United States Patent Application Publication US 2005/0228172 A9 - sequence listing, part 196

SEQ ID NO: 886394 - DNA, 632 bp, Homo sapiens
agaatcatacatgttgtagcacatatcagaacttcattcttctttttatagcaatctgaatatttttgttaatttgtatacagtttcatcacaggtctcttagttccatgagaaaagagacctgtaagcccaagcaactcccatgaagcaaagcgtcttctgcttctacattgtaacatgggtctcgtactgcatggttagcttctctccccagcagcatgatgctttttgtgcattcagaacccaattgatgacataagtcgattgattgctttaagtattttatgccaccaggcagcatcttgactcacttaggccaggttaggaagagacctgcatgcattcmtgctgtttagagggaaagttcaagtgttgaagtacaagaaggcatttgtttgactttcacaaaggcttgtctttctactcttgtgggatcttgagctaacactgctaatagaattaataaatgttcagtgctaaactcccctgctgttggatagtcctaaatgattgtgcatatacacataagaaagatctttccccaaggtcctgcttctgctcatcacttgaatggcaaagtcgagtgaagtagtcttattgccacgttccccacagtcagtcacagccatgtt

SEQ ID NO: 886395 - DNA, 694 bp, Homo sapiens
tcatgatatagagctaattctaaatattggcaataaccatggaactccacaataaattatgcgtggcctaagaattagctgcaaagcgagaactattttctctcttttttactgaccagatattgaggactaagggagattaaataatgagcctagggtcatgcagctattagtggcagattctagactttaactcagattttgtgactttcacgtgggctctyaccaccgtggaaaatttcccagaatgattgttctaaaggtaataaatagcacaggacagtaattctcaaagcatggttcctaaatcattaagatcaaaaccatctgggaacttgttacaaaatacaaattcctggccgggagcagtggctcacacctggaatcccagcactttgggaggccaaggcgggtggagcacctgaggtcaggagtttgagaccagcctggccaacatggtaaaacctcatctccactaaaaatacagaaattagccaggcgtggtggtgcgtccctgtaatcccagcttctcctgaggcaggagaatcgcttgaacccgggaggtagaggttgcagtgagctgagatcgcgccattgcactgcagcctgggtgacaagagcaaaactccatctcaaaaacaaaacaaaacaaaacaaaaaacaaaaaaaacaaatgcctgggctccacccttgg

SEQ ID NO: 886396 - DNA, 694 bp, Homo sapiens
tcatgatatagagctaattctaaatattggcaataaccatggaactccacaataaattatgcgtggcctaagaattagctgcaaagcgagaactattttctctcttttttactgaccagatattgaggactaagggagattaaataatgagcctagggtcatgcagctattagtggcagattctagactttaactcagattttgtgactttcacgtgggctcttaccaccgtggaaaatttcccagaatgattgttctaaaggtaataaatagcacaggacagtaattctcaaagcatggttcctaaatcattaagatcaaaaccatctgggaacttgttacaaaatacaaattcctggccgggagcagwggctcacacctggaatcccagcactttgggaggccaaggcgggtggagcacctgaggtcaggagtttgagaccagcctggccaacatggtaaaacctcatctccactaaaaatacagaaattagccaggcgtggtggtgcgtccctgtaatcccagcttctcctgaggcaggagaatcgcttgaacccgggaggtagaggttgcagtgagctgagatcgcgccattgcactgcagcctgggtgacaagagcaaaactccatctcaaaaacaaaacaaaacaaaacaaaaaacaaaaaaaacaaatgcctgggctccacccttgg

SEQ ID NO: 886397 - DNA, 442 bp, Homo sapiens
gtctgcccacaaaaccattttccattctatgacctgagtcacaaagaccttctgtgctgtctccctctgccagggtgctggccaccccctccattacttgagcccttacagctatgcatgattgctgcattggtaatttgttgcaacaatttggtgataacaatttaacacttaacccagttttccacctgtataacatctcatagccgattaaatgagattttcactcacatgttgtggattttcttaagaactgatacttyatgttaaagccctagtaaaataaatgtttgagttccctgagagtactcctgccacagggtttgggccttgattcaaacacccgcagtgcctgggagacctcccccgccccgcccgccccgcatttatgcaggggtctgccctgttctcacatgaacttctagcaccaatcttccctcca

SEQ ID NO: 886398 - DNA, 613 bp, Homo sapiens
tactgcacctgctaccaccacccactagccctgacatcacttctgcattgggactttaacctttcagcctccagaaaaccatcgccactgccactaccaccaccatagtcattcctgacaccactcacatcagaaaagatggaagctccaagtacatcctgtctctgcacctcactcactttcaaattaaagtcattcctgagtatctgaatgacacagcctaggtcataggcctgtgccctcgctgcaagcgaggttgggaatttgagttctgacttctagactgggattaagacataaagatttccacaaatattaaggaggccattccaaggatratgggcagccatgagtatgactgatatttgctacaatcatcaagatattttcaagttagaaaagcaaaatgcagaacaatatgtatagactactatcacttgcataagaagcagaaattgtctacatgcatagactatctctggaaggtttcaggggaaacaggtaactattatctctagggaagggaactcaataatcaaggatgggaggaagatttaattatcactgtatactctcttgtaccctttgattaagaaggatgcaatctaaggaa

SEQ ID NO: 886399 - DNA, 606 bp, Homo sapiens
acgtatacatgtaccatgatggtttgctgtcccatcaaccctgtcatctacattaggtattttgcctaatgccatcccagtccctattttttccctggagactttggaaagaagccaaaagttgttaagccttgaattgtaaaaggccatgaggagctggagatcagttgttggtttccattttcgcacacaatgaaattgactctgcagctccagraccctccaagctgggccctctctcattttacttaattgtgctttcatttttgcagatatatcccaagactggtcagactttgctctttggtgggaacagaagcattgctggcttctgaaaacccactggaccctggacaaatatggggtccaggcagatgcaaagcttctcttcacccctcagcataaaatgctgcgccttcgtctgccgaatttgaagatggtgaggttgcgagtcagcttctcagctgtggtttttaaagctgtcagtgatatctgcaaaatcctgagtaagtacccaggaaaggcccctgtgccctgtagactcttgcaaagctagacaggaaaattatgtgtgcattctgcctacttcaagtaattgctacagaa

SEQ ID NO: 886400 - DNA, 574 bp, Homo sapiens
tatttgaacattatgtcttccaccagcctcaacttgagaatcagcttgtataaagtttcatttaaaaaatcctatcggattctgcttgggattgcactgggcttgcagatcagcatggggatcccttctattacactgtttacttattacactgtttatcatataaaccatttttactatctattactaccaatatgtagtaataaaagagagagraaataatggaatcaaatttgggttgtgaagaagcagcagcagccctggaagtaaaatgggccagagggccaggcgcagtggctcacgcctgtaattccagcactttgtggggctgagatgggtaggtcgtttgagcacaggagtttgagaccagcctgggcaacatggcgaaaccatctctacaaaaaaacacaaacattagccaggtgtggtggcacatgcctgtagtcccagctacttgggaggctggggcacaagaattgcatgaacccaggaggcggacgttgcagtgagccaagattgcactactgtactccagcctaggcgacagagtgagaccctgtctcaaaaaaataaa

SEQ ID NO: 886401 - DNA, 574 bp, Homo sapiens
tatttgaacattatgtcttccaccagcctcaacttgagaatcagcttgtataaagtttcatttaaaaaatcctatcggattctgcttgggattgcactgggcttgcagatcagcatggggatcccttctattacactgtttacttattacactgtttatcatataaaccatttttactatctattactaccaatatgtagtaataaaagagagagaaaataatggaatcaaatttgggttgtgaagaagcagcagcagccctggaagtaaaatgggccagagggccaggcgcagtggctcacgcctgtaattccagcactttgtggggctgagatgggtaggtcgtttgagcacaggagttygagaccagcctgggcaacatggcgaaaccatctctacaaaaaaacacaaacattagccaggtgtggtggcacatgcctgtagtcccagctacttgggaggctggggcacaagaattgcatgaacccaggaggcggacgttgcagtgagccaagattgcactactgtactccagcctaggcgacagagtgagaccctgtctcaaaaaaataaa

SEQ ID NO: 886402 - DNA, 600 bp, Homo sapiens
agattttccagtatagaaacagagcacgaaggttactcgaaatgtccagataagagataatggagccagagactgggatgattcacagttgaagtgtatgaagatgttcagtaagcaatcttctttcatttttttctaatttaataatacaatatctttaaaccttggatttagccctgggggacttaaaatggtaaggattatcttgggggagtcaggaggtgaagttaagctctagacagcattctgatggctgtgggtggtgtaaaaggtagtacatctgcgtctgttcaattattatacccacaaattcacttcagatggcaaatctactttgggactcagtggatatgggccgggatatacaaatctacttaggaacttaccagttaacaactacacatatatatctaccatggatagccatttcatgaggactttctcatatatatatatmtctctctctatatatatatagatatatatatacagatatatatacacacatatctatatatatagagagagatatatatatggacttccatatatatataaatatatatgaggactttcatatatatagatttaaatatatat

SEQ ID NO: 886403 - DNA, 611 bp, Homo sapiens
cctgccttggatggactaaattagaatcttagggcataaggccctgaaatctttatttctaaaaagaaccccaagtgatacttttacgaatgggttgaataagctttgtatgcacgtgtgcaaatctttttaaataatcctacaagaaaaaataagtcaatgcttgtttggatttcaatccagaatgactctgatccstttctaaatatttatcttctcctcacatgtgcagtcccaggtttcatcctaacaataaatttcaataagaaacagctctaagaactctagcagcttgaagctggaggccatcattctcagcaagccaagacaagaacagaaaaccaaacaccacatgttctcactcataagtgggagctgaccaatgagaacacatggacacagggaagggaacatcacacaccggggcctgagctggggtagggggctgggggagagatagcattaggaaaaatacctaatgtagatgatgggttgatgggtgcagcaaactgccatggcacatgtatacctatgtaacaaacctgcatgttctgcacatgtatctcagaacttaaagtataataaaaaaaattaaagacaaaaacaaaaaa

SEQ ID NO: 886404 - DNA, 611 bp, Homo sapiens
cctgccttggatggactaaattagaatcttagggcataaggccctgaaatctttatttctaaaaagaaccccaagtgatacttttacgaatgggttgaataagctttgtatgcacgtgtgcaaatctttttaaataatcctacaagaaaaaataagtcaatgcttgtttggatttcaatccagaatgactctgatccgtttctaaatatttatcttctcctcacatgtgcagtcccaggtttcatcctaacaataaatttcaataagaaacagctctaagaactctagcagcttgaagctggaggccatcattctcagcaagccaagacaagaacagaaaaccaaacaccacatgttctcactcataagtgggagctgaccaatgagaacacakggacacagggaagggaacatcacacaccggggcctgagctggggtagggggctgggggagagatagcattaggaaaaatacctaatgtagatgatgggttgatgggtgcagcaaactgccatggcacatgtatacctatgtaacaaacctgcatgttctgcacatgtatctcagaacttaaagtataataaaaaaaattaaagacaaaaacaaaaaa

SEQ ID NO: 886405 - DNA, 613 bp, Homo sapiens
tttgttcattaaacagagacaacaataacaaacagtgtatttggtcattgtgaggaataaatgtacgactatatgcataaccagtgtgtggaacagttaggtataaatgtggccataatcaaaattcaattttgtttgttttctcttgtccttttaaaatatgctcactgggagtcatcttcttttgttccctattaagaggaaggtgatggtcaagatttcaagatggtcaagatttattcagggaaagagttaaaagactagttacgagaatatgacgcagagccatcaactccatcttccaactacggggaatccattccggagttccacggctctccttaratcacccgtcactaagcttggctgaggacctcatcattgtttatttcacaaaattatctctctaattatcttgaccctttttataattttccttagatcatccatcactaagcttggctgaggacctcatcattgtttatttcacaaaattatctctctaatcatctttgaccctttttataatttctaaatgggataaggggttcaagaggtatgcagtggtttggatcctttcctttgaaaatctccataaagcagttcacactca

SEQ ID NO: 886406 - DNA, 605 bp, Homo sapiens
aggaactgcaaatatgccaggtgacattctctttgaagtgtaaatgttgtttcagttgaattttttttctagtacacttggaaagtgagtttcatgcctatgaaagagtctggattctaataaacattattcctagacacaggaaagttgctataagcgatgggattttgaattctacatggattcctrtttaacaggtgacttcacaccttaaccttgaccagccttctatctacatctgccatgttgatttcttttgtatattcatttcttgttacttccagcggtaattacatttctaggatatattggtgtattttggttgtctccaagtccccttggattctgaggccaccattgtcctttctagacaaatggaatggcttaagcctccacacagtgcactttgggaggtcctggattgtacttgacatttccaaggtgtctaaaaagtctgatattgtggtgtcacctctttctccaaattcctgctcccagtttcatctttaatgaccgatggtcactttctgccctatcttgcaccatctgcctttaagacacccctaaggcttatacctcaatcacaactgatttttcctcaaagt

SEQ ID NO: 886407 - DNA, 598 bp, Homo sapiens
atcactgtcctctttttacagatgaagaaactgaggttcagagaggttgaatcactctttcaatgccacacttaaaaaagtggtcaaaccaggagtgatggcgagtgcctatagtcccagcaactcaaaaggctgaggtgaaagggtcacttgataccgggaattcgagtccagtttgggcaacttaagagaccttgtttcaaaaaagcaaaaacaaaaataagtggtcaaattaggatttataatcagaactatctgacattaaagtgctcttaaaagtgaaaacacgactgggcgcagtggctcacacctgtaatcccagcactttgagaggccgaggcaggcggatcacctgaggtcaggggttcgagagcagcctgaccaacatggaaaaacgccatctctacaaaaaatacaaacttagtcgggcgtggtgacgcatgccgrtaatcccagctactcgggaggctgaggcaggagaatcgcttgaacctgggaggcggaggttgcagtgagcagagagcactccattgcactccagcctgggcaacaagagtgaaactccgtctcaaaaaaaaaaaaaaaaagtgaaaactca

SEQ ID NO: 886408 - DNA, 530 bp, Homo sapiens
cagattttattgctttaggccaaaggtcaatccaaggcccagggcaaagtataggtagtgtgttttttgagtaggtatacattggaaggagttgctgaaaaggattatatgtcatatttcagaggtacttccataaaagggatgataaccaagctggcctgatgagccacaattgaagttgttccgttttataaaagagtacaccatttcccacagtaggactcctcaaatgaccttcaccaaggcagagrcatattgtgctgaggcttttcagggattaattaaggggctgtgaatagtgtaggctagacataattgtatgtgttttgtgtgcttgtaaagttacctgttatgcatccccttaccttgctcatataattaaaagtagactccaaagaccaaaatttaaagcagcccctgttcactaatcgccccatggacttttgcagagatagttccgttttgggaatgaatttgtaagtggagtttagaccacaaacactcaaaataatgctttcatctgctccact

SEQ ID NO: 886409 - DNA, 625 bp, Homo sapiens
agttgttcctaaagactcaccccagaaccacccctctatcactcttaaaattgcttttgtattcatttaattccatgtattaaccctacctgtttgaaatgcctagaatgtttctgttttctgcactgaattctgattatcaacacaatatttaaggacacaagacttataaatatagctatctaacttttccaactggaaaagaaaaaaaggaagaataatcagtccatgrcacattcctacaaaacagctttttaaatacttgaagccttctggactgaagtgctcattgaagaatttgacagactatgtcgctgctgcaataaaacactatgatgggaataagaaatacaagagctatggaatgggttggcaatttctcacttcactagagaacttaaagaaagattggatgtcagcaagaatgccagactaaggactcaaaaaatctactcctccactaaagaaacaaaaatgttggaaacattgtcaaaatcaaccttttcagaacttgggaaattaaccaaagacttgcaaaaatccaaaaagtatttattaaaaataaatgctaaatttcattaagaacagtgagttttgaggcattttaactgacctagccctgtca

SEQ ID NO: 886410 - DNA, 625 bp, Homo sapiens
agttgttcctaaagactcaccccagaaccacccctctatcactcttaaaattgcttttgtattcatttaattccatgtattaaccctacctgtttgaaatgcctagaatgtttctgttttctgcactgaattctgattatcaacacaatatttaaggacacaagacttataaatatagctatctaacttttccaactggaaaagaaaaaaaggaagaataatcagtccatgacacattcctacaaaacagctttttaaatacttgaagccttctggactgaagtgctcattgaagaatttgacagactatgtcgctgctgcaataaaacactatgatgggaataagaaatacaagagctatggaatgggttggcaatttctcacttcactagagaacttaaagaaagattggatgtcagcaagaatgccagactaaggactcaaaaaatctactcctccactaaagaaacmaaaatgttggaaacattgtcaaaatcaaccttttcagaacttgggaaattaaccaaagacttgcaaaaatccaaaaagtatttattaaaaataaatgctaaatttcattaagaacagtgagttttgaggcattttaactgacctagccctgtca

SEQ ID NO: 886411 - DNA, 696 bp, Homo sapiens
cctcagatccttcaattacatctttagccaccatttctggaaactactgtattcaccatccctcttgttttggctaaacccttaaacgcttacataacccctttacttggaacttgctccgtgcctcttctatcttatttggtctaattcctcagaccttggcattctatgtagaacacactwcctaacgtttaaattctgtctacatttatttatttatttatttcccagagttattttggctactgtctacatgtatttacatgatacatcttggttgagtctctgggtcaataaagtaactaaaaattctggcatacaactgaaattcacatcctttacactaccttccacaactcaggatttattcacattattgagctacaatctgagttagataataaaacaatgcataaattaatttaagatgcaaagttcctgtcccttcttcagcataccatgaacagtcacttcaaattccttcttgtggtctccagcagtatttgctgccatgcaccgataaaggcctgtgtttgacacttgagcctgagcaataaccagtttgcgtccatttaataaaatcttgaatccatccctttcatcaattaactggccatccttcagccacctatagaaaaaggcaaaaggaagtctggataaatattttaagtaaatcatatcctagaagatatataa

SEQ ID NO: 886412 - DNA, 630 bp, Homo sapiens
ttggaagttttatcaggggctcattctggctttaagctttcattagcatagttaacttccaatatattgcaaaaatatttcttcacgtgtagcttctaactgctttgccatccagatggttttgaaatcaaggaagctgctgtatttgcctggagctggttgttttgaattttgagattacagccttggtcagaagataagtggcacagctggccacagtgattcatcttcragaagcacttcacacagtagcaagaggaagtctccattgataattttttttgtttgttttaagtaactaatacgattacgggtctctattcacattagatttttggatgagtgtatttaagtaattttcttcttagtttttattctgggtttcaaggcagagctccacatcaactaatttattatggaatagcttgtgattttgacctagttaatctgactgtaaatgataacttgccatcgcaaagtatatagcgagagataaaagcagagctgaaattagaaaaaaaaaatacaagttcgaaaaaaaagcagcagctatggtttctcattttccccctccagcataaattgttgagtaatgagatttttaaaagccagaaattgctgtggagtgaa

SEQ ID NO: 886413 - DNA, 640 bp, Homo sapiens
tcctttgcttagctggttttgaagccttcaagtcaatctcagcctcactccttcgcctgaaaacagtagctagcaaagtatacggtaagctataaaaagcacccggatctaaggtgtaaccagtcactaagtgctgccagtttttcctctgtcaattgtttcagttcttccttcctttccccttccatcaggttaatcctgctgtcacctcgctcactggttcttgcaataagccagactgagctggaaagaaccgccatggtcctcagtgttgtctgtaggggacctcaytgtctgaggctgtcagggctctgtcaggaggagacccctggggccttctgagccctactaggagaggattctaggagagtaggacgccttgcacatagtaagtactaagtcaatgttacttaccagtaaatgaagaggcatgggaaattgttattatttttgagacggagtttcgctctgtcgcccagcctggagtgcagtggcacgatctgggctcactgcaagctctgcctcacgggttcacgctattctcctgcctcagcctccagggaaattcttaatcagaaaatatgtcttagatttttgttttaaaagagaactggcaggagctccaaatacactaaagctc

SEQ ID NO: 886414 - DNA, 608 bp, Homo sapiens
agagaattttgttattaccgaccttctgaagcctacttccgtcaactcgtcaaagtcaatctccgtccagctttgttccattgctggtgaggagctgtgatcctttggagaagaggtgctttggtttttagaattttcagcttttctgctctggtttctccccatctttgtggttttatctacctttggtctttgatgttggtgacctacagatagggttttggtgtcgatttcctttttgttgatgttgatattattcctttctgtttgttagttttccttctaacagtcaggtccctcagctgcaggtctgttggaatttgctggaggtccatcccagaccctgttttcctgggtatcaccagcrgaggctgcagaacagcaaatatggcagaacagcaaatattgctgcctgatccttcctccgttagctttgtcccagaggggcacctgcctgtatgaggtgtctgttggcccctactgggaggtgtctcccagttaggctacacagtggtcagggacccacttgaggaggtagtctgtccattctcagagctcaaatgccatgctgggagaaccactgctctcttcagagctgtcagacaggg

SEQ ID NO: 886415 - DNA, 615 bp, Homo sapiens
tctaacagtcaggtccctcagctgcaggtctgttggaatttgctggaggtccatcccagaccctgttttcctgggtatcaccagcggaggctgcagaacagcaaatatggcagaacagcaaatattgctgcctgatccttcctccgttagctttgtcccagaggggcacctgcctgtatgaggtgtctgttggcccctactgggaggtgtctcccagttaggctacacagtggtcagggacccacttgaggaggtagtctgtccattctcagagctcaaaygccatgctgggagaaccactgctctcttcagagctgtcagacagggatgtttaagtctgcagaagtttttgctgctttttgttcagctatgccctgcccagaggtggactctatagaggcagtaggccttgctgagctgcggtgggctccacccagtttgagcttcccagacactttgtttacctactcaagactcagcaatggtggacgcccctccccctgcctggatgcagtctcacaggtccatctcagactgctgtgctagcagtgagcaaggctctgtgggcatgggacacatcgagccaggcacaggagagaatctcctggtctgcca

SEQ ID NO: 886416 - DNA, 648 bp, Homo sapiens
gaaattacagtggtgaattgggcaatacaacacagtgatctaataaactagcaatttaccatattattatgagctcgaaaggcaatttaatcaaaacaatttggtttatattgcttctaacctagttgtgtagtttcacatttttttttaagtacaaaacttttagtcacaggactacagttttataaattagaatatatgctgctaaaatwattattgaaactaccttggtgatgactatagttataaaggcatccacttaaatgccacagtaaatcaagacacaattacagcctagccaatttttaatctttctgtatgtgcccttctgttttgagaataagtaaaagcacttttctattttttcctctaccgtttttttcaaataaagatagttataaaacatttaaaaaatatattttttgttagatattaagaaattaattaagagtctcatgtcctaaaatttttatacagttagtaagaattatttaaaaagtagtagggcacaaagcaccctaaatatctttattgtataatttcttttggaaaatggagcaattatacttgcttaaactttcccaatttcatataattttattactctttttttgtcaaccatagaatgactctaacgttggaaaagtt

SEQ ID NO: 886417 - DNA, 630 bp, Homo sapiens
tatagacatttctgtttagtatagtgaatgaatgaatgagaagaaatgctaatattcttgaaatacatgcgaatgtatgagaataaatgcttatgtgacactgaagtaaaagcattccaaattgctcccttgtttcacatgcataattactggtttcttttaataaactggtgatcatatcatattctacagccaaataggaacttctaaaagattttcacactcattggttattaaagtttccaaagatctaaatactcataacatcctgagcctgtgattttcaacaacaaggctttaaattcttctgacatttaacggaatttkctgtggtgttagaacagtgttctacacaaaatgcattatagaacatttgatttctctctggaaaaaaaaaaggtagcaataatgaactcttgagaaaggaaatccagttcaattggatttgaaatatgcatgttaaaaatagactgtgtatccatgagctgttggatgatacttaatcaacagtaattgttgttcaagcaaagcatgccctttccatcctgggcttagcactcccttggattagcaggatgtgccatgcgcggggattgtgggggcctcacaattgctgtacttcaacctctt

SEQ ID NO: 886418 - DNA, 590 bp, Homo sapiens
atagccagcttgctttaatgctctatttcccagcagtttcaaactcacaaagatggccaacagtggcagatgggacctgacgcttgaacttggggagctttcctccaacaggatgaatccatggaagataccaggcacattctcaaaagaacagaagtttagctggtggaaatgagagtagggtggatgtaagttaaaattgttgataagtaaataccctgattgggtattcctgtcaggtgctgctgtaaaaaatctcttaaaacactgggtgaagtggataaatggattccatttaacagagcatttactggggtctattagctgactattaccttaatgattatattataggcggcaatggggctgtcatcataaaagrtgaaaatgatcaaggagaaagaagtatgagctcagaagaggatgcagcaatgtgatgagacagagttgtgcctgttggcctccttcagtgagaaggctgcatctgaaattatcactgaagcaggaaaaacagtgtccttattctttttgtttatccaaaaatgcaatagcacactgatgcatatggaacctggggctatgagaattgt

SEQ ID NO: 886419 - DNA, 600 bp, Homo sapiens
atgcgtgtggtacctcgtggattgctgtactttcctaaaatgctgaaacttttccttggagaaaattcccatgtctttcatgtgtcatcaaagttagatgctttccaaggaaagttagtccatttcgaataaaaaaggagcctttgcttgggtcacaccctgcattctagcaaccatgctccttttcctttctcctttcctttgaacgtgtgtgtcatgcttggaaaatttcctcttcatatttctgctaaaaaaaaaaagtccaaaacaccttaattgcatggtggagaaagtgtttttcaggaacactcttgtttcctgcctacttctaggagtgaaaaccaaggttgatttacaccctcctctcagattaatatttacctccttgaattttggcaggaagtgcaaatgcmaatctccctctgactattacatagtttgcattcaatcaggaacaaggtagcaaaaaactgttgcaggaacccaagtttctccccaagaaatgatgagtgactaagatagcaccagtataaaaatgccacagctcttggattggaatgtggccttctgaagaaccatcttgcctggtcctggcctgag

SEQ ID NO: 886420 - DNA, 777 bp, Homo sapiens
tacttacaggtaaggctggtggtcctgggggtcctgtatctccctaaaatagattaaagaaaagctacaattaccactagtccctttttgcacattatttataaatttctaggtggatagaagcaatatatagagataaatcytgaagaatagaaaaatagaacttcatcctgataaaagtctctgcataaagaaaatatatcatgtcccttttagctttcatgatataaaaatcaccttgtatactctatgctttttgcaacagcaggacttgttttgaaagcgaaaataatctaattttctattcttttgtctactaatccaaaattagaaataatatattttcaagtatgtttacttgccaatgaagcagctgggaagtgtcacggcgatagataatttgtctgacaaagttagtatgaagatcagcagaaataataagtggatctccccatttcatgcttcccagctgcaagaagcagtcccatggcctcttctaaagctctgctgaattggcattgcatttgccatcaactgtaagaggctttgcctatatttatgtatttctgaacgctaaaattgctttgctgatctatgtgaatacaaatttccaggtggatatatcaacaaactattcaacatctttaaaaaatggttcatctaaaagttcactattttccaatttctatgtcaccttcatgtttactttcccaggaactttatttatttcttaagaactctcaaacattaaagaccacgcatcctttccacggttct

SEQ ID NO: 886421 - DNA, 632 bp, Homo sapiens
acaggaataaagaacaataggataatcccagtgctgttgtgagtattaaatgagataaacgccttagaacagagtctggcatactcaaatgctcaagaaatactagtgcttataaaacaaaacaaaacaaaacaaatccctgtctcctagccacagatgcatccagctctgctttgtcctttgggcacgggaatgctgctaaatagtagaggtggggaagaaaagggggttctgaccacccacccaggctcctgagcctttggtgattaggaaacagccttggtagaaccgtgaccctgagcccgggttcagtggccctgccactgccttacactctgcttccctgggctgtggacacagtgacccagacactcagagacctggatgccgatgacccaracatctcgggacaacaaagaacagagggaagaagcaggtgggtgctgggagccagcctggagcgcttctgggtcaacagagaggatgccaaggccctggattctgtgtgctgaaggggcgggaaggagtgaaatgtatgcatgcttctgctcacacacacccacctattattcatcagaatgtgcagagcaccaactgtgggccagctagacaggcattgaactcagtgtcta

SEQ ID NO: 886422 - DNA, 643 bp, Homo sapiens
ctctgctagtccctatcctgctgcaccctgtatttgttcattcatgcaccccatttacatatatgtgccagccttcatactagtgccgaggacgcagcattgaacaagacagatgggggtcctcacccactgagctcttctagtctagggtggaagacagacagcaaacaggayggcagcataattctgtagttacaactatagtctaagtgcttagaagagaactgtaccatggtcaccccatgtgcctgtacactcctcaagaactggaattctctcactcatctttctatccctggaacctaaggcctaagctggcagaaaggagggttcagagattatttgttgattgaaaatattacacaagagacatcatgtgaagtttgagagccctacaggagcctgtctcagactagatgagattcattcattcattcactcattcactcacaaagtattttttttgagcactttctacatgtccaacacggttctaggcactggacctagagcaggaaacaagacaaggaaaaacgaactgtcctcctgaatctccatgctaggagaggcaagcaaacatcaagccagacaaatacagaaagatagagaggatgctagaaggcaataagggcagggataggag

SEQ ID NO: 886423 - DNA, 653 bp, Homo sapiens
gaagatttaagtcaccctggtccaatagttaagagaaggtggtgaaggaaaatgcactttcttcactaatctcacgctgacatatctcaacagactaaaaaatcgtttaccagctaacacttgcctcttcctagactatactttccctgtattttattctaacagsgttgcagccttcttttttcctgttttttttttttgttttgttttgtttttccagtgatactgttctctaattctagcttagcattgatcccagctccaaaagataaggggtaaataagtaaccactgtgtccaggaagcagggaaaggggatgaggatgaaacctctattctgccacatgtagaacttactctctttctaccctcttttagaccacagtgccaaccaagaggagactggcaatgttccaagtccaacagggtcctaaaatgggagcccaaaatgtgtacatcctgaatattcagacatgtccgggaatgcctggagggtcagccaggcaggcaggacgtgagccaaggagcctcatgggtgggtttccaacctatctgatgattctctcccctatctggcccatagccctgttagagcaactatcttattctgtttcaggtttaaacttgtctgttggttccttactaaataccaaa

SEQ ID NO: 886424 - DNA, 570 bp, Homo sapiens
ccttaaaagttatccttaggggattcgcagcttcactttagttcaggccttgagaattgtggtgaagattgaatgacttattacatacaaaggggtcccaatagcaaatggtacatagtaagtgtttaataaaccctagggattgttgttttattataattactctgactacttttcttttttagtattacctgccccaatcactgttattactattttaactaccaccaccacgaatgtcggtaatrcattggttctcacttgggttataataaaattattttaactttttttgcagagaggctttcctgtgcctcatactttttgagcaaaatgccagccaaacttacagcctggaatgtggtagctctgcagggaaaagcacagctactgcaaaaccaaggaaagttttatcggcataacaacggcacaaagcagagacttaacccagcttaaagtctgggggaggatgtgtcctagaaatacagaaaattgcaaactaatacatctccagaaggcaggtgacatgacagctaagagctcaggctttgcacacctagattcaagaaa

SEQ ID NO: 886425 - DNA, 570 bp, Homo sapiens
ccttaaaagttatccttaggggattcgcagcttcactttagttcaggccttgagaattgtggtgaagattgaatgacttattacatacaaaggggtcccaatagcaaatggtacatagtaagtgtttaataaaccctagggattgttgttttattataattactctgactacttttcttttttagtattacctgccccaatcactgttattactattttaactaccaccaccacgaatgtcggtaatgcatyggttctcacttgggttataataaaattattttaactttttttgcagagaggctttcctgtgcctcatactttttgagcaaaatgccagccaaacttacagcctggaatgtggtagctctgcagggaaaagcacagctactgcaaaaccaaggaaagttttatcggcataacaacggcacaaagcagagacttaacccagcttaaagtctgggggaggatgtgtcctagaaatacagaaaattgcaaactaatacatctccagaaggcaggtgacatgacagctaagagctcaggctttgcacacctagattcaagaaa

SEQ ID NO: 886426 - DNA, 610 bp, Homo sapiens
tactgattaatcatgattccttttgtgcctgaaaactctaaagaaaggactctggcttggatggtgaggttgctaagtataatttgggattatagacaaagtactgggccaagccatgtaagtcttcctcattttgtgctttaaatggttgacaacccagagaagcaagtctgcaaaccctatcagaggcagacactttgtagcctctgctgcagtcgcttcgacataattcctcaagtcattgcaagcccaacctcagagctcatcatayataggccaacaggtcaacatctcccagtgcgagagggcacatttctatagtgactaagaactcatgtgttgaagtgggatggagtgaactttgaattctggctcccacaccacacttgacttgtgagacactgggcaattcagttagcccctctacgtaagactcagtttggcatctgcaaaacaggaataaaaatgccttccccatgggacttatgtgaagggcaagtgagtccatatctgcgacacactttacatacatgaaagattaaggaaaaacttgcaaacattattatcatgtgctttgggattttctttccctactgcaggtgtgactcac

SEQ ID NO: 886427 - DNA, 594 bp, Homo sapiens
ggtctgcatcatttctgatgccgtttctttcttgcagctatgtctggtgttcacatggtgagattctcactttgtttccttgctcagaatccatggttttccataacaaggccaacccagcaccattaaggtattgccaaaacacatttttcatatgacctggcaccttctacctgcttccagactttcttaataccaacttgctacctgccctttctcctgtgccacctatttgtaccttcctggatgcccaccctttgtcttattctctgtaactcgcttctttatgtctttctcatttcccatctctggattccaataaacacacagtgcatgatgccaccccagtcccagtttggatattttaatagaaastcaaaaaccaatgattagatactggaaatttggcatcattaacagaaattgcaaagtctaggatatttgggaatactaaggaggggctaatttaaaatttaaattatttgcacacttggagcctgcacatatatcttggtattgatcatggctctttggaagctatttatgttttcagcacacctataaggctgagatttatactgcatttggtgttta

SEQ ID NO: 886428 - DNA, 594 bp, Homo sapiens
ggtctgcatcatttctgatgccgtttctttcttgcagctatgtctggtgttcacatggtgagattctcactttgtttccttgctcagaatccatggttttccataacaaggccaacccagcaccattaaggtattgccaaaacacatttttcatatgacctggcaccttctacctgcttccagactttcttaataccaacttgctacctgccctttctcctgtgccacctatttgtaccttcctggatgcccaccctttgtcttattctctgtaactcgcttctttatgtctttctcatttcccatctctggattccaataaacacacagtgcatgatgccaccccagtcccagtttggatattttaatagaaactcaaaaaccaatgattagatactggaaatttggcatcattaacagaaattgcaragtctaggatatttgggaatactaaggaggggctaatttaaaatttaaattatttgcacacttggagcctgcacatatatcttggtattgatcatggctctttggaagctatttatgttttcagcacacctataaggctgagatttatactgcatttggtgttta

SEQ ID NO: 886429 - DNA, 504 bp, Homo sapiens
ttttaaaatatctagcaaaaatgtttcaacatcaaatagaaattatcttaaaatatataacaaaatcgcaaaatattaaccaaacttgatttgtaaaaaaacaacaacaaaaaagaaccaaatgtaaattataaaagcaaacaaacactgtaacagaaatgaaaaatgtgttggatggagtcaatagygccattgagatgcgagaaggtaaaatcagtgaatgtgagggcagaatagtagaatttaaccaatttgaacaacataaataaaatagactgatacataaaatgaacagagatgtaggtatgtgtgaggcaacaacaaaagatccaacatttttattacgtgtaccagaaaaaaagtaaaatgaggctgaaagaatacttgaagaaatagtgcttcaaaaaaacctcaaatttgcagaagacacaaatgtatagattcaagaagcctaagataccctacacggaataaacacatttcaagaaatattttgattaaact

SEQ ID NO: 886430 - DNA, 655 bp, Homo sapiens
cccaaaggcctgacccaactccttcccaaatggtgaagcacctctgcctccttccctttacacctgtggacctaccacactggggaactcctaggtgagtcccagagaaagcccaggtgaaagactatgagcctgtcagaagggatcagggtagaacccaagttgggacaggcaggggaggcagtcccagtctttaggggggtcaagtaattcccctttacaagccaaatgaagaaaaaaagttctaaggggagcatatgactccataaaataaaggacataattgggagtgatatctaatttatctattgaaggcctcctacgtactcttttatcacttagatggacagaatataattggtgtgctgtgcsccatcaatctcagagcctgggcttcctgtgctggctacacatattactgtcagattatgacactgtaataccaagatcaatgacattttaaacgtgctccagttatgggcaattgctgacaataaaaacagtgacaaattgatgaaacttgggcagcgattatctggtgtcaaaaataaaccataaagaatctgatttccaaacagagagaggtgcctgggacaccagcttagggaggaaaggcccagcgagaagagaacttatcctgctcacatgatcttgg

SEQ ID NO: 886431 - DNA, 616 bp, Homo sapiens
attcgcagcaaagtatcagctttgactacctttaaaaataactatcttagcttcacagtaagtgtaggaaatgcctatttgttgaaaaggcatttgtggaaaattaatttttaggtttctggttttgaggaaagatttaaaacaatcttsagtgtactatagttacctcatgatcttctttcttttccagttggctatattctatttttcttgaaatgagaccgtctgtccctttttacctacctcatcttctatatacctaattcttctaaaacaatataaaatttctacttggtcttggctggacacggtagctcatgcctataatcccagaactttgggaggccaaggtgggcagatcacctgaggtcaggagttcgagaccagcctgggtaacacggtgaaaccccatctctactaaaaatgtaaaaaaaattagccgggtgtggtggtgggcacctgtagtcccagctacttgggaggctaaggcaggagaatggtgtgaacctgggaggcagaggttgcagtgagccgagatcgcactactgcactccagcctgggccacagagtgagactccatctcaaaataaataaataaataaaaaacaaacaaaa

SEQ ID NO: 886432 - DNA, 589 bp, Homo sapiens
tcaacagatgactgttttatttcttaaactgataaactaaaacacccacaaatttaagtatattattcaaggtcttacaagccattctctgacaaaactacagaattgtatcttacaaattatcagcagtaaaaataaaagaaacccccagctataattttttttaaaatttaagaaaatattaaaaacaaaaacaacaacagaattaaaattaaacatctctccaaacaatataatagtggacagattcacatattaaaaaaagaaaaattcagattgggttataaaacaaaagtcaaatataattttttacaagagaaacatcaacaacctagaaaggataatgataggcccaagtataccagttctatccatttgttgtatgccacataaayataaacaaaaagaaaggagggttggcaatatcaatgtcagataaagttatattcaaggtaaaaagggtatcaaagatcattaagggagtgaatgattaaacatggaggatgcaagtcacaatagtaagggaaagactgaagccactgaccaatatgagtgactaatgcattatacatttattccattattctaa

SEQ ID NO: 886433 - DNA, 648 bp, Homo sapiens
taaaatcctttacagacaagcaaatgctgagaggttttgtcaccaccaggcctgccttacaagagctcctgaaggaagcactaaacacagaaaggaacaactggtaccagctattgcaaatacattccaaattgtaaagaccactgatgctatgaagaaactgcatcaattaatgggcaaaataaccagctaacatcataatgaaaggatcaaattcacacataacaatattaaccttaaatgtaaataggctaaatgccccaattaaaagacagactggcaaattggataaagagtcaagacccatcagwgtcctgtattcaggaaacccatctcacatgcagagatacacataggctcaaaataaagggatggaggaagatctaagcaaatggaaagcaaaaaaaaaaaaaaaaaaaaaaaaaaaaaaaaaaaaaagcaggggttacaatcctagcctctgatgaaacagactttgaaccaacaaagatcaaaagagacaaagaaggccattacacaatggtaaaggatcaattcaacaagatgagctaactgtcctaaatatatgtgcacccaatacaggagcacccatattcataaagcaagtccttagagacctacaaagagacttagactcccacacaacaa

SEQ ID NO: 886434 - DNA, 583 bp, Homo sapiens
aaattggataaagagtcaagacccatcagagtcctgtattcaggaaacccatctcacatgcagagatacacataggctcaaaataaagggatggaggaagatctaagcaaatggaaagcaaaaaaaaaaaaaaaaaaaaaaaaaaaaaaaaaaaaaagcaggggttacaatcctagcctctgatgaaacagactttgaaccaacaaagatcaaaagagacaaagaaggccattacacaatggtaaaggatcaattcaacaagatgagctaactgtcctaaatatatgtgcacccaatacaggagcacccatattcataaagcaagtccttagagacctacaaagagacttagactcccacacaacaacaatgggagacgttaataccccactgtcaatattagacagatcragacagaaggttaagaaggatatccaggacttgaactcagctctacaccaagcagacctaatagacatctacagaactctccaccccaaatcaacagaatatacattcttcccagcaccacatcacacttttctaaaattgaccatataattggaagcaaaacactcctcag

SEQ ID NO: 886435 - DNA, 632 bp, Homo sapiens
gacaatttttccaggtgctaattggtcatttgtatatcttcttaaatcaaataaatatttacatcttttttctaacttaaaattgattctttttcttcttactattgaattttaagagttccttatatagtctagatgaatttcttatatttctgtgttaaatatattcatttccaatattttcttctactctatgacttgccttatttgtttatgggtatgttttaaagagcagyagtttttcattttgatatattctaaatgtgaatatttttgttattcatacttttttatgttctatataaaatatttttgctaaccaacctaaaatcataaaaatatttgatcttctgaaagtttaatacttgtatctcttaattttaggtctataatctattttgatttgtttgttgtatgatgtgaattaagaacaaagttttatttttctccataaaaatatgctattgttccagtcatagtatttcaacagtataattttctcattaaattgacttggcaacattgtgaaagataaattaatatctatctgtcttatctatgtacctagctaactagacttttgattctattctaatgatttatatgtctgtcttcataacaacaacaaattg

SEQ ID NO: 886436 - DNA, 632 bp, Homo sapiens
gacaatttttccaggtgctaattggtcatttgtatatcttcttaaatcaaataaatatttacatcttttttctaacttaaaattgattctttttcttcttactattgaattttaagagttccttatatagtctagatgaatttcttatatttctgtgttaaatatattcatttccaatattttcttctactctatgacttgccttatttgtttatgggtatgttttaaagagcagcagtttttcattttgatatattctaaatgtgaatatttttgttattcatacttttttatgttctatataaaatatttttgctaaccaacctaaaatcataaaaatatttgatcttctgaaagtttaatacttgtatctcttaattttaggtctataatctattttgakttgtttgttgtatgatgtgaattaagaacaaagttttatttttctccataaaaatatgctattgttccagtcatagtatttcaacagtataattttctcattaaattgacttggcaacattgtgaaagataaattaatatctatctgtcttatctatgtacctagctaactagacttttgattctattctaatgatttatatgtctgtcttcataacaacaacaaattg

SEQ ID NO: 886437 - DNA, 591 bp, Homo sapiens
tccaaaatgctttccactgtgacaggactaatttacattaccaccagcagtttatatcattcctttttctctgcagcctcaccagcatctgttgtcttttgactatttaatgattcctctttgtggttttgatttacatttctctgatcattagtgatgttgagcattttttcatgtttgttggccacatgtatgttttcttttgagaagtgtttgttcatgtcctttgcccattttttaatggggttatgtgttttgtgtttgttgatttgtttaagtttcctatagattctggatgttagactttgttggatgcgtagtttgagaatatctttttcccattctgtagcttgtccgtctgctctgttgatagtttcttttgtggtacagaagctctttagtttaattaggttccacttgtctgtttttttttytttttgcaatagcttttgtggactttgttgagaattctttgccaaggctaatgtcaagaagagtatttcctaggttgtttcccaggatttttataatttgaggcctgccctttaaatcttggacacatcttgagataatttttgtatgtggtgaaaa

SEQ ID NO: 886438 - DNA, 599 bp, Homo sapiens
aatacataataagaaaatataattataggaaaaagaaaaaccttttttgattgagttgacaaactttgatataaaattatattctaaaattttttaatgtctatggcagagaggttaatacaacattttattttatattacaggatatcacctgtcttcagggattttatagtatttcatggatatggtttgtgaagagttttgagagaagaaggtctgcccttttcacacagtgagaaagtgtccaaattcttatgcatttctaatctgtaacactatattattaattgcttatgttaaaaaataacaattttatttaacttgtgagtacaggtacacttcaaatctgtgctgcatttctgargttatgtatttgtgtatacccagttctgcttgagaatcttgtggcatcaacctcttaggagaccagaagagtctttttggcttctgaatgttttctcttgccctttctattacccttaaaagaaatttcaatgatggtacagatgactggagtctagtgtggactgattctatgatgataactcgaaaactttggaaggtgtttcagggatagtaagcaccagggagagcatcag

SEQ ID NO: 886439 - DNA, 626 bp, Homo sapiens
cttccataacttctgatggtttgctagcagtctttgatattccttggcttgtagatctctgccttcatcttcatatgacgtattccctgtatgccttcacattgtcttccctgtgtgcatgactgtctttgtgttcagatgtccccattttataagacacagtcatattggattaaaacccaccctgatgacttcatcttaacttgatcatctgttttcgaataaagttatattcacaagtactagaggttaggacttcatctctgtttggagagacacaattcaaccagggaattgtggaagatggcaatgaagatttatcccatcttcattcaacccctaacacatcctatatttcaaacctttgcttccctttttctraggccttctcctctcactcttaatcctagtggctatgctccagttgtttaactcttgttatggtggaattgagtgggaaagatgggttatttcaaggaatgtttcatcctcactattctgtttgaagacataattgtgtagaataatgtttgaaaataaacactggcactcaattatattaattcaagattgaattataattcaatcttgtgcatgggatcctaagtttgaataaaaaagtgcag

SEQ ID NO: 886440 - DNA, 681 bp, Homo sapiens
ataaagaaaattctacagtagaaaatattcatttaatgcaaaaggaagcagtaaagcagtaatataggaacaaaaaggacatgtaagctataaaaaacaaaaagtaaaatggcagaggtaaatctaactatattagtaatagcatcaaatgcaaatggattaaacagtccaaataaaaggcagtttgtcaggctgaattaaaaaacaagatccaacgtgtgttgtctatagaaaacatactttagattcaaagacaaaaattgattgtaagtaaaacaatggcaaaacataatcgtgcaaataaccacaagaaagctggagtggctatattaatgtcatagaaaacatatattaaaataaaaaatgctactagagataaagagggacattttcaaatgataaargggtcaacccactgggaagatataacgataatgatcatctatacaacagagcaccaaaacatatgaagcaataaatagacaatttaacaataatagagactgaataccacacttccagtaatggagagaagtaggtagaacataaacaataaagaggatatttgaacaccacaaaccaactagacctattaggcttgcatacaacactctacccaacaaagtaggatgtttatttttctcaagtgcacacacaacattctgaatagaccatgtgcta

SEQ ID NO: 886441 - DNA, 657 bp, Homo sapiens
ctctcacatctctatataacatagattgtccttttgctctgaatttctttcatttattagaaaatttagatgtttcatttggaattatttaattgtttttacattcagttccatttttgatatggacaaatatccagtatggatataaattcagtagaaggattaataaagtctgaaaaacctggaataatttcaacatgaatatgatactgtaacagcttacagaaatgcgatattaactgtgaacattaatatactctgaaaagatgcatcagggtttaaaaaatttctccttaatgtagattgttttaattaccaatactgtcttcctcatttaaatgaaaaacgtaattttacaactattaatatataacttctctttgctccaagtatatgtgtatgcctggagaaaagcatatgcctggagaaaacaggagttatatatttatagcwttcaaaatagtataaaatattgtttacatgtaataatgcatttagaagtactacttcagtagtagcctccttaaaaagtattttaaacacaggaattaagtatataattttttcattttgtaataagttgtttatatgttatttggacaacagcttacacacaaaagtgttacaattcataccctaggtcttaaatgcatgaag

SEQ ID NO: 886442 - DNA, 462 bp, Homo sapiens
aaagtccacattcctatgacttcttataatattttaccaaaaacgcatttcagtttctttacacaccttgcatgtaaaactgtttcttcagttgtctcaataacatattacaatgttagcttttagcaatttttacttttggtgaaaaacctggttagtaagcgattttaattatgtaccaggtgtggcacctaagacaacagataagatttgactttttccagcatagctaggsggcatggctaacatcacatgtccccaggtcttatctagaatctaatgctctaaagtaggtaaattgaacaattttcaaaagtcaaacaagcagtttatgaccttaaagcatttagaaagcttaatatctgacctgtaaaatttagaccaaatgtctttattttatcaataatctttaaaactgtttttactttccaaagattacttaagtcgtgtactaaaaggcat

SEQ ID NO: 886443 - DNA, 619 bp, Homo sapiens
ctttggtgctagctattacaatagttttcatcatgctatagaggtacaaatggatattttggggggagtctaaaggaagaagtaattaattacaagtaagatagaaactgaagcaatggtttcacagaaaaggtgaacgtttgtgcttgcctttgaaatgtgaaaaggacttttcacattggcaaatataggtcaactatgttttggctgtttaccatgagccacaaagccaccttcagactgtactaatcagtttcagaaggaaatggaaaccaaaattttttttagactgaaaaagattacaaagaataaacttatctgaaaagttagtaaagtggagtttgggaggcagtggatttattgttcgtttgtgtgtttatttgtttgaatagcttgtcctttgagataaaaatgtagaagasggagaaagcgtaaaaattgtactgaatcaatattttaggcctgacacccaaatgtgcttcacagtccacatacccactaaagtgtggcattgattaaggtgggactggtctttggggactcgtaaaggtgctccatacccagaaggcacatggcaagcctgataattacctccaggcataaatcatcagctggggaa

SEQ ID NO: 886444 - DNA, 607 bp, Homo sapiens
catttgtctccatcatagacagttctctttctgaatgcatccaatattttactaaacacttaaagtaacataaaacagatgaattaaatgattcacattgtgaaagcaatccttgatttttcaacaatatttatttccgatttcctttcaatgttactttttaaatccagtggttctcaaycaaagattgataatatgtaccttgtctccctccctcaaaatgggagcatttggaaaggcaaggggggcatttctggttgtcacagtgactggtgagtcaatggcatttggtgggaaggagccagagatgctaaatggcttgaaatgcatagtcttactgaatgaatactggcaccaaatgaaaataacactttaccttgacagtgccttttggtgcattcaaattacaatttagttaattaaagatggagtaaaccttgtgattgggagcatgtttctcgtatatggtgtagtaaaagcggaagaaacatctttcagcctgtttctaggcttatctcatctttcatccagaggagacaagtgcccttgtatttaagtctggcacatatggcgagaaggcttggaactgattccagtggtacttctg

SEQ ID NO: 886445 - DNA, 589 bp, Homo sapiens
gtctgaagttgcaaaaaaaaaagaactttagctagaaacttctatttagaactcaaagccatccttttctaaactcatcctttgcccaccatatgcacaaatatgcacttgatttgggctcctttggaagacaatcctgaaataaggattcaagagtaagtaatatgytcaggatgtggtctaaggaaacagagataggagagtggggaaatgagccagggaagggaaggcaggcaaaaaggatatgtcattaagccagttgttattgtgggcaactagagctcaatctcactggccaattctagaaaaccgtgctgaatgtacctcagagttatccagttaagagatagggaatctggggtatttttacagcagctctttgttcaaaatttattgagggctgcttctagggcactaactctctggcacttccgacttgccctgttcacaggggctccatgctcccatgagtcaaaaaactcctcaggcagggagttctgggtattcccagtaaccaagattctgtgggtagaggtaagtgctgaaggcaaatgggcagggacactgagagtctgctacaacctccctc

SEQ ID NO: 886446 - DNA, 581 bp, Homo sapiens
acagtaaatgtcagggacaaatgtgaaattctatgtcatttttgagataatgctgctggcaatgataatttgcagtagctgacttacaatcacaagaattttttccttattacaggataacttcttgaatgtcatcaccacaattaatcaacttctgccagagcttctacataagtagcacttttggtttcagcaaggctaatccatgatggggcgtttctcaaaaccacctggctctgggaggaccttccgcacacacacaagcagaaacacccacatgagtccctttggttcataacttcttgggtcatttctgcaagattgacccctgccctttctttttaaaggakattttacctgaaacagtagggagacatatttctgtgttaacattgttctaaagaacctatggtcacagtacagcatcaatgggaaagtctctatgcctctcctaagtagaacctctgagatgagcagaatacttggaagggtacaaatatggctaactgttgtcaaatgtagaaatgtcatgcttcaggtagaagggttcaggaaaatcaccaaagaaattagaattccaa

SEQ ID NO: 886447 - DNA, 666 bp, Homo sapiens
ggaacaaagttactatagaaacataattactatcccctgttgaattaggatgcctgcaattatataaaaatcttgaaaccttcagtgaaaattctggcctttgctctctgccacattcattggagacatctgacaaactgtctcccttctctgtgctctagttatctctgtgcatataaaatatgagatacaaatatattgcattgtatcaactactatttatctaagaagctgaacttttttttcgagacaggctctcactctgtcacccaggctggagtgcagtggcacaatatcggctcactgcagccttgacytcccagactcatgtgatcctcccacctcagcctcccaagtagctgggactacaggcatgcaccaccatgcctagctgattttatttattcatttatttatttatttttgtagagacaggattttgccatgttgcccaggctggtctcgaactcctgggctcaagaaatctgcctgtcttagcctcccaaagtgctgggattacaggtgtgagccaccagcacccagctgaagctgaactatttacttggaaatccttgacacatctaacccggtaggtagtggaaataaggaagaagctcaaaaggacaaagtcttgcccaacagataacaataaaatgcaagggaagt

SEQ ID NO: 886448 - DNA, 603 bp, Homo sapiens
tttgttgcttacattcatacttgcaggaaatattaaatgtcagataaagattagtgaacataaggatgtcatttttttttcccatccaagttcatggactctttaaattctactgatatattcttgggggttcgtggaccccagattgagaaacttgctctaagcaaagcaaaggaaactacaacagatgtgggaaataattttaaactgaataccaaatattacctaacccacagcctacagagaaagcagttacctctaacctttcatggagggtaggagagccrtctcagtttccattcttacctcacagatctttttttttaaataataataatagctaccatttattgagcacctactctactgtgtgccataagaggactttacttttcaattttctgcagacaagtctccatacttccgttaggaactcctgcctccttctcaaaggatctgatcttgctcttggattcatcagtcttccttctccactaagagttgcccactttagaataactccctaatggctcccacacaacagcataaggtgggctttggcaagctgagtcttgtttcatttaagacctttacactgcagtg

SEQ ID NO: 886449 - DNA, 603 bp, Homo sapiens
tttgttgcttacattcatacttgcaggaaatattaaatgtcagataaagattagtgaacataaggatgtcatttttttttcccatccaagttcatggactctttaaattctactgatatattcttgggggttcgtggaccccagattgagaaacttgctctaagcaaagcaaaggaaactacaacagatgtgggaaataattttaaactgaataccaaatattacctaacccacagcctacagagaaagcagttacctctaacctttcatggagggtaggagagccgtctcagtttccattcttacctcacagatcttttttttwaaataataataatagctaccatttattgagcacctactctactgtgtgccataagaggactttacttttcaattttctgcagacaagtctccatacttccgttaggaactcctgcctccttctcaaaggatctgatcttgctcttggattcatcagtcttccttctccactaagagttgcccactttagaataactccctaatggctcccacacaacagcataaggtgggctttggcaagctgagtcttgtttcatttaagacctttacactgcagtg

SEQ ID NO: 886450 - DNA, 645 bp, Homo sapiens
taactactatttctataccacaatatttccctgtttctctagccatctatgcttccttacaacaaagcacagtgtaaagctctttgcctccacctcattggattaaataaacaggtctgtaaatataagagggaacaataatagtgaaaaaattggatactcaagaagtctagatgatcagagtgactttgtttcttttgttaatgaaaggatgagttggacggaaaaggagtgagtcacactgacaacgaaatgctaccaatttaggatttgattcattattttatgaccgttgcttgtttcctgatgctattcattgcttattcattggaggaacaataatcccattttggcttttgtggttttatagctgagacatccactttgaagcacattagctacacctctccctctccctactacttcatcaccatctcaaacatcagaaaatcaaattttgaaaattgcccagaagtattgggtgtacaaaaacattggtttctcytttggaagttcttcctgtgagggtttaagcatggggattttatagaggagatgaacatcagggatatttgtggcaatgtcacttcccttctcttaaaatggtgttggatggagagcctccgaggtaaagattctcaaatt

SEQ ID NO: 886451 - DNA, 618 bp, Homo sapiens
gtaaaattttaatcaaataaaatttaggatttttctattggttttagtaataaatagaaaacttttgacaagtgaagtggtagtcactgctatattggatactgaggctttacaactgcatcatgtctgttagtaatggtcatctcttagctattttttaaaaaattttcatgtgggctaccagtctccagaatctctttctctccatgaactttatcattctctctcaacygtgataatttatttctgtcaggggtatccatgatttcatattttaaatttctaatcttcgtttcttttttctctctgactcagtagtttgtgtgtgatagttgctctgtcatattttcaccagtaggtgccagtatttgatataacttatagagacagatctaccacttatggaggattgcctttccaggaaatgttctctctcttgtagataattcagaaagagcaaaccattctctctgcttgcagtaagcctgtattgaatcttctttacctacaaaaagatggcatgattggggggtgaacaaaaggctctgatagcattttttcacataaataaatgcaaatccatatggaatccttctgacggatatgtctacatactgg

SEQ ID NO: 886452 - DNA, 618 bp, Homo sapiens
gtaaaattttaatcaaataaaatttaggatttttctattggttttagtaataaatagaaaacttttgacaagtgaagtggtagtcactgctatattggatactgaggctttacaactgcatcatgtctgttagtaatggtcatctcttagctattttttaaaaaattttcatgtgggctaccagtctccagaatctctttctctccatgaactttatcattctctctcaaccgtgataatttatttctgtcaggggtatccatgatttcatattttaaatttctaatcttcrtttcttttttctctctgactcagtagtttgtgtgtgatagttgctctgtcatattttcaccagtaggtgccagtatttgatataacttatagagacagatctaccacttatggaggattgcctttccaggaaatgttctctctcttgtagataattcagaaagagcaaaccattctctctgcttgcagtaagcctgtattgaatcttctttacctacaaaaagatggcatgattggggggtgaacaaaaggctctgatagcattttttcacataaataaatgcaaatccatatggaatccttctgacggatatgtctacatactgg

SEQ ID NO: 886453 - DNA, 603 bp, Homo sapiens
aaatgttaggctgaatatatgtgctaaaaaaatacgatggtttctgaccagctattgatcaattggatgtctacatcaaaaaaaaaaaaaaaaaaaaaaaaaaaaaaaaaaaaaggattttaagaactactttgtaccatactcaaaaaacaatttgttagacttggratctaaatttcaaagttaaaaatatatatcttttagaattagcatggtaaaatatcttcataaactttgagtagacagagttaagggtaatcattacgatcatatatagagaatttaaagaggcacatttaaaacaaaatgatataaacagaagatatttcaatggaaaaatatatccaggaaaatatatgcatatgttttaaaatataaagcaggtgtgttaatattaatgtcacacaaggaagacttcaaggcaaagatcataaaacaccagtttagcagtaatgttttatttctttcattaaaaatagaaagttgaaaagtatcataagcattcaactcagtcagttagcagaacaaacattagtctgaacacacacatacgcacacaccccaaaacaaacagaacaaaatttagaaaaatggaagttgtga

SEQ ID NO: 886454 - DNA, 541 bp, Homo sapiens
caggtgtgattaaattaagaatatggagatgagatcatccttaggatttaagttcaaatcctcaaatcagatgacaaatttaatttaatttaatttaatttatttattttgagatggagtcttgctctgtcaccaggctggagtgcagtggcacgatctcagctcactgcaacctccgcctcctgggttcaatyaattctcttgcctcagcctcctgagtggctgggactgcaggtgcagactaccacgcccggctaatttttgtatttttagtagagatgggtttcaccatgttggccaggctggtctcgatctcctgacctcatgatctgcccaccttggcctctcaaagtgctggaattacagtgtgagccaccgcacccagcgtggatgacaaatttttataagagaacagggaatactcaaacacacagaggagaagaccacgtgtccttgaagacagagattggagggatgtggccacaggccaaggatcacctggagccaggaggagctgggagaggcaggaaggatcctcctt

SEQ ID NO: 886455 - DNA, 615 bp, Homo sapiens
gtacagaccaggagattcaggacagatgctgtgatgagatgggatttcttcctacagaagtcgggagagcctctgaagggttccaagtcgacagaaggactgggtttgagagagagcatgcctgaaggggagaatgcagggagaagggaggccaggaagaggctcttctccacgtgggatggtgagggccggtctagcagcacgaggtgagtgayggagggcagctctaggaggtcaggctgcgtgagggacacaggtggcccaatggatccccgagaagccacatcagctgtcaggagctttgtggacgaggtagaatgctttctgaatcctgagcactgtgcaggacatgggtcctttgtcaactaccatcgaagaataagtggtaattttcggagatgcaaaatgttgggtgcagaatgcgagtccccctcccctgcgggccgtgggctgcttggctgcggggtgagggtggtgggagtgagaacagtgctccctgttttgtgcacattgctactcactgtcgagttcagcatgagtgtggggaacagcccagccagggatttgtctcggggacacagaatgatggggtgcgcagggaagagggtgccgggc

SEQ ID NO: 886456 - DNA, 615 bp, Homo sapiens
gtacagaccaggagattcaggacagatgctgtgatgagatgggatttcttcctacagaagtcgggagagcctctgaagggttccaagtcgacagaaggactgggtttgagagagagcatgcctgaaggggagaatgcagggagaagggaggccaggaagaggctcttctccacgtgggatggtgagggccggtctagcagcacgaggtgagtgatggagggcagctctaggaggtcaggctgcgtgagggacacaggtggcccaatggatccccgagaagccacatcagctgtyaggagctttgtggacgaggtagaatgctttctgaatcctgagcactgtgcaggacatgggtcctttgtcaactaccatcgaagaataagtggtaattttcggagatgcaaaatgttgggtgcagaatgcgagtccccctcccctgcgggccgtgggctgcttggctgcggggtgagggtggtgggagtgagaacagtgctccctgttttgtgcacattgctactcactgtcgagttcagcatgagtgtggggaacagcccagccagggatttgtctcggggacacagaatgatggggtgcgcagggaagagggtgccgggc

SEQ ID NO: 886457 - DNA, 600 bp, Homo sapiens
caaggctaagggcagaaagtgcaggcacatgggggacagcatgatctatttatcgattcatttaaacatttattgagtgcctactgtttgttagggacggtgctatagccactggaggaagagaaatgaaggagtctattggggaaaaagaaaaagaattaaccgcacttaattatcctgcaatgatcattacagtgagagaaaggtttgcacaaaatgttctggtaatccaggggaggaagagattgaatccagggggaragacaggatagtagataagagtctaggacctggactggaggggcacatttcaaatcccagctctgtcactcaatagctgtgtgatgctgtgtaacttgtgtaggctctctggcctctgcttcctcatctttaaaatagggataataaaaattatacctggtgtgcagtatggtgtctataggtaataacactgtatcctatacttgaaattggctaagagtaaatcttaagtgttctcacagaacaaaagaagaaaatggtaacaatgtacggtgatggctatgctaattagctaggtgatagtaatcatttcacaatgtatcaggcatcaagttatac

SEQ ID NO: 886458 - DNA, 670 bp, Homo sapiens
tctgctgtaggtttaattttaaaataatcttttattttaaaacaaccaattatgatttggagatgtaattatgggatttttaaatttttctgtattgtcccttttgtaccttattttcttcctctgtcctatacaatgatcaccccttattctcaaggcatacattccaagacccctagtggatgccagaaaccacagatagcaccaaaccctwtatgtattatgttttcctatctgatgatgtaagtgactaatggactggtagtgtatacagagtggacatgctggacaaagtgatgattcaaatcccaggcaggacagaacagaacagcatgaaatttataactagttggcacaacatgcaatttataactatattttcacacaaccactctatctcaaataatattccctggtctctttaagttttacatcttttaagctcctatatgtagtttatgaattaattttaactggttattgttttactctacactttttaaggtgaagccatttaggattttaatgttttaatcatacatagtttttaaaataattggcatattgatataatgaaaagttctgtttttctctcatggactatttcttccatacatttagaaacttctattttacagttataaataggaggttgtagaactattaaaag

SEQ ID NO: 886459 - DNA, 670 bp, Homo sapiens
tctgctgtaggtttaattttaaaataatcttttattttaaaacaaccaattatgatttggagatgtaattatgggatttttaaatttttctgtattgtcccttttgtaccttattttcttcctctgtcctatacaatgatcaccccttattctcaaggcatacattccaagacccctagtggatgccagaaaccacagatagcaccaaaccctatatgtattatgttttcctatctgatgatgtaagtgactaatggactggtagtgtatacagagtggacatgctggacaaagtgatgattcaaatcccaggcaggacagaacagaacagcatgaaatttataactagttggcacarcatgcaatttataactatattttcacacaaccactctatctcaaataatattccctggtctctttaagttttacatcttttaagctcctatatgtagtttatgaattaattttaactggttattgttttactctacactttttaaggtgaagccatttaggattttaatgttttaatcatacatagtttttaaaataattggcatattgatataatgaaaagttctgtttttctctcatggactatttcttccatacatttagaaacttctattttacagttataaataggaggttgtagaactattaaaag

SEQ ID NO: 886460 - DNA, 629 bp, Homo sapiens
taaaaatttctagatacagtgctacgaagatggcaaggaagtctctcaaagatcaaaagaagagggtgaactgctaggaatttttggaacttgaactacaaagcagtgagttccttgaatttttgtgttatctgtcatatatcctgagctaggtgctacagaagcctccaaactgccagaactgccagaaagtacagataaagaagctccaagaaagtcttgttttctttaggcaaaggaccaggtgragggtggctttacaccagaaaatttttggcagtatctgccaaacaccactggaaaactcacatcttactccctccatgatttcagtggtgctaaacagaatttgatcccgtcattcccatacattgatactgttagacttgatgagttacatgggtatattgttattttctagagcagctgctaggaaaactatccaaagcaatatacttttgaaaagataaagaaatcaagatagaaatttttaatatgatcaagtcacccaaaggaaagtaagagaaacagaggaaacaaagagaaaacaagtaataaaatgacagtcttaagccctagtatgttaataaacccaattttattactttaaatttaaatgatctatggaa

SEQ ID NO: 886461 - DNA, 664 bp, Homo sapiens
ttgactcagcgattctaatttttttttttgaggtggggtcctgttattttgcccaagctggagtgcagtgactatttataagcatgatcattgcacacagaagcctggaactcctgggctccagtgatccttttgcctcagactccctagtagctaggactacaggtgtgtgccaccacacctggctttagcaatcctaattgtcagaatatttgagaattaaaaattagaaagcattagtacataaatatatatatgtataaatgatgtgcactgctattttatttgttggaataactgaaaaaggcttaaatatccatcaatagatgaatgatctaccaatagaggatattgtatgttgggatattttgatagtattaaaaagaatgagctagatccatatttaatggratgtggaggatgtccaaatgtcaatgatacagtgttgtataaaaataaaagaagaaaaacaagttatagatttatgttggcttgtgtgcatgcgtgtgccctgctatagcttattaaaggtcaacagatctcagtgactgttagaatgacgtgttttattgggctcactcttcagccagaacatgctagcatggctatacttgttatttatggtgatgaccattttgattggctgggtattttttctaattag

SEQ ID NO: 886462 - DNA, 664 bp, Homo sapiens
ttgactcagcgattctaatttttttttttgaggtggggtcctgttattttgcccaagctggagtgcagtgactatttataagcatgatcattgcacacagaagcctggaactcctgggctccagtgatccttttgcctcagactccctagtagctaggactacaggtgtgtgccaccacacctggctttagcaatcctaattgtcagaatatttgagaattaaaaattagaaagcattagtacataaatatatatatgtataaatgatgtgcactgctattttatttgttggaataactgaaaaaggcttaaatatccatcaatagatgaatgatctaccaatagaggatattgtatgttgggatattttgatagtattaaaaagaatgagctagatccatatttaatgggatgtggaggatgtccaaatgtcaatgatacagtgttgtataaaaataaaagaagaaaaacaagttatagatttatgttggcttgtgtgcatgygtgtgccctgctatagcttattaaaggtcaacagatctcagtgactgttagaatgacgtgttttattgggctcactcttcagccagaacatgctagcatggctatacttgttatttatggtgatgaccattttgattggctgggtattttttctaattag

SEQ ID NO: 886463 - DNA, 701 bp, Homo sapiens
ttactccaaggattttgaattggtaagtctgaggagaggcccaaatagggctatgcatttttcataagtaccttcgaagatgctcagattcagaagcagttggtctcagatgtacaccttgagaaagtcaggcctggagaaaaagaatgtactagacaaacagatatatttggcttagtttttttcctttcatgactgggctggttatctagcactggttatatttaagtccctaataaattttaaggtcataggagatgaggagtgtatcttatatccttcttaggagcaatttcacagcacctgtaattgtactgcttagccagtaggtatttttgaaagtcatgaagtccagatgattaaagttatttttagttttattataatcatggttggaaattaacctggaaagcactgagtttccctgtgtgtatatatatcacttgtaattaaaaagtaatctatttccccagtcattaaatgtttattgagtatctattatgtactggttttctgaaatatcattttgtccctgtcatttcatggtytctagttggagcatgcgtagcaaagaaaattcatgttccaaaatggcacaaggagggtcttaagcatttttaatattccacttatcagaattggaatatagataagtatttgcctgctcccagttctttgataggcattctattaaaatcaaa

SEQ ID NO: 886464 - DNA, 575 bp, Homo sapiens
tcttgtgatgaagggcgatgagatactactaagtggctgtgtgtatgtgtgtgtgtgtatgtgtgtgtgtacaatatatctgttagctctaatgatgtgtttgcatattctttgaataaatgactcttttatattcttagaatgttctagataggttgatttaatcagtaacatctttcyttaagtttcctaattctagggtgccatgtgaaaagatgcagaagaaaagttatgcttacacagatgacattcaggaatgaatactttctgctataacaataaaaaagtccagtactagtttcaatatcaaaagacgaagagaaatggttatttagaactctgtgcatagaataccaatctggctttctctgtagttaactgattctgaataaagatggtgatttgatcaaatttcaaacattttgaattcctcagaatacccttaattggcacagttttgttctttacaccctttgcttcactcttgctttacaaaagttagtgaataaatgaatgatccatttagtctcccaaagttttgatatactacttttgtcatatctagaatctcacat

SEQ ID NO: 886465 - DNA, 773 bp, Homo sapiens
cattggatgtcagggaatgctggccctgggtcaccttcttccttttggtgggaggttgtaagatgccctgcaactatgctgttcctccagacctgggttctctaatcagttcaccctccttttgcacctttcagagttctcctttggttgcctctcgcattatctccagcgtttacagttgtatttagcaggagtgggtgggaggaggaaccagaaaaaacaaattatgctatcttcaccagacttcagcttcatctgagagggcagaattttgcaaaatagaatatcgtaatctctcatcaacttgtaaaaaatttwaaaaaaaatcttcaacatcatgattctgatgtttaaatattatgtattataaaaataacaacatatactttatagatttatttactatagttatatctttttttaaataagatacaaggtcttgctttatcacccaggatggagttcaatggcgcaatcatagctcactgtaacctcaaactcctgggctcaagcaatattcttgtctcattctcctgagtagctaggactaataagtgcatgccaccatgcccagcaatgtatttgtttatttatttattgtagagacagagtctctctatgttgcacagactggaactcctgggctcaagcaatcctcctgcctcagcctccaaaagtgctgggattacgccaccacacctggcctatagttatataatttaatgtgactattttacttacctgtttatttccagcaatcgttccagaacagc

SEQ ID NO: 886466 - DNA, 631 bp, Homo sapiens
ttctcagtcaaatatgaaaataaaaaatcagcaggagtgtgaaatttcatgtggttttataaatgcatgtagctaagattttagaaaatgtttggtttagcctacagacatgggttcatcatgaaatttctcttttccactaaagggtatgagaccaagtagaattctcgaagtctgtcctcatgccccttcaataagttaccacttcaaaagctacaaagctggattcagggcaggaccttaagttctggctaccgtctgygtaaatatcacacacttacatgtggtaaagtcagagggacttgcagacctgagtgatacttatgacatcagaagtgagttttgtttatggttgattaatgacattgctacttgggccatgtttgtgacaacagcactgagggcaattagcaagagcaacagttagacagtcccatacttggaagattatatgagactaaatttgacactcttaatattgacatctcgtaaatagcatttggtctctatgtattttcatgatattctctttaatgtaacaacaatcagtaaactgtcacatatctaacctcatggaactcacatatctaacctcattgaatcattaacaatgatatttgcacctcttaaa

SEQ ID NO: 886467 - DNA, 698 bp, Homo sapiens
agatgcagaattgtgtgaatgtctttaatgttactgacctgtactattaaaaatggcccaaatggccaagttaatgttatttatatatatatacatatttaccacaataaaaaatgtagacaatagaaactatgactgagtgtctccagatgttggatttagcaaaaatttcagagaattrtattatattgccattttaaatatagttaagaaactaaaggatacatatatttaaagaattaaaggaaagtgccacaacaatgaatcaatagattctccactccccactatgttgatggccataaggatggtggcccatgtccgtgatacagtttgctgatgctgcagggaacaacatggaccttgtttttctatgattgagtgcgctggcctgtttgttgtctccctgagaaatcagctcaggggcttgcctttgttttacttaactcagaaatttctgagggctggagtggcctcctgaaagtatttaaaggcaaatatactagctacagcctcctgagataagggatgtgaaatcatgcaaacattagacatacagaaaagcctgggaaagaagaggcatggagggagagaagtgatttgaaaggctttcacatgtgccaggaaatctacaaagccacagataagcccagggctggattcatcttcagaaaagactcaagaaacaagagtttcac

SEQ ID NO: 886468 - DNA, 698 bp, Homo sapiens
agatgcagaattgtgtgaatgtctttaatgttactgacctgtactattaaaaatggcccaaatggccaagttaatgttatttatatatatatacatatttaccacaataaaaaatgtagacaatagaaactatgactgagtgtctccagatgttggatttagcaaaaatttcagagaattatattatattgccattttaaatatagttaagaaactaaaggatacatatatttaaagaattaaaggaaagtgccacaacaatgartcaatagattctccactccccactatgttgatggccataaggatggtggcccatgtccgtgatacagtttgctgatgctgcagggaacaacatggaccttgtttttctatgattgagtgcgctggcctgtttgttgtctccctgagaaatcagctcaggggcttgcctttgttttacttaactcagaaatttctgagggctggagtggcctcctgaaagtatttaaaggcaaatatactagctacagcctcctgagataagggatgtgaaatcatgcaaacattagacatacagaaaagcctgggaaagaagaggcatggagggagagaagtgatttgaaaggctttcacatgtgccaggaaatctacaaagccacagataagcccagggctggattcatcttcagaaaagactcaagaaacaagagtttcac

SEQ ID NO: 886469 - DNA, 483 bp, Homo sapiens
aaattccatttagactggaggaataagttttagtgatctatttcactgcatggcaaatgaattataaggtattatgtatttcaaaattgctaaaagaattgatttttaatgttcccatcacagaaaagaagttggtaaggtgatagatatgttaattagcttgatctttctacagtgtatacatagatcaaaacattacrttgtacattatatattatataatatattttatataaaatataatttattttatatattatatactttatataaaatataatatactttatagtatctattttatatctataaaatcattatctctcaaataaataaataaataaataagaaagaaatttacctagagagcaaaatgccacatttataaacctttaaagcacttgggtatcatattttgcttaacaagtattgctcacctcagagtcttaaaatgttctatttaataatactattattttatct

SEQ ID NO: 886470 - DNA, 583 bp, Homo sapiens
acctgaagtacacctttttctttctcgaagtctgtaaaagttacagatttataaaaactgaaggaatttgggctacagaattttcattggtgcttgctatcctcttccctagtcatttgttgcccagggaacaaaaatagcaattgtttgtatgctgaagttttgtgcttcagtttattttggcctggcatgtgaagtttgaagattttgaggttccgaaatattttttttctgattgagtcaaaattggaagcttgggctagttttcaggatcttgtagaaatttcaggatttctctaacggttctgcacctggaaacaaatataggcctgatggggagtgggagagagctctcgttctcctcctcgacratgagttttgtgtgttcattgacattctccttggcgttcctgttatgcgggtgtttatgaccctgggcacccaaggaaatttgcttgccagagttttacttgttagaggtaggtgaaagtacttttaagtcttgtgttatttatgtcttgacagaattatgaaatctgtttgtctcaaagttctgttggctcttactagttgactttaggaa

SEQ ID NO: 886471 - DNA, 630 bp, Homo sapiens
tgaatattttattccaaacttcccctgctattaagcaccttgttcttgatcctacagcttgaggaaaacctctgtttttctctcaagacaaattgatgattgaagtatcctagtcccttctatgattttagccattcgatgaaggatctttgcacccatcagttgatactcactcatgktgcagccatctcacatagcttgtagtttttgtttgtttgtttttttccagaaacaaggtctcaccctgtcacccgagctggaatgtagtggcacaatcacgactcactgcaaccttgagctcctaagctcaagcaatccgcatgcgccaccatgcctggctaatttttaaattttttggtagagatggggttctccctgtgttgcccaggctagtcttgagctcctgggttcaaatgatcctcctgcttcagcctcccaacgtgttgggattacaggcatgagccaccatgcctgacccatctaactggctgttcttttcacgaaagacaagtcattccctgacaccatttactcagaaatgggagggagtggagatatggagaaaagtatctggtagatgactttgctctatctgtgcaatatcactgtttatagacatgcatttcccta

SEQ ID NO: 886472 - DNA, 579 bp, Homo sapiens
cctctccaaggcgaaacattgcactccccgttttacagatgagaaaactgggattcaggaggttatttttttctctctctctcattccaaatattctctgtctctcctctctctcttattccaaatctccttttctttatattttattgtgaagaaagtggccacagtatatggtctcttaggaaggtgcagccatgtggttaatgaattttgcagcagaagaataaatcaaatatttattgattcaaattggtgtaggcatggtaaaaaaatgtgaaaagtagaactttgtttattcattccacaaatgtttattttctgctaccaagtgccaggtactctgtttcttcctgagtgtatagtggcaagggagaggaggccctctgagaacagcagactgcattctaatttgtatgaagttcttactgaaatgaaagtttctgtgatgttaagaytgtatgctactattcagtaaatgtctagaaagggcaatctgatttccgagcttctaccatgatgccagttaggtggctatatgtcagaaagcagagtccaggttctctctttttactttctgga

SEQ ID NO: 886473 - DNA, 615 bp, Homo sapiens
ctgagtgcttacaaatttgaaagtatgaaatttttaaggcataaggacagtgatctatctttagttgtcagacactatatttagatatttagacctcacctcaattgtttacattttttggtaccaaaactccttgcaaaattttcagatacatcagtggaaactaaaatcaatacattgagaatgaatacataattgcattatttattacattctaattctggcccatttccatagaaatccttggaggcatcaatcgcaatttgtttcygcaacactctaaggctgtggggccacagtcatccataaacataccaggagtcctgagcagatatggatttacatcctgtgtacctaggaactctggggaaatgtgagtttagggcagagtctgatcatagttgagtggaaatattacagagaaagagagagaaaatgatcatatgaatatgaatctaaatctcctgggtagtcaaaggaaatctccttagaatctttagagctgaagataatagttcatacctgtttcccatttcagccgtgaacaacagggagagtttcctacaagtgactgcaaattgaactgaaattaacaaaatcgacatgaaattgcct

SEQ ID NO: 886474 - DNA, 605 bp, Homo sapiens
aagatgtttcttcttttttcccttcccacttctggaagcatgaggggatttttctctaatattcattgtgagaacctggtccagctcctggaggtaaaaactcacaaaagcatgatagccctggatgaatggatccccttggagtttccatcattcagactggtccacatggagcctctagtaatccgtcagttagagtttaggcttttctactccagtactcgttcctgcgraggcttctgctaagggatttctgctcagataagttgtgattctctgtacccacctgtctgtctctccagttttggggacagcagtttgctctgtgacctcacttcttcgaaggatctaaagaaagttgttgctttcttttagttggtttagctgttcacgtgttggcacatgtgttaggacagagtgacatcttccaaactccttgcatgttgaaccgcctatatattgttattctcactatctaggatgtctaggaaagtaagaaaaagatcatgtgctggctctcattttgtcatcctcctgactcttcattttctttgagcctagggacaaaaatgaaggcctgttactttgtaagaagaaaaatgtca

SEQ ID NO: 886475 - DNA, 587 bp, Homo sapiens
tgagcccgaaggtggaaaggagaacaagacagacagagctctgtctcatggagcttaaattccagcagggtggacacacaataaccaagcaaacaaaacggacatcatttcaggtagtgataagagcagcaaaagacccctgcaatccaaggtgaggagtttagattttgcccatagtgcagaggaagccccactggggggctcctagcgtggatgtgacatggtgtgctttatgtttggaaagatcactagctaccaggactatgcaccatcgaatgccacccattcaataagcagaaactgcattttcatctctcagtagatcccaatatamgccttttctattcaaatgtgatgtcctcaatgaactcctttgattacccctgtagggaaaatgttcttttaaaaaagaatttctaaaaaccctattccaggtgattctatgagatctttcatctcctgtctcagaagacttatccaggggtagcaggaacagcttgcatagaatagaatttgtttcacgaaccatttctccagtcattattataattccttaggcaaaagatgatttcaaaaataccctccga

SEQ ID NO: 886476 - DNA, 695 bp, Homo sapiens
tttcaggctccgatagatctaggttcaaattctgagtctcttattagctgtgtggcctcatgcaaattgcttaatcttcctaggccttaataacctcaattctaaaatgaggttaataatggtataattattgaggttttttartatgaggttaataatgtaaaatgaggttaataatgaggttcatataggtaataatgcctatatcatggggttgttgcaaagattaattggataatgcattaaaatgcttatcatagtgtcatatataaacacaaacatttaacaattatttttaatagtaacattattcttataactactgctgtcattattgccctgccactagattctgagttcttttagggcagggactttgattattttgttcactgctatcgcttagattctagaactctgtctatactattgaacaaatacttcactatttgaagaaggctttacttttgttctggatgataccagtcagtggtcccttatcatgagagccaccttgctttctgtttgcttgaatttgctgcttttatgaaatccaggtgtctcatctcagccacctctgagtcctgtggtatagcctgtgagttcagctgtctggaaatgaagtctgtttgtaacattatcataccacactttatacataaccactgtagccaattgtttaaaaaatagtcaac

SEQ ID NO: 886477 - DNA, 601 bp, Homo sapiens
agttggcaagagtcacagaacccattctgttggctcaagtgaagaaccaaaactgaagcaaaaagcagtatattttagcaaaatgcaatggccacccattttaagtttttacaactcaaaaaataatttttaactagagaaaagaaaaggttgagaatcatttggagggttatttttttcaaaagtgtatgctttaaatagtttattctactcctttcagagaacctgtgctatgttgaaccactgtttatgatgagaatattttacatccttcaratgtgttggctggaaaaattttgagagtcactgtcctaaatagtaaaattagagtgctttttataaaatcagtctttcaatattcccttcatactggaggaccatcaaaagatagtaattaactaatgaattaattttctgatggctgtatttttctccttctttcctgcaacctggaggtaggaaacacacattaacagaagccagtgctgaggagagactaagaaatagcatgagacaggtgaaatgcaaactctttaaaatcaaacttcagggtgcaggtattaaaaaaaggagagagaatgcagtttgctcagatgacttg

SEQ ID NO: 886478 - DNA, 611 bp, Homo sapiens
aaatggccatttgccagcagcaagcgaacccctaaatagtcacgttctgttcgggagtcaaaggaaaaagaaaatcccctgttttctaagtacagctgggtaatggttttctttagaggtgatgataaatgtattctctgaaatgtattattagacttgttaaatgtgtaattaaagggattccatgaagttgttgcagcaggaatgggatttaaattgcccccaaacccccttccacacacacattattactttacctgtgaaaatcttaaaagctgttggtttacccagcagcttagagccttgaactaagtgaaacatgaaatatcttcaatatatgtaccagaggctctgygtgtgtgtgtgtgcgtgcacgtgtgtgagacattgacaagagaaagattgatatactcaaaccctacatcatactgtttttcataaatttccatattgaatccaagagacctcattttgaggatttaaaataatgtggcatcttgcttcattaccaataaaagtaagctttttggcctacccataataccccagggtaactggatttcaaaagcaaatcaacttgagcttggtctttcactaactaaaaatacagt

SEQ ID NO: 886479 - DNA, 659 bp, Homo sapiens
ttattggacagagcagattgtaaaacatttctaacacggcaaaaagttctattggacaatgccgttccaaaaacttttacatgtgttcatgaagatacaaaaaatgaaaaataaacaaaaaaaaatttacatacccttcactgaccaagataattttttattcaaagttaacttatttttaagataaaacttcaaacacaaaattgacttcaacactgttctcacttgtcacacagaaaccaacttttcagccgcggcagcatcaggtgttagggagagacacctcctggcagcacatggaattacaacctagcacaatcagacactggaaccagccagggactgggtttcagcagccatcggtggaataccaggagattcccaagagtgggagaaaaatcccataccaagaaacaatcatggataaggcaccaggaagacatactaggttacaaaagcccatccaaggccaggcgcagtgkctcacgcctgtaatcctagcacttttggaggccaaggcgagcagatcacttgaggtcaggagttcgagacaaaagcccatccaccaccagacataaatctcctgtgtcacatccctcaagccatgcatggctgcacagagatacataataataagtgtcggtcatttgaataaataa

SEQ ID NO: 886480 - DNA, 606 bp, Homo sapiens
tcaccccatatacaccccgtatacccacacagcatgggaggtcactaaaactcatcactctccctggaggaagcctgaagggcagctggactaagtgcctccatccaacacccttggaggttcacacttatttctgttgtctccataccaacagtgcatcaactctcatcttttctggcccaaagttggataaagccccagctcaagttctcttttgtagactggcaatagagttgagaaatgtaaagaagacggatactaaaagatgaagaagtagaacttccaggagaaggaagttcttaggcagttcgtggatggggctctagctaggtgtagtgaagttagaaatgtgtactttctaagtcagacaattctgagtgtcttgtatttactttcatgtttctcagtgatctctaacatttggtccatatctcrcatccttgcccttctccagaaattttcttctttgatgtcgtaactattttctggctcccaaaatcaggtgaacctgggtaccatcttccctgggtcctatgacctctcttgctgtgagatgccactcttctgcctcttccccactctctgtctccatcttctcttctcttt

SEQ ID NO: 886481 - DNA, 581 bp, Homo sapiens
tatctttgttagaggggatcaatctggcagcagaatgtaaactgaatttgaggagagttcaggagtagggcagggttggaagctagaaatgggggcatcagttaataggatattgccatggtctagccacaaggcaacaagaacccaaagttgaagtaatgaagttgtagaaatagtaggggagagagattaaacaacaaacagttggaggcgactctgaggttttgtcaactgcaaaagggagtgaaaggggtgaagtggtttgagcaaagaaaaagcagagctgagtttggtacatgcttatttacaaagtaaaagaaatacttatatatgtatataygttattgcaaatgtgatgcagataaattgcagaaaattaaaaaatggagaaaagcattataaagaaaataaaaatcatatttaatcccacaaccacagtttgccattgcaatagtacgtttggtatatttctttctagatagataaataaacagatggagcatggtactaagtagtcttcaaaaatatgattctcactcgctgcgtattaccatctggatacaccaaaattgatttcactg

SEQ ID NO: 886482 - DNA, 623 bp, Homo sapiens
tcattttttcatatttctgttggacaaaatctgttttttatgtaccagtttatgacaacttttaatagtggggctattacagttttgtgtattagacatgttgcagttttttgttttttttttttttttgccacattctcattaccyttcaaagttttatatggtatttttgataagtagaagttttgaaattttatgtagtcattgctatccccttttggattttttttccttttctgttatactttgacagtccctctcaaaacaagattcagtaaacatttacctatgatttcttttaattctttgtgatttcttcatttgtctccttatttgaagcatcagcctgtggtgatcatgaacacaggctctggagttacatggacttggatttggatgctggttctcccaattacttgctgtgtgaccttggataatgcttaacctctctgaaactcaattttcaaatctgaaacagggttggaagttgcaggagataatgtatgtcgaagtgtccagcacattacttggtcagtagcagacatgtaatcttaaatattgccacgttaggtctctgttaagtatgtacaattttgatcttcatgaaggcagagacactgtct

SEQ ID NO: 886483 - DNA, 593 bp, Homo sapiens
tttgctgatacttaacgtgctacagggggagctctatccttgtttctcattggctctgtctgtatgaccaaggttgtcatatgtcctggttatcctgggtcagtccaagtttatgcaggttgtcccagtgcaacttctaatagttcccccttcgactctcgaaagtcccagtctggatgacagttgttactctgtcaataacccataggattgcttcccttaagacctccacttttcttccaaagggatctgccctatagttgtctctgaaggattttgtcagactgatcccagtagtggatttcacactaaagttcaccctgactctgggctgggatgaatggtaaaaggaactctttgaccaggtaatccccctactctttccaggaaatcccrgtggggaaaaggaaggtcctatgacctgaacagaagaaacagaatttggtggccagggaaagccttccctgggggtccacccttcctgtgacctgaacagaagaaacagaatttggtggccagggaaaaccttccctgggggtccacccttcctgtgacctgaacagaagaaacagaatttggtggtcagggaaaac

SEQ ID NO: 886484 - DNA, 616 bp, Homo sapiens
ttctgctcttgacagaatgtctgggaatcactggttatgagattctgtattttcaaacccgcatttataccctataaaaatgtggggtttactacgtgctggaagcagctattaggataaattgtgctagctcctgaaaccaggcataagccattcctacacctgccaggactgtcctgtcttcatcatacctagcttaagccaatacaagaatgaagggaggaggaatctgagccttggttggccctaagccttcacccaaatgatcctgaaaataattgtagtgatagtaacaacagcaaatcttgaatatttgctctctctgtgttaagcacaatgctaaacacacatacaatttaatgcccaaaactctargtaagtatttttatcttgtctttagaaactcagggatgctcagggctaacaggtgacaagtgattaaggcaggggttcagatcgaggtctccccaattctagttctcacattgtcacttgtccatcctgattccttagcctgatgcttccatgtaatcttatgatggtcttcaggaagggtgtctttccttccttgtgctcaaggtcacccacctaggaagggaacatgcatgaacacagg

SEQ ID NO: 886485 - DNA, 691 bp, Homo sapiens
aaatataaaaacaagtgtcttaaatataagtattgaatttgatttgtcttcagaatccaacattcagtactaagttccactttgaaaccctgttttttgacataggttattaaatattaagcatttaattattacaaattaaaaggaaaatataaaggaggatggatttgtttgtttctttttcagattgaaactgcttggccaaggcctagccagggtagctggcctacccatggcaaggacttgcagcaagccaaattaacttccttgtttggatcacacattaaatttcggaataaagccatttccctggaaaggatcaggaagcattaagcagtagtgctcaagaagattaaacttccatgttgagaatctcactggttatctttggccttctggatagctagttcttttctggcctgtgtacctttytatggctacataaaaaaattaataacctttctaaaagtaaaaatcctatttggagtaagatggcattgcaaattaaataagtattggaataaacaacattagcatatttttttcaaagctatgtgtttagcactcaaaacaatgtcatgttgggcatctataaaacagcttatcaacatttgcagttggcaaataggtgtgttttggagatgttatgagcccttcttttaaaatcactaagatttcttattagtgtaaa

SEQ ID NO: 886486 - DNA, 573 bp, Homo sapiens
ctactttatttccaagagagtcaagctcagtcttctaacacagtgagggacatgcagctctctggaagtgtatcttcctccataggtttgcatccaattcccctatgttcaattcaggcccagctgggctcccattctgtagagtaggtacctccagaattgtagacttcatgggttctgaggttttgcttctgggcactcccatgaccaggttagaattatctttctcaggtgtgcataagtcaggaagtctattatttgttgcaactccttcatcagctctctaccacctccccaaattttgttgctgcaatcgactttcccattctccttgtctctttttaatccctcctgccccaccccacctcactttaaatcattttagaagggtttgaggaaggagcactgataagtgcttttgttcaaccttccaggrttaactggaagttccctatgttttatgaccagaaaaaagaaaaaaatatatattttgcatttgggtagagcaaactattgtcaaaattctactactttaatcattgtgtgacttgtctttattgtataggtgcacca

SEQ ID NO: 886487 - DNA, 535 bp, Homo sapiens
tttgcctaatattcaaaaatcagctgcagcaacataagatctagagatccagtttagcagggattcatgagaacaaaacttaagcatgcttatgagccattgagggatgcagggaacatggctgaaagtaaatgtaaagcaatcaatgtctgcattcttctacaactgtagatttcaacatgrcaaaagtgccgggccatgaaccatcaaagtgtgccatgaaattttattcactatataccagcggtccccaacctttttggcaccagagatcagttttggggaagacaatttttccacagacccagggttagaggggattggtttcaggacgaaacttccacctcaaatcatcaggcattaggttagattctcataaggagcatgcaacctagatccctcacatgtgcaattcacaatagggtttgtactcctaggagaatctaatactgttgctgatctgacaggaggcagtgctcaggcagtcacgttcgctcacccaccactcacttcctgccatgtggcccagttccta

SEQ ID NO: 886488 - DNA, 637 bp, Homo sapiens
cttgccttgatgttgatggctgctgactaaacagggtggtggttgctaaaggctggagaactgtggcaatttcttaaaataaggcaacaatgaactttgtcacattgactgactctttcatgaaagtttgctctgcagcatgcaatgatgtttgatagcattttacctacagtagaacttctttcaaaattggcgtcaagcctcttaatycctgttgctgttttatcaactttgtgtaattttctaaatcctttgttgttgtttcaacaatgttcatagcatccttaccagaagtaaatttcatcccaagaaaccactttctttgctcttctgtaagaagccactcttcattcattcaagttttatcatgagattgcagcaattcagtctcatcttcaggctccacttctaattctaattctcttgtcgtttccattacatctgcagttacttcctccatgatgtcatagacctctcaaagtcacccacgcaggttgaaactgacttcttccaaactcctttaatgttgatattttgacctcctcccatgaatcatgaatactcttactgatatctagaatggtgaatcctttccaaaaggttttcaatttactttgcccagatccattagaggaat

SEQ ID NO: 886489 - DNA, 574 bp, Homo sapiens
ttacactgttggtgggagcataaattagttcacccattgtggaagtcagtgtggcgattcctcagggatctagaactagaaataccatatgacccagccatcccattactgggtatatatccaaaggattataaatcatgctactataaagatacctgcacatgtatgcttattgtggcactgttcacaatggcaaagacttggaaccaacccaaatgtccatcaatgatagactggattaagaaaatgtgrcacatatacaccatggaatactatgcagtcataaaaaaggatgagttcatgtcatttgcagggacatggatgaagccaaaaaccatcattctcagcaaactatcacaaggacagaaaaccaaacaccgcatgttctcattcataagtgggaattgaacaatgaggacacatggacacagggcagggaacatcacacaccggggcctgtaggggggtgggggctggtggaggaatagtattaggagaaatacctaatgtaaatgacaagttgatgggtgcagcaaaccaccatggcacatatatacctatgtaacaaacctgc

SEQ ID NO: 886490 - DNA, 574 bp, Homo sapiens
ttacactgttggtgggagcataaattagttcacccattgtggaagtcagtgtggcgattcctcagggatctagaactagaaataccatatgacccagccatcccattactgggtatatatccaaaggattataaatcatgctactataaagatacctgcacatgtatgcttattgtggcactgttcacaatggcaaagacttggaaccaacccaaatgtccatcaatgatagactggattaagaaaatgtggcacatatacaccatggaatactatgcagtcataaaaaaggatgagttcatgtcatttgcagggacatggatgaagccaaaaaccatcattctcagcaaactatcacaaggacagaaaaccaaacaccgcatgttctcaytcataagtgggaattgaacaatgaggacacatggacacagggcagggaacatcacacaccggggcctgtaggggggtgggggctggtggaggaatagtattaggagaaatacctaatgtaaatgacaagttgatgggtgcagcaaaccaccatggcacatatatacctatgtaacaaacctgc

SEQ ID NO: 886491 - DNA, 711 bp, Homo sapiens
tcacttgtctgtgtacctcattcttcctggatgcagggcaacaacttgggcaaaggtgctgctggccacagaggtttctggccagaaaatcagcaccccaaagatcccatagcaattttattatgtgttttccatttgtttcacctctttttcgttcctttctttgttttttattgttttcccatgggctgttcaaacccattttaagaaatctatcttgacttgatttttttttttttttgtcaagaggaaggaagcaccagaagggggaggaggtgtcaggctctttttaacaatcagttccctcagagttaatagagcaagaactcactgattaccataagaatggcaccaagccattcctaaaggatctgccttcaggaaagagacacttgccaccaggccctacttccaacattggsgaccagatttcaagaggagacttggcaaggccaaacaaaccatatccaaaccacagcaagcagcctgaatgcatgcaggcactctgtttaggtttggtgtgcaggtcttggtttacctttatgggctgttggtttcaatggcaatttaattttcagagactgtatggtgatattttagtctgtgtggcgtggtgatttgggcgctcctcaaaatgcgacattagtaatccctactagtgccacttgatggggtgtaggagtttccctaggccaggccacctatgctcta

SEQ ID NO: 886492 - DNA, 655 bp, Homo sapiens
catgggagcggtttcccccacgctgttctcatgatagtgagtgagttctcacagatctgatggttttataagtgtttgacagttcctccttcacatgctgtctcttgcctgctgccatgtaagacatgccagcttccactcccgccatgattataagtttcctgaggcctccccagccataagaaacygtacgtcaattaaaccccttttctttataaattacccagactcaggcagttctttatagcagtgtgaggatgaattaatacatctacataaagatacaattttttctgcaagtgtgatgagatcaatgctttccaaaatgtgggccaagaccacccactgagactcctgcttataagaggaaaaggagcaggagatgaaataaggttgaatcacacacttctatctcggtccctctgcctttatcaaggtgaagtctcacttgggaggcaatgtgtctttatcactctccagcacttactcacctctttttttacttaataaagagccttcccagacaacatatctatctagccaaaatttagtaacaatacttaatgttttccttgtatttgtttttagtttgcttctatttgagtcaaataaaaatgtttttctatttgctgtagtgcaataaagactgtttaaa

SEQ ID NO: 886493 - DNA, 617 bp, Homo sapiens
actgagactcctgcttataagaggaaaaggagcaggagatgaaataaggttgaatcacacacttctatctcggtccctctgcctttatcaaggtgaagtctcacttgggaggcaatgtgtctttatcactctccagcacttactcacctctttttttacttaataaagagccttcccagacaacatatctatctagccaaaatttagtaacaatacttaatgttttccttgtatttgtttttagtttgcttctatttgagtcaaataaaaatgtttttctatttgctgtagtgcaataaagactgtttaaacattgatttatttaagrgaaaaagttgatttcgagaaaaaatgttaaatagatattagtagggatacatgccagttatttattgtggtttaatcaagcacccccaaagttaatggctcaaaacaacagtattaagattactattgcatgggtgaacaattttggctgaacttaattggctggtttttctggtcttaactggttctctcatgcctctgaaatctgttgaagtctgtcaatctcttctcagaatagtatttttacagtaaaagtaacacatgtagaattgcaaaggaagccaattata

SEQ ID NO: 886494 - DNA, 617 bp, Homo sapiens
actgagactcctgcttataagaggaaaaggagcaggagatgaaataaggttgaatcacacacttctatctcggtccctctgcctttatcaaggtgaagtctcacttgggaggcaatgtgtctttatcactctccagcacttactcacctctttttttacttaataaagagccttcccagacaacatatctatctagccaaaatttagtaacaatacttaatgttttccttgtatttgtttttagtttgcttctatttgagtcaaataaaaatgtttttctatttgctgtagtgcaataaagactgtttaaacattgatttatttaagagaaaaagttgatttcgagaaaaaatgttaaatagatattagtagggatayatgccagttatttattgtggtttaatcaagcacccccaaagttaatggctcaaaacaacagtattaagattactattgcatgggtgaacaattttggctgaacttaattggctggtttttctggtcttaactggttctctcatgcctctgaaatctgttgaagtctgtcaatctcttctcagaatagtatttttacagtaaaagtaacacatgtagaattgcaaaggaagccaattata

SEQ ID NO: 886495 - DNA, 593 bp, Homo sapiens
cctgttttcctactgtatcatcaaatacacatgattaattcaaagcattatttcttttacttgttcatttttatattacacaagtaataaatatttgtttaaaaaacacaaacagtacaagtaaaaggagaaaattctttcgccttctaccaatctcatccctggagataatagcctttgtcagtttactgtgtaatcttacctgatagatttctaaatatgcatatccacctacatgtgtgtatgaacatgtaatcaaaataggatttttatacacatttttctgcaatgtgtttcttttacctaaaataactgtcttccttcttctyatatctgtattagaagaaaattcttatttttttaagaactgtgctatgtgaaattccattgtatggttgccccatcatttatttaacattcatctaacgcctggcatttaggttgtctcctactcaataaatattgagaatttgtaatcctctagggatgccgtggaggagtacaaaccatataaggaaattcctctcctctcaagtagtttgaggctggatatgtgagtcagacatattgtgtaacaaataggcttcagattt

SEQ ID NO: 886496 - DNA, 524 bp, Homo sapiens
gccatgtggggaaggtccttgttccctcttccaccatgattatgggtttcctgaggcctccccagccacgtagaactgagtcaactaaacctctttcctttataaattacccagtctcgggtagtatctttacagtgtgtgagaatggactaatacatcactttaatccatatttaaccttgatggtacctgcatcatatgaaagggctgtgtatttggttcatgtaggtgcctatgttatcaggggttctggagcctgcaagtcttatctygggttgatctccaaaaagaatacttgcctacataaaagtgaattcaagtagcttatttagcaggtgatcccaggcagcactggtaagagaggggaggagtgagacaggaaagagaaggagggcaaggaagagtttgaattcagcacattatcactgtgggcaaccaggaatcagtcctgatggtgacctttgggagacaatatagaacatgcctgagagctgtccaaccaagtggcaaaggatctggggtgt

SEQ ID NO: 886497 - DNA, 473 bp, Homo sapiens
agggatttttggcactcaagaaaattattctaaagtttatctgaaataatagtcctgggaatggccatatgtaagaaataataacttaaaagtatattgcataatgttgttctcaagttctttctaataatatttatgaagccatatttatatactaaaagtatagaatttaagcatattgaatgtgaaatacttttagatttcaaaaatgaattataaattacattaaacattaaattattcatttaasaaatgtattgaataacttataaatatttttcttttattataactttattaaggtatactcaaccaataaaaattgtagctatttaaggtgttcaacttgatgttttgatatatgtacacattatgaaataattaccacaatcaagctaattggcatatccatcaccttgcatagttactacatatggtgagaacacttaagactaacattgttagcaaatttc

SEQ ID NO: 886498 - DNA, 650 bp, Homo sapiens
aaatccaattaaacctctttttcttcccagtcttgggtatgtctttatcagtagcatgaaaacagactaatacagtaaattggtactagtagagtgggatgttgctggaaagatacccaaaaatctggaagtgactttggaactgagtaacaggcagaggttggaacagtttggagggctcagaagragataaaaaatgtggaaaagtttggaactgcctagagactgattgaatggctttgcccaaagtgctgatagcagtatgaacaataaggtccaggccgaggtgatctcagatggagattaggaacttgttgggaactggagcaaaggtgactcttgttatgttttagcaaagaggctggtggcatgttgcccctgccctagaaatttgtggaactttgaacttgagagagatgatttagggtatctgacggaagaaatttctaagcagcaaagcattcaagaggtaacttgggtgctgttaaaggcatttggttttataagggaagaagagcatacaaacttggaaaactgcagcctgactatgtgatatatattaaaaaaaacacacattttatggggagaaattcaagctggctgcagaaatttgcatacgtagcaaggagcctaatgttaatccccaagaa

SEQ ID NO: 886499 - DNA, 604 bp, Homo sapiens
actgtataatatacatcagattatgccagtcctctgttcaacttattctcaaggtttataatttaagtggtctacatgggttyaaatgatttcactgtccactgtttacgtaatatctctccctattattctttccttggatcactctacttcagtaaaactggagagaagcatactttggcctcaaagatgttgcattttctgtccctttctcctagagtgcacttttcctggatatccacatgatctgctgccatatctctttaaggtctttactcaaatatcaccttatctatggagactttcctgtctaccctatcaaaatgaacaaccacttcatccatctccaatccctgtcatgtttatatccacagctcttaccacttgaaaatccacttctcttgttaatatatttctgattctattttcttttgacctctgcaaaggcatatatttttgtaactcattttgaactgctgcatctccagagtctactctagtttcaggcatttggtgagtgttcagttaatatttgttgaataaatgaattgactaggtcagctacattgattaatttcaaatgttaaatcaaacttgcatttct

SEQ ID NO: 886500 - DNA, 585 bp, Homo sapiens
ctgcatcatgcaaatgaaatgcacctgtttgcagaaagacacgaataatctggtttccaagtattcttggctctcaaacttgcctttattgactccgtgtgtgtgtgtgtgtgtgtgtgtgtgtgtgttttcctttcataatcaaattattctgactctagattttccaaattcatcttttcaactttcctatgaaaggtgtttagggragaaaaactaaaataattaatgaatcacatgggaagagaaggagattttggaggagaggaatggtgtagaaaatcaggttgcccattctcctatgttctgtaaccataatttagaatcttatcttgcatggtttgttggtgagaaatgttaacatttgcatttcaaggtaaagaaaggcttttactgatggccagtcaccagggaaacttaatgagaagttacagtggttggatttgtagcaacttgttttctgtagtatccaggcagcagacggctttgtgcacacaaatacagaaagtggactgcttgttaggtatcatatctaattagctagaacccaaaaaacttctgctaatgatatttttatgccaggag

SEQ ID NO: 886501 - DNA, 659 bp, Homo sapiens
aggttcttttgaggtgttatagtggctgcccttagagacagtagatgacaaatgtttcctattcagatctttaaaaggtgctagactcttggttaatctctttaggattgggagagcctggaagaaaaggatctagctatgttaatagagattcttcacagatgtaaatttcccctgacaatggacagctttgcatagccatttcaagatatggcaaagaaacattttttggggtaaaatattttgactttcttctttgtcacataatgttattccagagtcagattggaaagtaagtcagatacrtagggttaaataaaacccatctaatgagaatttaatgatttgtagggcatgactccccagactccttaaataggaatttgggcaagataaaaaaaaattagagtttagtcctcagctggaacatactaatttttatttcagtaatatttgcaatttctttttaaagtatttttatgatggctgttttagaagccttgtcagagaattctaacataattgtcatcttggtgttagcatcttctagttatcttttgcttgagatcttactgttttgttttttttgttttttttggaaattaaacatcctgttcctaaacaacaaatgggtcaatgaagaaattaaacaggtaatc

SEQ ID NO: 886502 - DNA, 651 bp, Homo sapiens
ctagcctcagcctcccaaagtgctgggattagagtcgtgagccgccgcacctggcctatttttgctttttttaaaatcttcccctttttttctgccttctccagttttaatgaaacattttacatgattccattttatcttctctgttcgtatattaattatcctcttaaaaaattagtagtttccttacagtttagaacatttgtttataacttatctaagtcaattttcaaataacattgttttgcttcatgggtaagctgtaatcacctacttcattgctgctgttattactttgaatggttatctattaaatcaattaagaataagaaaaataaagmctttattttaccttaatttctgtcttttttaatattcttactttttgttgatttaagtttctgacctatataatttttcttcttcctgaaaaacttcttttaacatttttttgaaagatagatctagttgtcacaaattctccgtttttgctcttctgagaaaatatttctctttcacttttgaagggtaatttcactagatacggtattctgagttggtgtttttcttttcttttctttctttcaatacttttaatattttatgccactctcctctttggtttctgatgagaagtctaatgtgtgttgc

SEQ ID NO: 886503 - DNA, 643 bp, Homo sapiens
gcaccggtggtcagagtgaaacagaacagggcagggagtttcacaatgttcttctatacaatgtctggaatctatgaataacaccagtttctaagttatgagttgatttttaaccactaggtttaggccaggcaggcccaggcctggttttggccctggcacygggctgcctgtctttgatttcacttccttgtttttttttttttttttcttaaaacaggtactgagcataaaacaatataaaaccatatgagagggtctctctcttccctcaccatcatgcccaggtaattttcgtatttttagtagagatggggtttcaccatgttggccaggctgttctcgaactcctgacctcgtgttccgcctgcctcagcctcccaaagtgctgggattataggtgtgagccactgtgcccggtgtttcagctagtaagaagacaaatgcaaagcttgttttcttgaattaataaaaatgtaatgccttccaactaagttttcgggttagaattgtgaatacagaagtgcacctaatgtagtcaaaattagctaccaatttcaagtcacattactgaataaattagattccagtgtttgtctatgtacatgttgttattaattacccagtagtattccccaaccag

SEQ ID NO: 886504 - DNA, 619 bp, Homo sapiens
atccaccgacagcttgcaccttccaccttgaaaagccacagacactcaacaccagcctgtgaaagcagccaggaggggagctataccctgcaaagccacaggtgcagagctgcccaagactgtgggaacctacctcttacatcagcatgacttggatgtgagacactgagtcaaaggagatctttttggagctttagaatttgccccactggattttgtacttgcatgggccctgtagcccctttgttttagccaatttctcccatctgaaatggctgtatttacccaatgcctgtacccttattgtgtctaggaaacaactagcttgcttttgattttgcagtctcacagacgaaagggacttgccttgtctcrgatgacactttggactgtggacttttgagttaatgctgaaatgagttaagactttgtgggactataaggaaggcatgattggttttgaaatgtgaggacatgagatttgagggggccagaggctgaatgaggtttggctctctgtccccacccaaatctcatcttgaactgtactcccataattcccctgtgttgtgggagggacctggtggaagatagtttgaatcatgggggcagtattccc

SEQ ID NO: 886505 - DNA, 621 bp, Homo sapiens
ttatttgcagcctgaggcttgtggcagagctgaatattttccccagatatctgatatcttgcttattcaacttgctgaaatcccggagtgtgacctccagagtcctgaattcctgcttccagttgaagaacaaagatacagccctgctgggaatgtaggtttctggggcctcttccatgtggattccacctgtgtcttctgcagccttttcccatgaagccatagctcccccataaaagtccagtttaatgaagtccagrgcacttgcacaattgggcaaatgttcaaagaagtcaaataagtaatcggggatgttccctgagttgatatataagcttttaccttgaaagaaagcttcaaattcttggctcagggctgatttggatgtactctcttgatataaatggatgccacactctacaaaggaattgatgtttatggctttcagaatttcttgctcagtggtgtttttcacactttgcaaagattcctgtctccagagaggcctcttggcgatggaaagtccgagaaggcagccgtgttgatacactgctgcgaggtgcttcataacagccctggtggcttccacagatgacccacaggtgtaccggagcaggctgc

SEQ ID NO: 886506 - DNA, 619 bp, Homo sapiens
tggattatctttttgttttttgccttgttttatgtatgtgtatgtgtgttcatactttttattcaacgccaaacataaaggaacagtagagactgaggtaaatagtatttatacccagaattaagcttgccttttctaccagatcataagttgggggctgggggaacaggctagatttggggtttgttttactgaattaacttgtaatgcatcacactcctcagattctttccacgatgagctgctgctgccttgtgcttactgtgaggcctggagggccagaggggctattccttgtttcttctctactctcagctctcagcatgcctgtgccacatgcgtggttctctctgtgtgctccccagcagtagagaccaactcatcccggtttgcggggaacttttgcagtttaagcatggaaagtcctgtgtcccaggaaacccctcagtctggggcagaacwgggtgcttggtcaactgagtatctgaggctcccagggattctaaactcatgctaggccccactcaactattgataatttgttgaaatttcccttcttttcttctttgctcttgctcactattgggtgtgaggtgtatgctggacttaggatagttcc

SEQ ID NO: 886507 - DNA, 560 bp, Homo sapiens
aatcagagtgtggtgttttccatccttataaggtcctgtctccttgtttacccaccccttcttggattatacgattatacagacacagcactctttttcatgatgctccaaccctaaaggtgagtggaaagcacaggagtctgtaactcccctggacccagaatcaaactgaaatgagatggtttgatttggagtcargattaacgtggcccaattgagaagtcaagtaaaacctggggggagattaagccaagaaaggagatgccagctctctgccttccttgccagatggcaggtgtgtgtatgtgtttatataatcaatgcccacacatccggctgtgacttctcactcagagttatatgaacattgcaggggttcacaaactgtctggagatctaattaccagtttcataagcccaacagagtgccagccacagaaagcagccaggagagggaaggaggaggggtgcaagtgctgagcaaggccacgttgttattaaatgctacattcagcacctgtgccatgggctgagcctgccagtctccaagggaaagctgc

SEQ ID NO: 886508 - DNA, 674 bp, Homo sapiens
ctcaaactccatattcaactcatcagtaaattctttctctggtatctcaaaagcattttcaattaactctgtaactcaactctacgcccttaattttcagtacagatgctcctcggtttatgatggtgttttctcctgatacacccatcacaaattgaaaatatcttaagttgaaaatgcwttcgatacctctaacctactgaacatcataggttagcttagcccaccttacattaatctatagttgggcaaagtcatctaatacaaagcctattttataataaggtgtcaaatatctcatgtaatttattgaatactgtactgaaagtgaaaaacagaatggttgtatgggtacttgaagtacggtttctactgaatatgtattgcttttgcaccaccatagagttgaaaaattgcaagtcgacctattgtaagttggagattgcctgcactgccatctctcatctggaaactacagtagcctccaaaatatgcttcctgcttcccctctggtccctcactgatccttgatcacagagcagctggaatgatcatcaaaacgcatccatcagatcatctgacttttcttctcaaaactttggatggcttcccacatctcttacaagacatcctaaattccttaggatggcaacatcttattccctgcttcctgt

SEQ ID NO: 886509 - DNA, 542 bp, Homo sapiens
gtcggcttttcctgaaaactttaacctttttttttttttttcaaagagacaggcttttgccatgttggccaggctggtcttgaactcctgacctcaagtgatctgtctatctcggcctcccaaagtactgggattataagcatgagccaccgcacccagccacctctttttttttttttttcaaacaagaatctayacatacgtaactactatggttacaaaattaagatttaaaaaactgtaaaaagtggtaccaccaaaataaatttgttaattctcacaattgactttatttcatccaagccctctagttatttttctaaacaactcaatattccaagttcatctcccaaagctgtgaccacaataatgaggagtacgtagctcccacttctggtcttaccctggtcatttacaatgtgactggaggagcatcaactgagactaaatataaaagcacacgataattactgacacattactcaggattctatcttgtgagaaactcaacattgaagtatatacagagactttcacttcca

SEQ ID NO: 886510 - DNA, 636 bp, Homo sapiens
aagggaggaggctcggagtctccggtcaccacagccgatttccctgaagcctccgcagggggccacccccacagagttttatatgctaacagttcttaaattcggagtcctgtgggaaggtgggaaagttaggtatatacactttttaatgtttttgtttttgtttttttgttctactcaaaaagtcattggtacctaggtaacacacttaaagaaaggcacactttgtggctgggcacagtggcttacacctgcaatcccggcattaggggaggccgaggcgggccagtctcgcttgagcccaggaatttgagaccagactgagtaacatagtgagaccgcatctctacwaagaaaaaaaaggttagccaggcgtggtggtgcgcacctgtggacccagccacttgggaggctcaggtgggaggatcacttgtacccaggtggttgaggctgcagtgagccgtgatcaggccactgatctccagcctgggtgacagagtgagaccccgtctcaaaataataacaataaaataaaggcacattttgagaacagaagatgtttctgagtttcacatgttgccatatcctgtggacagcttatagtgggacaccagggcagatattgaagtttgatgt

SEQ ID NO: 886511 - DNA, 636 bp, Homo sapiens
aagggaggaggctcggagtctccggtcaccacagccgatttccctgaagcctccgcagggggccacccccacagagttttatatgctaacagttcttaaattcggagtcctgtgggaaggtgggaaagttaggtatatacactttttaatgtttttgtttttgtttttttgttctactcaaaaagtcattggtacctaggtaacacacttaaagaaaggcacactttgtggctgggcacagtggcttacacctgcaatcccggcattaggggaggccgaggcgggccagtctcgcttgagcccaggaatttgagaccagactgagtaacatagtgagaccgcatctctactaagaaaaaaaargttagccaggcgtggtggtgcgcacctgtggacccagccacttgggaggctcaggtgggaggatcacttgtacccaggtggttgaggctgcagtgagccgtgatcaggccactgatctccagcctgggtgacagagtgagaccccgtctcaaaataataacaataaaataaaggcacattttgagaacagaagatgtttctgagtttcacatgttgccatatcctgtggacagcttatagtgggacaccagggcagatattgaagtttgatgt

SEQ ID NO: 886512 - DNA, 671 bp, Homo sapiens
tctgcttggtccagaactaagttcaagtcctgaatatccttgttaattttctgtgtcattgatctgtttgatattgacagtggggtgttaaagtctcccacaattattgtgtgggagtctaagtctctttgtaggtctctaagaacttgttttatgaatctgggtgctcttgtattgggtgcatatatatttaggatagtcagctcttcttgttgcattgatccatttaccattatgtaatggccttctttgtctcttttgatctttgttggtttaaagtctgttttatcagagactaggattgcaacccttgcttgttttgctttccatttgcttggtaaatattcctacatccctttattttaagcttatgtgtgtctttgcatgtgagatgagtctcctgaatacagcacastgatgggtttcgactctttatccaatttgccagtctgtgtcttttaattggggcatttagcccatttacatttaaggttaatattgttatatgtgaatttgatcctgtcattatgatgttagctggttattttgcccattagttgatgcagtttcttcatagtgtcgatggtctttacaatttggtatgtttttgcagtggctggtactggtttttcctttccacatttagtgcttccttcaggagctgttgtcag

SEQ ID NO: 886513 - DNA, 659 bp, Homo sapiens
tggagtacagtggtgcaatctcggctcactgaaatgcccacctcccaggttcaagcaattctcctgcctcgacctcccaagcagctgggattacaggtgcctgctaccatgctcagctaatttttgtatttttagtagagacagggttttgccatgttagccaggctgatctygaactcctgacctcaggtgatccatccaactcggtcccaaagtgctgcaattacagaccccatgcctatgtcttgagtggtattgcctaggttgtcttccagggtttttatagttttgggttttacatttaagtctttaatccaccttgagttgatttttgtatatggtgtaagcaaggggtccagtttcagttttctgcatatggctagccagttattccagcactatttattgaatagggcatcctttccccattgcttgtttttgtcaagtttgtcagagatcagatggttgtaggtgtgtggccttatttctgagctctctgttctgttccattggctctatgtgtctgtttttgtaccaggaccatgcttttttcattattatagccccatagtatagtttgaagttgagtaacgtgacacctccagctttgtcctttttgcttgtgattgccttagcttttcaggttcttttttggttcc

SEQ ID NO: 886514 - DNA, 662 bp, Homo sapiens
tagatggtcaccattgcacatgtcctctgctggcacctcttcctcttgtccaactcccttctggtcctgtgaccctaaaggttatctcatgtctagggctgcaaacttgtgtctccagcccagacctcttcaactaagcaccaggtctatccacttatttatgtaaggtttctctaaagtgtctgatagacctttcagattcacttagccacacatcgtgcaatctcaccccagaacttgtatttccttcagttatcacaatcttggtaaatggcattttcacctggttcctcaggctaaaaaccaaagaatcttccttgattactcttcytctaatcctagcctatgcattcagtttatcaacagatcaagtgggtcctgcagcctcatctctaaactaaccctgagactgttcccctctcttcatttccatgtctaccatacaatccaggcattgccttcgggtacttggactgctgtgggtttctctccctctgttcattgcttctactctcatttcccaattttttttttacacagccaccatcatgatcttcttacaacattaatcagatcacgtcactcccctgcctaaattcatcaatggtttcccatcacacagggtagaatctaaactcctcaccgcatcccacaaactccaa

SEQ ID NO: 886515 - DNA, 578 bp, Homo sapiens
ggacagagagcccagaagagattatttggggaaagaagatactaagcttagtttggtgcctgattttttttttaatggttactagatttagaagaggattttcttttttctttatgtttttcagcctccaaccttttagacaaagtttcttctacatggctttattgtatagaattaatcttcaatatctgtatctgcaacattgtcctcatactatagacccagaattcctctcacaggcagctgctcattaggaaggtctaattaggaactctctttgctggcagtggtggagaagtttcytaaggaaactccaggcttccaaaatagtaggtatggatgtagatttttcacaaatggaacatggggcacattataccctgtttctacagggagcatcagcccaggtgatattcaagatgatggaaataatgtgaacagatgagaagaggaccaagagcagagcccctggaaaatccagagtgagtgaggtgattctgaaagctgtgaacagtagaaaattcttacagcccatatatggatgagtgaaagcagtaagagcaaatgaagaagctgca

SEQ ID NO: 886516 - DNA, 580 bp, Homo sapiens
actggctctgacctttaaaacttctattaaacaaacgtctattgagaacctagtggtgccagtagatagaactttgaaaaagacagtcaaagttcttgcccatctagagactgtattcttgtggtaggagggagaataaacaagtgaacaaaaattaaattactaggttagatgagggagaagcagcttctttgataattctcttaggaaaagattctctgaagaaggaatatttgaactgagacttgaaaggtaagaagaagccagttatttaaaaagtcaaaagactattccagttaagcacaaaggtgacaaagtgmgaaagaacttggtgaatgtctggggaagagaagggagtccagagtgggtagaattaacaagcaattataactggaatatttgatgaggctggagatgtagataagtgtcaaataatgaaggactttatagaacatggtaagaaatttgtattttattacaggagtatgggaagccattgaaggcacgtgagagacgtgatatgacatacttgaaaaagatcattatggctactgtggaaaaaatgaagcagaagggaagt

SEQ ID NO: 886517 - DNA, 681 bp, Homo sapiens
acttatgatgtgatctgaaaccagtacagaataaaagatcctatatctgactttacactattgtaggctaaaactgtattaatcttaaacaaaaattttaagaagacattatcacaaagttgcctaatattgactgcttataattgactgtgtatatatgtgtatatatatataacattgagttatatatagttatataatattgagttatagttacatgtaacattaagttttttctgtatatatgtacagttgtgtgtrtacacacacacacacacacacacattcaaaattttacttataactaccatgctaaatttcatctttttagtctgagtctgtctttaggaattctattcttcccaagacaaaatcatttatgactacatatttataaataggcagcagtgatttttcttaacaaaccagtctttgtgatccatcaggtaatattgaaggctggaattcttttggaattgtcaagtgaaagaatttaacatgagctgttataggaagaaactttccaggatattataaaactgtatgaaattacttcttcataattttttggaatagttcattctttttatcaatttctctaatatattgattatagaatcaaaatcagtatgtttatctttctaagtagattgttaattgatcatcagggtaatttcagct

SEQ ID NO: 886518 - DNA, 647 bp, Homo sapiens
aaagggaaacagaccagctaggccgctcttgaaaaattggtattgcattcaaaggattttgtgatatatggggagaacagaactgtgaagaacacattccaggtttctgagttgatgagttggatagataatgcttttcactgggtatatatactagtcatttagtaaatgtttatttggtaattttgataktggtcacaaaattattttgtttcttactttagcatgtcttttagaataatgggttcctctagtaaacacttccattaaactaatctaagctcttatttgtattttttgagcttctccatctcctcccatctcatcattataccagagctaaggttgccttcataaggtaccatttctgttaaataacttcagggctcaagaatttaaagtgactcctttttgcctgcagtcaaattcttgtgtttgaggttcaggtccaactgacaggtgtagtcactgagtatttacttattggttactggtccatctttgcgatccatttttctttgttttttgctcatggtgcttttcttatatgttagctatgtttaactgtaagctggttttctttctttttgtttttgaaaattatgggacgtttttgaggtttacaatgaaagtatagtcctttggta

SEQ ID NO: 886519 - DNA, 613 bp, Homo sapiens
ttcacattttgccctatttctattcagtatgtttacatatcatatacaagtacacatataaattgagatcatactgtcattacatcttagggttttgatttattttcaggtaatattagctatgagtgttatagaactgaaccagggtctgcttgcctggcacagtaagaccaaatgtccataccgaggtttgcagcggtagaaaggaaggtgtttatttgcagggctccaagcaaagaggttcaggcagctggtgtttaaatcctgaccccactcctctccatggcttgcaggtaagggtttttaaaggcaagggtaaatttcaggaaaggaggaattataggcaaaatcataaatcaatataaggaggttacacattggttttgrcctaaaagcgtgggatatcttgaagtgagggcttacaggtcataggtatattcaaagattttctgatttgccattggttaatgaagagaagctttgcttgaaaatttggggtcagcagaaaagaatgttagctctggttcatgaatgtgactttcttcaggctcctcaggaagaaactgagaacaaagaatgacggtcagagttcagtccccagttcccttttatc

SEQ ID NO: 886520 - DNA, 664 bp, Homo sapiens
aagtgactcaaatccttaatgattttattttaaaaataatttataaagcttttacaataaattctaccaccaaataatttctaacccacattatcattatttcatcactgtgccaacattaaccataaactgatctatatttctagtatctacaaaaatcaacaaagcagtgataataaacatgtggcttgcccttataaggcaaagatggtgatgaaataaattatgcagcaaatggaggcaagttgcattagtcacagacattcatttcaggtcacttttcatgaaaaaaattaaaagacttctctatgcataaacacaaataaggggacagctcaaaactgaattgacatctggataatggacagtcagctaggtttactcacaaactgactggttgttacccaggacagttttctgtgtcagcaggttagcaatttattcaattctgtgaatcatcatttcacctyaaaccttgtgaaaactataaatatccaaaatgtattgcctaggatctaaaagacttctcgtatagtcaggaaaccagatctctggcttaaagtgtttacacattattgttttagtcacatggaatagtttcacaatattctcagggatatgtaaattagatgagaaaatgacattttaatgtgctatggatttt

SEQ ID NO: 886521 - DNA, 667 bp, Homo sapiens
ttccttgtctgtaaaggattttatttcttcttcactgatgaggcttagtttggctggatatgaaattctgggttgaaaattcttttctttaaaaatgttgaatattggcccccactctcttatgccgagagatccgctgttagtctgatgggcttccctttgtgggtaacccgacctttctctctggctgcccttaataktttttccttcatttcaaccttagtgaatttgacaattatgtgttttggggttgctcttctcgaggagtatctttgtggtgttctctgtatttcctgaatttgaatgttggcctgccttgctaggttggggaagttctcctggataatatcccaaagagtgttttccaacttggttccattctccccgtcactttccagtacaccaatcatagatttggtctgttcacatagtcccataattcttggaggctttgttaatttctttccactcttttttctctaatcttgtcttctagctttatttcattaatttgatcttcagtcactgatatcttttcttccacttgattgaatcagctactgaagcttgtgcatgcatcacgaagttctcgtgctgtggttttcagctatttatcacgtttgtgataaattgaccttgttattttgagatatgttccaccaatact

SEQ ID NO: 886522 - DNA, 594 bp, Homo sapiens
ctctcaccatacactgaggtcactgccattggcatccccatgttgtaggttagagaaccgagggtgctgtgaagcttaggtagtttgcccagggtcagttagtagggaggtgatagactagggtccaaactcaggtggtctggccctggatcaagcactgtctctgtttcgttctctttccctctcctttccctttcttgttgcttccctttatctctcattgacatggtgcagggcttatacttgatggcttttaaaagtcattaccacagagattctagagcttwgtatttacagctacagtcaaataagcagttcaaaaagaaaaagtttatttccttctctcattaaaaataaaaatatctggagaaaagcaacccaggcccggtaaggtggctccctgatgtcaacaggaacccaggcccttccatctttttttttttttttttttttttttttgacaagttctgactcctgtcacccaggctggagtgcagtggtgcaatcacagctcactgcaaccttgacctccccggctcaggtgattctcctacttcagcctcccgagtagctgggactatacaggtacatgcc

SEQ ID NO: 886523 - DNA, 540 bp, Homo sapiens
tcatggcttttgataactcttttgcctttcccagaaacgtgggtttgggaagttgctatgtcctggaaatcacaaagtatatatttatcttgtaacactgccttcttggtgttgcataaatgctagaagcaccatccctctcatgaagactttcacctttgatgcctactgcctagaatgcttctgactgggtcttcacttggctcattcccaccctccaggtatcggctcaccggcygcccttgcagacttctccaactgtccaatgcgtccctccgtttttcagtaccttatcaccatgtgtattttactttgagcattcatctctaatatatggtttgcaatcactttaattacttatttgtatccatgtttgttgtctgttttcacagagtagaatgtcaactcatgagatgagagatcttgtttcagtgcctggcctacagcattagctcaataaatatttattgaatcattgaatgcatccagactttcagaaatgattcctggttataactcaggattacaaatgactttgct

SEQ ID NO: 886524 - DNA, 664 bp, Homo sapiens
aagtacacttttgtgtactgtattagtctgttttcatgctgctgatgaagacatacctgagactgggcaatttacaaaggaaagaaatttaatggagaaatcacagttctatgtggctaggaaagtctcacaatcatggcagaaggtgaaaaaggyacatctcacatggcagcagacaagagaagagagcttgtgcaggaaaccccccctcttataataaccatcagatctcgtgggacttgctatcatgaaaacagcaagggaaagacctgccgccatgattcagttacctcccactgagtccttcccacaagactgggaattcaagatgagctttgggtggggacacagccaaaccatattattccacccctggcctctctcaaatctcatgtcctcacatttcaaaaccaattatgtcttcctagcagtaccgcaaagtcttaactcatttcagcattaactcaaaagtccacagtccaaagtcttatctgagacaaagcaagttccttgtgcctatgagcctgtaaaatcaaaagcaagttagttacttcctagatacagtgggggtacaagcattggatgaacacagccattccaaataggagatattggccaaaacaaagggactacaggcctcatgcaagtctaaaatccagcggat

SEQ ID NO: 886525 - DNA, 622 bp, Homo sapiens
actccagacctgcgtatctgtgagtcagttaaacctctttcctttataaattacccagcgtcaggtacataattataacagcttgagaatcgactaatacaggtggatatgttgattatctaaggccatggcatgggtctatggataatgtcaggctcacactcaatgtatactttacattttgttgcctctataatattgattagagatgaaatgcatcaaggaagcatttataatactgaaaaaaattatcataccactgtccacatgtgtcaaagaaatatatacattccaagatctttaagggtaactaaaggaggggaaaatttaaacaaattgataatattgatttcattttttcaaatgcatgaagtgattaccttttcaaattacagtaaggaaaaaattwaaaaaacaaatcagtatgcatactttgagattacaaataagaattatgtgaaactgtgagagatgacagatgaaaaataaattatattaaaagtcacataggcctttttctaacccaccttcttggaatgatttaaatgaacaaggaaagacattcctcagcccttgagttaaaacttaagacattattattattacaattacagaaaaacaa

SEQ ID NO: 886526 - DNA, 597 bp, Homo sapiens
ggtgaatacggtgagcaaaattcagcaaaataaaagtcccaaacagatctctaatatatattactcaatccaattgacctataactcttacaaattttcaatccaagcatcacaggcttgaaaatgtaattgcttttaactgctccctactgtcccattttaagctatccatctgtatttctgctttggagaaatgtagagaaaattaaygtgactgtgaatcaaaatgataggtataaaacagtataatatttgtggcttttgtactgactttttgggttgaaggaagaaaaatacaataattgagttttatttcttgtcttactcccattcacacttcaaaaattatcttcaacattaaaaaagatacaaaaatctctagataacctgtgataaagggaaaatagttccttaaatctacatggttaatcctaggcacttctaatcagagattacaataaagcaaaatagatcaccattttgttagaagtatgtcagtgttattacatccataaattataataacttttttaagtttaaaatgaggccattgtgatttgtattgaatagcttctttgaaattataatccagtgttc

SEQ ID NO: 886527 - DNA, 599 bp, Homo sapiens
aaccttgaccagagatgataattgggaataactgtagtttcttttcagagttagagacgaatgctgaaagaccatgaaaaatctcagagacaagtcatttctgggacaataaatagcggaagacagcatttaacaatgaattaagggaaattccattctytcctgtatttcagcactgcggaagtctacgaagcagttaatgttaagaaataccattgactaaaaaaaaaaaaatgattttctgcattggatgttaaaagatatgaagcaagaaattgaccattcagtggaacaatgtgaatcctaaattatctaaataaaaacaagaggatcagttaattcagaaaaaagaattgtataaattctggaactcggtagatatattctccttaacaaattctggcaaagaattctcccaatcacttattcattagggattgagaattgacactagaaacagataacttgtgcttaatattgtgcttaagctttaagcatagaaaatttccttgatgcaagggggttactgtgtcacctcaagttaaaaggcaatttaggaagtgatatgtaactagcagtttgaaagtattctaaatatt

SEQ ID NO: 886528 - DNA, 599 bp, Homo sapiens
aaccttgaccagagatgataattgggaataactgtagtttcttttcagagttagagacgaatgctgaaagaccatgaaaaatctcagagacaagtcatttctgggacaataaatagcggaagacagcatttaacaatgaattaagggaaattccattctttcctgtatttcagcactgcggaagtctacgaagcagttaatgttaagaaataccattgactaaaaaaaaaaaaatgattttctgcattggatgttaaaagatatgaagcaagaaattgaccattcagtggaacaatgtgaatcctaaattatctaaataaaaacaagaggatcagtyaattcagaaaaaagaattgtataaattctggaactcggtagatatattctccttaacaaattctggcaaagaattctcccaatcacttattcattagggattgagaattgacactagaaacagataacttgtgcttaatattgtgcttaagctttaagcatagaaaatttccttgatgcaagggggttactgtgtcacctcaagttaaaaggcaatttaggaagtgatatgtaactagcagtttgaaagtattctaaatatt

SEQ ID NO: 886529 - DNA, 599 bp, Homo sapiens
tgatccagtaagatgaggtttattgttgcatctgaggcatgaaaaactgttgcctttgagggactgaaatgaagtatgtctaaagaacagagtaggaagagataaaaatgaagaagcaggtaagagctatattttgcctgttctacctgatattattcaaagttagggctttccagtttcccttgatgcttttctctcagttcctatccttctccttttatttttaaattttctgaattaagacactggatattgatgaatctctctctctctctctgccccccctccccgctccctccctctctctgtcccatctatcaattgtgaaaagagaataaatcttgaaaccacaaaaccactaagccaaatgggaaagtcaagctgggaactgcttagggcacacctgcctctcataacrtagctacgaagctaagaagcaacacaccgccttcacaatttgcccacaagaaattccttgtggacaaaatacagacagaactcaatcatccctctgaggctcacctgagacaaatgcatatctgattgcttcctctgccctgtcttttatgtaaaaatgcagattcatggctgggcacagt

SEQ ID NO: 886530 - DNA, 599 bp, Homo sapiens
tgatccagtaagatgaggtttattgttgcatctgaggcatgaaaaactgttgcctttgagggactgaaatgaagtatgtctaaagaacagagtaggaagagataaaaatgaagaagcaggtaagagctatattttgcctgttctacctgatattattcaaagttagggctttccagtttcccttgatgcttttctctcagttcctatccttctccttttatttttaaattttctgaattaagacactggatattgatgaatctctctctctctctctgccccccctccccgctccctccctctctctgtcccatctatcaattgtgaaaagagaataaatcttgaaaccacaaaaccactaagccaaatgggaaagtcaagctgggaactgcttagggcacacctgcctctcataacatagctacgaagctaagaagcaacacaccsccttcacaatttgcccacaagaaattccttgtggacaaaatacagacagaactcaatcatccctctgaggctcacctgagacaaatgcatatctgattgcttcctctgccctgtcttttatgtaaaaatgcagattcatggctgggcacagt

SEQ ID NO: 886531 - DNA, 539 bp, Homo sapiens
ccccacgagtccttgtgggaaacatccattcatgcctggcatgcattacatttgcagtcacatgcctcatctttcttagaataaaatgactcaatttaaaactaaaagcagaatcccagcactttgggagacggaggcaggaggatgacttgaagtaaggaattcaacaccagcctggccaaccaacatggtgaaaccccatctctaccaaaaatacaaaaattagctgggtgtggctgtgggcacctgtaatcctagctactcaggaggctgaggcaggagaattgcttgaacccgggaggcggaggccgcagtgagccgagatcgcatcactgcactccagcctggctaacagagcragactccatcttaaataaataaataaataaataaataaataaataaataaatcttgacgcacaagccctggaaaaactgatttttagttaaaaataatttataactcagttttgactttgaccactaaaacataattttaccaataatcaaaaaaggattaaagtcacgcattagtgtga

SEQ ID NO: 886532 - DNA, 539 bp, Homo sapiens
ccccacgagtccttgtgggaaacatccattcatgcctggcatgcattacatttgcagtcacatgcctcatctttcttagaataaaatgactcaatttaaaactaaaagcagaatcccagcactttgggagacggaggcaggaggatgacttgaagtaaggaattcaacaccagcctggccaaccaacatggtgaaaccccatctctaccaaaaatacaaaaattagctgggtgtggctgtgggcacctgtaatcctagctactcaggaggctgaggcaggagaattgcttgaacccgggaggcggaggccgcagtgagccgagatcgcatcactgcactccagcctggctaacagagcgagactccatcttaaawaaataaataaataaataaataaataaataaataaatcttgacgcacaagccctggaaaaactgatttttagttaaaaataatttataactcagttttgactttgaccactaaaacataattttaccaataatcaaaaaaggattaaagtcacgcattagtgtga

SEQ ID NO: 886533 - DNA, 610 bp, Homo sapiens
ctgagaggtatttgggagatgacaggagtgccctcacctggccccaagaaagaacttctcagtacacagtttttgataactgttttttcacctataaggaaataacaaagaattgtgcacatagggtataattctattaaactagaaattaaacccaacctgtgaagttaggaggaatcaataaggtggatgtgttagttagtaaagatattcaaatattatcttcctaccaaaaagacacctgcactcatatgcttattgcagcattattcacaatagcaaagacatagaatcaacctargtgcccatcaacagtggattggattttaaaaatgtggtacgctatacattgtggagtactatgcagccacaaaaagaagaatgaaatcatgtccattgcagcaacatggttgcagctagaggccattatcctaagtgaaataacacaggaacagaaaaccaaataccacatgttctcacttctaagggggaactacacattggctacatatggacataaaaacaggaattatagacactggggactccaaaagtgggagggaaaaaagagggcaagatgaaaaactttctattgggaattatgttcact

SEQ ID NO: 886534 - DNA, 568 bp, Homo sapiens
ctgctgttgtgccactcggctcccctgagattccttttaccatccctctgggggtatcctctgctccgtgtactttgttgctaacactggcacctgtgccttttggaagatcgtcttggccagtggagccaccttgcctaactgtgagccagaggagccttggagtttcatgccctctcccgagccttctcccttcctagcccaggaccggtgtgagcatgcagaagctcagcaccygaggtgagacagagtccgagtgttatatatattccagagctcaccatgggatcaggctgaggctggggctccacccgaaatacaccccatccttggcttcttccccttctgtatcctgctttccccgctttcttactgatttctccttcattaattagttatcttattatttctcaattgaccacttacacctgaatccctgccttaggatcagattctgatgtgattatgatagtggggaaaccccaggaaggcatttcagttaacacctcaggtgctcaggaaggagaacagcttcaactggtcatgccccagagcagaactgtcattt

SEQ ID NO: 886535 - DNA, 545 bp, Homo sapiens
aggtgtcgtggctcatgcctgtaatcccagcactttgggaggtccaggtggaaggattgctgagcccatgagtctgagatcagcctaggcaacacgttgagaccctgtccctataaaatatatatattgtgttagcctcctccactgagggagaggcagagtagttttggtctcastgtatcaggagttcctgtgacgttctgctggagtcccatcacattatgtaaaagtacggtggatgacaccagaaaatgggtggggggggggacataaatgtagcaccttccacccccagcaactccccaggccaccccaatcagagccctgcatgggaggattccactcccaaagctacgtttgcatgcacacatggcccatatttataaggttccactctgcagagtatagaactcaagtccagatgggaaagaataagtcacaactaaattcattgatgatgatgcaatcctaaaagagaatcttgggaaggtagacatatagggtacagatattgccctgaaaaattcagtgatgtccaaagcttc

SEQ ID NO: 886536 - DNA, 636 bp, Homo sapiens
gtgtatgtgcctgtgtccaaatttctctcttcttataagaacacagtcatattggattagggcccactctggtgatcttattttaacttgattacacctgcaaagaccttacttccaagtaagaccacattcatgggtactggaggttaggacttcagcatatcttttaggggtacacacttcaatccactgatctttatgtgggaacctytcaggagggggctatggcttaggtggtcatgtcaagagtgttctaaaggggaccgtgtaggagaccatcaccttgcatgaccctcccacatgattccttcccacatttcctctgacctaccccaaaaattatgctaccttgggaactggtagtcttagttttcctgcccaattttgagagagtcactcattccacccacagtaacctcaatgctcaagaaaacaaaactcataaccttggcatccacattttggaaggtggttactcccaccaccctaatttattctcagacctatttacaaaattgcaaagagacagcattttgctatcgtataattaacatcacagagtctgtaagaaaatcacaactctttgaaataccagaaaaaatagatcaagccaaaacaaaattgttatgaccagaa

SEQ ID NO: 886537 - DNA, 603 bp, Homo sapiens
tgagccctcaacctgtgggatgtgatgctatttccaggtagatagtgtcagaattgaatcagaggaaattcagccagtgtctactgcagaattggttgcttactgaatggggaaagaatccacacatttggtcacagaagtcttctgtgttgattgttgttgagtgagagaatggaaaaacactttgggtttattttcccacttagacaccctcaaaggctaccatgctgacctcaaccactgagacacctgcccactcagtgacatcccagtccatatggattttcattgtcatttcttggctatgtctttgtctggacccctctttcccgggaattccctataatccctgttatctgcctggttggctccactacagggtctgagttcactaagaatgattatgactatggtattggtctgggaaaagtctgttggcctctcagacagctytccatgaggggccatttccttgctgtcagctcagaaatttgatcttctcattgtcccagaggtgatgggacttgggaatgggactcacgctaactaagacgacgggggctgacctctcagggcagaatgccactgcattcatttgttctc

SEQ ID NO: 886538 - DNA, 617 bp, Homo sapiens
aataactgtgtaattctcactgggcaggctccaagaaagaataagaaatggtcttcatcctcgtggagcttacaatctagttggatgcacaagaaaatcacacactaaaatgataattatatagaatagcattggcattctgaggagagagagagagaccaatgttggggaaggcttgaaagaggaagtttgtaggacacataaactttggttatgctggaaagggagggaaaggccctctaaatgaggggaagagtctgggcaaaggcatggaaatagggatgctccatgcgttggagacataggaaggtggggcatgtcagtgaatatgcatctataataacatcatagaggagatgctgtagaaaccgtagtaataaaaatgtgaggytgtccatggcctttggctcatctcactctaaatcgtaatcagggtatctcccctgccaggtaattatctcaccttaaattggactcggaggaaaaaaaaagcaaggctagtacaatacaggctgaagacaagggttttgaggttaccttattcactgttaaaagcattgtgagggcctgctacaaacaagaatccatgtataccaagatggatgtcattgagtgct

SEQ ID NO: 886539 - DNA, 571 bp, Homo sapiens
ctgattatggaagcccccaagccaaggcggcccctcggctctgcctgcggaaagttttcccttcacctgcgcagaccaggccgatgtggcctccagaatggaggggtcagcctaggttgcctgtgacaactctgaaaggccttaggaggcacagcatctcaagtgcacacccgagtatggcgtgatctgcaaggggaataggggctggggggagacataggctttgaagatgaatcaggctggagcagggtggaagtgggctcagggagatggagcaggaggggttggtcagggaagagggagctcaagggaggagayataagcgcagagagtgagatagatagggacccagcagcaagtgggctcagagaggggctgtggtgcagagagaatgagactcagatgggggctgtagactcagagagagagatggggacaaaaggggagtgggggctcaggcaaagggatgaaggcagagatgggaaaattgggagggaggggagcatccgttttgggagggaagtgtcagttttgagcacacacagtcctctgcagcttgaggaggaggaag

SEQ ID NO: 886540 - DNA, 571 bp, Homo sapiens
ctgattatggaagcccccaagccaaggcggcccctcggctctgcctgcggaaagttttcccttcacctgcgcagaccaggccgatgtggcctccagaatggaggggtcagcctaggttgcctgtgacaactctgaaaggccttaggaggcacagcatctcaagtgcacacccgagtatggcgtgatctgcaaggggaataggggctggggggagacataggctttgaagatgaatcaggctggagcagggtggaagtgggctcagggagatggagcaggaggggttggtcagggaagagggagctcaagggaggagacataagcgcagagagtgagatagayagggacccagcagcaagtgggctcagagaggggctgtggtgcagagagaatgagactcagatgggggctgtagactcagagagagagatggggacaaaaggggagtgggggctcaggcaaagggatgaaggcagagatgggaaaattgggagggaggggagcatccgttttgggagggaagtgtcagttttgagcacacacagtcctctgcagcttgaggaggaggaag

SEQ ID NO: 886541 - DNA, 646 bp, Homo sapiens
gctggagcaggaaaagtgccctgtgcctggtaccatggtacatgaaacatctagctgtgccatatgataggcaagtgctcaagtaatgctgaggacatgtcaaaagaccaaggtgccaacttaaagggactcccaatggccaaatctgggacaacttgagtatcaaaataatgacagtaacagattataagccatgaaatataaatagtcctgatatacagacacatacacgtattacatacacacatacatacatacacacatgtgcagaaagagaaagctctttcttacactagaatgcccaataataggtgtggaaggaaggatgcaactagtatggtaataattgattcaaacaagaagcattactagatgctaaaactaaagccattgtgtgaaaayttgttgaggagtaggatatttacatagtcttaaagagtctttccacaagatacaatacctgcaaaaggaaggagagtgactttatagcgaagaaacatggcagagactatcttagtcgagtgatcaaaggctgcatcactgttactggacaaactgacatgaggctcctgatgggatgcacagggaagagtgaaaaatcacttctgtgatgttcctgccagagatgcaaaactgaaatctaatc

SEQ ID NO: 886542 - DNA, 556 bp, Homo sapiens
aagactctgtcttgttaactgttatatattcagcaccaagcacagtgtctgccaaataatactactaaagaataattattgagtgaattgataaatgaacaaataaatgaatgcatgacaaccaaaggaaaacactggaagagctcaatgcctatttygtgtgctggttttattagtcagggtcctccacagaaacagaaccaataggatttatatttgtgcatgtgtgtaaagaatatatatgtgtacacacacacacacacaagatttattacctgatttacaaacacagatgattatggatattggcaagtcccaagatctgcagagtggagatttgggtggagatttggtctccaagctggagacctaggagagcccaatgtttacttactatccaagtccataggcctgggactgatagctgatggtacagttccaatcctaaggctggcaggctcaagacccaggaagaactgatatttcagtttgagtccaaagtctggaaaaaaagccaatattcctgtttgaaggccatcatacaggaaacattctc

SEQ ID NO: 886543 - DNA, 592 bp, Homo sapiens
tacactgctcaggtgcacaaaaatctcagaaatcaccactatagaattattcatgtatccaaaagccatttgtaacccaaaagctaatgaaataaaaattaattaattaattaaatttttaaaaccgtttatttcttgctcacacaaaatccaaagtggatgtttctggttgggaggtgctttccatgtgatcattcaggactctagtttccttrcatcttatggctgcaccattccctgggcctcagactcctcgttgggccctctgcagtcagctgccagatcagggcagagcatgcggaggatcgtggaggaggctttcacagccacttctgcacatagtccattggtcagaactgtcatgtggccacatctaactgcaaagacaatgaggaaatatattctagctagatgctcaagaggaagaaaaaaatgggccttagccatcacatagctgtctctgcctcactgtgaaaacctggggaagttacttatctttgagcctcaatttccttgtctgtaaacaggcatagaaatgatacctgcttcaggtattattcagggggctatcgtgatggttaaatgagacagt

SEQ ID NO: 886544 - DNA, 481 bp, Homo sapiens
gggagagaatttgcctatattattctggggaaaaaataaaatatttctgtataacatcatagaactgtaaatggagatgttaaacttctctgatgggtagtttgagaaaaattttaaaaattgaaaagttttttttttttgagacggagtctcgctgtgtcatccaggctggagtgcagtggcgycacctcgtctcactgcgagctcagcctcccgggatcatgccattctcctgcctcagcctcttgagtggcgggactacaggtgcccgccaccacgcccggctaattttttttttgtatttttagtagagacggggtttcaccgtgttagccaggatgatctcaatcttctgacctcgtgatccgcctgcctcgacctcccaaagtgctgggaatacaggtacaagccaccgtgcagggccaagattattgttttaaagtgtaaaaattaatattgaattcttgtgtttatataatat

SEQ ID NO: 886545 - DNA, 682 bp, Homo sapiens
aagacttgaaagtcaaaatgatgcctcaatccatggactacagaatagatgttgtgttggcaggcatgaaaccagcatgtgtttccctgtacatctccattagaactctttagtcaccaggtacattgtcaaaaagctgaagtatttgaagtgaatctttttttctgagctgtaggtctcaacagtgrgattaaaatactcagtaacccatgcagtaaacagctctgatatcatccaagtgttgttgttccatttatagagcaggggtagtgtagatttagcataattcttaagaggtgccctaggatttatggaataacaaatgagcattggcttgtaacaagacagtcagcctgtcctttaaatctttttctttttcttgctataaggtctcactccattacccaggctgcattgcagtggcatgatcttggcccactccatacttgacctccttggccccacaatcctcccacctcagcctcctgagtagctgggactagtagcatgcaccaccatacatggcttatttttatttatttatttatttattttagagacagggtttcaccatgttgcccaggctggtctgaagctcctaagctcaagccattcccccacttcagcctcacagaatgctgggattgctggcgtgatccactctgtctggcctctaaattcg

SEQ ID NO: 886546 - DNA, 682 bp, Homo sapiens
aagacttgaaagtcaaaatgatgcctcaatccatggactacagaatagatgttgtgttggcaggcatgaaaccagcatgtgtttccctgtacatctccattagaactctttagtcaccaggtacattgtcaaaaagctgaagtatttgaagtgaatctttttttctgagctgtaggtctcaacagtgagattaaaatactcagtaacccatgcagtaaacagctctgatatcatccaagtgttgttgttccatttatagagcaggggtagtgtagatttarcataattcttaagaggtgccctaggatttatggaataacaaatgagcattggcttgtaacaagacagtcagcctgtcctttaaatctttttctttttcttgctataaggtctcactccattacccaggctgcattgcagtggcatgatcttggcccactccatacttgacctccttggccccacaatcctcccacctcagcctcctgagtagctgggactagtagcatgcaccaccatacatggcttatttttatttatttatttatttattttagagacagggtttcaccatgttgcccaggctggtctgaagctcctaagctcaagccattcccccacttcagcctcacagaatgctgggattgctggcgtgatccactctgtctggcctctaaattcg

SEQ ID NO: 886547 - DNA, 646 bp, Homo sapiens
acagcaaccttcagtcaagacacacggctggcccatagcaaccacacagggaaggcccagggaataagtacacagaacactcttactccccgcccccctctgatttctggccatacagaagaccaagggcattggcagagcctatacaggccagcctttcagggcagtgagcagggtggaggtgggtaaagatggattgaaagggtcgcgtgaacaccactagcacagctctcaatctgcccaggaagtaagcactcaaggcacgagatgttgctccatccatgggcatcaacttggatatacrtgttcagccctcatcactgggacactaaatggggctttagagtcacatgccacagccatcaatgtctctcacagacctgtagctgccacagttgagtgatctgctggctgaagggaaggccacccacaggtgacactcccaggacttccctgggcctaccatgttcaccttgagactgtttagactttgcatcaatgacagggcaagaggcagtgatgtttccatcctgttagaaaacagaggtctttaaaaaattttttccataggtttttggaaaacaggtggtatttgggtacatgactaagttatatagtggtgatttctgagagtttggtgtaccca

SEQ ID NO: 886548 - DNA, 652 bp, Homo sapiens
gagggaaaaactataaatcttaaaaataactaagttcagcagtttctgtagacaaagatggtaatcaatcaattcatttcatgttgataacccttcacacatgaaaaatatttttattcatattagcaacaaaataaatttatttatttatttgagayaggatctcactcctgtttcccaggctggagtgaagtggtgtaatcatggctcactgcagcctccacctcccaggattaggtgattctcctacctcagcctcccagtagctgggactataagtacgcatcaccatacctgagtaatttttttgtattttttacagagataaggtttcatcatgttgcccaggctggtcttgaactcctgacttcaagtgatccgtctcctcttagttccccaaagtgcttggattacagacatgagctactgcacccagcacaaaataaatgtaaaagtggaaagttaacaaagtaaggacaagaaaaaagtggaaaaaaataactgtctggaaaaatagaaaaaaatattttgatggatataaaatatttgaagaaacaattagaaagcttattcttgcaagcttgtcagttttactgaagttgctaccctgttgcaattcccatcgaaatcttttgggaatgttattaaatct

SEQ ID NO: 886549 - DNA, 574 bp, Homo sapiens
gtctaagtcagtgggcttaaactatactcagcaggcctgcttcagggactcagcaaggagaggcagttgaaaaatgaggtggcacatgcaagtctcagagttctcaaatgcacttagtctagtggatttccccttttaatgtgctgtaaataataaaattcatgattttccttgaagacagtattgacattgctaatatgaaatacacagatgttttggaatttttgtataayaaattgagtgttcttttattccaacttttagcatcaggttaatacagccaatatttatttcataaacttaatttctatgctttattccatcatctaaagctattatcataattttatttttatgtattttttaattttaatttttaatttttgtgggtacagagtaggtgtataatatttattggttacatgagatgttttgacacaggtatgcaatgcgtaataatcatatcagggtaaatggggtatctattgcctcaagcatttattctttgttacaaacaatctattttaaacaaaaataataccggatccatgctttactactgttgaaacctctt

SEQ ID NO: 886550 - DNA, 695 bp, Homo sapiens
aaaacctagcataaatgggtaaatacctgtaaacataaaacctcccaagattgaagcaggaataaattgaatcccagcgtggaacaataaaaagttctgaaattgaatcagtaattaaagcctaccaaccagaaaaagcctaggaccagatgtatttactggtaaattttaccagatgtacaaggaaaagctagtaccattcctactgaacatattccaaaaaattgaggaggagggattcctccctaactcattttatggggccagcatcattctgataccaaaacctggcagaaacacaatagaaaaagagaactgcaggctaatatacttgataaacatagatgcaaaaatcctcaacaaaatactagcaaaccgaatccagcagcacatcaaacatctaatccaccatgaccaagtaggctttatgcaagattgtttcaacacatgcaaatcaataaatgtgattcatcacataaacagaactgaaaacaaaaaacacatgatcatctcaatagakgcagaaaaatctttcagtaaaattaaacatcatgttaaaacctctcaacaaactaggcattgaagaaacatacctcaaaatagtaagagccatctatgacaaacccagagccaacatcatacagaatgtgcaaaagctggaatcattccccttgaaaactggagcaagacaagaa

SEQ ID NO: 886551 - DNA, 587 bp, Homo sapiens
aaagcattggccagacctttcaaaactgaaattacctctttccctattagtggcaaaatagggaaatgcatggcctacatttaggaatcaccaccactttattgtgctacataaacaaagatccatcttgtaaaaactagagtttttaccttaccttaaatagcagtaaaagctgctcatctaatggccattaggaatatggttttacacactcccatagctctaaatttcactttagccagcataggaagagtgtgagckctgaatagcaaaaaataggcacattcccaaaaaggaatggctaaaggttgaggaataggaatgagaaaggtagatgtttcaataaaggggtagagagagcttcattatgatggaactatctgtaccttgattgcagtagtatttacacaaatctgcacatgtgaaaaaattgcttggaactttatatacacacagtgagtgcctataaaactagtggagtatgaataaattctttggattggaaaaaaagttacttgttttcttacatatcaagaatgaacaatagcataaaagtaaaatacttaggtataaatatagctaaatat

SEQ ID NO: 886552 - DNA, 587 bp, Homo sapiens
aaagcattggccagacctttcaaaactgaaattacctctttccctattagtggcaaaatagggaaatgcatggcctacatttaggaatcaccaccactttattgtgctacataaacaaagatccatcttgtaaaaactagagtttttaccttaccttaaatagcagtaaaagctgctcatctaatggccattaggaatatggttttacacactcccatagctctaaatttcactttagccagcataggaagagtgtgagcgctgaatagcaaaaaataggcacattcccaaaaaggaatggctaaaggttgaggaataggaatgagaaaggtagatgtttcaataaaggggtagagagagcttcattatgatggaactatctgtaccttgattgcagtagtatttacacaaatctgcacatgtgawaaaattgcttggaactttatatacacacagtgagtgcctataaaactagtggagtatgaataaattctttggattggaaaaaaagttacttgttttcttacatatcaagaatgaacaatagcataaaagtaaaatacttaggtataaatatagctaaatat

SEQ ID NO: 886553 - DNA, 607 bp, Homo sapiens
ggcaattgtaacacaattataagcacctgtatatctcaacatatgtaaacatagaaaagatatggtaaaaatatggtattataatcttatgagagcactgtcacatacatgtttcaattttcaccagaatgtcattatgcagcacatcactgtacatatatagtaagacctcacttatctttgtggataggttcttggaaactgtgactttaagagaaacagcatataacgaattttaccataggctaatygatataaacaagagttaagatcctatggcatatttctggtcacaaagacatcaccagcttctaaataaagaccccaaaaacttttaatattaaatcttgaaataaatgtgagatatacatatatttaagaaagattaataaaaacaagtaagatgattatttactcaatttttggtgaatcagtgagttacagcagttataatggtggtgtgttaaatcaaggaataaatgtttgcaaagcaaaaaccacaattcagttcgaagacaatatcaaatgtggcagccatgctgagcacttccatacctcattgtttattgtcaatacataattattgtatctttatgaatttttataa

SEQ ID NO: 886554 - DNA, 599 bp, Homo sapiens
tctgctccttcactgcttgcacttcctcagttgtctttgttagctcctcctcccctgtcagacttttaaatgttggattgccttaaaggactcccctcaacctttttcttagtgccatctccccttaggtgacttttcttcccaccaatggcttaaaacaatatctatgccaatggtcctcctagtcatatgtccagactagtcaatttacctttgctgcagattaataaactacttaacttgtcatcaccactgcatcttaataaaacccaagtaggacacactttctaccctgtaaagtgtacttatcctcaaagtgtacttattcaccaaaactcactgaatggctcactactcatatggtttctcaaacctaacaacttggattgatacttgagtattcttttctttcccctcacactcaataaccaatttaccaattaytttctgtctctatctcaaatatacatcacctattgggtcatttctcaccttttccattgctagaaccctagtccaaaccaccatcacctctcacctggaacactacattaacttcccaacagatatccctgtctctcgctgtctccaatgatcca

SEQ ID NO: 886555 - DNA, 595 bp, Homo sapiens
ccattgctcaaacatgaaatagatgatttgttctggccagctcttggaagagtcgataggactggtaagtacagaacaaggaaggactgatgttagagtgagaccaccaagctacctagatagcctgctaccactaggatcagggtcacatgatccatggaattttagggaaaacttattggaaaacacatgtaatttaaggagtggaatgttaagacaaaaggtttgccagctctgccaaattcctgtcttataggaccacacatcagctgamagcttctaagatgtgggcatctctgtggagattctgggacatttgggtgtagaacacccaagttatgaagggttgagacaagggtttctatgcagagctgactttgtatattgcctgagtctttcctctaattctttagctgtcatggcattcataaaaatgcccatggtcctggaagtccagaggccaggccttctggccatagatttactaaccttttcactttctgccttctctccttggaggactctaggtgaaggttcccaacaagagtggccacctccttcccagggtcatccttaggccacagtgccaagtaac

SEQ ID NO: 886556 - DNA, 639 bp, Homo sapiens
caaatatcatcttgaattctcacatgttgtgggagacacctggtgggaggtaaatgaatcatgagggcaggtatttcccatgcggttctcatgacagtgaataagtttcatgagatctgatggtcttataaggtggagtttccctgcacaagctctcttctcttgtctgctgccatgtgagacagtcttttcacctttcaccatgattgtgcggcctccccagccatatggaacagtgagtccattaaagttctttcttttgtaaattgcccagtctcgggtatgtctttattagtagcatgacaatagagtaacacaccatctctctggagaagcctttctagatatttgaaaggacttgtgtgttgtgatataagctgtatctgctttctgtagcaccgcaaacccagtaatgctatggttcttgaagacttgtagaggcaccaccattattgtcttggacaagatttaaaagaattatgyggtgtgccaggaagagactcttgttctcttcccttactttctcccaaacaaatggagtatctctttgtgctgagccacatgtagctggggctggggtgacataagcaaccctataggtgccacctctgagactgtgttggaacagacctgaagcca

SEQ ID NO: 886557 - DNA, 656 bp, Homo sapiens
cttatggaatacatatgtaatatttctggaaattgataaaaatattctgctactaggattattacctatatgttgattgggagtatattcgagtacaccctagagaggaaaaaggcatattttaaactaatatttagatttttctcactctgctttattcatttaggtattgattgactgcaaaaacattttaattaagccactttacttggtcagacattatttgatgtaagaccccaatgttatgtaagatgacatcatagtcaaactaattaaaatttttggataaatgtagaataagttctcacatgaaattaaaggctggcgcgtaacaaacwattgtgaaaagaaaaacaaattacttttacttgtaaatcctaatgtcctaaagtaaattgagatagaattttataagaagttgatttcaagagcaatattttacatagtgaggctaatgctaacaaaatatttaacataaaatacgcatttatttcccaatgcatgactttaacagttagttaatttcaacacatcctacccagaggaactttggagctctgaactgttacttatggaacgtctttctagaaatcaattattgctgtttgttattgattgaaaatgactcatgaatggcatttattttcacaggtgaa

SEQ ID NO: 886558 - DNA, 617 bp, Homo sapiens
tatttcaagaagcagaaaaattaccacaggaatcagaaaatgtagcacagataacagaaaaaaaatttgcacaaatattgggaccagatgtggtggctaaagcttgtaattgcagcactttgggagactgaggcaggagaatcatttgagggcaggagttcaagaccagcctgggcaacataatgagatcctgtctctgaaaaaataagaagaaattagccaggcatggtggtgtatacctgtagtccactagggaggctgaggcaggaggatcacttgaggccaggrattgaggattcagtgaactctgaccatgccactgcacccatcctgggtgacagagagagacactacctcttaaaggtgggaaggagaaagagagagagagagagagagagaagagagagagagagagagagagaaataaaaagaaaagaaaaaagagaagaaaagaaaaatactaggcatcccagaaggcaagaaagactgcattaatgaaataagaacaattagtaaggatagaacagactgcaaattatacagaacagaattttttatgcaaaaggatgataaaagaaggattaaagaaaagtataaataggacaattaaaatgaat

SEQ ID NO: 886559 - DNA, 484 bp, Homo sapiens
cactcctccaacactgaagatttgcttcattaatatcagatttaccccgttacggttttcaggcatttctgggtaagcaattacttttcatcttcaacttgcttcatcatgcaatatcttggaagacattttaaacagcaattaaactcaatacatayagttccaaaattgcacacaatgcagctgaggtaagaaaaatgtgacccactgaaatcaagtttgttcacatgcacagcaaggtaatgtttttggactgcctgctggttgacagaaatctcactaattctaaaatgcatcgttgtttcagatatgttaaaatgtgtcttcagactgatataagttcaggtttgatcattcactatggatgtgacctcaggccagttatgtaacttcattgaacttgttttctcactataaatggggacaatcaccatgcccacttcataagggtgttgcaaagtttaacaagagaattcagtagcac

SEQ ID NO: 886560 - DNA, 678 bp, Homo sapiens
tcaattggaaatgcagaaatcacccatcttctgcgttgctcatgctgggagttgtagactggagctgttcgaatttggccatcttggaacctccccccaatttccttcctttttaaggctgaataatattcactctacgtatatactacattttgtttatccatttattcattaatggacacttaggctgcttccatcttttgtttattgtgtatgatgctgctgtgaacatgggtgtatcatatctgttggagttcctgatttcaattctttggatatattcccagaagcaaaatcgctggatcatatggtaattctatatttaactttttcaggaactggcataccatttttcacactggctgcaccattttccattcccactagccatgcacaaagcttccaatttctccacatcctccccaacacttgttgttttctgttttttggtaatagccatcctaatgagtgtgaagtggtatcttaatattgttttgatttgcatttccctaacaattggtaatgttgagcatcttttcaygtgcctattggccatttgtatatctttggagaaatgtctatattcaagtcatttgcccattgtttagttgggttctttgtttttgttgttgttgttgagttggtaccttgttttatgtaggagaaagatgggtcata

SEQ ID NO: 886561 - DNA, 619 bp, Homo sapiens
gcaggggtttcaacagacagagtaacaggggacataatgaagtcacaggcctaaaagaaaggatccaatgactttgcaaggggctagcaagaaagcttggagactaaagtagcaaaaagagcatctattaatgcttcctaaaacaatggcaggaaatcaattccatggggcttaactgatgcaggcctggaggcactaaaacccattttgcctggtgaagtgagcattttgtgggtcaccaacagttcatcatgatccatttggattggccaagctatgtttaaaaagggatcagtgactccaaaccaacctgaactgcagggcatattgacagaaagggagtgactaattygtaaatgtgaatgaagctgtattttatttaagattaaaaagtgatgaacaagagagagaactaaattacagccttgtggacggctacattacaggaattcatcacaatttcccttctggggcttcagagcttgactctgacttatgctttttggcatggaagtccgaaaatccaatatgggtaattgaatgagtgtacttgtattagttaggataggctaggtttgttgcaataatgaacaaccctcggatcacagtagcttatcaa

SEQ ID NO: 886562 - DNA, 619 bp, Homo sapiens
gcaggggtttcaacagacagagtaacaggggacataatgaagtcacaggcctaaaagaaaggatccaatgactttgcaaggggctagcaagaaagcttggagactaaagtagcaaaaagagcatctattaatgcttcctaaaacaatggcaggaaatcaattccatggggcttaactgatgcaggcctggaggcactaaaacccattttgcctggtgaagtgagcattttgtgggtcaccaacagttcatcatgatccatttggattggccaagctatgtttaaaaagggatcagtgactccaaaccaacctgaactgcagggcatattgacagaaagggagtgactaatttgtaaatgtgaatgaagctktattttatttaagattaaaaagtgatgaacaagagagagaactaaattacagccttgtggacggctacattacaggaattcatcacaatttcccttctggggcttcagagcttgactctgacttatgctttttggcatggaagtccgaaaatccaatatgggtaattgaatgagtgtacttgtattagttaggataggctaggtttgttgcaataatgaacaaccctcggatcacagtagcttatcaa

SEQ ID NO: 886563 - DNA, 619 bp, Homo sapiens
gcaggggtttcaacagacagagtaacaggggacataatgaagtcacaggcctaaaagaaaggatccaatgactttgcaaggggctagcaagaaagcttggagactaaagtagcaaaaagagcatctattaatgcttcctaaaacaatggcaggaaatcaattccatggggcttaactgatgcaggcctggaggcactaaaacccattttgcctggtgaagtgagcattttgtgggtcaccaacagttcatcatgatccatttggattggccaagctatgtttaaaaagggatcagtgactccaaaccaacctgaactgcagggcatattgacagaaagggagtgactaatttgtaaatgtgaatgaagctgtattttatttaagattaaaaagtgatgaacaagagagagaactaaattacagmcttgtggacggctacattacaggaattcatcacaatttcccttctggggcttcagagcttgactctgacttatgctttttggcatggaagtccgaaaatccaatatgggtaattgaatgagtgtacttgtattagttaggataggctaggtttgttgcaataatgaacaaccctcggatcacagtagcttatcaa

SEQ ID NO: 886564 - DNA, 626 bp, Homo sapiens
cctttgggttcccacaaaagtaaactctgccccccaattacaattcctggtttcttcttcattttagtcaattactgctgcagaacaaagaatcccaacattgagtggtttaaaaaacaaccatattattatctctcacggttctgtgggttgctggagttcakctgggcagttctgcaagttccactggagtctatcatgcaggtggagtcagaaggaagttgaccctggagtcaactagaggctccaatgggaggctgaaaaggctcagcctccctccctttccatggagtctgaggacctctcctctcacatgaggcctccagcaaggtagatggatttcttataggtggctcaggactcccaagagtaggccttccaaaagagaagaagcagaagctgccagtcctcttaaaggctagacctggaatgggcaccggtaactctgccacttatgttggatgaatggtcccagggccaatccagattcaagtggaaaggaaataaactctgaatttgtggccatttttaatgcatcacatgctattccatatgataactgaagaaaagtatccaagttcactgttgaatagcaaaatgagcacatttgggacaagggcagctcc

SEQ ID NO: 886565 - DNA, 664 bp, Homo sapiens
ctccttcatcatgcatgatactaaggaaagagaggaccctggaacctaactgagttcctatggctgcaagcctggagagaatacgattcgagaggtgaataatccacaggcaaataactacaagctatttcttttctttaatgtctagaatcyctcaagttgctggaaatgcaattaggttcctagataggagaggacaaattatgttctttggttccgttcaaaatttggaacattatttatgttccagggttgctatttcaccaacagaagtgatcataagagaaaaaggcccacccctacattcctgcacttttccattctttagatgggtcctgacaggtgactgtctctgaagtgggtgcctgctgagagctcagaagagctgccagcacaggaagtaccttgagcttgacagaagtgtgcacattgggccccagggggcatgtggcctccatgataaaagggcgacagcaagaaaccggcacagtactcagccccgaatgactcagatgttatgaagtattgatcacatacattgcttctggcttttaggcctatgaatatttaaataagcacattaatattgcatatgaaactgaggcttaaataacctttgtttcttattgaaaggaagggctggcattttcaatgtgctcttgaa

SEQ ID NO: 886566 - DNA, 633 bp, Homo sapiens
cagactggagtgcagtggcgtaatctccgtgcactgcaccctccaccccactgaggtcaaccaatcctcctacctcagcctccctggtagctgggactacaggcatgtatcaacatgcctggctaatttgtgtattttttgcagagayggggtttcaccatgttgtccaggctggtctcaactcctggactcaagcgctccacctgcctcagccttccaaagtgctgggattacaggcatgagccaccaggcctcgcctataaagctctttaataaacttttttttttttttgagacagggtcgtgctctgttgctcagactggagtacagtggcacgatcatggctcactgcaaccttgacctcctgggctctagtgatccccacctcagcctctcaagcacctgggactataggtgcgcaccaccacacctggctaattgttttctttttcttttcctttttttctttttttttggtagagatagggtcttgctatattgcccaggcttgtcttgaactcctggcttcaaggaatccttccaccttaacctcccaaggtgctgggactacaggcataagccatgcacctagccaacaattattttttatcacaacacagcgaggttcctgc

SEQ ID NO: 886567 - DNA, 633 bp, Homo sapiens
cagactggagtgcagtggcgtaatctccgtgcactgcaccctccaccccactgaggtcaaccaatcctcctacctcagcctccctggtagctgggactacaggcatgtatcaacatgcctggctaatttgtgtattttttgcagagatggggtttcaccatgttgtccaggctggtctcaactcctggactcaagcgctccacctgcctcagccttccaaagtgctgggattacaggcatgagccaccaggcctygcctataaagctctttaataaacttttttttttttttgagacagggtcgtgctctgttgctcagactggagtacagtggcacgatcatggctcactgcaaccttgacctcctgggctctagtgatccccacctcagcctctcaagcacctgggactataggtgcgcaccaccacacctggctaattgttttctttttcttttcctttttttctttttttttggtagagatagggtcttgctatattgcccaggcttgtcttgaactcctggcttcaaggaatccttccaccttaacctcccaaggtgctgggactacaggcataagccatgcacctagccaacaattattttttatcacaacacagcgaggttcctgc

SEQ ID NO: 886568 - DNA, 631 bp, Homo sapiens
ctagccaacaattattttttatcacaacacagcgaggttcctgctataattatcctgactttacagatgagaaaacaaatgtacagaaagcttaaaaaacttgactaaggccaaacaactagcaagtggtagattcagtatgtgggcctagacagtccttctccagagactgactctcactatccctttattcagcactctctgtattgcatgagaaaaaatacatgttgcatctgtagctgaacttcatacaacgcacaccaactacatttgggagacagattcatttatttacaaattcccagtggccaccaaaacatctgatagttaaaaagcccatcttaaatgtttgtggaaatgaatggaattggatggttttagtagcttcaatttgactcatctaagaaaayagtataacccacatgtagctgtcctcctgagggtggcctctgttttcactatctgccagccatgaaacagggctgcttcatccctgcacagatatcttcagtagaacttgtcagcaaccaacctcacttctccagcatgaatattagctctctctctgcatgcgggaggcagaataatgaccttctcaaagatgcccacattctaagccctagaacttgtg

SEQ ID NO: 886569 - DNA, 662 bp, Homo sapiens
agttttttggcttcaaaaccaattaaaatgatgaatagctgtgaaaagaaccagaagtgcatttaatctttcttcagaacagttggggatcagttcttttttgtcacatttcacattagctgggaacataaacttggtcttgttcaaaggttcaaactacttcttcctgaaagagaaccgatctacttaactttttttttccccagctattataaacactgagatatttacaaagtgccttgtacttctttctgtttatctcccaaggtcacgacactctatttgcatcttctcttagcaatgttatcctaaaaagaatcatcaaagcaaagattaactgttacaagaaaaaacaaataagcgagaagattrcttacaaatttcgggggttggtttattatggatgcaaaaatgagtagaaactcaagtccctgagtccacctttcatgacggtagtcctgattttgctatcatttaatacaacttaggtcttaatgttctcactcagtgctgagtgtgctgggataagcaaggtgttcacagtcttgtacatttttttctttactttttatcataaaaatgagctgcagatgtcatgcagtgcagagagaagagaatgctttctgagtcagaaggtcacattttttgtactcaaccacttc

SEQ ID NO: 886570 - DNA, 570 bp, Homo sapiens
accctggaagggacctgacaggatggtagtggctgtgggtgtctgcattggttgagctgctcagtgtttttggtccagagactggagcaggtccctggtgcacagaaaaggatttggaggatccttagcctgggttcacgtccccaccttcatcttctgaccgtatcctccgttcctcctttgtcaagccttaggctgtttttttctgcattggtcttccctggacattcttttacttaccttggttcttcrttcatgcactttctctagactaaggtttctctctgctcatatagttatccccattcttgaaggctgcactgaagaccattcagtgtcttcggcagctcttgatgttctctcctcaagggcaggttataccctcattttgctctcctgttgtgacatagcgtggttgtggatagagtggtccttcttggatgttctgttgccttcacgcaggtgagctgcccagagcccagcacggtctgggttctcatccagagcctggtctgacctgaggagccctgacctccagcctgcactccaccgtctcctggagatgtgacc

SEQ ID NO: 886571 - DNA, 594 bp, Homo sapiens
tgccagtggatgtggagaaattagttagaattctcctctaaactgaaaaaaaatatggtatttaacagtccaggattaaagatttagaatgtaaaaagacttaggaaaatgtagctaaaagatgggctctgtctgggttcaaaaggaaacaggtttgggagcctcttgggaaacagccaaagaaaaccaaatgtttttaggttcagtttaagattagagttagatttttcttaaccagtctttaccagtttatcctgctcaatcttgggtttatttctttaaaaatattcaggaagaacaatgagctttgaaggttccagtaatattactttattaaagatatttattttggataaaaagctggagatctatgtttattaattagttaagttarttggaggattctttcatatttctgaaagacaaccactaggactgtgtgaccatagggtgctgttacctccaggtggcagcgaccttcaagggccagtgtggcaaccagaggcagccatccctgcaagtcgtggcacttggtggggccgtgtgggatgatagagcctgggattccagagggaggatgtatgggataatgag

SEQ ID NO: 886572 - DNA, 623 bp, Homo sapiens
taggtttctgcttaaacctcatttttctcaaaaagaatttctcctaacaccatcaccccacgttaagtcctttccttttattctttctcatattgctctgtttctatagctatagcaattatctccattttaattaaatatgtatttgcatgtttatgtgtttaatatctgcataggcatttggatggagactttgtgggcaggactacacctgtgttttctgccmcctctgtggtctgcacccaccactgtgcccaattcatagtagatgctccgtcgctggtaaacctggtgcctcacccactccttcttcactgccaccttctctaagctcacatcttacttctagaatatgatgggatcactggcagtaaggaacgtccagctcgaagaaggcagctgggaaagatattttaaacacactcagacccccagtgcctgacatcatccctgtttccctgttagcattaccagttcccagtatttgttgaatgaatgaattattaatattattctacctaatttcaaagcactatttcagacattaaaccatgaaatactaggaacaaaaccacttgacacagagagaaaaatgatgtatctacaggaaagactgctctgga

SEQ ID NO: 886573 - DNA, 598 bp, Homo sapiens
ctatgcaccagtgtgaataagatagatctatacctatttgcacagaaagtatctaaagtcactttgttgagtgaatacaattttcaaaataatacagtatgatagtgtttatataaaaatagctatacaatactacatattttcgatatggttgtaaatttagtaatgaataggaaaaatgtctggaggcacatgaaccaaaaagaaataactattctaragaaagatagggaggaggagagggatggagggaggaagaagagtttgacagtcacagaaatatgaagatcttacggccgaacaagtgcagacccacacgcttataaaaagatgatgcattaattccactcctaggtatatacccaaaggaactgaaaatagagactcaaacaagtatttgtatgtacatgtttgaggcagcattattcacaatagccaaaaggtggaaacaacccaagtgtcattaacagatgaatgtataaacaaagtgtagtatgtacttacaatggaatattattcagccataaaaaggagtgaagtttttacacctactacaaaatgaatggacgaaccttgaaaacattgtgctaaatgaaat

SEQ ID NO: 886574 - DNA, 598 bp, Homo sapiens
ctatgcaccagtgtgaataagatagatctatacctatttgcacagaaagtatctaaagtcactttgttgagtgaatacaattttcaaaataatacagtatgatagtgtttatataaaaatagctatacaatactacatattttcgatatggttgtaaatttagtaatgaataggaaaaatgtctggaggcacatgaaccaaaaagaaataactattctagagaaagatagggaggaggagagggatggagggaggaagaagagtttgacagtcacagaaatatgaagatcttacggccgarcaagtgcagacccacacgcttataaaaagatgatgcattaattccactcctaggtatatacccaaaggaactgaaaatagagactcaaacaagtatttgtatgtacatgtttgaggcagcattattcacaatagccaaaaggtggaaacaacccaagtgtcattaacagatgaatgtataaacaaagtgtagtatgtacttacaatggaatattattcagccataaaaaggagtgaagtttttacacctactacaaaatgaatggacgaaccttgaaaacattgtgctaaatgaaat

SEQ ID NO: 886575 - DNA, 657 bp, Homo sapiens
ccattattgcccccagccactcacttttccctgcatcccacagttccactctctgcctgccttgacattgcttgctgcctggactctgaaggtgggtcatttactttaattaacttttattgatcacctactataagttcagaatagtcatggtttcttccacttacattatttcaatatcttgttcttttaaaaattcatctgcctaccatttcatgcctttaaagaatctctatcctaaaagtgtgtractttttaaacctgtgtggcccatcacccagatcaagatgtagaacatttgcagtgccccaaaatgttctctcaaatcctcccagccaatattctgtaaacataaccactactctatcatcatcaattagttttgcctgtgctggaacttcatatacatggtattacgcagcatgtattattttgtgtctggcttttgctgaacattcatccatgttgcatggagcagttgtgttttatttttcatttctgaggagtagtatgtagtagtatgaatatatcccaacaagttaatctagtctactattgatggcatttggtttgtttccagtttgaggtactatgtaaaatgctagtatagacattttcgtagatacattttggtgaaaataggcactcagcccatat

SEQ ID NO: 886576 - DNA, 657 bp, Homo sapiens
ccattattgcccccagccactcacttttccctgcatcccacagttccactctctgcctgccttgacattgcttgctgcctggactctgaaggtgggtcatttactttaattaacttttattgatcacctactataagttcagaatagtcatggtttcttccacttacattatttcaatatcttgttcttttaaaaattcatctgcctaccatttcatgcctttaaagaatctctatcctaaaagtgtgtgactttttaaacctgtgtggcccatcacccagatcaagatgtagaacatttgcagygccccaaaatgttctctcaaatcctcccagccaatattctgtaaacataaccactactctatcatcatcaattagttttgcctgtgctggaacttcatatacatggtattacgcagcatgtattattttgtgtctggcttttgctgaacattcatccatgttgcatggagcagttgtgttttatttttcatttctgaggagtagtatgtagtagtatgaatatatcccaacaagttaatctagtctactattgatggcatttggtttgtttccagtttgaggtactatgtaaaatgctagtatagacattttcgtagatacattttggtgaaaataggcactcagcccatat

SEQ ID NO: 886577 - DNA, 649 bp, Homo sapiens
gccacattgagtgatataggcttttatggggacacaaacaccattaagaatattattactaagaaaagtgtcaatgacagtgtccaaccatcaaacccaaaacatctttggaaatccagtctgcaaattgggacttccagatttggaagtgtctttgtttcctaggtctacaggtttctgtagttttcatacacaagtcactaaccaggtattgggagaagaagcactgacaccttcataggtggcaagtctatgcagatattgtgcctgtgagtgtgtgtgcatgtaggaagagatgagggtgctgaagagatggttactttctgtcccccaaacccatctccttggccacataggagtgggtatgttggagatattcttcaagctggtccaacagagccccaaaggcagaaggagaccagctgttggggagggaagycctcctgtccagaggctcccaacagcatggaatgccaatatgacagccaaggtggggttcctccaggggagagctgggtaacagaataggctccaccagattttcagttccccagattcccacagccaaggttatgcatttccggtccctgagctgggacatgttggaaatcaaagcccatgtactttttatgatcttctggaccaaagg

SEQ ID NO: 886578 - DNA, 639 bp, Homo sapiens
tacatcctgagactgctgaagttgcttaccagcttaaggaaattttgggctgagacgatggggttttctaaatatacaatcatgtcacctgcagagacaatttgacttcctctcttcctatttgaatacgctttatttctttctcttgcctgattgccctggccagaacttccaatactatgttgaagaggagtggtgagagagggcacccttgtcctgtgctggttttcaaagggaatgcttcagcttttgcccattcagtatgacattggctgtgggtttgtcataaatagctcttattattttgatacatgttccatgaatatctagtttattggctttttttttttttttttttttgagacggaatcttgctctgtcgcccaggctagattgcaatggcatgattttggytcactgcaacctccatcccccaggttcaagtgattctcctgcctcagcctcctgtgtagctgggattacaggcgcatgccaccattcctagctaatttttgtatttttagtagagatggggttttgccatgttggccaggctggtcttgaactcctgacctcaggctgagatcatctcagcctcccaaagtgctgagattaaaggtgtaagccaccacgcctggc

SEQ ID NO: 886579 - DNA, 628 bp, Homo sapiens
gagacgagacaatgttgaagatgaagcctgcagcagcagaccatccacatcaatttgcaaggaaaaaaatgtgtcttgttcatgccctgattacagaggactgacaattaacagcagaaaccataaccaacaccctggtctgctgctgtgcatttcatcttcaacactgtctcatcccttcttaaaatgagttatccatttgtaaaccgctgatttacatggggcattgccccataaacttttcacaaggcaatagatatctcaattgcttcagcttacacaatactgactaaaaaatttaagttgaacaaactctccactcrccaggtgccaaaagtgttgcaaccagatcagctgcagacaagagcagagctttcaatgggaattttaaacaagcgggatcaagatcctcaagcacttcttcaaagaactataacagcagatgaaacatggctttactaataggatccagaagacaaagcacaatcaaagcaatggctacaaagagatggaagtaaacccatcagagcaaaaacataccagtcaagagcaacggtcatggcaacagttttttggggatgctaaagacattttgcttgctgactttctggagggccaaagaatgata

SEQ ID NO: 886580 - DNA, 628 bp, Homo sapiens
gagacgagacaatgttgaagatgaagcctgcagcagcagaccatccacatcaatttgcaaggaaaaaaatgtgtcttgttcatgccctgattacagaggactgacaattaacagcagaaaccataaccaacaccctggtctgctgctgtgcatttcatcttcaacactgtctcatcccttcttaaaatgagttatccatttgtaaaccgctgatttacatggggcattgccccataaacttttcacaaggcaatagatatctcaattgcttcagcttacacaatactgactaaaaaatttaagttgaacaaactctccactcgccaggtgccaaaagtgttgcaaccagatcagctgcagacaagagcagagctttcaatgggaattttaaacaagcgggatcaagatcctcaagcacttcttcaaagaactataacagcagatgaaacatggctttactaataggatccagaagacaargcacaatcaaagcaatggctacaaagagatggaagtaaacccatcagagcaaaaacataccagtcaagagcaacggtcatggcaacagttttttggggatgctaaagacattttgcttgctgactttctggagggccaaagaatgata

SEQ ID NO: 886581 - DNA, 602 bp, Homo sapiens
tgatacaaaagtaaaacagccttactattgatatggagaaagtttttgagtggtctgattagaagatcaaaccagccacaacattcccttaagccaaagtctaatcaggagcaaggccctaattcgcttcaattctgtgatggctgagggaggcaaggaacctggagaagaaaagtttgaagctagcagaagttggttcatgaggcttaaggaaagaagccatctctgtaacatcaaaatgcagtgcaaggtgaagcaggcaagtgctgatgtaggagctgcaataagttatttagaagacctagctaagaccatagacaaaggtggctacactaaacaacagatttttcaatgtcaacaaaacaggyttctattggaagaagatgccatctaggactttcagagttagagaggagaagtcaatgcctggcttcaaagctttaagggacaggctgacactcttattaagggcttgtgcagctggtgaagctaatgcccatttcccagtccaaaaatcctaggccccctaattaactatgctaaatctactctgcctgtgctctacaaatagaacaaagcctagatgccagtacatctgttta

SEQ ID NO: 886582 - DNA, 602 bp, Homo sapiens
tgatacaaaagtaaaacagccttactattgatatggagaaagtttttgagtggtctgattagaagatcaaaccagccacaacattcccttaagccaaagtctaatcaggagcaaggccctaattcgcttcaattctgtgatggctgagggaggcaaggaacctggagaagaaaagtttgaagctagcagaagttggttcatgaggcttaaggaaagaagccatctctgtaacatcaaaatgcagtgcaaggtgaagcaggcaagtgctgatgtaggagctgcaataagttatttagaagacctagctaagaccatagacaaaggtggctacactaaacaacagatttttcaatgtcaacaaaacaggcttctattggaagaagatgccatctargactttcagagttagagaggagaagtcaatgcctggcttcaaagctttaagggacaggctgacactcttattaagggcttgtgcagctggtgaagctaatgcccatttcccagtccaaaaatcctaggccccctaattaactatgctaaatctactctgcctgtgctctacaaatagaacaaagcctagatgccagtacatctgttta

SEQ ID NO: 886583 - DNA, 614 bp, Homo sapiens
ctgccttacaagagctcctgaaggaagcactaaacatggaaaggaacaattggaacaagccactgcaaaaaacatgccaaattgtaaagaccatcgatgctaggaaaaaactgcatcaatttacgggcaaaataaccagctaacatcataacgacaggttcaaattcactcataacaatattaaccttaaatggaaatgggctaaatgccccaattaaaagacacagactggcaaattggataaagagtcaagacccatcagtgtgctgtattcagaagacccatcttacatgcakaggcacaaataggcttaaaatatagggatggaggaagatctaccaagcaaatggaaaacaaaaaaagcagggtttgcagtcctagtctctgataaaacagactttaaaccaacaaagatcaaaagagacaaagaaggccattacataatggtaaagggatcacttcaacaagaagagctaactatcctaaatatatatgcacccaatacaggagcacccagattcataaaacaagtccatggagacctacaaagagacttagactcccacacagtgataatgggagactttaacaccccactgtcaatattagacaga

SEQ ID NO: 886584 - DNA, 686 bp, Homo sapiens
acaaaatatagtataaagacatttcacaatttccaaacaaatctttctacgcttaaatgatcaaattagaaaaaccaattcctataattaatatgcagaacttttatagaatatgatattataaagttaaatttgcaaaataattctaacatccactattgttcagtataggtaatctcccaaaaatatcacatcctcttgaaaatgaattgtctacaaaatttcaaatgcaaagtattacagccaaatattatcttaattaatttcttacacttaaaagtgtccatcaacagtgtgtcagatggtctttatatattttttctgtatgaaggaatagccttgcctactgaagataggttctctatgtattcaacaataatgcaactttagaagtattccacactgctgagaaatgttgctttgagtttgctttacacatcatcaacwctaaatcctatagtaacatgagaattcacttcttcttgtaaaaataagtaatttacaggaaaggcaaaatgctaatactaacatttgtagcacttgatgatttacaaagtccttttacatctgttttttcatttgatcctatcgacaatcataataataataaattatatatataacccatataataacgatggtgatgataattttagtattactgtcattataattattattatatt

SEQ ID NO: 886585 - DNA, 605 bp, Homo sapiens
cttccaaaggggccattgcagtggtggtaggacctctggccccatcattgctggactgtaagcaaaactgtccactcagtgcctacctataggcaatggtgctgatgggcttcactgcctccatttcctattttgacagctatattactttgctgtagaacatacttatgtgaaacaggactccttgagccaagctcttgcatttagtagttctcaatggggaggcatttggcaacatctggagacatttttggttgtcacaatttgggaggcaggtgtgagtgggaggaggtgctaccgatatctagcagttrgagaccagaaacattctacaatgtacagaacagccccctacaacaaataattatatcactttagagatcgatgtatttgagcttgagacactttggcacaaatgaacaataacatttaagggtaaatttttaaaaaaatccttaagttaaaaaaaaaaaacctcttttcctaatatccttccaatttttccatgaaggcaaaagagtcaagaaagaaccaagttggctgcttgctatgaatgaaattattattattattttgtttgattctacttttagataagacagtaa

SEQ ID NO: 886586 - DNA, 624 bp, Homo sapiens
ttctctatggtaaaagtgactcataactgtgaaccaaaataagattcaattttattaaactattaattttaaaataataattttctgaaaacaaagatctagacaattattattgttactattattagaatataatgtttttgctatctcatatagtagtattgcagatattttctagtagaaaggagtgtattatacataatatatgtaattttttggaatttttttactgtcttgtgaaaattaaaacacttgatttttgtacattacctatgtatgtaattaaaactagatcarttaatcagataaaataataactagtcctaggaatttgtgacacctggatcctggtaacattttgtttagctgtagtatatctttttctatccctttacttttaacctgagtctttatattttaactggatttcttacatagagcatacagttgattattgttttattatataatctgacaacctcagttgtttaatagttacatttaaattagtcacattttaagtgatagtcacattcatatctaccatatttataacattttaatagtcattacatttcttgtttttgttctttttttgtcttttctggttttaattgaatgttt

SEQ ID NO: 886587 - DNA, 664 bp, Homo sapiens
ctggctactgactatgttcactcaaagccctggggttctacaatcagcaggtggcaaagtcagccgggcctgtgtcttccccttcagggtggcaagttctcctaggccctaagcaggtccagaggtgttgtcctggatccagttaccagagtcaaaatccttagaaatctacctggtgttctattttaytgaggcggagatggcactcaaattacaagaagcaatccttctcattcttctgtccactttccaaaagcaggggagccttaccccatggctctcaccaccacaggccaatggagagtacttccagactaccactgatgttctcttaaagcccaagggctcttcagtcagtttgtggtaaatgcttcctgggctgggactcactctttagggcagtgggcccccttctttcttaggataggtccagaaatgcaatccgagaatcaattcctgaaatcagagacctcaggagcccacttgcttctctaccttttgtggccaactggtatctaaggtgcaagatgaaggcccctttactttttcctttgcttttatcaagtagatggagtcttaccccttagctgccacagcagggaatgtgctgagtctcacctgaagccaatatgtctcagaagcttacccaaggcccttgatgtgg

SEQ ID NO: 886588 - DNA, 604 bp, Homo sapiens
ccaagatattttccttttacaaagccaaaaataggaccgcagtcccctctagcttatggggtttctgctgagaaatctgctgttaatctgataggttttcctttttaggttacctagtatttttgcctcacagctcctaagattattttatttgtcttgacttatataacttgatgaatatgtgcccaggtgatgctctttttttgatgaatttcccaggtgttctttgaacttcttgtatttggatgtatagatctctagcaaggccagggaagttttctttgattatttttctcaaatatgttttccaaacttttagattgctcttcttccttgggaacaccaattattcttaggtttggacatttaacrtagtctcaaccttcttggaggcttttcttaaaattcttttgtctttgtctttgatggattgcgttaattcaaaagtctagtctttgaactcttaagttctgtcttctgtttgttctgttctgttgctgagactttccagtgcattttgcatttctctaagtgtgtccttgatttccagaagttgtgattgttttttatttatgctatttatttcactgaagaatattccttt

SEQ ID NO: 886589 - DNA, 604 bp, Homo sapiens
ccaagatattttccttttacaaagccaaaaataggaccgcagtcccctctagcttatggggtttctgctgagaaatctgctgttaatctgataggttttcctttttaggttacctagtatttttgcctcacagctcctaagattattttatttgtcttgacttatataacttgatgaatatgtgcccaggtgatgctctttttttgatgaatttcccaggtgttctttgaacttcttgtatttggatgtatagatctctagcaaggccagggaagttttctttgattatttttctcaaatatgttttccaaacttttagattgctcttcttccttgggaacaccaattattcttaggtttggacatttaacgtagtctcaaccttcttggaggcttttyttaaaattcttttgtctttgtctttgatggattgcgttaattcaaaagtctagtctttgaactcttaagttctgtcttctgtttgttctgttctgttgctgagactttccagtgcattttgcatttctctaagtgtgtccttgatttccagaagttgtgattgttttttatttatgctatttatttcactgaagaatattccttt

SEQ ID NO: 886590 - DNA, 604 bp, Homo sapiens
ccaagatattttccttttacaaagccaaaaataggaccgcagtcccctctagcttatggggtttctgctgagaaatctgctgttaatctgataggttttcctttttaggttacctagtatttttgcctcacagctcctaagattattttatttgtcttgacttatataacttgatgaatatgtgcccaggtgatgctctttttttgatgaatttcccaggtgttctttgaacttcttgtatttggatgtatagatctctagcaaggccagggaagttttctttgattatttttctcaaatatgttttccaaacttttagattgctcttcttccttgggaacaccaattattcttaggtttggacatttaacgtagtctcaaccttcttggaggcttttcttaaaattcttttktctttgtctttgatggattgcgttaattcaaaagtctagtctttgaactcttaagttctgtcttctgtttgttctgttctgttgctgagactttccagtgcattttgcatttctctaagtgtgtccttgatttccagaagttgtgattgttttttatttatgctatttatttcactgaagaatattccttt

SEQ ID NO: 886591 - DNA, 630 bp, Homo sapiens
ctgactttttaacgattgcccttctaactggcattagatggtatctcattgtgcttttgatttgcatttctctaatgacctgtgatgatgagctttttttcatatgtttgttggccacctaaaagtcttcttttgagaactrtctgttcatatccttcacacactttttgatggggttgttttattctcggaaatttgtttaagttccttgtagcttctggatattagccctttgtcggatggatacattgaaaaacatttgtcccattctgtaggttgtctgttcactacgatgatagtgtcttttgctgtgaagaagcgctttagtttaattagatcccatttgtcaattttggcttttgttgccatttctttcagtgttttagttatgaagcctttgcccatgcctatgtcctgaatggtattgcctaggttttcttctaggttttttatggttttaggtcttacatttaagtctttaatccatcttgagttaatttttctataaggtgtaaggaaatggtccagtttcagttttctgcatatggctagccagttttcccaacaccatttattaaataggaaatcctttccccattgcttgcttttgtcagggttgtcaaatatcag

SEQ ID NO: 886592 - DNA, 630 bp, Homo sapiens
ctgactttttaacgattgcccttctaactggcattagatggtatctcattgtgcttttgatttgcatttctctaatgacctgtgatgatgagctttttttcatatgtttgttggccacctaaaagtcttcttttgagaactgtctgttcatatccttcacmcactttttgatggggttgttttattctcggaaatttgtttaagttccttgtagcttctggatattagccctttgtcggatggatacattgaaaaacatttgtcccattctgtaggttgtctgttcactacgatgatagtgtcttttgctgtgaagaagcgctttagtttaattagatcccatttgtcaattttggcttttgttgccatttctttcagtgttttagttatgaagcctttgcccatgcctatgtcctgaatggtattgcctaggttttcttctaggttttttatggttttaggtcttacatttaagtctttaatccatcttgagttaatttttctataaggtgtaaggaaatggtccagtttcagttttctgcatatggctagccagttttcccaacaccatttattaaataggaaatcctttccccattgcttgcttttgtcagggttgtcaaatatcag

SEQ ID NO: 886593 - DNA, 630 bp, Homo sapiens
ctgactttttaacgattgcccttctaactggcattagatggtatctcattgtgcttttgatttgcatttctctaatgacctgtgatgatgagctttttttcatatgtttgttggccacctaaaagtcttcttttgagaactgtctgttcatatccttcacacactttttgatggggttgttttattctcggaaatttgtttaagttccttgtagcttctggatattagccctttgtcggatggatacattgaaaaacatttgtcccattctgtaggttgtctgttcactacgatgatagtgtcttttgctgtgaagaagckctttagtttaattagatcccatttgtcaattttggcttttgttgccatttctttcagtgttttagttatgaagcctttgcccatgcctatgtcctgaatggtattgcctaggttttcttctaggttttttatggttttaggtcttacatttaagtctttaatccatcttgagttaatttttctataaggtgtaaggaaatggtccagtttcagttttctgcatatggctagccagttttcccaacaccatttattaaataggaaatcctttccccattgcttgcttttgtcagggttgtcaaatatcag

SEQ ID NO: 886594 - DNA, 651 bp, Homo sapiens
tttggtatttgttaacaaccagatcatctgaaacctggatttctctacttaatttttactaatattactgtcagagtaacacagtttctaactttgaagattcagatggtaaacaggattttttaaaatgcaaggatgtcaggcttatttcctaaaaatagccatatggaatacaatataaattctaggttttgaagctgtttctatgacacacatattactgatagcttttattataatttatagcatcacactgatgtcacattgttttctaaatgtcttgcaratttcaatgtgtgagagactaatttgttaactgttctgtcttgggtttgagtttttgttttttatgagtttaaaaaataccaacttatgatagagcagagactaaagaaaacaaacaaaaaagaaaatactcagagtttaacttctctattttactgtcagtctctaacctacagcattttgaagttaatggcaatgatgactggggaaaatgtgcacagagagaattaccacataaacttatacctgtttcaaattgtaggtagtacaactatgcctttaagagttacttctttgtgtacctctcagaacaccattattgagcaaatgacattagaaaatacaattaggaaagaaataatatag

SEQ ID NO: 886595 - DNA, 684 bp, Homo sapiens
tatcatactgaatgggtaaaaacagaaatccttttctaagttcaggaacacgacaaggatgcccacttttaccaatgttattcaataatatagtccttgaagtcctagctagaacagtcagataagagaaggaaataaagggaatacaaattggaatggaagaagtgagattatccctgtttgcagatgatatgatcttatatttggaaaaacctgaagactccaccaaaaaactattagaaagacattcagtaaagttgcaggatacaacatcaacatacaaaaattattgaaatttctatatgccarcagtgaccattatgaaaaaaataatcttacgataactacaagtaaaataaaatacataggaataaacttaaccaaagaagtgaaagattctacaataaaaactataaaacactgatgcaagaaatagaagaagacacacaaatatggaaagatattccatgttcactgattgaaataatattattaaaatgtcacgctatgcaaagcaaactacagatccaatgcaatccttatcaaaatactaatgacatttttcagggaaataaataattataaaatttatatagaactacaaaattcctcctagaatagtcaatgctatcctgagcaaaacaacaaaactggaggaatcacattacctgacctcaaattata

SEQ ID NO: 886596 - DNA, 666 bp, Homo sapiens
tgactttcggatataagaaacagcatatggcaacagatgctgtgcacctagctaacaatcaatgaactgcaaattttccacttggtatcatctatccagctctcatgaagttgacctcccagctacagctcacacagttgattctttgtgggtccatgacttttttggaccttgcttggtgaggttaagaatttgcatatatttctcctggctttccctgatggtgatttgtttttctgtttcartcacattgagtgggcagtgataaaaccagtacagaaggccagtgtagccatgtctacaagttgacgtcctcactcataagaaaacgtgcaggtcttatgtctcatagttatatgtgtcgattgaaaattatggtgtccaccttgtatgggaatgtctgaaacagtgtgtggagttatgatataatcttgacattttagaaaaataatactttcagcattaagctactttctactaggtattcacttttgatttgagtacttctttagttacagccaatgttctgtcttttactggtggaatatctgctagccatgctatagggaatgaagaacagctcttagcagaatagagcaggcagggaagtggcagtccacccagtgccccaggttttttcattcatccattcatagaaacaaagaa

SEQ ID NO: 886597 - DNA, 581 bp, Homo sapiens
tctcacttcaatctatttagccttccttgagctagataccagcaccatcttacctatgaacccagactctactcaaatatgtcactcacgattcggctggatgctctgaacaacaaagttagaccccactgatgttcattaccctgaaatggatgtgatgattggggttgtctcctgtcaccctttggagtccagccctacatcaagtctgttcccgtaaccccacctctgacaatcactaatagacctttgagtctctttctgtagtcgagaggtcctagtacatctcatgagaaggtccccgagggttaggccayggacattgtttaaaaatatataaattataaagtactctacaaggacttagtgttaccatcataattatctcatgatgatccagttcttgctgccagagatgctgctatgtagaggaatgatttgagatggagactggacttctaagtgccttccatgtttaatcatccgaagtcctgcagatgcactgaattccattttaaaattaacagaattaggcaaattaggcaaaatcctattttctacatgaatttcaagtattgttt

SEQ ID NO: 886598 - DNA, 592 bp, Homo sapiens
accctggtcacagagccacccctttgctctgggcccccagaacaaagaggcagtaggacacaggaagaacagtgtcctcagtgatccagggactcaaagacaggccaatgtgtgatgttttagcccctcctctggctgcagtggcagggctggggtcagagggaggatgttattgtggagagtgctgtttcttttgatgtgcaaggaggggtactatgggctgaatgtgtgtcctcccaagttcatatgttgaaatcctaataccaaggtggttgtattagggaggtggggcctctgagaggtgattaggttctgagggtaaaggcctcatgaacgggattagtgatttcataaaagaggctccagagwgctgttttgcccattccgccatgttaggaccagcgagaaagcaccatctgtgaaccagaaagtgggccttcatcagaccctgaatctgccagtgccttgattacggacctcccaacctcgagaactgtaagaaatacacttctgttgtttgtaaactatctggcttatggtattttgttatagcagcccaaatggactaagacaacggatgttcagcaggatc

SEQ ID NO: 886599 - DNA, 602 bp, Homo sapiens
cagagctttgccagtcaagagcaggggtgtaagctgccattgtgtgaaaacaagttaagttgcttggttccagggaatgtggtccaagtgtcataaatgcatctgtttaataatgcatatcagtagctcttccagaatttgggtgccttgagctgcctttgtttcctcatttccagaaaaatgaacaagtccgtgtcttgacaaaagcactagatggcagcataggacatctattcaactgtctctctccacaggctgctggaattttgacagatacaaaacggtacctgtggttttgtgtataaaactggtataactgtttgtacatttaaaaaatgtaacaataaattaaacataagggaaaagggttgctaataaatacagtgttagactgcatttttgtataccaggtgacaagcctgggcattcaaacytgatttgtgtaggggatgggcaggatgggaagcgagttgaaagagttgcaaaatgtacacgctgggtggttatagcttccttgagggttgttgttgatttacccatatgtctgtgtgcattccatagaggtgaaaatttagggaagtgaggggtacgatatgtctgaa

SEQ ID NO: 886600 - DNA, 656 bp, Homo sapiens
tactttataatcaagccccagtttaattttcaagtgttatctcctgaatactccaccatcttctcactacattatatatcctatattttagccaaaacaggccactggacattttctgaatgtgccacatttcttcactgctattggttttggtacttgctattcttcacgtaatgacattttcctccattgtcaggttggggagatgttcatcatttatatcttgtttccgatgtcaactcctctctgaaatatgccatgttagcccttggagaattaggtggcgacttatatagcatcyacttttgtgttcatctcctctaatgttgattgggtaagtttgtttattcatgtgactataaattccttgaggatggagtttggattctttcacttttgaatccacaaaaccttttttttttatgggaaactgttggtgcctttttaataagttgtggtgaggagagttcaaattacagcataacagaattcgtttagtgaattagcacagtctgtagttagcatatcatatagcagtattattcagttaaggaaaaatacagttgaaacacattacattttaattccctgtgagtaaagtgataagtaaatgtcaaatcatcattgggagaacatggaaatagtcaagcataacg

SEQ ID NO: 886601 - DNA, 693 bp, Homo sapiens
taattttactttcttactttctactggctccaaatcacccctgttcattactgcatagggactctcttataaacgtagtagaaatcacagtaattttctaaaatcttctgcttgcatctacaaaaacctggttttgtttttcaatctacatatatctttagctggaataaaaaggtaaaaacttctgcaatatatgtggctttgtcattctgattggcctttagggattgcccagaaaacagtggtgactgcccagggcttatgcattgacctgcacttttttagtgtttttcaagagattcaacagatgggataattgttgtccctgaaagctctgcctggtggtctggcatcccaggaatttgcccacattcctttgtgttggttgtctgactctgccctttgcagcagggtttcacaggtataataggattttacttttaaggtagcaggcaagctgcctggcaaagaatytacttacagagaggaggcactacccttcccattcccttgcctctgtgctaggaatctttgatttagagcactgcagctgctgcagttcattactgtacattttagagtcaagcacgactgtatcagtgggttaccccctaaagtgctatactcattgtgataatagctaaggatattacagacaggaggagtgaatactgcctttggagcatcactact

SEQ ID NO: 886602 - DNA, 562 bp, Homo sapiens
taaggtcagaatattctattggtttgtgttagtgtcttgtattcatccattttcatactgctatgaagaaatacctgagactgggtaatttataaagaaaaaggcatttccatacatcctctgaaatctaggtggaagttctcacacctcaattcttgacttctgtacacccacaggctcaacaccatgtggaagccaccaaggcttggggcttgcaccctctaaaacaacagcctgagctgtatgttgacttctttcagccatggctaggacatagggcaccaagtccagaaactgcacaaagcagcaaggccccaggmctggcccatgaagccatttttcactcctaggcctcctggcctgtgatgggaggggcttccgtgaagacctctgacatgccctggagacattttccccattgtcttggcactaacatttggctgctccttacttatgcaaatttctgcagccagcttgaatttcttctcagaaaatgggtttttcttttctattgcattgtcaggctgcaaattttctgaacttttatgctctcttccctttt

SEQ ID NO: 886603 - DNA, 614 bp, Homo sapiens
ttaagctcaggggggcattattcatcccccaaggacttcaaaggaagtgagtggattgtgaactcttttttttttttttttttggagacagagtctcgctctgttgcccaggctgtagtgcagcagcacaatctcggctcactgcatcctctgcctcctgggttcaagcaattctcctgcctcagcttcctgagtaactgagattataggcatgtgctgccacacctggctgtttttgcattttagtagagatggggtttcaccatgttgcctaggctggtcttgaactcctgagctcaggcaatctgcccgcctcagcctcccaaagtgctgggattacaggtgtsagccacactgcctggccaattgtgaactcttaaatatcagaaaaaaatatattctcatctttttggctcaatattagtatcagtttttaaaaactgataaaggtgactgttaaacattagctgataccacatcagaaactgaagcatagcaatatatggaaaagacttaattttagatgtaaccctaatctttaccctaatttgaactcacccaaagtgtgattattcaatatgtacatcatcgatatgcatctaatctgtactggg

SEQ ID NO: 886604 - DNA, 636 bp, Homo sapiens
tgcttgttttagagctttagagaagtgattgtatcctgtctgtagtcttccgtgatttgctttgtctatgtcgctataggaattatccctttctattgatttataagaataaacccttaatggctaaatgtgtgcaagttttttctaccagtttgtggcgtattgttttactcttttaatgacgtcatttgatgaatggaagttttaaattttaattatagtttaattttctattacagttagtagttttgtgtcttatttaggaagttattccttattctaaggttatgcagatattcttctgtattatcttctcagttttttaaaaaagttatactttcatatgtaagtcttaatctatctggaactgaagtagaagtccagtagatttattttttttttccttatggacaatcaactacttaagcctcatttattgaatagttctttatttactcartgattcacaatgcaatctctgtcataaaataaatgtatatacacagtcatgtttccagcctttgtctagccctatgccattatcatactctcccatgtcagtgtaaattcacgtctttgtaatttgtagggcaactcactcttttcttcttcttcaggatcaccttgactctaatg

SEQ ID NO: 886605 - DNA, 594 bp, Homo sapiens
ttgtgatttttgctcattgattttgtatcctgagattttgccgaagttgcttatcagcctaaggagatttggggctgagatgatgaggttttctaaatatacaatcatgtcatctgcaaacagagacaatctgacttccacttttcctatttgaataccctttatttccttctcttgtctgattgtcctggccagagcttccaatactatgttgaatatgagtggtgagagagggcatatttgtcttgttctagttttcaaagggaatgcttccagcttttgcccattcagtatgatattggctgtggttttgtcacaaatagctcttattattttgagatatgtgccatcaatatctagtttattgagagtttttagcatgaagtgctgttgaatttcatcraaggccttttctgcatctattgagataatcatgtggtttttgtcattggttctgtttatgtgatgaaatacatttattgatttgcatatgttgaatcagccttgcatcccagggatgaagccaacttgattgtggtggataagcttttggatgtgctgctggattcggtttgccagtattttgttgaggat

SEQ ID NO: 886606 - DNA, 473 bp, Homo sapiens
tttggtgtcttcacttggtatttatgtgacgtcattaacacttatttttatattttgttagaaaatcttgcacttctgtagtttccaagagctctcttcagttagctgtaaaaagtttgccaattagtaaagataaatgctagagacacacaagcaagactaggaacaatgacaaaagtagcagattcaagcaaatgactgtggcagtttagaacaagtcactgcagacagaagaagccacttaatggaaatgtgaataacaaatacataaatgtaaatggaaataattaggaagctctgtggccaaatgrtgaggtaaccacatggaatggagcagaacctagcaacaaacctatagaaaaagagaggttttttttttttttttcagagactgagacactggattggtgcctgaaactggtacacacagtgggaggaacggatgagagcaagcatggacaaccacatccctt

SEQ ID NO: 886607 - DNA, 599 bp, Homo sapiens
aatgtttcctgaattcaggacaaataggattttggtatatgtcaccctttgaaagacaaaagaggtgctttctggagaacacactgctcttgactttaagcctccttcagttctgtttcacagtttttattcttcatggtctgttgaactgaacttgtgacttcaagtggttcactgaactgagatttattgcagtttgaggaaggaaacagtaaaataagaaggcagttttgctatttttgtacaagacctcctaagcaacatttcacaaaacacatggtttcaattacctctgtggcatccacccacccacccactcatccattcagccaatattgtccagtgtcactrtgttagggctgggaatgcagcagtggacaagatacatacagtttctgctctttggagcttatagtctagggtgagatgcagccaggttaaccaggcagtttccagtagagtgtgattaacagctaggatgattgaactctgggctgtcatgagaacataaaaaagatgtctatgacccaaaccagctgcaatgaatagacagaaattatattagctatctgtggctgcataagaaattacccccaaaa

SEQ ID NO: 886608 - DNA, 607 bp, Homo sapiens
atgtatctgccattacagattaacacagaatagttccatttctctaaaaatctcctgtacttcacctattcattatttcctcataccctccccttgtctgtaacccctgcaacagctaaatttttactgtctatacacttttgcctttaccagaatgttatatcgttgaatttatacaatatgtggcyttttgagactggcttctttcaactagcaataaaatgcatttatggtttctccatgtctattcatgacttgatagctgaagtttttaacacttaataatatgttgttttatgaatgtaccccagtttatcccatccacctattgaaggacaccttggtttctttgaatttttggcaaatgtgaataaagctccaataaatatctgggtgctggttttgtggggatatgttttcaaattatttgggtgaatgcctaaatgtgtgattgctgaatcatgttaagatgtttagctttgttagaaacttccagtctgtcttcaaaagtgactgtaccctttttcaattccacctgcaatcaatgatgctcaatattctcaccagcattttatggtgtcagtttttttgtactttagccattcta

SEQ ID NO: 886609 - DNA, 637 bp, Homo sapiens
tattcagataattgtataatatcaaagctgaagaggtccgtggtaattatccagtcccgctatttcattttgccaataaagaatttgaagctcagagaagttaagtaattaaatctgcattatctaataaatcagtgtcagagtctgaaacagaacccagagttctgactctcagtcttcgtcctcttctgctacaccatcttgccccctgacatcattgcataattttatctctggccaatcatcttgattatcacaatctttgcccttgaaaaaaatcctgatctgttaacctggcargtgctctcccataagcatagtcaagtggtgtcacaattgctgtttacactaatcataatgtactattcccatgagaaacttatacataaaatgtgaagtactctgtctccatattctcagttttaacctgacacaccctcctccaccaatcaaataatactcccaaagttccattggaacttctggactgtagctataaaatacatgagaaaagatgccggattttataaatatgtgcctgtaacatcacactagacccacctgggtgtcaacattttccccctatttagaaggccagaaataaatgtacatgggaaaagaatataggtagaatttg

SEQ ID NO: 886610 - DNA, 612 bp, Homo sapiens
tattgtttttcctagggtaatattaaaatgaatttgtattccaagaacacacatctgaggacatagggtattcaaaggcattgggggaagcctcactgagattaaaattttcctttagataatttgtgggttgatgtgcaacaagcgtcatgaggcgagaatgtatagataattaagatgtgagttttwtctgccttgggctgtttatgatcatacttgtctcccagatatacttggtgaattggatatcaaccctctcatcataaattatcagtgaatcctgcccaggactctgaggatgccacaagtggggaagcaggaggaagacttctgcttttctctttccaagtcttgtggtcgttaaagtttgatatccattaatgcataagtgtcatcaccccgctgaaaatgcagctcttctgtatgtgttttgattaccttgtcagaggccaggcagagagaggttgaacagcagtgctgctcctgcactgttatttctgcttccattacttgtcccatctgtcagtttcaggaacattcatatctatggagccattatttttagtgctgtaattatcttggatgtctaaaaacacagtgtatcatgttggt

SEQ ID NO: 886611 - DNA, 612 bp, Homo sapiens
tattgtttttcctagggtaatattaaaatgaatttgtattccaagaacacacatctgaggacatagggtattcaaaggcattgggggaagcctcactgagattaaaattttcctttagataatttgtgggttgatgtgcaacaagcgtcatgaggcgagaatgtatagataattaagatgtgagttttatctgccttgggctgtttatgatcatacttgtctcccagatatacttggtgaattggatatcaaccctctcatcataaattatcagtgaatcctgcccaggactctgaggatgccasaagtggggaagcaggaggaagacttctgcttttctctttccaagtcttgtggtcgttaaagtttgatatccattaatgcataagtgtcatcaccccgctgaaaatgcagctcttctgtatgtgttttgattaccttgtcagaggccaggcagagagaggttgaacagcagtgctgctcctgcactgttatttctgcttccattacttgtcccatctgtcagtttcaggaacattcatatctatggagccattatttttagtgctgtaattatcttggatgtctaaaaacacagtgtatcatgttggt

SEQ ID NO: 886612 - DNA, 464 bp, Homo sapiens
ggacttcattgtttatatgactatcagcattgtggtcacaacaatttaaccagtcactaaaaagtttcaaacattccctcatcttcctatcttcttctgaaccctccacactcttccagtttctgtctgctacccaattccaaagtagtttccagatttcaggtatctttagaaaaattcccaactccttggtaccgttttttttttttttttttttttttttttttttttgtraaatagctgacactgggaaatttataaagtaaaaaggtttaattgtctcactgttatacaggctgcacagaaagcatgatgctggcatatgctcagcatctgggaaggcctcagaaaacttacaatcatggtcaaaggcaatgggggagcaattatgtcacatggcaaaagcatgagcaagagagtgaggagagaggtgcaacacacttttaaatagctagatctcagaa

SEQ ID NO: 886613 - DNA, 695 bp, Homo sapiens
tacatgtggctagtcaactgtcccagcacaatttattgaatagaaagtcttttccccactgcttaattttgtcaactttgtcaaatattagatggctgtaggtgtgcaactttatttctgggttctctatttctgttccattggtctatgtgtttgcttttgcatcagtcctgtgctctttttrttactgtagccttatagtacagtctgaagtcagataatgtgatgcctccagctttgttctttttgcttaggattattttggctatttggcttattttgtggttccatataaattttagaacagttttttttttttcaaattctggaaaaacgactttggtagtttgataggaagagtgttgaatctgtattttgctttggatagtatggccatttttatatttattcttctaatccatgagcataggatgctttttcatttgtttgtgtcatctatgatttcttttagcagtgttttgtagttcttcttgtacaaacaaacctcttgctgccttggttagatttattcctagctttttttttttggctattgcaaataaaattctattcttgattcagcactcagctttaatatatagaaattctactgatttttgcacattgattttgtatgctgaaactttgctaaatcttttgtgttccaggagcctttcaatgttctttagggtttt

SEQ ID NO: 886614 - DNA, 601 bp, Homo sapiens
atcatatgatctgtgaacataaatagtttgaattaatgtttggataaacatacattctttttttaacattatcttttaaaaacattatcctctttttttatttggatacattttcttttcttttcttttttttttttttttttttttgcctgattgctctggctaggacttccagtactgtgttaaatgggagcagttagagtgagcatccttgtctggttctggttttcaagaggaacacttttagcttttgctcaattagtatgatgttggctgtgggtttgtcatagatggctcttattatttttatgtaagttccttcaatgcctagtttgttgaggattttttaatatgaagggatgtttaattatatcaagagccttttctgcatctattcagatgatcatgtcatttttgatgttctgtttatatgatgaatcatattttttatttccatatgttgmaacaactttgcaccccaggaataaagcctacttgattgtggtaaattagtttttgatgtgctaatggattcagtttgctagttttttttttttttttgaggatttttgtatctaggttcatcaattatacttgcctg

SEQ ID NO: 886615 - DNA, 529 bp, Homo sapiens
gttccagaaaatatacccttgaccaatgccttgtgaaatagatttgtaagggcagcacctgcatctttgaagagccctgtaattgcttttctctgtatgtcagatctaacagtgggaactgcagtcactcaactacaaaatttaaatacaatgggaataattggatcytgaggtggcaggggccaagtggcagcactcaactgtcaaagtcaaggtgggcgtagctaccacaatggacagcagaggcaaagccacaatcagaattgtctgactcgtgtagagctctggcattggctaattaatcatggtgttcctagaagtgaaattaataggaagcctactgcatttctacttaaattatacaaacagaaaacttctagattgaatggacaaaagactaatttgagttatacaaacagagaatcatagcccctcaatcaatttccagacttgaaccagtttacagacccaggacctcttgaatgaaggggaggccaggtccccttgaggaaggaccccactatattac

SEQ ID NO: 886616 - DNA, 773 bp, Homo sapiens
taaaattagcaagacatgcctcttcacagctactagaatgacaaaatgtaaaagactgacaatatcaaatgttgggggtaatatgggccaaagaaactttcactcacagacaattggaaaagtaaatggtagagatgctttggaaaatattttggctgcttctcagaaaaaaaatcataaacatcataacatcatgtgacccagcaattccatctctaggcatttatcaagagaaatgaaaggatatatccatatgacttgtatataaataattatggcaacttaattcataacaatcccaaatgggaaacaacatacatgtccatccataagtgaatggataaataaattgtatacatctacaagcgaatctcattcaaaattaaaatgaacaaacatggatacatgcagtaacttagataaatctcaaggcatcagtgctgaatgaatgaaaccagtctcaataaaagtatgtagggtatgatytcattcaaattatattatatagcttacaaaactacctaacagtgatagtaattaatagtggtagtaataatctgtttacctgagtaaaggtaggagaggggattgactgaaagggaagaggggaaacctttctgaagcaattgaaatattctacatcagtatttggttggtggataagcaagtgtatatatttgtcaaaaattatcattctgcctaaaatatgtgatttttttaatcacatgtaagtggtacttcaaaaatgtcaattaaaattacaaggtgaaata

SEQ ID NO: 886617 - DNA, 703 bp, Homo sapiens
gcctttgtctctttctctctctgggaactgagtattgttaccccttctagcagccatgggacaagaactatacaaagacttacagctgttttttttttttttttcctttggtgccaaaggcagtgaactgacagaatgcttttcattttctcttgacagccagcaaatgttttggctggaaaccttccctgaatgacagaatactgggtttgaaagaaacattttcatgaagtatgtgcccctgtgggatggatctggtttgcamattaagacactgctgccctcacccatgagcactagttcattcctgcctccaaatactcactttccatcatagagacgtgtggtctgaatattggggaacataaatgtgttttctctacccttgagttattattcactttttagtattgttccaccacttggtgtggtacaagctaagaaaacataattaaatacaaatcaacaaagtaaaatagcaaaatgaggtggaaaggccagttattgccttataatttttataaaaagttgtctatcattttggttctatgattcattttgtcttcatacagaatctacaacactcagcacaatttttatattaagcaagaagttttagaaatttaaagttagtgatgtgactcacaatagctacagttggagtagtataatttagtctaaagcaatatagttgcttctgttg

SEQ ID NO: 886618 - DNA, 617 bp, Homo sapiens
gccatcctactacagggcatacattcaaagaaaataactcatcctatcgaaaagacacatgcactcacatgttcattgcagcactattcacaatagcaaggatatgaaatcaacctagatgccaatcagtgctggattgaataaagaaaatgtgcttcatatacaccatggaatactacatggccataaaaaataatgaaatcatggcctttgcagtaacatggatggagctggaggccattatcctaagtgaactaacacaagatcagaaaaccaaatactgtaggttcttataaattggagctaaacattgartacacatcaatgtaaagataggaacaatagacactggggacctctagatagggaagggaaggggggattatgggactaagacccacctgttgggtactatgcttacttctggggcaataggatcattggtacctcaagcctcagtgtcacacactttacccatgtaacaaacctgcatgagtaccctttaatctataataaaaattaaaattatgaaaacatagtattaaaatgaaataattagaaataaattttaataaaaatatacactgtaaactacaaaacattgcaaaagtaaatta

SEQ ID NO: 886619 - DNA, 641 bp, Homo sapiens
gctgttattctaagcaaattgatgcaggaacagaaaaccaaataccatatgttctcatttataagtggcagctaaatattgagtacacacggatacaaagtagggaatgacagaccctggggtctgcttaaaggtggagggtggcaggaggggaagactgaaaaacaacctatacagtactatgcatattacctgagtgatgaaataatctgtacaacaaacacccatgacaaacaatttacctatgtaacaaacctgcacgtgtattcttgaacctaaaagctaaataaatwaaaaattaaaaattaaattataattttcaatgtagaagttttacctgtagattttttatcttactaatttttgtataattgtttcattttgactttggaaagttaatagatgttttatagtgatccctaaacagcactattttgacaatgtaaatcttagtaaagtacattgattctaaatatttttaaaataaaatttaacaaaatggcaaaaaaaaaaaaaaattagaagaagcaattacatccccagatctccgattctcaattaacctggcaactttctcttcccaacaaacactcctcccctcctcagtagaacactaacagtttatttactgaaaagaataa

SEQ ID NO: 886620 - DNA, 616 bp, Homo sapiens
aggaaacagaatagagaacccagaaataaagcccaatatttacagccaactgatcttcaacaaagcaaacaaaaacataaagtgggagaaggacaccctattaaacaaatggtgctcagataatacacaagtcacatttagaagaatgaaattggatcctcatccctcacattatacaaaaatcaactcatgatggatcaaagacttaaatctaagacctgaaaccacaaaaattctagaagataacatcagaaaagcgcttctagacatggacttaggcaaagagttcattaccaagaaccaaaaagaaatgcaatagaaacaaagataaatagatgagacttaattaaaaagcttcctcacagcaaaaaaaaaaaaataataataataatcagcaggattaacagacaacccaaagagtgggagaaaatgtattcaaactctgtatgcaacaaagaactagtatccagaatctasaaggaactcaaacaaatcaacaagacaaaaaccaaataatcccgtcaaaagtgggcatgaatagacagttctcaaaatgtaatgaagacatggaatcaacctaaatgctcatcaatgatagaatggatcaagagcatgg

SEQ ID NO: 886621 - DNA, 608 bp, Homo sapiens
attgaatcgtggtgaaacaattaggtgtatccatgttgtaggaattctaaaaagtaactgccctggactcttcaagatgccaaaagacacgtacatgtggaggaactatttctaataaaaggagcctaacaactgtcttagtccatttgggccactctaacaaaataccagaaactgggtggtctataaataacagatatttatttctcaaagttctagagactggaaagcacaagactaaagctccagcatatttagtgtttggtgaggttccactttctggttgatagacggcaccgtctagttgtgttctcacatagtgaaaggagcaaatgagctctcttaggccttttacaagggcactaaaagcacatgcgagctctgacctcatgacgtaatcacctcccaaaaggctccacttcctaatacawtcaatttgtgggtaaggatttcagcctatttgggggagacaaacattcagaacaaagcaaaaaccaagtgcaatgcctgtttattgattagattctggtttgggtgtgggaggtgacgaggactattttcttgaccaaactttaatgaggctgatctgagcttacttctcaactagg

SEQ ID NO: 886622 - DNA, 608 bp, Homo sapiens
attgaatcgtggtgaaacaattaggtgtatccatgttgtaggaattctaaaaagtaactgccctggactcttcaagatgccaaaagacacgtacatgtggaggaactatttctaataaaaggagcctaacaactgtcttagtccatttgggccactctaacaaaataccagaaactgggtggtctataaataacagatatttatttctcaaagttctagagactggaaagcacaagactaaagctccagcatatttagtgtttggtgaggttccactttctggttgatagacggcaccgtctagttgtgttctcacatagtgaaaggagcaaatgagctctcttaggccttttacaagggcactaaaagcacatgcgagctctgacctcatgacgtaatcacctcccaaaaggctccacttcctaatacattcamtttgtgggtaaggatttcagcctatttgggggagacaaacattcagaacaaagcaaaaaccaagtgcaatgcctgtttattgattagattctggtttgggtgtgggaggtgacgaggactattttcttgaccaaactttaatgaggctgatctgagcttacttctcaactagg

SEQ ID NO: 886623 - DNA, 650 bp, Homo sapiens
gaaaagtatgagtgattccaacttaagaagttttaaattgtggtgatgtcagctctattaataggctaataaaaacttttaagattaggcctggtcatgggaatacgttttcaggaatcgtttcatgaaaaaacacacaaaaatgttttacttatggttctgtattcstcaaaattctccagagacacagaatcaaaagataaatagatataaagatagataggtgatagatggatagatagatagatagatagatggatgatagatagatagataggaaaataaatatatgtgaggggttaataggggaattggctcaaattattatggaagctgagatgtcccacactagatcatctgtaagctgaagaaccagagaaactactagcatgctcagtccaatttggaaggtctaagaaccgagaaagccaacgatggaagtctcaatctgagtccaatggcaggagagccccagtagactgcaagtgcaattcccagagtcaaatggcagaacaacctagagttttgatgctcaagggcagcagaagggtgtgctactccaaaagagagaaagatataattgacccttctacccttttttgtttaataagagcccttagccaattggatggtgtttgcccatgttgagg

SEQ ID NO: 886624 - DNA, 650 bp, Homo sapiens
gaaaagtatgagtgattccaacttaagaagttttaaattgtggtgatgtcagctctattaataggctaataaaaacttttaagattaggcctggtcatgggaatacgttttcaggaatcgtttcatgaaaaaacacacaaaaatgttttacttatggttctgtattcgtcaaaattctccagagacacagaatmaaaagataaatagatataaagatagataggtgatagatggatagatagatagatagatagatggatgatagatagatagataggaaaataaatatatgtgaggggttaataggggaattggctcaaattattatggaagctgagatgtcccacactagatcatctgtaagctgaagaaccagagaaactactagcatgctcagtccaatttggaaggtctaagaaccgagaaagccaacgatggaagtctcaatctgagtccaatggcaggagagccccagtagactgcaagtgcaattcccagagtcaaatggcagaacaacctagagttttgatgctcaagggcagcagaagggtgtgctactccaaaagagagaaagatataattgacccttctacccttttttgtttaataagagcccttagccaattggatggtgtttgcccatgttgagg

SEQ ID NO: 886625 - DNA, 659 bp, Homo sapiens
tccaatgttttattttgttttgtattttaaattgtgtttatttttaatttttgtgaatacatggtaggtatatatatttatgggtcacatgggatattttgatacaggcatgcaaaaatgcataataatcacatcagggtaaatggggtttccttcgactcaagcatttatcctttgtgctacaaacaatgcaattatattagggagctaaacattaaaataattggactcatgttcagtatttttgtctctctcccctcagaatgactgtctatcttgagaaaaaaaaaaaaaaaaaaaacatgcttaaaccgtataccatatcttgtttttgtagrcatccagagagataggctcttaaagatacacaaaccctacttttaaaatattagagaagaattgaaggaaagattgaccacctgctgtaggggagaaaaaagtgatatgttttcctctcccatcacaagggtgttcatagccaacacccctataacaaaagacagattaacaagagaaaatcatcatttatttatttaaccaaagttttatgtgacatgagagccttcataaatcaatgcaaaccaaaaaacctagagaaaatggtgtatttttatgctgagtatgaagaaaaaagtcgatagttgtgaaaaaacatgatt

SEQ ID NO: 886626 - DNA, 640 bp, Homo sapiens
caggaaacaaaatcaccatacagaaatcagtaacatttattccctcaaaacaaactatatgaaaaaaagtcaagaaagcaattccatttacactagcaaaaagtaataaaataaaatatgtaaaaataaatttaacaaataaagtgaaagtgccatacactgaaaactataaaacattgatgaaaraaattaaagaagacacaaatgaatggaaatatataggatgttcacagattagaagaactgatatttggggctttgctccagattaggctttggcttaagtgaatgttatgcctagtttgatcttctgtcagaccaatcaaactttctccatataagcaataaggctgttttgcttccttatcatttgtatgttcactggagtagcacttttaatttccctcaataacttttcctttgcattctcaacttggctgactgtttggcttaagagacccagcttttgacatcccttcctcacgaacttagcttttgatttaaagtgagatatgtgcaaatcttcctttaacttgaacactgagtcatcattgtagggttattaattggactaatttcaatattgtggtgtctcagggattggggaggccttaggagaagaagaaacacagggtaacag

SEQ ID NO: 886627 - DNA, 640 bp, Homo sapiens
caggaaacaaaatcaccatacagaaatcagtaacatttattccctcaaaacaaactatatgaaaaaaagtcaagaaagcaattccatttacactagcaaaaagtaataaaataaaatatgtaaaaataaatttaacaaataaagtgaaagtgccatacactgaaaactataaaacattgatgaaagaaattaaagaagacacaaatgaatggaaatatataggatgttcacagattagaagaactgatatttggggctttgctccagattaggctttggcttaagtgaatgttatgcctagtttgatcttctgtcagaccaatcaaactttctccatataagcaataaggctgttttgcttccttatyatttgtatgttcactggagtagcacttttaatttccctcaataacttttcctttgcattctcaacttggctgactgtttggcttaagagacccagcttttgacatcccttcctcacgaacttagcttttgatttaaagtgagatatgtgcaaatcttcctttaacttgaacactgagtcatcattgtagggttattaattggactaatttcaatattgtggtgtctcagggattggggaggccttaggagaagaagaaacacagggtaacag

SEQ ID NO: 886628 - DNA, 656 bp, Homo sapiens
aacatcatcaaattggggatcaagtttccaacacatgaactttgggggacacagtcaaaccatatcacctgtttttgcacttctattcaacatagtactgaaagcttgccagagcacttaggcaagaaaaaaaaggcattcctatgggatagaaagaagtaaaattatcttaaataacagaagatatgatatgatctaatatgtgatctaatgtgtagaaatccctaaatatttwacacacacacacacacacacacacacttgttagaacaaataaaaaatcaaacagtttcagaatacaaagtcaacgcccccaaatcagatgcatttctatgcactaacagcaaacaatctgaaaaggaaattctacttacaataatctttaaaaagtattagaaatatgtttaaccagtgaggtgaaatatttgagcactgaaaaccattaaatattgctgaaagaaacgaataagacagtagtacatggaaagttatccagtattcgtgaattgctatacctagtattattaagatgcttatactgcccaaagcgatctacagatttaacgcaattgctatcaacattccaaaatttttttgcttaagtagaaaagtttatactcaaattcatatggaatcacaagggacacaaaaaggca

SEQ ID NO: 886629 - DNA, 656 bp, Homo sapiens
aacatcatcaaattggggatcaagtttccaacacatgaactttgggggacacagtcaaaccatatcacctgtttttgcacttctattcaacatagtactgaaagcttgccagagcacttaggcaagaaaaaaaaggcattcctatgggatagaaagaagtaaaattatcttaaataacagaagatatgatatgatctaatatgtgatctaatgtgtagaaatccctaaatattttacacacacacacacacacacacacacwtgttagaacaaataaaaaatcaaacagtttcagaatacaaagtcaacgcccccaaatcagatgcatttctatgcactaacagcaaacaatctgaaaaggaaattctacttacaataatctttaaaaagtattagaaatatgtttaaccagtgaggtgaaatatttgagcactgaaaaccattaaatattgctgaaagaaacgaataagacagtagtacatggaaagttatccagtattcgtgaattgctatacctagtattattaagatgcttatactgcccaaagcgatctacagatttaacgcaattgctatcaacattccaaaatttttttgcttaagtagaaaagtttatactcaaattcatatggaatcacaagggacacaaaaaggca

SEQ ID NO: 886630 - DNA, 656 bp, Homo sapiens
aacatcatcaaattggggatcaagtttccaacacatgaactttgggggacacagtcaaaccatatcacctgtttttgcacttctattcaacatagtactgaaagcttgccagagcacttaggcaagaaaaaaaaggcattcctatgggatagaaagaagtaaaattatcttaaataacagaagatatgatatgatctaatatgtgatctaatgtgtagaaatccctaaatattttacacacacacacacacacacacacactygttagaacaaataaaaaatcaaacagtttcagaatacaaagtcaacgcccccaaatcagatgcatttctatgcactaacagcaaacaatctgaaaaggaaattctacttacaataatctttaaaaagtattagaaatatgtttaaccagtgaggtgaaatatttgagcactgaaaaccattaaatattgctgaaagaaacgaataagacagtagtacatggaaagttatccagtattcgtgaattgctatacctagtattattaagatgcttatactgcccaaagcgatctacagatttaacgcaattgctatcaacattccaaaatttttttgcttaagtagaaaagtttatactcaaattcatatggaatcacaagggacacaaaaaggca

SEQ ID NO: 886631 - DNA, 656 bp, Homo sapiens
aacatcatcaaattggggatcaagtttccaacacatgaactttgggggacacagtcaaaccatatcacctgtttttgcacttctattcaacatagtactgaaagcttgccagagcacttaggcaagaaaaaaaaggcattcctatgggatagaaagaagtaaaattatcttaaataacagaagatatgatatgatctaatatgtgatctaatgtgtagaaatccctaaatattttacacacacacacacacacacacacacttgttagaacaaataaaaartcaaacagtttcagaatacaaagtcaacgcccccaaatcagatgcatttctatgcactaacagcaaacaatctgaaaaggaaattctacttacaataatctttaaaaagtattagaaatatgtttaaccagtgaggtgaaatatttgagcactgaaaaccattaaatattgctgaaagaaacgaataagacagtagtacatggaaagttatccagtattcgtgaattgctatacctagtattattaagatgcttatactgcccaaagcgatctacagatttaacgcaattgctatcaacattccaaaatttttttgcttaagtagaaaagtttatactcaaattcatatggaatcacaagggacacaaaaaggca

SEQ ID NO: 886632 - DNA, 615 bp, Homo sapiens
ttcaatagtattaattccctgttgtgcttggcctttcccacacctctaaaataacagttatacaattgactctagaataaccaaggaaagtattacgattttcagtattcatagtggtgaaaattaataatggtgcgtttgtggaagaaaaaatgaaagtcgtggctcatgcctataatcccagcactttgggaggccgaggcgggcggatcacgaggtcaggagatcgagaccatcctggctaacatggtgaaaccctgtctgtactaaaaataaatacaaaaaattagccaggtgtggtggcgggctccatagtcccagctagtcgggaggttgagacaggagaatggcctgaacccaagaggcagagcttgcagtgagtcgagatagcaccactgcactccagcctgggtgacagagtgagactccatctcaaaaaaaaaataaaaaacaaaaataagaaagwggagttggtcaacaagaagcagtggtcagttaggaaaacagcatttagggagggggaagcaatcatgatgaatgagtctggcatctcattgtcttgagtgtggtgatctggtgagttttagttctttgatgctttttgagaggcctaag

SEQ ID NO: 886633 - DNA, 625 bp, Homo sapiens
accaaagaaatgttcgttaagattatgttgttaacttcttctgtattaatgcataatataaatacaaaaaccttgtcaagttaacggtttatacttttcctgagctaatagcatatatataatgatttctgcttccttgtttacgatgtgatgacaagggtagctgcgccactgtgggccacaggagcaccacattccaggaagcactagtcacgcatgccaacttacatgtttggcaggcaggagaatgctgggcctttgactgagaaataattctgttttcttcctcccccaaatgtgctcttagagctagaggtcctattaatttcctgagtttttttttttttttacctaaatctttattgggatattagaaacaaataaaaaacctatacaaaagtcaactcaagagggattaaaaaaaaccccgaaactattaaaacactagaagaaatccagggaamactcttcctgacattggtcttggcaaaaaatacaagacctcaaatgcacaaacaacaaaaacaaaaatagacaaatgggacttcatcttcaaatcttctacaaaacaaaagaaataatcaacagagaacagacaacttgcaaaatgggagtaaatatttac

SEQ ID NO: 886634 - DNA, 604 bp, Homo sapiens
aaatgtgtcacacttacattctaggggaagacgggaacaataaacataaacaaatgaataaagagaattagtgagtgtctggaagtaataagtgctaggaagacaaagtaggatatgggtctagagtgtgatgggagttgatgttttaaatagaatgttcaggaaatgcctctttgggaggtgatgcatgtgccaaaatctgaagtgagtaagcactcaaataatgccattcatcatcatcatcatcatcatcatcatcatcatcatcatcatgaccatcaccaccaccattaccactggctggcagtgatttgtaatctccaacccagccctaaaactctaagattgtaggaagaagagggtgaatttccagaccagggctgggataagccgggcacctagggcacacaatttagggaagtacctgctcttaaggttatacaaatgcaaccctgrattaaatcaattatcttcttattaatgtagtaaagttgtctgtgctttaactgttagaagacaacagaacttagggactgaatgtgtcaagacactccttgattttctagcaatcagagaccaggacagttatttgcttgggttttga

SEQ ID NO: 886635 - DNA, 645 bp, Homo sapiens
cattttttgtttcttttctaaacttcctgtttttaggtatgtaattcttttgtccaaagataacctacagaaagttgaaaacatcttggcttcagctactttttgagtcaggagctagttgcaggaaattttacaattcacttcttaaagctatagtttttctttatctttaacatctccactctctccctgtaaccctcagaggtttgaatgagctaatgcctgggtgaccactccccaactctctcccctcactagctatcacccagagattcgctgcatggcctcattgtgggcctgagaagcaaggtatggatgtgggtcgagatatttagtattaggaaactttaggaacacacccaggagggagagaaggaggctaraggtgtttacagcttttggagcccaatgcatttctgggtaagtgagtatttccagctatcaattgctgctgatagtgatttgttaaaaaaaaaaaaaaaaaaaaaaggaaactcagcaattaacactgagagcacaagtgtgctctttgctgtcctaatctaaagcattcttctcatgcagtgggtggttgaagcatcctgaagaattggaatgcatactggattaaggatctggagactggaattctaaatctgtctctca

SEQ ID NO: 886636 - DNA, 662 bp, Homo sapiens
cttctctctcagaacttctagagcacttctagtttattctctaaaatacagcacttatttctcttatattttgtttatagtgaactgttagaatgaaatagaaactgctctcattgtacgagtggctttaaacatcgctatctcttgacctctccttttattcccatggacttttctaatggcctgcttagacttatccctcctccaagaaagtgtcagatttatatttcttttasttttcttgtctgccagttggagataataattactatttcaaaggactgtgaggattgaatgataattacttcagaagtgcctggcattgtttctggtacacaataaatggtagcttttgtgtataagacagatattaaagtgttaaagagaatgagaaaaaggaaagatagagttgtaagtatctcttagccttcttagtaattccccttggctttaggcatgcctcaagtttcaccatttcttccatgaacatctgtgctttgattacataaacattcttgtttcccagattagtctatccataataacatctgtgaaaagatgaggtatgtgtgcaagcataatatctataaagagaagttaaaatcacttctgcatacatattgtttgcaggtatccatgtcattaagtactaattaatgctg

SEQ ID NO: 886637 - DNA, 628 bp, Homo sapiens
tatacattgctctggttcagaaaagtgtggcaacttgaaacaggggcttccagtttataggtagatttaaaaattttctgattggcaattggttgaaaaagttattaaccaatagaaagggatgcgtgggttatgaaaaaaggttgtgaagaccaagttttatcctgcagatgaaggcttcaaatttcagagaaagtagattataaatgttacytatcagacttaaagtctgtgttgatgttaatgctggaaggcgtatgatgagtcatgtccaactgccacttcccatcatagcctgaaccagtctttcaggttaaattttagagttccctggccaatgaggaagtccattcagaatgttgggggaccttataattttatttttgtttacatccctccttctggccaagatttgccagaggcaacatcagtggccaccaaatctttattttgtctcatagcattgctggggtggcatggctgcttcccatgggtccatcctattccttggtaggactccctatggccaagggacttagtcaacaagacttacagctaattaattgttctaggccagataggaatagaagtagataaacattcattaccccttgaaattattattact

SEQ ID NO: 886638 - DNA, 683 bp, Homo sapiens
ctaaaaaagatagcatgaggcacacaatttatttctctttcccctctttttaaaatttttgctgtttactcagtaagtggagaaaaaatattttactacctcatcaatatcacataaaaatcttgtttaaattttagttgtgctggtgatgttaaggctcatttttaaaaactcttatagtaaatttatttactcagtttgatcacgcataatttttaaaatcagatttaccttttaaaaccactttataactttttatctattcaattttaacattacaaaattattttattatgaaacaattttaagtaacatccaaagtagacaaaattacttctctttcaacaaaagccacatcctcatatcttatcttatttttcttatacattatgcataaakaatcatttttgttacagatagtgtgatagttaacattgagtgtcaacttgatgggattgaaggatgcaaagtattgttcttgcatgtgtctgtgtaggtgttgccaaaggaaattaacatttgagtcagttgactgggagaggcagacccatcctccaactggatgggcaacatctaatcagctatcagcgtggctagaataaagcaggcagaagatggaagagcaggtttgctgagtcttccagccttcatctttctcccgtgctggatgcttcctgccctag

SEQ ID NO: 886639 - DNA, 625 bp, Homo sapiens
atttctctaatgatcattgatactgaactttctttcatatacttgttggctgcatgtctaccttcttttgagaagtgtctgttcatatcctttgcccactttttaatggggcttgtttttctcttgtaattttgtttaaactccttatacttagacctttgtcagatgtgcagtttgcaaatattttttcccattctgtaggttttctgtttactctgttgatagtttcttttgctgtgcagaagctsttaactttaattagatcctacttctaaatttttgcttttgttgccgttgattttgtgtctttatcataaaatctgttcctatgtccacgatgattgtctcctagggtttttatagtttgaaattttacatttatgtctttaatccatcttgagttgattatgtgtatggtgtaaggaaggggtttagctttaatcttctacatatagctagccagttatcccagtaccatttactgaacagggagtctttttcccattgcttgtttttgtcagctttgtcaaagatcagatggtcatagaagggtgatcttattttggagctctttattctgttccattggtctatatgcctgtttttgaaccagaaccatgctgtt

SEQ ID NO: 886640 - DNA, 625 bp, Homo sapiens
atttctctaatgatcattgatactgaactttctttcatatacttgttggctgcatgtctaccttcttttgagaagtgtctgttcatatcctttgcccactttttaatggggcttgtttttctcttgtaattttgtttaaactccttatacttagacctttgtcagatgtgcagtttgcaaatattttttcccattctgtaggttttctgtttactctgttgatagtttcttttgctgtgcagaagctcttaactttaattagatcctacttctaaatttttgcttttgttgccgttgatttkgtgtctttatcataaaatctgttcctatgtccacgatgattgtctcctagggtttttatagtttgaaattttacatttatgtctttaatccatcttgagttgattatgtgtatggtgtaaggaaggggtttagctttaatcttctacatatagctagccagttatcccagtaccatttactgaacagggagtctttttcccattgcttgtttttgtcagctttgtcaaagatcagatggtcatagaagggtgatcttattttggagctctttattctgttccattggtctatatgcctgtttttgaaccagaaccatgctgtt

SEQ ID NO: 886641 - DNA, 588 bp, Homo sapiens
tgaagtgaaagtacactccacagggtgggagcaggctcaatcaagtggctcaagatccccagttgcaatattttctcggttttaagtaccctttagaggtttcccattggttacaccatatgtaaatgaagttttggcccataacccatcgtaggctgaaggtttggccagtgaacagaarctgaagtgaaggtttggcttgtgaccaatcagaggctgaaggtttggtctgtgaccaatcagaggctgatgtgaaggttccctgtctcttgactctattctcctgcctcattgtcattgcctttatgaaggaatgaattttcagaggtgcttaccccaccagtgcagacatgtttctctcatcatccttcatgttttcctcttaggtcattttacccttattttagaatactctgtctttaaccatttaatggttacccttggtattttctcatgcatacttaatgtctaaagttaaacattttaccttcttttgagaagacaagggccacagaacattaactcagatgatacctccctcacgaggtatgtgatatggtttggctgtgtccccatccaaatctcatc

SEQ ID NO: 886642 - DNA, 355 bp, Homo sapiens
tttccctctgcttttctcaagctgaaggagttttgccccatagctactgcaactggtagtgtgctgagtctcacctgaagccaggaagtatcagaggcttacccaaggcccttggggcagtatctgggtatcgctgctggttattcagggccaaagggctcttcagttagcaggtgataaatgctgctgggactgggtgctttccttcaagacagcaggytactttctgccccagggtgtgtctagtaatgttttctgggagctacaccctgtaacaggggcctcaccgaatctgacttatcgtgctgtggctgaaatggtaaccaagatctgtaacaggggcctcaccgaatct

SEQ ID NO: 886643 - DNA, 649 bp, Homo sapiens
tcatgctgcttcagggaagagagaagagagcacatatttctcaacctggaatgctctgctttcttttttaaatcaactttattgaggtaaaaattatatggagaaaaaagcatccattttaagtgtacagttcaattaatcttgacaaatgtatacgcctgagtagttttagctcctctcragaaatgaatcataatatcatcctggaaagtgccctcctacccctttgaagtcaaattcccaccgtaactcccatctttgaacaaccgctactctctttctattattacaaaataatttattctgttttagaactcctttatatatatgaaatcatacagcatttactttgtttaatttggagtctggagattcatttatgttattgtgtatatcagtaatttattttttttttgcttactaatctgtatttctttatagaatatgacataatttatcaattttatattgatagacatttgagttgtttccaggttttagttattataaataagactgctatgaacaaatgaacaaatgcaagtctttttgtcgttgtacacaaaatatccagatataaaattgctgaagtcatagggtagatgtgtaattagcttgattaaaaaaattgaaaaaaaaaacttttctc

SEQ ID NO: 886644 - DNA, 656 bp, Homo sapiens
ccaggacggccattattaaaaccaccattgacaagtaaattttggttacttctgtagcatacaacaatttaacataaagtttataattaataacatacagaagttatttcagaattataagagtttcccataattttggagcacatatcaatgacatttctataaatacagcccaaagaaagtcaaacascattttatatttgacgatgcttcttgtatgatttttataccaaataagaccaatatgtctcttttggacttcagaggactcatatcaaaaaattaatgaggaatcaagttagaatttgactttggaaagttcgtcaaagataaaaaatttaaaatgcttgatatcacgaaatagggtcatgggtcattgtaaaataagtcattcatttaaccaaagcagtaactcaaagatttcaaaaaagaaaaaaaaaaaaaggtgaaaatctttattctttgagagaggaggcttaatatcccaaacaataagccctaattaaaaacaggatgggcaaatgaaatttgtttttttgaaattttataataaaagtttaatcatcttgagtataaaatataatttctataaaccttgtaacctttatcattttgcatgaaggagtgagttaatgctccaagaaagccttgttaaa

SEQ ID NO: 886645 - DNA, 656 bp, Homo sapiens
ccaggacggccattattaaaaccaccattgacaagtaaattttggttacttctgtagcatacaacaatttaacataaagtttataattaataacatacagaagttatttcagaattataagagtttcccataattttggagcacatatcaatgacatttctataaatacagcccaaagaaagtcaaacagcattttatatttgacgatgcttcttgtatgatttttataccaaataagaccaatatgtctcttttggacttcagaggactcatatcaaaaaattaatgaggaatcaagttagaatttgactttggaaagttcgtcaaagataaaaartttaaaatgcttgatatcacgaaatagggtcatgggtcattgtaaaataagtcattcatttaaccaaagcagtaactcaaagatttcaaaaaagaaaaaaaaaaaaaggtgaaaatctttattctttgagagaggaggcttaatatcccaaacaataagccctaattaaaaacaggatgggcaaatgaaatttgtttttttgaaattttataataaaagtttaatcatcttgagtataaaatataatttctataaaccttgtaacctttatcattttgcatgaaggagtgagttaatgctccaagaaagccttgttaaa

SEQ ID NO: 886646 - DNA, 447 bp, Homo sapiens
taaattcctaaggcctttattttttcctcgtattttagatttacaatttcttcataacctattttattgccctaggcaattgtcagctagatagccctaaatgtgcatattaaaggaacccttaggtaaaaaaaatcagatagtgaaatttgcwtctcaaagcaccgagagaaagagtctggtgatgttagagggagattgaagatggatgccaaatcaaacacaaaattgtagaaatatattataggattgtataaggagaccagttgtatttagatagggactacctgtcttttaactggatctctgagctctgggcagagcccacactgaatcctaggtctccaaaaagggagaattactatgaggctacaccaagtgacggttttacagtgtacttttttttttttttttaacaaagacatttctaagtgtccaagctacttt

SEQ ID NO: 886647 - DNA, 447 bp, Homo sapiens
taaattcctaaggcctttattttttcctcgtattttagatttacaatttcttcataacctattttattgccctaggcaattgtcagctagatagccctaaatgtgcatattaaaggaacccttaggtaaaaaaaatcagatagtgaaatttgcatctcaaagcacmgagagaaagagtctggtgatgttagagggagattgaagatggatgccaaatcaaacacaaaattgtagaaatatattataggattgtataaggagaccagttgtatttagatagggactacctgtcttttaactggatctctgagctctgggcagagcccacactgaatcctaggtctccaaaaagggagaattactatgaggctacaccaagtgacggttttacagtgtacttttttttttttttttaacaaagacatttctaagtgtccaagctacttt

SEQ ID NO: 886648 - DNA, 612 bp, Homo sapiens
tactccaatcaatcataagttcggtctttttacacagtcccatatttctcagaggttttgtttgttcctttttattcttttttctctaatcttgtctggatgccttatttcagcaagatggtcttcaaactctgatatcctttcttccacttgattgattcagctattgatactcatgtatacttcatggagttctcatgatgtgtttttcagctccatcaggtcatttacttccctctctaaactgggtattctggttagcagctccagcaacctttatcaagtttccttgcttatttgcattaggttagaacatgctcttttagctcagcagagtttgttattacccacattcgcaatcctacctctgtcaattcatctgtcttatcctttgtctaatgctgagagrcattatgatcatttggaggagaagtgttttcagcattttttcgttgattctttctcagcttcatgagtttgtctagtttcaatctttgaggctgctgacccttggatgtggtttgtgtggggacttttttttgttgattctgttgttgttgctgtctgtttttttttctttctataggtcccccttctgtggtgctgctgcag

SEQ ID NO: 886649 - DNA, 568 bp, Homo sapiens
ccccactctgccatagctatgtgtgtaagattaggcatcatatgttgagatccgttctggccatcaatacaaggcatatgattagtcaggcttatggcttagataaacttaaccaaaacctgatttcccagttagcagtaagaagaggaaaagccataatgaataaggaaacagcagtgatcatgatgagccatgagcaaaatgaagttaagtgtgggcagaaactaagtgaaagcagaattagttgattgagctctgcacagtggcttacgcctgtaattttagcactttgggaagccagggtgggagaatcacttgagctcargagtttgaggccacagtgagctatgatcgtgccactgcacttcagcctgggtgacagagtgagatactgccttaaaaaaaaaagaaagaattagtcgattgggatggaaaacaaagaagaaatcagttatgctgagagaaaacatcccataagacaccaggacaaactggctccttagagaatttgaaaaaagtagctagatcctttgagctgtttctattccaatgacgtctgtatttccgt

SEQ ID NO: 886650 - DNA, 617 bp, Homo sapiens
tataggtaaatatgtgccacagtgatttgctgcacagatcaacccattgcctagatattaaggccagcactgattagctattcttcctgatgctctccctcctcccaacaccatgacaggccccaatgtgtgttgtttccccccatgtgtctatgtgttctcatcatgcagctcccacttataagtgagaacatgcggtgtttggttttcattcccggcatttgtttgctgaggataatggtttccaattccttccayggccctgcaaaggacatgatctcattcctttttatggctgcatagtattccatggtgtttatgttccacatttttaaaatttgatctatcattgttgggcatttgggttaagcccatgtctttgttattgtgaatagtgctacagtgaacatacacatgcatgtatctttataatagaataacttatattcctttggatatatacccagtaatgggattgctgggtcaaatggtatttctgcctctaggtctttgaggaatcaccacattgtcttccaaaatgattgaattaattgacacccccagcaacactgtaaaagcgttcttttttctctgcaacctctccagcatctgctggt

SEQ ID NO: 886651 - DNA, 700 bp, Homo sapiens
tctaacccaggcactctctgtattttatatcctgtttcatttctctcttagtccttactgcagcctacaattatttagtacctgtcacccccactggaaggtcagctccaccagggcagagactgggtctgggttgtgcacagctctstccccagcaccttgtccagcacttggcacatagtaggcaccaactaaatatttagataattaaaggaatggagattctgttaaggtcctttcagttctgcagtgagggaggctcagctcggcagggctgggccataacccaggtctacacggctcagaggcctctatcactgacacccttccccagccaccctccatgggtcaccaaggagtagctgacctctctgagttttctgtgccagaagctctagcagcaggggtgctatttggaagaccatgacaatggccctagggtatgatgctctgtttctcccacctccatctcttttccatatttttggctctgccctagcattaagatagccagtcacccagtctccccaggcctgtgctttctgctgtgtttggccaataagagcagagaggggcagtagcctcccaccctccttgctgggtcctgatgcagctgtggctgttgctatggtttgaatatttgccccatccaaaactcacattaaaattttatctccaatgtgacagacagtattgacag

SEQ ID NO: 886652 - DNA, 700 bp, Homo sapiens
tctaacccaggcactctctgtattttatatcctgtttcatttctctcttagtccttactgcagcctacaattatttagtacctgtcacccccactggaaggtcagctccaccagggcagagactgggtctgggttgtgcacagctctctccccagcaccttgtccagcacttggcacatagtaggcaccaactaaatatttagataattaaaggaatggagattctgttaaggtcctttsagttctgcagtgagggaggctcagctcggcagggctgggccataacccaggtctacacggctcagaggcctctatcactgacacccttccccagccaccctccatgggtcaccaaggagtagctgacctctctgagttttctgtgccagaagctctagcagcaggggtgctatttggaagaccatgacaatggccctagggtatgatgctctgtttctcccacctccatctcttttccatatttttggctctgccctagcattaagatagccagtcacccagtctccccaggcctgtgctttctgctgtgtttggccaataagagcagagaggggcagtagcctcccaccctccttgctgggtcctgatgcagctgtggctgttgctatggtttgaatatttgccccatccaaaactcacattaaaattttatctccaatgtgacagacagtattgacag

SEQ ID NO: 886653 - DNA, 700 bp, Homo sapiens
tctaacccaggcactctctgtattttatatcctgtttcatttctctcttagtccttactgcagcctacaattatttagtacctgtcacccccactggaaggtcagctccaccagggcagagactgggtctgggttgtgcacagctctctccccagcaccttgtccagcacttggcacatagtaggcaccaactaaatatttagataattaaaggaatggagattctgttaaggtcctttcagttctgcagtgagggaggctcagctcggcagggctgggccataacccaggtctacacggctcagaggcctctatcactgacacycttccccagccaccctccatgggtcaccaaggagtagctgacctctctgagttttctgtgccagaagctctagcagcaggggtgctatttggaagaccatgacaatggccctagggtatgatgctctgtttctcccacctccatctcttttccatatttttggctctgccctagcattaagatagccagtcacccagtctccccaggcctgtgctttctgctgtgtttggccaataagagcagagaggggcagtagcctcccaccctccttgctgggtcctgatgcagctgtggctgttgctatggtttgaatatttgccccatccaaaactcacattaaaattttatctccaatgtgacagacagtattgacag

SEQ ID NO: 886654 - DNA, 681 bp, Homo sapiens
tcagaccctgggggtacacaatgactttctaagggttcacaggcaacaggccattttgagagaatcacttttcagattctcaactgacatgggtactctgtgggctcttcatttccacatcctcttttggtaacactcttctcccactttataaaacaaagattgatcagtcaatgttctggcaggagacagatagcgtacttacattggctaattggaggaaagtttcataaaggtattatttaaaacttgtgatccggatgaagggaaatagcaaacaatagtgccaggccctggctagtaacagtggggccctggggagggtgaggggaaagagccttctggaatctgcagacaaaaggagactctaggcgggggctgtcagacaggagctgtgaccttctgcagtggaggcaggcagcctgggctcccccacagtagggataaagaacccctacctcactcatctctcagtctaccatctctgcctgttytcgctatcccatggcaaaacccaactgttacaggaaaggggtcccggtccagaccccaagagagggttcttggatcttgcacaagaaagaattcagggtgagtccatacagtgaagtgaaagcaagtttattaggaaagtaaaggaataaaagaacggctacttcatagagcaaacctgagggtggc

SEQ ID NO: 886655 - DNA, 658 bp, Homo sapiens
cactcctgattaactttttttttggttgctctgaaacaaatgtggcacaataaaagaaattggcttcccagaagatgtatagaatcttctgtttacttgttcatttttccttattttctaggagtgaacaatgccccatttccaggtgaatggcaatggagtagttgtccgaggrtactcaatactcaagagtcagctgatcatgtccttagatgcaccagaaatgatggtaaagcttgggagtgcggatacctttgattctaattattagcgaatgcctcagctcagcatcactgggctatatggggcctaaagcagggcagagccaatcaagaacactcaaagacagacagatgcagaactgggaatggacgtgtagggacgggaagctggagaaagatgggagcatgaatatgcatgtaagggtacatagatttggccgggcatggtggctcacacctgtaatcccagcactttgggaggccgaggcaggcagatcacctcaggtcaggaattcgagaccagcctggccaacaaggagacaccccgtctctactaaaaatacaaaattagtcaggcatggtggcgatgcctgtaatcccagctacttgggaggccaaggcaggagaatcgcttgaacccggacggcggaggttgc

SEQ ID NO: 886656 - DNA, 658 bp, Homo sapiens
cactcctgattaactttttttttggttgctctgaaacaaatgtggcacaataaaagaaattggcttcccagaagatgtatagaatcttctgtttacttgttcatttttccttattttctaggagtgaacaatgccccatttccaggtgaatggcaatggagtagttgtccgagggtactcaatactcaagagtcagctgatcatgtccttagatgcaccagaaatgatggtaaagcttgggagtgcggatacctttgattctaattattagcgaatgcctcagctcagcatcactgggctatatggggcctaaagcagggcagagccaatcaagaacactcaaagacagacagatgcagaactgggaatggacgtgtagggacgggaagctggagaaagatgggagcatgaatatgcatgtaagggtacatagatttggccgggcatggtggctcacacctgtaatcccagcactttgggaggccgaggcaggcagatcacctcaggtcaggaattcgagwccagcctggccaacaaggagacaccccgtctctactaaaaatacaaaattagtcaggcatggtggcgatgcctgtaatcccagctacttgggaggccaaggcaggagaatcgcttgaacccggacggcggaggttgc

SEQ ID NO: 886657 - DNA, 623 bp, Homo sapiens
tacatttcaagggtatgttgaaaatgaaatgacctaaagcctagaaagcagttagctgagtgccacatactcaaagtgctcaaggtaatctaaataggtatcttatctttaagatgaaaataacccaactgaaatgtataggagctgtagatggttgaattcatcaagaacaattcatcaagaattcttaaatctcatacacatcttagctaccttcacatgttaaattttcataaggtccttaataaattagagttgaatttaattattttttaagtattctgttaaaatgaagaataagaccatctcttccattaaatgtcttatcccaaaggggtgataattaatacaaaaagtagaatctgactgggtgctcatrcatgcagagtacagaagaagaatgaatcagcttgggttgggatggtggaaaaggtgttagtgacaagctcatccttaagctgactcctgtatctaacactgtgggaatttggagatactgatttttaaggtggaggggaattgataatttagtggtgtgtgtataaggtgtgtgtttataatttaaggtgtgtataagggatttataacttagaagttgaaaaggaagcctgagaatgtcagca

SEQ ID NO: 886658 - DNA, 631 bp, Homo sapiens
acaagcaagtacttgcaaaggcttccttgtgatcccaccctcatgacataaatgatgttgtgcttcgtaatttagttccaacctcttttaaccctcaaatttagccattgttgttctcattttataaactaatgctttcacagatatcccctcatgttctgtaacactttcttagatttatcttcatgttcagcaactttttttctccctatttattcttgcatttcatttctttcttctgatccacttctctttttcctggagtttatcctttagtaattatttcaatgaccatccactagagaagcatgaagcatgtaaaactacacagtttcctgagtcactttccagagtcttacccatgctgtcttttcaaactttattccttgtccctaggagttcatgagatttccttttcttctacttaataaaactcaagttgaattgrgttagtgcctgttctgtgaagccagtgtcctttctagagaaaatggcatatatatatcacaacttttttactgcatgtgacaacaaaacctgtcaaatatgctaataccaaataggaatgtgtggttccagaggactcatttgatccaagtcaagtaatgctcttcacttagttgtctattgt

SEQ ID NO: 886659 - DNA, 738 bp, Homo sapiens
aaatctaacagattgggttggggggcagagcaacatggctgaataaaaggctccaaatggcaggagtaagtccttacttattaacaataacattgagtttatcaataataaaatttagtgtaaaaggactagactccccagtcaaaagatgtagagtggccaaatggataaagaacaagacccagttatctgttgcctgcaagaaacacccttcacctataaagacacaaatacactgaaaataaagggatggaaaaaatattccatgccaataaaaaccaaaaaagaacaggagtggctacactaatatgaaacaaaatagatttcaagacaaaaactataagaagagatgaagaagatattatataatggtaaggggattgatttagcaagaggatgtaacaattataaatatatatgtacccaacgcaggaacatccagatatataaagcaaatattatcagagctaaagagagagatagacccctatacaataattgctgagacttcaatacccaactttcagcattggacagatcttccagacagaatatcaacaaagaaacatcagagttaatctgcaatayagaccaaatggacctaatagatatttatacaacattttgccaaacatcttcagaatacatattcttctccttagcaaatggatcattttcgaggatagactctctgttaggtcacaaaacaagtcataaaacattaaaaaaaatttaata

SEQ ID NO: 886660 - DNA, 599 bp, Homo sapiens
ttcaaactttctttcatttgattgatgcaactattttttgactctctcttctcatttttgagacagagtctcactctttcatccaggctggagtgcagtggagtgatctcagcttactacaacctctcctctcaggttcaaatgattctcctacctcagcctactgagtagctgggactacaggtgcccaccaccacactcagctaatttttggatttttagtggaggccgggtttcaccttcttggccaggctggtctcgaactcctgacctcaggtgatctaccttccttggcctcccaaagtgctgggattacaggcatgagccgctgcacccggtctgactctccctttcataaaccaraggatgacacctcctaatctctccaccttcctcttttagtcagtgtttcaaatggattaaaaacaagggctgcttgctaaggactacgctgatcaaaagaaatacagacgttgctctatgtgtcaaataaagcacctgtttgttcactttccaggaaaaattgccatgtggttgatactgtaggaaacaggagactgctatatttgttggagttggatgcagaccattcttacatt

SEQ ID NO: 886661 - DNA, 599 bp, Homo sapiens
ttcaaactttctttcatttgattgatgcaactattttttgactctctcttctcatttttgagacagagtctcactctttcatccaggctggagtgcagtggagtgatctcagcttactacaacctctcctctcaggttcaaatgattctcctacctcagcctactgagtagctgggactacaggtgcccaccaccacactcagctaatttttggatttttagtggaggccgggtttcaccttcttggccaggctggtctcgaactcctgacctcaggtgatctaccttccttggcctcccaaagtgctgggattacaggcatgagccgctgcacccggtctgactctccctttcataaaccagaggatgacacctcctaatctctccaccttcctcttttagtcagtgtttcaaatggattaaaaayaagggctgcttgctaaggactacgctgatcaaaagaaatacagacgttgctctatgtgtcaaataaagcacctgtttgttcactttccaggaaaaattgccatgtggttgatactgtaggaaacaggagactgctatatttgttggagttggatgcagaccattcttacatt

SEQ ID NO: 886662 - DNA, 535 bp, Homo sapiens
cctgagaagcctcgaaatccctgtggccccagttttctcatttattaaatgcacataattatactgaccttctggttggtggacttaatttaggttatgttagagagtccagcatagggcattcttagctttaagtgcccagtaaatatttgctgttaacrttaatgttttaattgtcatttctttatctatgtaattgaggaatttggcattatattaatcagtattaatcagggttctccagagaaacagaaccaataggatcaataggatgtctaaatagacatagtgagagaaaaagatatttcgtttaaggaattggctcgtgacactgtggtggctgacatgtccaaaatgtacagagaagttcagtaggctggaaactcagggaagagttgaggttgcagctcaaatttaaggcagtctgaaagcagaattcctttctgctcaggagaactcaatgttttgttttaaagccttcacctgattggatgaggcccacccacatcatgaagggtactctgcttaaaactct

SEQ ID NO: 886663 - DNA, 607 bp, Homo sapiens
gtcttttttttgactaaaagtatctttcatctgatataactgctcttgctcacttttggtttctgttcatatgtaatatctctttccacctctttaccttgcatctgtatgtgtctttatatgtaaggtgagtatcttgtgagagcatataattgaattatgttttttaacccatatgccagtctatatattttaagtgaataatttaatccatttatgttcaaggctattgatatgtgaagctttattcttgtcatattgtttactgttttctggttgttttacatattctttattcctttctttttctcatattgtttataattgtgatctggtggatttctgtagtggtaccacttgagtcctttctctttcttctttttgtratcattttaccagtgaatttatacttgtgtattttttttatgatggtaaatgttatcctttcacttccaggtttaggactcccttgagcatttctcatattgctggtctagtggtgatgaattccctcagcaattgcttttctggaaaagacttgatttcttctttatttatgaatgttatgaataataattttgctggataaatagtattcttcattgat

SEQ ID NO: 886664 - DNA, 450 bp, Homo sapiens
tggcaggcacctgtagtcccagctacttgggaggctgaggcaggagaatggcttgaacccagaaggtggaggttgcagtgacccaagattgtgccactgcactccagcctgggcgacagagcaagactccgtctcaataacaacaacaacaaaaaaaaaaaaaaagaaaagaaaagaaaaaaatgacaggtgatatcaagtgttggagatratgcagagaaactggaacctttatatattgctagtagaaacacaagtgatatgccagcaatatatgaatgtataccacttctgttcctaccagcaatatatgaaggttccagtttcatatagggcagtatcttataaaattaaacatgcgtttaaataggacccagcaatcctactcctaggtatttacctaagaaaaatgaaaactatgcccacacagagatttgcatgtaatgcagc

SEQ ID NO: 886665 - DNA, 672 bp, Homo sapiens
ttaatatttatatgtgtggatgtgatcctgcaattatgttgttagctgtttatcatgcagacttgattgtgtatttgctttacagtgtcaatggcctatgtacttaggtgtgtttttgtggtgtctggtttttctttttctggcatcttgaggtgcaatattaggatgtttatttgagttttttttcttatttgatatagacwtttgttgctataaatttccttcttagaaccactttttgctgcattctataagttttggtatgttgtgtttttatttttgtttgtctcaagataatttcaaattttccttttaatttattaatttacccattgattattcagaagcacgtctttaaattttcacattatttgtaaatttaaaaaaaatctttctattattgatttgtagattcataccattgtggtcagaaaggacacttgatatgatttcattcttcttaaatttgaaaatttttttgcctattgtaaaatgtatctggagattgttgtttgtgcaattgaaagtaacgtatattccacttctggtggctggaatgttttgtacatatccgtgaggtcatttggtccagggaatagttaaattataatgtttctttattgttgtctgtctggataatctgctcatagtgggaagtagaatacagaagtt

SEQ ID NO: 886666 - DNA, 611 bp, Homo sapiens
cttggtcttgatttgtttcttaaacaaatcctataccttcatatcttatataacttccatcctacttgatgctgttctttcatgtttcttatgttgttatccaggttcatgaacccctggggatttgcgagaatgcagacttattttccaaaggcggggaggccctgaggttcaacatttctaagagattttccaaagatgctgctgcctcacacatcaggaccattttacgagggtgagcctagaagtctttcttctgcccaccaacatgctgaggatcaggaaaggcatgtgagccacycttcaagagaagaggccacaagaccaggggagcccaacaccatgtctgagcttatccaggcacatgaggtgcctgagaggagatagtcattgcacctctggccacgtgggttattggccgtgatccctgagacagcagctcagatgtaccacttgtgccacctggagctggctcaggagtccatctacccagatcctacttgtctgccctggtgagaataactccatcaaacacccagccccttttatcgagaactacagcacacaaagtttcttaaaatgctgatgtttaatgatctacactacatgat

SEQ ID NO: 886667 - DNA, 611 bp, Homo sapiens
cttggtcttgatttgtttcttaaacaaatcctataccttcatatcttatataacttccatcctacttgatgctgttctttcatgtttcttatgttgttatccaggttcatgaacccctggggatttgcgagaatgcagacttattttccaaaggcggggaggccctgaggttcaacatttctaagagattttccaaagatgctgctgcctcacacatcaggaccattttacgagggtgagcctagaagtctttcttctgcccaccaacatgctgaggatcaggaaaggcatgtgagccactcttcaagagaagaggccacaagaccaggggagcccaacaccatgtctgagcttatccaggcacatgaggtgcctgagwggagatagtcattgcacctctggccacgtgggttattggccgtgatccctgagacagcagctcagatgtaccacttgtgccacctggagctggctcaggagtccatctacccagatcctacttgtctgccctggtgagaataactccatcaaacacccagccccttttatcgagaactacagcacacaaagtttcttaaaatgctgatgtttaatgatctacactacatgat

SEQ ID NO: 886668 - DNA, 489 bp, Homo sapiens
ttcagctctgtgctttcttggaaatggcagttgtcaatgtcgtcttcaaatttcccacacctagttctccccagcagtagctccattgagaatacagtcttggactccacctattgcacacagagagattaatgtgaacacaccctccttgttgcccctaagtagctgctggtgaagatgtcatttgtgtaggagaagtcccaacattctcctccattagggagcttgcccatgggcctggcatcaggagatcttcyttagattgggcagttaagaacaaaaagcggatgggcatggtggccccagggcagacacccatgaatgtatccctatttccagatgcacttcccactctcccatggtgagaccccagtttcactctcagtcagtgtctgaacctgcagctgcatttccagaggatggcgctatgtgcctggggaggggtttggctctccaagagctttcagggtaacctcagccctgggacag

SEQ ID NO: 886669 - DNA, 654 bp, Homo sapiens
gcctcagcctcctgagtagctgagattacaggcgtgttgcaccatgcccggctaattctttgtgtttttagtagagatggggttttgccatgtaggccaagctggtctcgaactttcctggcctcaagtggtcctcccacctcagcctcctaatgtgctgggattacaggcatgagctactgtgtccagccccyattgcactgtcgaaatgtcactggtcttctggatcacacccagctgacccattcttctcatatttatttaaccttggcaaacaaacagctcaaccacacaactatttgcaaaattatttgtgagatctactgggttgtgaaagattttcacatgagaaagattttcaatcaaacacaactcacaagtcaagggatccatgacacaagattcacactttccttttcacttggcaaagtcttgcttataattgtgaagcagaagccagcactgcaggattccttaccactgcatgagttacacaagaatgaaaacttctcatgggttccctaaaaactgagattggaaaatgacataataacaacaaaaataatggtgcaaattgacatagttatatctcatagatgtgtcttaggtcttttcaaagacaagagataggtcaagaaagacctgaggtgaccc

SEQ ID NO: 886670 - DNA, 639 bp, Homo sapiens
gattgcattgaaattgtagatagctttggttagtattgacattttaacaacattaattcttccaatttatgagcataaatatctttccagtttttaatttcctcttccgtttatttcattaatgctttatagtttttttgtagacatcttttacttcttgaggtaaatttatttctaattattttatatttttgtagctactgtaaatttgattgcattcttgatttctttttcagtttgttcactgttggtgtatgttagtgctactgatctttgtacattgattttgtgttttcaacttaactgaattcatttagcagttttaatagttttttgacaaagtctttarcttttcccaaatatcataacatgtcatctgtgaacaaggataatttaacttcttcctttccaatgtggatgcccattatttctttctcttgcccagttgctctggtcgggactttgagtactacattgaataaaagtggtggaagtcttgttccagatattaaaggaaagaaatatataacaaacccacagcctttattttggccttcattttgaggtatgttcctttaagcctgttgtgttgagagcttttatcatgaaaagatgtatgatttttgtctaatgtttttt

SEQ ID NO: 886671 - DNA, 608 bp, Homo sapiens
gctttgtggttaccttgaggattccaaaagattctcttatacatataacaagttactttaaacagatgagaacttaactttgatcacaaagaaaagaaaagaaacaaaggaaagactaaaaactctacaatttaactccatcaactcccckttttgactttttgttgtcttaatttatatcttttttattgcctatctcttaacaggttgctgtaataatttttgatagatttatcttttttttcctcataccagatatatgagtagattactcagcacaattacagtattaaaatactctgaattgtctatatatttacttttaccagtgagttttatatctccaatagctttctttttgcatgttatcatcctttctcttcagatcaaatacatcaatttagcatttcttttaagatgggtctaatggttaaggattttctcaacttttgtttgggaaatgctttatctcttcttcatgtttgaaggaaatatttgctgattacagtatttttatttggcagttatttcccttcagccctttgaatatgtaatcccacttcctcctggcctgtatggtttttgctgagaagtctgttgccagacaa

SEQ ID NO: 886672 - DNA, 608 bp, Homo sapiens
gctttgtggttaccttgaggattccaaaagattctcttatacatataacaagttactttaaacagatgagaacttaactttgatcacaaagaaaagaaaagaaacaaaggaaagactaaaaactctacaatttaactccatcaactccccgttttgactttttgttgtcttaatttatatcttttttattgcctatctcttaacaggttgctgtaataatttttgatagatttatcttttttttcctcataccagatatatgartagattactcagcacaattacagtattaaaatactctgaattgtctatatatttacttttaccagtgagttttatatctccaatagctttctttttgcatgttatcatcctttctcttcagatcaaatacatcaatttagcatttcttttaagatgggtctaatggttaaggattttctcaacttttgtttgggaaatgctttatctcttcttcatgtttgaaggaaatatttgctgattacagtatttttatttggcagttatttcccttcagccctttgaatatgtaatcccacttcctcctggcctgtatggtttttgctgagaagtctgttgccagacaa

SEQ ID NO: 886673 - DNA, 623 bp, Homo sapiens
aaggagagaaaaaagactgttttgagatgtgacatgggtcagctggaaactcccaaagttagtttaaggtcacaagacttaatttagaatttgatttgggatataaatttttaaaaaatttaaaaaaattaaaaaaagaagaaaaaaataaaaaaagcagaaaaacaatttgatttggggaagtggtcaaaaatattaaggcttgaatacttgattaaataggatatgaagtcactgtgacaaagtgttgttactcaagatgatgatgaatagattttaaaggcaaatacagaaagttacattgttatagtgaaaaccttgcctcttttaatagagaggttttggttttctaaagtaactaaagacttgacaaaagacaacatgaagcatagtaaattgttttgctaagacacagtctttgtttcctagctagaattcttaaaaggctaaaaarcatctttcacaatctcatattagggcagtccaataattcaagatatccttgtcattttaacataggaggccaaattctagtgttacatcagtgtacttttgatatgaataatcaaacaaattataaataatttctttcaaatcttatcaaactttatcacacatgaaat

SEQ ID NO: 886674 - DNA, 459 bp, Homo sapiens
aactccgtccatttttgttctgttgctggcgaggagctgcaatcccttggaggagaagagacgctctggtttttggaattttcagcttttctgctctggtttctccccatctttgtggttttatctacctttggtctttgatgttggtgacctacagatggggttttggtgtggatgtccttttcattgatgttgatgctattcctttctrtttgttagttttccttctaacagtcaggcccctcagctgcaggtctgttggagtttgctggaggtccactccagaccgtgtttgcctaggtatcaccagcagaggctgcagaacagcaaatattgctgtctgatctttcctctggaagcttcatcccagaagggcacctacctgtatgaggtgtctgtcggcccctactgggaggtgtctcccagtcaggctacacggggattagggacccacttgag

SEQ ID NO: 886675 - DNA, 528 bp, Homo sapiens
tgaattcactaaatcttggaatcctgggtcctggagaccaacttaaaacatgaaaaactcaagactcatggtagcttggcgtactccccttccatcagcccgagtataatggggaaggggtgctggttagaaatgcaggtttcagggccccagcccaracctactgaatcagatatttggactcagtgctggcatcggcatctggacaagtgctgcagaggcttttcatgcacactacattttgagaatcccaatagctctctccagaaccagaccctgttgtgcctattgtgaaaacacggatcggggagtggtccctcctagaaggggcttcggagtccactggaggggaatgggcccttcacagaaatcagacctgcttctgaggcttcagaaaaggatctcacatgacctgcctttccgagtggaaagagtggggtgttttctcgattgaagaagagataaagttaggatttggggaagcactgcatttagactctcaagtcagtatttttagcccttgctaaa

SEQ ID NO: 886676 - DNA, 637 bp, Homo sapiens
attatttcaacccattattatatttctagaagtgatgcttacagatttttttttctttttgagaactgcatgcttttcataaagtctcttggaaaagtaatctctatgtagttttgcttcttcattcattcagcatttgtcaatacttgttactggcttgcttcctgaggtctaggagtttatgttgtatcaagagagatctacagataatagaagttactgtagaattttaagttccacagaaggtgcatttctgaggccctataaagcagcatttgaatcaggtcagctcttcagccctcgagaggtattttcatgttcttgttttctgttttttagtgatgttccatttctggtgtttaatctagscatgccactaaatatttacttttctttgtgagacaggttaagactgtcttaacttagaagattcttcatttctttggtcactggaatagcattgctgtcttttttgtcatcattccgttttgcattgttatcattctcttttgcattgttaatatcagaatgtaatggtccttaggaaagcacagtgtggctcggtagagtgatgtgccttgttgtttctgatgcttttttgattctctctgaagcctgttggtgagcctgttgggtg

SEQ ID NO: 886677 - DNA, 628 bp, Homo sapiens
gagttagttactgggaacaaaagcaatactaatggaaacagccttcccatgagtataaggagctggactagtctcccttgttctaatggacatcctccttacgtggaataataacaggacaatttaattttatttgttattgttaattttttttagagacagggtcttgctctgttgcccaggctggagtgcagtggcatgactgcagctcactgtaacctcaaacttcataacaggaaaattaaagaaaaatcaaaagaaaccacttagctgtaacacaaggaagatatgctgacttgtttaatggaaaggaatatactttaatggaagaatacatatatcagaatttcaaacatcccccatggatttagtaatggagcaactccattttttgtttttgatagagaattgtgtttataattctgtttcttayatgcaccatgtaatcaaaactgttgcctgtgaataatcactctttttctgattcctacttggctaggctggtatgcctgttttattgcttttccagaacagatagactcacatattgtttcacgttatgttttgagttcttaagcatattgtctcttcctcctgtgcgctgattcccactttcgtgcacacagca

SEQ ID NO: 886678 - DNA, 595 bp, Homo sapiens
tctggaaatgacaatcattgaaataatgtgttattcaccaatagattacatcaacctgaaaaagaaaaaattagtggtgcgttacctttgtcagaaagagagcaaagaggccgggcgcagtggctcatgcctgtaatcccagcactttgggaggctraggcaggtggatcacgaggtcaggagatcgagaccatcctggctaacatggtgaaaccccacctctactaaaaatacaaataattagcccggtgtggtggcaggagcctgtagtcccagctactcaggaaagtgaggcaggagaatcgcttgaacccaggaggcagaagttgcagtgggccgagatcatgccactgcactccagcactccagcctgggtaacagagcaagacctcatctcaaaaaaaaaaagaaaaaaaagagacaaataattgggaactgtgaaagatctgttcctctggaaggttaggaagggaaagccttttcatgtgttaccaagagcagcatccaagagcctgctaatgtgtttctcagcagaaagggcactgtcctgaggtggggataggatcttgggaagcaaacatgtctcttgcccgtc

SEQ ID NO: 886679 - DNA, 657 bp, Homo sapiens
ctgctgcttttaaagaatgtcacttttctagacatctagtttcataagatttagtttaaggtcaagaggagaaacatctcttatagatttagaacttggtagagtacagatattctttgcagtagatgtggaagtccaagaacatttgggagaattgttaaaaatgtactgactggttttatttagcctctttgctggtcagttagcttttcttgtgacatagctgcagagtcaagcctgagttacatagatgacaaatgcatgcyaagttaggtgttaacaggcagaattctaaggtggccccccgagactactgccccttggtttacatctcctgtatgatccccaggactgtgactatgacgggatgtcactcctgtgattaagttatgttacatggcacagtttactttaagaataaaagtttgtccttgatggaccctaaaaggggttggagagaccgattcagagagaaagattccatcaggggagattctccatgactggctttgaagatggtgggggccatgtgacaaggagtgttgatggcctctaggagctgagagtggcccccagccgacagcctgagtgaacttgtaagcacattatttctctgagcctccagaaaggatgaagcctagccaacaccttgatttt

SEQ ID NO: 886680 - DNA, 672 bp, Homo sapiens
cactggtattaggctgaaccatacgaaattgctgtttttgttgatcaaaatgattaaatattagttacttcatatagctcattgtaacatatttataccctgggtctttataaccagagacaagtggattaatctatgaagctattaaaaaattctatagtaaatatatttataaactgaagaatctgctttaacgtgagctactttccctgcactatcagtttttgcaagtttacatttttttcctgcaaaaagaggcaaaattaattttaaaaatctaaagccattggaaggtaccagaagatgggasgtttcaaagaaggaattaaattgaaggtagaaggcatcctatttcctacattgacttcaacccccaccaccttctgcaatgattctgaaggcgatccttgctcaaaggtgaccacctcagtattgtggtcatgggaaaaaacggaaaagggatcagcattctttagcttcttttatggctttatttcagctgggttttcaaattttacttgagtagatagctttatttggctcagaatgagtcaaagtggttttttggtgaatgtttcctttaccttcataagcactttctttaaagttccaggtgaaacccccagcatggtggacactgtgtcgtgatgtcattgcaggtgctctatttga

SEQ ID NO: 886681 - DNA, 738 bp, Homo sapiens
ataaaacacaagcatgtgctgtgcttcagatgccttgtttaggaatgtttagttctaaatgctagacataaatcaacatatgttctggaattttcatgatgaaatctctcactgtgcatcaaagtaagagaaatagaaagttctgaacaggagcatgtattgtcctaacaatcttgtggccccaatattcatcataataaaaatttttctgccttggtattattatggatagtaattattatggataataaaaatgatggtgtattagtcaagatcggctagcttatactctgacaataaacaatttcaaaataaaaaagaccattagtactcattgttcagcgatttaaatctcacaagtagaatcagcctcttgatgggggatttttccattataaagctggtgctacgatctgaattctgcaaattggggcatttattagttagtgatcatatgggattggtctatggaaggatgcatgctgaagtcagttctttagggctacatcttgcctaaactcagtttagcatgrctggtgttacaaccctcaattcctttctgcacaggggaataagtaatttctgatataactgctgcctttcacacaaaggtgggactcttgctaagctgctagagtgcagtcaaccttgccacaaagactatgcagatgacttcagtgttctcaattcctcccttggttgaagatcacattcacgcccatttcacccattcaagga

SEQ ID NO: 886682 - DNA, 632 bp, Homo sapiens
ctctctagtcacagttcctaggtactgggaaatttattggcttcaaattatgagaagaaaacaacagtattaaagtgattttcattaaatatgtgccaaatatgacatttcttcaaccattttgtcaactaggacattatatcaacttgtaacttaaatcatctttatgacttatctataagctacatttgctgtgtgtgccttcactatgtttgctatgatttggggaatcaagaaaaattcctaaagctaggaatcttagaacactggccttacatggttaattacttcttttcttctgtggttattccatgtctatttttctgtttagaagtagaaattagtcaagctttttaaaataattattatttgtaataaaatatatcataaaagggcagttttyatttgatttttgaggttatttttctctctagaaaatcagttattgacctttttggggggttaaaactcatctgaaaatctcatgaaagctgaagaacctgtgcttagatacatgaaaatatgtagaaaaatatacattttgggctgaagattaaccttcagtgtcagtgctataatttgcatatttgtcccctcctgaatttaagttgaaacttaatctccaatgtggc

SEQ ID NO: 886683 - DNA, 630 bp, Homo sapiens
ggaagtctcaattaactgctaggctcggagaagatgacctagttaactaaatgaatgaatgattaaagctaactaaagagtaatcagcaatcatttttctgatgcctatgaaaatcctcattgttgaacatatttttaaacgcagaagtacccatctgtctaagcgacattaatgcaatgagtattygacttctcctcgatgactaaggaccattgtgtggtcatgatttctcattatgggtgcttctccaggctgtccactctaccttcagccatcggtgctcacctcctgcaaacttcttctcataaaggattgcatggcttccaggtacatccaatcctaagtgcaaatcaacagctcccttgcccattgtaatccaaaactctatgagaatatgcactagaaagtgccaaattgtaagccgaaaaagttctgtggaacgtattttgtaaaagccacaaaagaggctggcacatactgtcaacccaaacctgtccccaccccttcctcttcacttagagaacacacatgtattttatccatgcatcaagtggccatgtgatttagaggagctggggacaagcagccctgattagataaaccggtccgctcagcagcgatcagcatag

SEQ ID NO: 886684 - DNA, 652 bp, Homo sapiens
atgggctcatctttatttcgccagggcttggctcaatgccaagcacatatgaggcactcaaaacatatttgttgaataaataatcttgacatgaatttagtctaatccagaatgcaacttgtgatggttaatttcatgtgttgacttgaccaggccacggggtgcccagataattgattgcacactattttggggtatgtctgtgagtgtgtgcagaggaagtttgcatttgaatcagcagagtgagtaaagtagattaccctcctcagtaagggtgagcgtcctgcaagctactgaaggtctgagtggaacaaagaagcagaagaagggagaattcgcccactctgcctggctgcttagccaggacattagtcttcttctcctgctcttgggctgggatttccagcattagtgctcctggttctcaggtctctggattcmgactagaacttacatcgcatttctccaggcctccagttcttgggatttcccagcctccataatcatgtgagtcaattcctcataataaatctcttcatatttataaacagtccgccacttaccatggttcaacttcagatttttcaattttacaatggtgtgaaagtgacagacattcagtagaaaccatactttgagtacctatacaaac

SEQ ID NO: 886685 - DNA, 618 bp, Homo sapiens
tcagtgcttttaccgctgacttctggaatgtgtttgatgaaaagaaagcaacttcttcagacagaagatactgatgcagcctgctgaggttaggacctacaggaacaatacaccaatgttatcagagcttcgtttgcctccaacttcagtccaaaactgacaacgggagggaaagcattttttaaagccgttgctgtcagctgccattattataaatagcaattgctctgcttctccctgggggaatgtaggcatcattgtttggtttttgtttagattaagaggttttttccaatagctttttacaactagatctgaaaaatgaaactagtagcacagtgatgctgcttccatttatcattccagaagcttggatatgttgaaagtcaaaaccagagaaggaggttcctgcttctttcctatcatcargtttgagtgccctttctcaatgaacaattaacaaagaagtcagctctatttaatgttctgtgttcactccagaatttcaggaaagtaagaagcaaggagagtcaaaagaatcctaagtcactgatgtcttcatcaacccaatcatcagtgacctctaacattagctgattttctcaataaacattgttt

SEQ ID NO: 886686 - DNA, 710 bp, Homo sapiens
ctgaaaaatgaatatcagaagtttgttttattattttgcatttttcaaatcaaatgaaaatttcctttgactctcaccgcttctattttccttcctgccctttggaagccattaatctcctattttcagattgattttaaaaagccagccacaatgccagtgcctgccctcattcctctgctgaagtgatttcagtttcctctaaaatattagatttttcccttgctcttatttactatgcacagatgcagaaggagaattactcaagttttgcaataaaaataagcttggctttgtgagcacctgctttccgctgtttaataatgccgagctccctttttctctgtggttctgtttaytcttctacaaattatttttgttctcagttgacaaagataaatgatgggattaatatatattgaagaagtctctgtgagcagtatgccagcccagaggaagggtgggtattatttccctcaggtaaggaaacacagcaaactggattaagagtaatttgctgtggggcttatagatgatcatgatccattagtggtacaccatttatgaaaattgctttttcttaaataaaaattagaatgactttcactatcttgtcagaactgagccaatccaactgcattttcccccaagggaaaacaaaatatcaatggcaaagcttagattctttttatttaaactcaaagcaattt

SEQ ID NO: 886687 - DNA, 735 bp, Homo sapiens
atagcatcaatttttatgtttaataattacttatttaatgtgtaatgtatttatactcttttgattaattatatatactaataattgtaataataacaatatataggtaaattctagaacttgaggatttttatgatcacagaaaatatcaaacaattaaaatttcattttataaactttttttggcaatgaaatatattagggctaacaatacaaatatttgagcataaaatacatacttatgaggacataatttatggtagatatgaaatggaaatataaaytcaaggaggaaatataaacattataccatttctaactgttaaggaggactttgtgtacttttaaaagtgaacaattaaggataataaatcaccatggtagctagattccattggatacatttaaaagaatgatggggctattatattttgaaatctcaatgcaacatttacaatatgctagaaattacatcctttttattttatttattctattaaaatttataataaaaaatgtagttgtccacttaaagatatgcaactgggtccatgttctcttcaaatccaaccaggtcagattgccaaatccagattctcattgccttggaaatctgttgtctgcagccatttctggtgcccaaaccagaactgatccgggtttgggtgcatgcaagagatccacattaggtagtgtcaccagcaagggacttgaagcaggggatttggtgctccc

SEQ ID NO: 886688 - DNA, 602 bp, Homo sapiens
catactccatgaaatttcataaatcatcatcatttgatttaaattttgagaatttagactttgaccaaatgagatttatttttttattgtggcaagaatccttaacatgagatccaccctcttaaatgtttaagtacacaaytcaatattgctaatgatagacatgatgttgtacagcagatttctaaaatgtattcatccaaagaagacatacaaatggccaagaggtatataaaaaatgctcagtatcactaatcatcagaaatgtgcaaatcaaaaccacaatgagatatcatctctcacttgttgggatggttgttataaaaacaacaacagaccaggcgctgtggctcatgcctgtaatcccagcactttgggaggctgaggtgggtggatcacctgaggtcaggagttcaagaccagcctggccaacatggtgaaaccccatctctactaaaaataaaaaaattagccaggtgcggtggcatgcacctgtaatcccagctactcaggaggctgagacaggaggatcacttgaacctgagaggtggaggtcacagtgagccaagatggggccactgcactccagcctgggtgacaga

SEQ ID NO: 886689 - DNA, 555 bp, Homo sapiens
gtgaaaatattcaaggatgaagctgaagcgaagatatttacagacacaaaaaaaattgacagaatttgtcatcaactgaaatgatgaaagaaaatgctacaaattactatatcctaaaatagaaggaaatgatcccagattaaaagccagaaagtaacgaatggggaaaaattaattttaaactcttctcttttcacttaatgcctttattactagttcttatttttttgtattaawgttgttacctctaccttcttttttttcatttgtttggcatatttttctcattctcttatatttaaatttttggggtttttgtggcttttttctgataagcaatattattggatttctaatgcaatctgagagtttttatgtttaactatgggattttatcttaatttaatttatttaacactgatatttatgatttgtcttctttcatttttttctgtactttctcattaaaaccacacactaggcagtctcctcatctctgtgaaccatgaaatttgataccttcggtggtctgacacaattgccacaatcttaact

SEQ ID NO: 886690 - DNA, 629 bp, Homo sapiens
ccccagagagcaccagcaaaggctgagtgtgaaccccagcaataccaggagaacaaagaggaaaaacaaaacaaaaccagaatagaattcaaagggctcagaaaactaaactgtcattgatacaaatgcccacaaaagtcgaccagatcctatgaatcaaacctaaacaaggtgaagcctcattgaaacagaagacttaggatcaagaatctccagctgggcatggtggcacatgcctatagtcccgggactttgtgaggccgaggtgggtggatcacctgaggtcaggagttcgagaccagcctgggcaacatggtgaaaccccgtctctactaaaaatacaaaattagccgagcatggtggcacctgcctgtagtctcagctatctgggaggttgagtcaggagaattgcttgaacccgggaggcggaggttgcagtgagctgagattatgccattgcactcmagcctgggcaacaagagcaaaaaaccctgtctcaaaacataaaaaaatttaaaacaacaaaaaacaaaaaagagtctcctgacagaagaatcaaaatgtccaggatgcagtaaaaaactgcaccatatccagaactcagaatgtttttcctactctctactctc

SEQ ID NO: 886691 - DNA, 602 bp, Homo sapiens
agcacatccttctggtgtgagaactgaaaaagttctgcccttctttgctgcttggagcaacaaggctctacctactcagcctgtgacctgcttgggtgagagtcccctggtgcagtcctttcactcaaatgatgatgggtatgttgcttagaggagaaataaacctttgctgtttggagccactgtggttaggaagctttttgttactatagcatagcctcgcccaccgtgactaataaaaaatactgttttcttctttatgcaaaaataaagtataacatcaacattttaatatgacagaaacttgttgaactcacccaaattcttactactaagaggtttgtaatgtttcagagtmtgtccctatattcttccagggtgtgtgcgtgtgtatgggcatgtagagagaggaaaaggtatgtctatttagatgtgtggacataaatataagagacaaagaaagaggcctctgtatctatgcacctgactctgactttatcattgtggccagtccttagatttccgagtttctaacctgtcaagtaagtgaatttgagcccaaggcggggtctcgatacacccaaggtcttggagtttaagag

SEQ ID NO: 886692 - DNA, 662 bp, Homo sapiens
gcccaccagcctggggtagaatgagtgaggaggaaggtcatagagagctacagttggaatcaggtgggtccagttcacacagggagcagtaggtcacagtggggagcttggattttcaacagaaagcaattaagaagtgttgggccattttaagagttgagtgacttcacctggtgtatgaatttcctattgattttctaacacattaccawcaacacagtgctttaaaacaatataaatgtattctctttcaactccgaaggtcagaagtcctacaagatcccacagggataaagtcatggtggcagcaggactgaatttctttcagatgctgtaggggaaaatcagtttctgcctttcccagcttctagtggcccctgcactccttggctcatgccctttcctccaccttcaaggccagcaatggtgggccaagtccttctctccctcccttctttctggttccatcttccactattagggatccttgtgggtacattggagcccgttggataatctaggatactctccctattttaaagccagctgatcagcaatctgaattctatctcaacctcaatacctctttgccatgggacctaatatactcacaggttccagggagcaggacgtggacatgtttgcaggggaaattgatctgc

SEQ ID NO: 886693 - DNA, 512 bp, Homo sapiens
ctactataaatatttcaccatattcttttaacagctaaggaaacttaaaaaataaccatcatacaatttattacttaaatttattaatacatttttaatatcagatggtaagttacaggatggagctgtgacacccttgtcatgaacaagcctacagttgtagacttatgctcacaaagggtgctcagctccctattaatgaattgattgatgaatcaattaaatgatgttgtgattattggctatcactgacacttgcagaaggtagckctctcttgtgctgatttcatgttaatctcatctaactttaaggagctcatttcatgacacatggaatttaaaggccagtactctacaattcatggacactcttctaactcaaagtagctattaaggaaaccaatcttaaagtcaggatgacagggaccttaaagtaccaattccatttccagccttatagactcaaccaagttatttaatgtgtctaaatccagttttcttataggaaaaag

SEQ ID NO: 886694 - DNA, 610 bp, Homo sapiens
aacaatattgtgtgctctccaagtgttttgcagaagcagtggggctcctgctgagacgtggtcttgccaaaccccctcaagctccaaagatggtcttttcaaaatctttctcctctattgccccgggccatgttcttccagaaaactgcctgcaagcaatttccttaatcgggttgctaagggcaaccccaaagaaacaacataccaagctatctgtctgtccatccgaatcccaaaagctttccttgtgcttcctgctctgaccaaagaggcatttgaggcacatgtgagagaacagctttccagaaaccacacttgagtccacagcagagcrgaaggggcaggaggcatcaggaccatttccagatttctctctggccctgattgtctagatttgcatccaatcactgcaagagtttatacaaaagttgttagaaagatttgggtttcacacagagttatgaaaacaaggtagaagcctgatgtcttcatttcccatgaaatcttgtgggtgtaaatgaaacatgttttagtctcaaatcctggagctgtggggttcacaatggagaaatatccaggtctcttgaacaagactggacgataaccaggg

SEQ ID NO: 886695 - DNA, 610 bp, Homo sapiens
aacaatattgtgtgctctccaagtgttttgcagaagcagtggggctcctgctgagacgtggtcttgccaaaccccctcaagctccaaagatggtcttttcaaaatctttctcctctattgccccgggccatgttcttccagaaaactgcctgcaagcaatttccttaatcgggttgctaagggcaaccccaaagaaacaacataccaagctatctgtctgtccatccgaatcccaaaagctttccttgtgcttcctgctctgaccaaagaggcatttgaggcacatgtgagagaacagctttccagaaaccacacttgagtccacagcagagcggaaggggcaggaggcatcaggaccatttccagatttctctctggccctgattgtctagatttgcatccaatcactgcaagagtktatacaaaagttgttagaaagatttgggtttcacacagagttatgaaaacaaggtagaagcctgatgtcttcatttcccatgaaatcttgtgggtgtaaatgaaacatgttttagtctcaaatcctggagctgtggggttcacaatggagaaatatccaggtctcttgaacaagactggacgataaccaggg

SEQ ID NO: 886696 - DNA, 650 bp, Homo sapiens
agtggcccatggctgagagtgtatattaggaactacaatccaagtagcctaaagtacagcccaggcttgtgaatttggaaatttccatttttaggaaatttgatattgctctgtgtgccacccccatatcccaaggtataagcagtgcagtagctaagtatttttaggacatgcaaatttactatattttgttggctacaagataatagggcacacaggattttctaaagctgcaattccaaatggcatggactagaagccaggttttctcactccatgtcaagggctattcttcttctctctctctgtctctaacaatattgcaacgatattctgaatttagttgtaaatttagttggaatttgatataagctatttgattttccttcacaaatttgtttacagcaatttcctcccagaacacactgataaagagaagtagatgacagttattgatgaaccctgctkctggcagttattaatcagccattgacttgatgaagcagccatggatgccacacctgatggtgaggcatgtgacctggggtccagctgccatgggtcatccatgtggctttgggagtgttgggaagctactgcttcagcatctccaaggaacaagcgtcctgtgagagtggaagtgagaggtc

SEQ ID NO: 886697 - DNA, 590 bp, Homo sapiens
ctggaaaccctgggagatagtgtgggacatgcctcagactgagggagctggggtatttacaccccaactcctgtcagtcagagcttgagggctgttctcaaaggctcttctggtctgccacatggaggaaaatagtgcaggaagtccttttggctgaagtgtactggtgctgatgatgagaaggtgggcactattccctgaagtggtgtaggagaggagcacctgctgtttgctacacattgacctcccagatctgcctgtgatttggggcttatagagatgtgttgattctgtctagtcaaagtgagagtcattgcagaacaaaaccagaatcttagtggtgactgtgcaaagccatttggtctaatgattttaccaagagcatctcagaacactagtattggtagtatgtagccttgttaataaatatatacaagyacatgttgaaatgacttgttattatatggctagagcaaacccacgtcatcctcatgatgtcttgctgtcacaatctcattctctcttgggttctgacctgactcctcaagcaagagaacaagggttggcagagctctccaggaatgcacagc

SEQ ID NO: 886698 - DNA, 620 bp, Homo sapiens
tcaaaggctcttctggtctgccacatggaggaaaatagtgcaggaagtccttttggctgaagtgtactggtgctgatgatgagaaggtgggcactattccctgaagtggtgtaggagaggagcacctgctgtttgctacacattgacctcccagatctgcctgtgatttggggcttatagagatgtgttgattctgtctagtcaaagtgagagtcattgcagaacaaaaccagaatcttagtggtgactgtgcaaagccatttggtctaatgattttaccaagagcatctcagaacactagtattggtagtatgtagccttgttaataaatatatacaagtacatgttgaaatgacttgttattatatggctagagcaaacccacgtcatcctcatgatgtcttgctgtcacaatctcattctctcttgggktctgacctgactcctcaagcaagagaacaagggttggcagagctctccaggaatgcacagccccaggtgcccagcagagggcatcaagtatgacagatattggaatgacatctgttgtgtgtgcagagcagactgactgagtggaaccatgaccaaagagaactcaggtagactcaagtgcttctggg

SEQ ID NO: 886699 - DNA, 620 bp, Homo sapiens
tcaaaggctcttctggtctgccacatggaggaaaatagtgcaggaagtccttttggctgaagtgtactggtgctgatgatgagaaggtgggcactattccctgaagtggtgtaggagaggagcacctgctgtttgctacacattgacctcccagatctgcctgtgatttggggcttatagagatgtgttgattctgtctagtcaaagtgagagtcattgcagaacaaaaccagaatcttagtggtgactgtgcaaagccatttggtctaatgattttaccaagagcatctcagaacactagtattggtagtatgtagccttgttaataaatatatacaagtacatgttgaaatgacttgttattatatggctagagcaaacccacgtcatcctcatgatgtcttgctgtcacaatctcattctctcttgggttctgacctgactcctcaagcaagagaacaagggttggcagagctctccmggaatgcacagccccaggtgcccagcagagggcatcaagtatgacagatattggaatgacatctgttgtgtgtgcagagcagactgactgagtggaaccatgaccaaagagaactcaggtagactcaagtgcttctggg

SEQ ID NO: 886700 - DNA, 629 bp, Homo sapiens
ttctcattttacagaggggaaacagaggccctttccttcttacaggagtccaaagctattgatagaaatttttaaaattttgtttaaaaatgtttgagtacttttaaaaaatatcttttcattttgaaatagttttaagactcacaagaagttgcaaatatagtttagttttctcatatacccttcacccagcacgctccaatgaaaacattggattcttttagggtttagggttggaaaaaatcttgaaatgatgattagttttaaatgctcattattcatgcaaacgcttagcctattcagaaagtatctgatactttctttttttgagatggagttttttgctcttgttgcccaggctggagtgcaatggtgcgatctcggctcgctgcaacctycgcctcatgggttcaagccattctcctgcctcagcctcccgagtagctgggattataggcgcccgccaccatgcccggttaatttttgtatttttagtagagatggggtttcaccatgttggccaggctggtcttgatctcctgacctcctgatccgcccacctcggccttccaaagcgttggaattacaggcatgagccactgcccctggccttatctgatactttctga

SEQ ID NO: 886701 - DNA, 519 bp, Homo sapiens
ggctaatttttaattttttttttttaatagaggtagtatcttgcccaggctggactcaaacttctggactgaagtgatcctctcatcctggcctctcaaagtgctgggattacaggcatgagtctttgcacctcgccaaaactaatttttgaaacatattttcagaaactcccaatgctaacattttatttaaaggctttacaagcaagcatcttcttttctttctttgacaaatgttggtatttgggatttcttgtgataatgcagatggcttgcgagtccartgaaatttttatagatggaatactagctatttcacaatagtgtaaagtgcccactggcagaacacacaagcctggttagatcaattccctgctgctagcttggattcactaaaagggcacagatgagaaagtacagaagtaactaggttatataaagacataaatcagaacaactacctggtaatgaactcagcgggagttctggccagacctccaaccaatgccgtgttagctt

SEQ ID NO: 886702 - DNA, 579 bp, Homo sapiens
ttcagcataagtgctgtcctggaggagggcctcagaagccctcggtggcttcttccactcctgatacccactcaccttgtgataagagctttgctgactgttagccactgcttatgaacttggctgctttaatggagacccctgaaaatttttacaaagggcttgaagaccaaagtagtgaattcctaatgatggaatttcagaccctgtgacaactgaatgcaatttggaggaaacagatgttgcttgatgccggttaatcaacctctccatgtccacagatgtatcaggacccagggtttgactgaccygtcacatggtctggcagcacctacagtggttgaaatcaggaccacccaagcacgcccaggatccactggcatctttcactgtcagtatggtcatcttgtccttgccatgcaaaaggcatcccactcctcagactgaccacatttgtagctggccgatctgtttcttggcaaccagaaggcaagctgttgtgtctgccagccttccccactggtcatgtgtctcgctccccatgaccaatggggaaaaccaatattactggtgaaaacc

SEQ ID NO: 886703 - DNA, 569 bp, Homo sapiens
ttgtggaagaccatgtggtgattcctcagatatctagaagcagaaataccgtttgactcagcaatcccattactgggtatatacccaaaggaatataaatcattctattataaagatacatgcatgcatatgttcattgcagcactattcacaatagcaaagacatagaatcaacctacgtactcatcaatgatagactggataaagaaaatayggtacatatacactgtggaatactatgcagccattaaaaagaatgaggtcatgtcctttgcagggacatggatgggactagaagccattatcctcagcaacctaatgcaggaacagaaaatcaaataccacatgttctcacttataagtgggagctgaacaatgagaacacatggacacatggtggggaacaacacatgctggggcctgttggggaggggttggggaaggagagcataaggaagaatagctaatggatgctctgcttaatacctagatgatgagttgatctgtgtagcaaacacatgtttacctatgtaacaaatctgcacatcctgcacatgtaccctggaact

SEQ ID NO: 886704 - DNA, 652 bp, Homo sapiens
ttactgtgctcttcagtgtttgttatagaattattttgagttgtaaatatttctccaattcctgtgccataaaacacacatatatcttagatcaatcacttggggcagatgcatttcttatggaaccatattctacattgtatcaaattttctatcagaaagaagtttataaactaatcagtttatgaacattaaggtcagtgaagtatattagacttagtattgtgttgayggaaacctaatagttcattacttccaatactcacttctacttttaccaatgaagagtctatgatcaacttttaccttccttagcaccatatccaaattagctgagataaatggatacaagtggataattaataccttcgtgtgtgtgtgtgtgtgtgtgtgtgtgtgtgtgttaggttgaatttcttggaaacacaaagttgcctttacaggttttccaggaagggctctttggagacgtgaagatggcaggatggggcagaggaagaaagtgaccaacaacttggttataactgaggcctcagctcacccagaggaaacttcaatggttctttgaagtgagcccacattgaagcatagggaacttcgctagcgcctctcagctctccccaccccaccttatgtgggacagcatggttag

SEQ ID NO: 886705 - DNA, 633 bp, Homo sapiens
cctatttagggaacaagtgattatgctacttttgcatggtcaggatactgtggctgttgaacaaatgtcactgggcaggcagtgcctcaaatactggtaatgctagaggtgtgtttttggtaaacaggcagagtatgatttgccgagttccttttactttttgtaatctttccttagagcatacctgtgttgggttaacagtgtaaataatagggtgtttattatattgtttattaatattaggctgttaactgtcagtggattattctggtctgatgtaagcttatgcaatggagaatgtcttcatgttacttatactaacattattgtgtctattaagtaatagattagtccagtgtgatgttaggagttcagtagagtgattagaatttaagatagatgttgaacttaaacatgttcttaattggtggctgcttttgggccaactgtggtggtaatattttttattttctgtaggaagkttgtttcctagggtctaaagagctgtccctctttagactaacagttaaacttacagggaggttaagtaattctgtgtataagcttaaagttgaactaggagtctatcttggacaaccagctatcaccaggctccatagccttgtcacttct

SEQ ID NO: 886706 - DNA, 579 bp, Homo sapiens
gttatatgtatttattgtaaatgctttcttccaatttgagggctgactatacctgttctaagtagtgttttttgataagtacaagtttcaatctagattatgaccaatttatcaagcccacatttgggactctcattatctaaaataatgtccaggtgcagatgaggccttgcagrtgagtttctgcaaatacagtttctccagtcagaagatctatgagctaaagatatcacctgcttcccaggcacccaatgtgcaagggtaagatcagcagagcaaaaccactgtagatgtcctatttgaagaagagggaaacacgaggcacttcacactcattagtctatagcaattctgaaatgcatgtgggcacatgctgccagttccttggctataacttagttagaaaaagtcactattgctctcagattcaccctctggattcttggtccctccctgtgtgtcatccagctggtgtttatggctaagtactttcctcaggatcccatatacatcttgtgtttttttttgttgttgttggttgtgtgtgtgtgtgtgtgtgtgtgtgtgtgtgtgtgtgtc

SEQ ID NO: 886707 - DNA, 573 bp, Homo sapiens
acctgtagttccagctacttgggaggctgaggcaggagaatctcttgaacccaggaggcagaggttgcagtgagccgagattgcaccattgcactccagcctgggtgacaagagcgaaactgcatgtctctctctctctctacctatctatctatctatatacctatatcattgtttattcattgttttggctatctttatgatggggaggagcrctagcgggttccagtcttgttctcctcccgagtgtgatagcatttttaatggacaatcctttagggcatctttccaaagctttcaacttagtttttgtttctgtacttaaaaaaattatggtaaaatacacataacataaaatttaaacatttaatttaaccatcttaaccatttaagtgtacagttcagtggtattaagtacatgtgttattttgcaccatccatctccagaactttgttcattttcccaaactggaaccctgtacccattaaacactagcttcccatttcccagtgccctcaaccccaggcaagcaccattctactttctgtctctgtgaatttgagtactctagg

SEQ ID NO: 886708 - DNA, 642 bp, Homo sapiens
ccaaaatgttgacagtgatattgacaataaaattcagatggaggtgatctcagatggagatgaggaacttgttggaagctggaacaaaggtgactcttgtcatgttttagcaaagagactggcagcattttgcccctgccctagagatttgtagaactttgaacttgagagagattatttagggtatctggcagaagaaatttctaagcagtgaagcattcaagaggtaacttgggtgctgttaaaggcattcagttttataagagaagcagagcataagtgtttggaaaatttgcagcctgactatatgatagaaaagaaaaaacattttctggggagaaattcaagctggctgcagaaatttrcataagtagcaaggagcctaatgttaatccccaagaccatgaataaaatgtctccaggtcacgtcagagaacttcttggcagcccctcccatcacaggcccagaggtccagaaggaaaataatggttttgtgggctgggccccgggtcctcacactgtgtgcagtctagggacttggtgccctatgtcccagttgctccagctgtggctgaaaggggccagtgtacagcttaggctgtggcttcagagggtgggagcaccatgccttggcagcttcc

SEQ ID NO: 886709 - DNA, 621 bp, Homo sapiens
cactaggaagtaactagcttgcttttgattttacaggctcataggcagaaggaacttgccttgtctcagatgagactttggactgtggactttcaggttaatgttgaaatgagtaaagaatttgggggactgttgggaaggcatgattggttttgaaatgtgaagacatgagatatggaggggccaggggcagaatgatatggtttggctgtgtccccactgaaatctcaacctgaattgtatctcccaggattcctatgtgatgtggagggacccagggggaggtarttgaatcatgggagccagtctttcccatgctattcttgtgatagtgaataaatctcatgagatttgatggttttgtcagaggttttcgcttttgtttcttcccatttactcttgccgcaaccatgtaagaagagcctttcacctcctgccatgattctgaggccttgccagccatgtggaactgtaagtccagttaaacctttttttttgttctcagtttcaggtatgtctttatcaggagtatgaaaacatcctcttaaaagtatattcacgagcaaatatttgtaaattttatgaagtccagttttttatttctctttttatggattatgc

SEQ ID NO: 886710 - DNA, 805 bp, Homo sapiens
tcagttaagcggtataaattcaggaaatgtacagcatggtgtctgtagttaataacaatgtattatatacttgaaaattgctaatagtgattttaaataccttactacaaaaaagtttatgagataatagacatgttaattagcttgatttagccattccacaatgcatacatatagaaacatatcatgctggacacaatatataaaatttttgtcaattaaaaaatagttcttataaactcaactgataaagacccaatagaaaaaaatagaaataaattagctaccttatatgttatttagattttttctattcttmtttttaaataatataaaattttctgctattcaacatttgaagaacttggacaaatgtaattggatttacaaataaaaatattgggtatacatagaaaagatcaagcttgataatttttatggaagaaccatttatatgagacatagaaaatacttaaggaatacataaaataaaatctcctgtatttttaatagttctgaaactaattttatatggtaaaataatctataaataataatataataaaataagctatgaataataagctattaataatgtaattatttaaatattgatatttatcctttatttgtatatggctaccttatttgacaggcatactgtctaaagttttggagttatactttatattgtaggagtaaagttttaaatcctatgttgataatgaaaaaaattgaattgcatcactaatgttttcagatgattggatttatcccatatttcataactttcaaaacttttaca

SEQ ID NO: 886711 - DNA, 805 bp, Homo sapiens
tcagttaagcggtataaattcaggaaatgtacagcatggtgtctgtagttaataacaatgtattatatacttgaaaattgctaatagtgattttaaataccttactacaaaaaagtttatgagataatagacatgttaattagcttgatttagccattccacaatgcatacatatagaaacatatcatgctggacacaatatataaaatttttgtcaattaaaaaatagttcttataaactcaactgataaagacccaatagaaaaaaatagaaataaattagctaccttatatgttatttagattttttctattcttatttttaaataatataaaattttctgctattcaacatttgaagaacttrgacaaatgtaattggatttacaaataaaaatattgggtatacatagaaaagatcaagcttgataatttttatggaagaaccatttatatgagacatagaaaatacttaaggaatacataaaataaaatctcctgtatttttaatagttctgaaactaattttatatggtaaaataatctataaataataatataataaaataagctatgaataataagctattaataatgtaattatttaaatattgatatttatcctttatttgtatatggctaccttatttgacaggcatactgtctaaagttttggagttatactttatattgtaggagtaaagttttaaatcctatgttgataatgaaaaaaattgaattgcatcactaatgttttcagatgattggatttatcccatatttcataactttcaaaacttttaca

SEQ ID NO: 886712 - DNA, 602 bp, Homo sapiens
taagttaagaggttgaacataaaaataaaaatcactcattttgtatgtatctcttgagtacctactatgttccagtcactattctaatcattggggtatgtaaagaagaacatagacataggccctgtcctcatgtgccttacattacaatggaaagagagaaacaacaatatattaaataactttaacagtaaataaaaatatttaaaaaataaaaagcaamgaaaatctttaaaactagaactatatttgtgaagaataataatgaatttatatttgaaattcattaataaattagccattcaagaaaacattagtggatttgtttattcatacttttaccaattaattacaaaggaattctgggaggacagcagcatgctcactcatccctgactccttcttcctccaatcttccatgttttatggaataatataacaaaggagggcataaaagccactctcaggtgaaatcattcatctcccctgagcattataggtaagaaaataggcaccggatttttactacctttgatgctcagagagagtgaagggaccaatttttaagcaaaattgccattttttttctttttcttgcaaga

SEQ ID NO: 886713 - DNA, 601 bp, Homo sapiens
agaagggtttgggtaataaatagccacactctattctaaggtttctgtatttagtcgtaaaattttaacttataaaccataaaaattagacattatttaataccacaccacctactaaaaataaaataagtgttacagtaaaaaaaaattaaaattgaatgtgaaaaatattccgataatccataagaagatagaaaagagccaataaaaacaagaaataggaaggatgaaatagaatacaaaaaattagcaagggtgagatatatatatatatttcaagatcaacaaaattgataaacatctaactagactgacraaataaaaaataaaacacttctttttagttaatatacttgttttgaatcaggactgtggtgacagtgaaacaatttgttaacactgaaaatgtatacaacaaatagtaaattgtactgtatataaatttaaaaatatcaatcagaatgtgagggagattcaaaatcaaatacaaactctagaaatgaacctgattgtatcacaaatgattaacaactacagtgaagggggtatggaagaaaagactgacctaagaaacttgagtaacagtatttggacttcattt

SEQ ID NO: 886714 - DNA, 610 bp, Homo sapiens
tagtctaattggtgatatggtaacatttgtgacttaaaagtctgaaagtcacttttttcttctcactttgtcttaagaaaacaagaaacatattatgtatctgaatataaatgaaaaacttgtatctttacctcttcctttattggggattattgaatttcrtaaatcttatgcagagcaaggctttgaggacagaatgacaggataagatcctggccttggtacttactagctatacatccttgagtcaattaaccacctttgtttctcagttgcttcaactataaaatgggaataatcactgtacctaactcttgtaagtattctgatggttaaatgagaaaaaaaaaactttagactaataccatactaataccaaatgtattatttttagtatactatcatacattttttctgttatcatactaaaaaattttccacttctcaatgcccaagcttattacgtatttcatcaagggaggacaggcccgagttcttataactctttcattttttctttcttagtttttcctgtttaatattatcctaagcgctacattgctttgactatgaagaaaacccatcttattctgtttgtttgcttaaatta

SEQ ID NO: 886715 - DNA, 584 bp, Homo sapiens
agtcaatcttttgtgtcctatgtatgtcagacactgcctcctcaagctcatctataaaatccccttcatttcaccacagaagcagaaaacccatttgggacccttcactctgcagcagagagagctattccctttccttcacctattaaacttccgctcttaaccttactcctggtgtgtctgcatcctagttttccatgatggctgtgagacaaygaacctcagggaccatcccagacaatgaggctgtttaaaaaaagaagtttattcctagacttctcctcaagtctcatgatcacccttggatgatatgcccattctttaaatagtcgctggctaaaggaatactatagtgagctataactattcagcattctcttctggtaatttagaagaagtccaacacaaggctgcccaatatctgaaaaaaagtttctatatgcaagaaatatgaggaaaatggcatttgggtaggcaacaaatgagcaatttctgccacagactataagctccttgaaggtaatctcatacatttcttattgagtgcagtatgtaaaaggcttaacacagagcctggaatatag

SEQ ID NO: 886716 - DNA, 584 bp, Homo sapiens
agtcaatcttttgtgtcctatgtatgtcagacactgcctcctcaagctcatctataaaatccccttcatttcaccacagaagcagaaaacccatttgggacccttcactctgcagcagagagagctattccctttccttcacctattaaacttccgctcttaaccttactcctggtgtgtctgcatcctagttttccatgatggctgtgagacaacgaacctcagggaccatcccagacaatgaggctgtttaaaaaaagaagtttattcctagacttctcctcaagtctcatgatcacccttggatgatatgcccattctttaaatagtcgctggctaaaggaatactatagtgagctataactaytcagcattctcttctggtaatttagaagaagtccaacacaaggctgcccaatatctgaaaaaaagtttctatatgcaagaaatatgaggaaaatggcatttgggtaggcaacaaatgagcaatttctgccacagactataagctccttgaaggtaatctcatacatttcttattgagtgcagtatgtaaaaggcttaacacagagcctggaatatag

SEQ ID NO: 886717 - DNA, 648 bp, Homo sapiens
cttgtatagattgggtatcagagtaatgctggccttgtggaatggttagagagaattctctcctcttcaattttccagaacagtttgaagagaactagtttagtttttacttaaaagcttggttgaattggcagtgaagctatctggtcctggattttttctgtgggagaagatattttactccttattcaaatatattactcagtattggtctgttcaggttttctgtttcttcctgattcaattttgggaggttgtatgtgtccaagagtttatctatttcctttgttttccagtttgtcactatatgttgtttatagtttctgatgatcttttgtattcctstggtattagttgtactgtcttctttttcatttcatttctaattttattttggtattctttcttttttcttggttattctagctagcagtttatcaatgttgtttaattaaagagaaaatttttcatttttttaatcttttgcatgatttttcagtctctgttttgttctgctttaatttttatttatttttttctttacatctactaattttctgtttggattgagcttgcttttcaagttccttgaggtacattatcagattgttgaaatctttcaacttttttgatgcaagcatttatgtg

SEQ ID NO: 886718 - DNA, 674 bp, Homo sapiens
ttattatttattatcacaattattactttcaccatatcagtttatcttcttctggtgcttatattatacaaaagtgttacgtctacttttgtcatatctctacatatttctctcattctttgattttctttacttattactaatatttttggcagagttaattgacattatctttcagctttttgcactaagatggtgtagtgaaagcaatgatcctaaaaatgattccaagaatatgtggaaactctatcaatacctatcttccttcagtgttactcaggtattttctttgccatttccctctctttttcttacccatttcagcctccacaagcctttctcatagtttgagaaattattcaaaaaacatcttcttgttctgtggcatctcttgattgttcagtgagggaagcatttcctgttttgccatcttctcttaaataagaactttccaagcacttattttcttagtcatcaatatttrtgcagtgcagtttttcttgtgtgaagaaaatatggtatacataatatatttaaaactaactgacaacaatcatatttcttctttccactgacaatttcaattccaaactgattacaattgtgaatatgtttttcttttctaaaagtttacgtgaatttttattaatttatctcaacattgactaactgga

SEQ ID NO: 886719 - DNA, 576 bp, Homo sapiens
acgtgccaattctttctaaatagcctttcagattgctactgctatcaattgcattagggtggtggcattttctagaaataaccagttttttaaaagaattattagagtattctcttcagattttaagtctcattcattttcttggctattgagcacccgctgattagggctcaagctgtcagtatcagctgatttttgtagccaaactgtggaagaactggttcatgatccttccttgaagcttttgttgttgttgttgttgtaatttaatgaaaaaactgaacaaagtttagtaacacaagattcaaccagtttcaacatgccatgttaacataaaagagatacatatcaaaattaytggacttttgaaaatgaatctggctaaaatattttatttttaaggctaacatttttaacagctttattgaggtataattgataaacacaaatctacctatataatgtattcaatttgatgagtttctacatacatatacatacaccatgaacactatcgccacaattaaagtaaaagacatgtctaacatgtctgaaattttctatgcatccttttgt

SEQ ID NO: 886720 - DNA, 352 bp, Homo sapiens
cttattttaggatgacaggaagatatttgaggctgggcatggtggctcacgcctgtaatcccagcggtttgggaagccgaggtaggtggatcatctgaggtcaggagttcgagatcagcccggccaacatggcaaaactccatctcgactaaaaatacaaaaattagccaggcttattggtgrgtgcctgtaatcccagctactcgggaggctgaggcaggagaattgcttgaacccaggaggtggaggttgcagtaagccgagatcgtgccattgcactctagcctgagcgacagaataagactccgtctcaaaaaaagtagaagatacttgattctagaattctgaaaat

SEQ ID NO: 886721 - DNA, 647 bp, Homo sapiens
agactgggactgcatctaattggagtctgcttttccatcttgtagcacataatgagggcataacaaataccttattacatgaatttctgactttgtagattgattttaggatgtttcatcttgtcatatctaaataagtctcttgyttatttctatattggacgaaagaggtgatattatttcttggagacagtcttctgtctatctcattctatgtctgtatccatttttgaggtaggagatcagcagaacttgttttctgagccttagttatgaccctgcttatcaagagaggatgtagcaaagaaaccagcaaagccagctagaaccaagatggtgatgaaagtgacctctagttactgtcactgcttatttgcatttgcataagatgctcccaccagctacgtgatgttttagaaatgccatggccacaacccagaagttgccttacatggttcagggaactccccattccttttccagaaagttcgtgaataacccacttcttaattaagtatataattgagtgggtataaatataggtagtcagtaatttttgagggctaccctggagcactctgcctatagtataaccctgccctgtctgtggaatagccattttgctgtacactgttgctctaataaac

SEQ ID NO: 886722 - DNA, 557 bp, Homo sapiens
acaacaataacctgggaatgggcatttctatagagctatcagacagattctaagtgacaatgctatggaataggattttttgaaaagtcccaaatccagtctgctttctccagagcatgcaaggcagctggatttcttttctttactctttttctttttctttttttttttttttgagaaagagtcacactctgttgcccaggctggagtgcagtggcacaatgttggctcgctacaacctctgcttcytaggttcaagcgatcctcctgcctcagcctccctaatagctgggactacaggtgtgcgccaccatgcctggctaatttttgtatttttagtagagatggtgtttcaccatgttggccaggctggtctcgatctcctgaccccacatgaccttcctgcctcagcctcctgaagtgctgggattacaggtgtgagccactgcaccagtcaagctgctggattttgaagctaccatagagttgtagagaaggtaatggtagtaggccaagtttaatggacacaaaccacgctgctccaaattcagtcattt

SEQ ID NO: 886723 - DNA, 557 bp, Homo sapiens
acaacaataacctgggaatgggcatttctatagagctatcagacagattctaagtgacaatgctatggaataggattttttgaaaagtcccaaatccagtctgctttctccagagcatgcaaggcagctggatttcttttctttactctttttctttttctttttttttttttttgagaaagagtcacactctgttgcccaggctggagtgcagtggcacaatgttggctcgctacaacctctgcttcctaggttcaagcgatcctcctgcctcagcctccctaatagctgggactacaggtgtgcgccaccatgcctggctaatttttgtatttttagtagagatggtgtttcaccatgttggccaggctggtctcgatctcctgaccccacatgaycttcctgcctcagcctcctgaagtgctgggattacaggtgtgagccactgcaccagtcaagctgctggattttgaagctaccatagagttgtagagaaggtaatggtagtaggccaagtttaatggacacaaaccacgctgctccaaattcagtcattt

SEQ ID NO: 886724 - DNA, 633 bp, Homo sapiens
ttgttacttatgaaaatttctgcagctggcttgaatttctcctcagaacatgggattttcttttctgtcacattgtcaggctgcaaattttccaaactcttatgctctgtttcccttttaaaactgagtgcctttaacagcacccaagtcacctgtttaatgctttgctttgctgcttagatatttcttctgctasatactctaaaccatctatttccatttcaaagtttcacaagtccttagggtaggggcaaaatgctgccagtctctttgctaaaacataacaagagaagttcccaataagttcctcatctacatctgagaccacctcagcctggatttcattgtgtgtatcattatcagcattttggtcaaagccatttaacaagtctctagggagttccaaactttcccacattttcttgtgttcttctgggccctccaaactcttccagcttttgcctgttactgagtttcaaagttgcttccacatttttgggaatctttttaatagcgccccactctactgataccaatttactgtattagtctgttttcatgctgctgataaagacatacacaagactaggcaatttacagaaaaggaggtttaatggactcacagttccatgt

SEQ ID NO: 886725 - DNA, 607 bp, Homo sapiens
ggtgaccttgttgcttaaaaaaaaaaaaaaaagaaaggtgctctatggaatggaattggaaacagagtaaggcttttgtgcatcctgtaatcatatttgaactgtcctacactataactgaagagccaactgttttcaggtactcaaccatctgttgatacactgctttttaatcacagatgattartcttatgaatgtgttattctaaaggggagtagcccacactcttaatgaagttctattgattcagatatatcaagtctgactgtcatagtctacatagtctatctaacacatcatattgtttcagttgcaggagtacaatttttttttctttcttttttttttttttttgagatggagtctcgctctgtcaccaggctggagtgcaatggcgccatcttggctcactgcaatctctgcctcctgggttcaagccattctcctgcctcagcctcccaagtagctgggattacagcgtgtgtcactacacccagctaatttttgtatttttagtagagatggggtttcaccatgttggccaggatggtctcgatctcctgaccttgtgatctgcccgcctcggcctcacaaagtgctgggatt

SEQ ID NO: 886726 - DNA, 639 bp, Homo sapiens
ttgttacttatgaaaatttctgcagctggcttgaatttctcctcagaacatgggattttcttttctgtcacattgtcaggctgcaaattttccaaactcttatgctctgtttcccttttaaaactgagtgcctttaacagcacccaagtcacctgtttaatgctttgctttgctgcttagatatttcttctgctasatactctaaaccatctatttccatttcaaagtttcacaagtccttagggtaggggcaaaatgctgccagtctctttgctaaaacataacaagagaagttcccaataagttcctcatctacatctgagaccacctcagcctggatttcattgtgtgtatcattatcagcattttggtcaaagccatttaacaagtctctagggagttccaaactttcccacattttcttgtgttcttctgggccctccaaactcttccagcttttgcctgttactgagtttcaaagttgcttccacatttttgggaatctttttaatagcgccccactctactgataccaatttactgtattagtctgttttcatgctgctgataaagacatacacaagactaggcaatttacagaaaaggaggtttaatggactcacagttccatgtggctga

SEQ ID NO: 886727 - DNA, 604 bp, Homo sapiens
attttttatatatgattctgaaagcacaggaaataaaagcaaaaatagacaaatgggactatattaaactaaaaagcttctgcacagcaaaggaaacaactagcaaaatgaagagacaacccacagagtgggagaaaatatttgcaaaccatacatctgataaagagttaatatccaaaatatataagaaactcaaacaactcaatagcaagaaaacaaataacytaatgaaaaagtgggcaaatattcctgtacctgaacaacagtcaagccaggatccaaatcaggaacatactcccattcacagttgccacaaaaagaataaaatacctagtaatacagcttaccagggaggtgaaagatcactacaaggagaactacaaaacacttctcaaagaaatcagagatgacacaaacaaaaggaaaaacattccatgctcatggataggaagaatcaatatcattaaaatggccatgttgcccaaagcaatttacagattcagtgctattcctattaaacaaccattaagattcttcacagaactagaaaaaaactattttaaaattcacatagaattgaaaaaatgcctgaatagccaaggca

SEQ ID NO: 886728 - DNA, 650 bp, Homo sapiens
atttttctttcaatgaataacccagactcaaagtgcatattggtaactatattttaaaccaaaaaattcctcacataataaatacattttatgcacattaacttcgaatttacttcagaaagctatttacaatataaataattataaatgggaacactttgcaagatatcattgacatagctaatattttctactttacattccaaagtaaaatttcaaattacagctttatactacaatgtcactaaaaactatacattgcaagacggtatttgaaatattggcgatcagtatcttttctcacaaatataatcctttttatagcacattagtcaaaaaacaaatgtaaaatattttatcttttttgaagtgtctactcataatgtttccttttttgaaatatttcccttcggaaaaaaaaagaaaaaaracttacagtacttccaaaatttttttccaggccaatttcatttcttttgaaatgtaaacacatcagggttaccgggtgtaagtttaacagtgattacatgtgtcccaggtcagcaaattagggcaaattaaccccaaccccatatagatttatgaaagcaaagtcccatgcagcaaagttgcaataaacaaaactacaaatgtttggtttaaaattagca

SEQ ID NO: 886729 - DNA, 442 bp, Homo sapiens
agaccattatcctaagcaaactaatgcaggaacagaaaaccaaatagcacatgttctcacttacaggtggaagctaaacaacaagaacacatggacacagagaggggaacaccggacaccagggcttacttgagggtggaggtggggaggagggagaggatttaaaaaatactgttgggtactatgcttgttacctgggtgactaaataatctgtgcaccaaasccccatgacatacagtttacctatgtaacaatgttgcacatgtacacttaaatgtaaaaataaaagttaaaaaaatgcagtttaaatataagaagcaggtagtttaatagaaaaaaagatgaaaaattatgtaccataaaatattaatcaatagaagactatataaaattaaatacatttcaaagcaaggaatattaccagggataacaaggggcatt

SEQ ID NO: 886730 - DNA, 576 bp, Homo sapiens
attctacaatacctaaggcatttccatcactgcatatgttctatgacactatgatctcaggaaaattaatttcacttagttgtggggtatggggtggagagtttttcagtagcaaataataacgacttatatgtatatcaaatttacagtttacaacatggttttcgttctcttcatctcattttaattcagatacaatctgtgaaatagtactgtaatcatggccattttacaggataagaatctaaaagtagagaggttgagaaatgtattcaaggttatctggatgttggcaacaagaagggatttgggctaattttgatgattccaagtcaaatttattttgtaccgcacacactctaattatgttagagcaaactattttagaggcagactcaaaaagcttactaaggtgcasggacagcatgttgctgggtcaatttgtgggcaatcctagttctgagtaagataccccagagaataacctacaaagggcctgtgtgcttgctgcgaggtgatggcggtactggaatcaatttcaccaaactctaatggctgtggtatggtcacattatg

SEQ ID NO: 886731 - DNA, 594 bp, Homo sapiens
tatctttcttactctgaacatcgtatttctcttggtatacccaattccttttgcctgagccttgctattttccccaatgccattcctccaaatgggtctaatttggactttgggggaaaaaaaacctacacacatgggtttctcttcttttccatcaagcaactgatgacaatagagttcctctataactatgtataagttgctttggttataggatgtcttttcctctttggagatttggtttctagctttagatctggatatagcattttaatgccataatagattaagtcatcctagaacactgtttccctcatttgctgtggctgggaaggtaagccattgcttgacttacatcctgttaatctgactctttagtctggccactgtatagagattctgcctttgactagacgcaggtgtggacaaacaggctgatctrtggttgggtggcttccgtccagagaaactgtctccatcagaagaggatattgcctccaagtggaagaatggttataggcttttttacctattgattggtttataaagaaaaaaattaaattatctcacactagctaccccacagcagccatg

SEQ ID NO: 886732 - DNA, 535 bp, Homo sapiens
tctcggctatatgagctctattttgtttccctatgaaatttaaagtacttttttctaattctgtgaagaaagtcaatggtagcttgatgggaatagcattgaatctataaattactttgggcagtatggccattttcatgatatcgattctttctacccatgagcatggaatgcttttccattttttgtgtcctctgttattttcttgagcagtggttggtagttcttgaagaggtgcttcayatctcttgcaagatgtattcctaggtattatattctctttgtagcaactgtggatgggagttcactcatgacttggctgtttgtctactgttggtgtataggagtgcttgtgatttttgcacactgattttgtatcctgagactatgctgaagttgcttattagctgaagaagtttttgggttgagatgatagagttttctaaatgtacaattatgtcatctgcaaacagagacaatttcacttcctttcttgctatttgaataccctttatttctttctcttgcctgaatg

SEQ ID NO: 886733 - DNA, 535 bp, Homo sapiens
tctcggctatatgagctctattttgtttccctatgaaatttaaagtacttttttctaattctgtgaagaaagtcaatggtagcttgatgggaatagcattgaatctataaattactttgggcagtatggccattttcatgatatcgattctttctacccatgagcatggaatgcttttccattttttgtgtcctctgttattttcttgagcagtggttggtagttcttgaagaggtgcttcacatctcttgcaagatgtattcctaggtattatattctctttgtagcaaytgtggatgggagttcactcatgacttggctgtttgtctactgttggtgtataggagtgcttgtgatttttgcacactgattttgtatcctgagactatgctgaagttgcttattagctgaagaagtttttgggttgagatgatagagttttctaaatgtacaattatgtcatctgcaaacagagacaatttcacttcctttcttgctatttgaataccctttatttctttctcttgcctgaatg

SEQ ID NO: 886734 - DNA, 628 bp, Homo sapiens
aaaacctggtagagacacagcaacaacaaaatgtcaggctaatatccctgatgaacattgatgtgaaagtcctcaataaaatactggcaaaatgaattcagcagcacatcaaaatcttatccaccacgatcaagtcagcttcttccctaggatgcaaggctggttcaacatacacaaatcaataaacgtaatccatcacataaacagaaccaatgataaaaaccacatgattatctcaacagatgcagaaaagacctttgataaaattcaacaccccctcatgctaaaaaccctcaataaactaggtattgatggaacatatctcaaaatagtaagagctatttatgacaaacccatagccactgtcatactgaatgggcaaaagcttgaagtattctctttgaaaacyggcacaagacacggatgccctctctcaccactcctattcaacatagtattggaagttctggacaggagagtcagacaagagaaagaaataaagcgtattcaaataggaagagaagaagtcaaattgtctctgtttgcaggtggcatgattgtatatttagaaaaccccattgtctcagcccaaaaaagccttaagctgataagcaactttagcaaagtc

SEQ ID NO: 886735 - DNA, 628 bp, Homo sapiens
aaaacctggtagagacacagcaacaacaaaatgtcaggctaatatccctgatgaacattgatgtgaaagtcctcaataaaatactggcaaaatgaattcagcagcacatcaaaatcttatccaccacgatcaagtcagcttcttccctaggatgcaaggctggttcaacatacacaaatcaataaacgtaatccatcacataaacagaaccaatgataaaaaccacatgattatctcaacagatgcagaaaagacctttgataaaattcaacaccccctcatgctaaaaaccctcaataaactaggtattgatggaacatatctcaaaatagtaagagctatttatgacaaacccatagccactgtcatactgaatgggcaaaagcttgaagtattctctttgaaaactggcacaagacayggatgccctctctcaccactcctattcaacatagtattggaagttctggacaggagagtcagacaagagaaagaaataaagcgtattcaaataggaagagaagaagtcaaattgtctctgtttgcaggtggcatgattgtatatttagaaaaccccattgtctcagcccaaaaaagccttaagctgataagcaactttagcaaagtc

SEQ ID NO: 886736 - DNA, 614 bp, Homo sapiens
tggtggcaggcgcctgtagtcccagccacttgggaggctgaggcacaagaattgcttgaaactgggaggcggaggttgcagtgagctgaaatcgcgccgctgtactccagcttgggtgacagagcaagacccatctcaaaaaataaataaaaaataaaaataaaataccatgaatttggaaggattttgaaagttttagagagttttataagctatttttaagagtgtaaaaaatggataatatatcctttattaagaacggttaacacctgttttaggtgataagaaaggaggtaagatcttaggcacatttgaaaaaaaaataggtagcattacttaaaagataatcatattgactgtttcctctcagcaataaggagaaaagagtggatgggagcctattatttagacggtgtaatctttcgsttagaatacggattctgaaaccagattgtctgggctcacatccctgtctagtgtggtcttagggaacttacgcgactcgactgcaccttagtttcctcatacaaaacacggagaatactaatattatctacttaatgaggttgttctgaggattaaataaagtaatacatgaactagtacgtgaaaag

SEQ ID NO: 886737 - DNA, 637 bp, Homo sapiens
tccctaagagatatgtgcagtacagcttgtgagaactctatctctttataaggaaatgtaggcccaggcacatccttatgtggctgtgcaaggggccacaggctgcacatgagtgggcttcccaagggtccttaagctgtaactgaaacgtctcatgcttaggagtataacagagttctctgttttaagaattattcttaattattggttattagtctggcaactggatttgagatttgtttgcatttttaagagtatgtgtggtgttttaaaagtgttagattatttaggccgggtgcagtggcttaggcctgtaatcccagcactttgggaggccaaggcaggcagatcatgaggtcaggagatcgagaccatcctggctaacatggtgaaaccccgtctttactaaaaacacraaaaactagctgggcgtggtggcgggcacctgtagtctcagctactcaggaggctgaggcaggagaatggcgtgaacccgggaggcggagcttgtagtgagcggagatcatcgtgccactgcactccagcctgggcgacagagtgagaccccgtctccaaaaaaaaaaaaaaaaaaagggttagattatttacactcagtgtcattaactaatccttacag

SEQ ID NO: 886738 - DNA, 618 bp, Homo sapiens
tgtatcagcagtttgatttttgataaattattttctttgagcttcaggttcttaatctataaagtgcaggtaataataataacaataatcagctctacagagttgtaatgggaaccaagtaaatgcaagaatgttaaagtgtatgtgtacatttgtaaaaaatacttaatagaggattaatattctacactataaaaatggcttcttacttaatggagttaaaggagaaataaatgaccatgtaagtacagagggggaaagtataaactaatttgtttttgcttcytttctgtttttttattattaattttttcatacttacttttaaaaagttgataagcaggaagactacttcattgtgcctttaataagtagatactagttgtgaagaggtaatgatggcaggatttaaaggactgtgttctgtttgcacctatggctaactcagtgtggccaggttgaagtccctttactgctccgtaagtctggttgtttcaactatgaaataggagtagtcggcttagaaaagctgataacccacagagagggcccctgactctcctgaaccacagagaggcatactctcctcggcctgggacccgccagacctcttagagg

SEQ ID NO: 886739 - DNA, 634 bp, Homo sapiens
tcacttggttcaacacaataataatgagtgcttattatgtccccagccctaggcgaggcactgtaaatagagagaggaattaaaggcagccaaccctaatccttcctatcttagtctgttttgtgctgctataacagaatagctgagacagtgtaatttataaagaaaggaaattcacttcttattcttctagaggttgggaagtccaagagcatggcagcagcattggttggctactgctgagggccttcttgctgtatcataaccctggtggagggcatcacatgacaagagggcaagagtgtgcttgttagctcaggtctctctttctcttcttataaagccaccagccccatcatggggggccctacccttataatcttatctaatcctaattatcttccagagaaccctttgccaatcaacataggaatttggggattaaatttccaacacaygaaatttggggatacatatcaaaccatagtattctgcctctgacccccaaaattcatgtatttctcacacataaaatacattcatttcatccccacagactcaaagtcttaattcattccagcatcaactcaaaagtccaaagtccaaagtctcatctgtgagcttgtgaaatcaa

SEQ ID NO: 886740 - DNA, 674 bp, Homo sapiens
tgtatattataaatcattctactataaagacacatgcacacatatatttattgcagcactattcacagtaacaaagacttggaaccaacccaaatatccatcaataatagactggataaagaaaacgtggcacatatatgccatggattactatgcagcaataaaaaggatgagttcatgtcctttgcggggacacggatcaagctgcaaaccatcattctcagcaaattatcacaagaacagaaaacaaaacacagcatgttctcactcataagtaggtgttgaacaatgagaacccatggacatagggaagggaacagcacacactggggcttttcggggggtgggkggctaggggagggataacattaggagaaatatctaatttatatgatgggttgatgggtgcagcaaaccaccatggcaggtgtatagcaatgtaacaaacatgcacattctgcacatgcaccccagaacttaaagcataatgattaaaaatatatataatggatttaatgtttgtaaaatatacaatttttttaggatatacattaatatttaaacctattaaagttaatattaaatattaactttattatttaaaacaaaaaagaggacaaaatataacccactacaacaaaagcaagtacaaaagtgaacacatattattattt

SEQ ID NO: 886741 - DNA, 579 bp, Homo sapiens
aaacaccagaaggctttttatggcacaaaatgacacagtaggaagaacagcctcacaaaccatctagctaatttttccaagaaactgcagaaataagaagatgttcctctcctaacaccttcccagtttcacagtrtatacccgaatagtccctgaaggatttagtgtgtacagtaatgcaaggcacagatagacaggataaagcatcctgaggtttacaacgcatttagcacaaggctgttggtcagcaacaatgtgataaaatccatgaaaatgaccatctaacttgtaagaatagtcaatataataaaagtaagactattaaataattaaataactatattatgacttattacagaaggtttttttgggagggggaatgggggattgagtccaggctatatttaataaaccatagtgactaacatagccttcagtgagaaaagatatctgttttttctgtaagtgcacatggagagtgggcagtaggaattccaaaaaaaaaattgggaagagtggatatccaggcatttgtttacaaaatagtacatctgaaagatccattgattttgacagtat

SEQ ID NO: 886742 - DNA, 639 bp, Homo sapiens
ctttctttacaaattacccagtctcagatggtatctttgtagcagtgtgaaaatggactaataaagtggattggtaccagcagaatacgaagctgctataaagataacctgaaaatgtggaattgggtaacagacagaggttggaacagtttagagrtcttgtaagaagacaggaagatgtggagaaatttgaaacttcctagagacttgttgaatggttttgaccaaaatgctgatagtgatatggacaatgaagtccaggctgaggtggtcacagatggagatgaggaacttattgggaactggagtaaaggtcactcgtgctatattttagcaaagagattggcagcatttttcccctgccctaaagatctatggaaatttgaacttgagagagatgatttagggtatctggcggaagaaatttctagcagtgaagcattcaagaggtgacttgggtgccgttcaagcattcagttttatgcagtcacaaagagatggtttggaattggaacttacatttaaaagggaagcagagcataaaaattcaaaaatttgcagcctgataatgcagtatgaaggaaaacccattttctggggagaaattcagaaatttgcataagtaacaaggagccaagt

SEQ ID NO: 886743 - DNA, 625 bp, Homo sapiens
gatctctgcaagggattctcttgacattcccgggggtagaagattgggaaaagggcacaaactaggttaaggctgaaggtccacacctttcagtttttgcttatacaggccagaatgggagggctaggatgaaaatttagggagcacrggtggattggctgccagaggccaccctctttttagaatatgaagtgctttctgcttgtctttgtttcctagcagtcaattctagacaactggaaaattcttcctcaacatccattacatacacagaaactaaagaaagtcacagagagatttaccttaccttttaaatcagaataaattattaatggaaaatgagcaaaccattcaggactttgggtttagcactttgtgtttggtcctctaaactaatttccactaaacattactcctataagttttgcaagataaaaatgtttagacgttttcttggattggaaaatgtgctctgaggtgcagagggcttatttggaagtgctctgaaagacacaccagcaaagaagctagaggagttaagatccaggaaagggcagagggagcagctgcaatgatgttgcaaataaagcctgggctcctcctacaaaggagctcaggagcaggc

SEQ ID NO: 886744 - DNA, 646 bp, Homo sapiens
acactatgagaaatgtactattcttatacccacgttgcccagggtcatacatctaaggggtgcaaggaccaggctttgatttcaaattataatctaatgctcactctcccaggccttgaatgtcacagcagctcctcattcctaatacttaacaatagtgaatgtgcaagaaagggaaaaagcagtatcaaagcatttaaaaatgttgaaatctgaaacaatgacaccctagatatartattcaatatctgaatcctattcttttgttttactcagactctctctactgaagttccaactggtcttcgtgaccttcttgggtttttgttccctgatctcactaactatgtaagacataaagtaaatgtggtgtgctacagaggttgctaatcagctaaggcatcagtaagctgacaagtgacaacactcgagaggggccacagtacagggttctctccttgaggttcttgccaaagagattgtgcttgtctgctatgtagtggagaatgcttcgggtctgtaccaacttcatcccgtcaatttcaaccatgggcacttgttggaacagcaggtggttacctgagaatggaagcccagagttagaagtgatcttttcttctctgtcccccaacccctaaaaaatgct

SEQ ID NO: 886745 - DNA, 632 bp, Homo sapiens
atgagttcatacagatacctactatttcaattcaatagattcatttagccgtgtcctttcatttctaacctctctgacaagtgagaaacctggctatgattatctaaaatatacaatatttgcatatttgtttaatcctagtacaagtaaaatagttgcagaattrccaatgcatacctctgtgaaaaacaaatctactaacaagagtacagtatttttctttccttcttttttttttttttttttttttggtcttaagccttacaatatccagtcaaaattgtggttttctgtggttatttaggtcagttcttttcccccccacctccttcagtttggtaatctattcatttgaaatgctgttaggttgttagtgtttgtatattccactttgcggtttccttacatcctggttggttttaattaattacttagttttctggtatgcaaaactttaccatgattctaagagccagagttatatgaaaaagtgtctttggagacactgtctctctctgtccctaattcccattcctagtccctctttttcccacccatttctcactcatccccctgtagacaacaaatctcactaatttctaactttccccttttgtttttcttttgctcaa

SEQ ID NO: 886746 - DNA, 654 bp, Homo sapiens
caaagcaccccaaatgcagccccacaagaggaactaagcagaggtacattcatgtcaaaaaccttgtatgtggggatgggggagtgaggatgtccaaagtcaagaacagctccctccagggtcagtccttgcccaaggatgctggttcagcctccaaggctttgtctccataccaagtttacaccagggagcagcctctgacatgcccaaatccagggaatggatacaagagaggacaaggggccaattgcttctttaagatctgtcctgtggcaaattccgagtccagtggaagtccagccttcagctgctggggtctcccgtgtcttccttaattcatacaaccacttgatcatgggtgtgttgcactccaccaccaacatgccacaggggacatgctcctgggcccgctccccarcagtagccaaactgaggtgggagcagcttcccttggagttgcccccacccagcactgggcccagccagggacatgatgtccaagttggcaaggcccccctttgattcccaaatttaacaacgtgccagatgtgtgggttccagccctgaggcagggtcacaaagagatgtcagtttcctcaactataaaatgaggaattggtttagaatcagatcgtctccttagtttcttccagt

SEQ ID NO: 886747 - DNA, 654 bp, Homo sapiens
caaagcaccccaaatgcagccccacaagaggaactaagcagaggtacattcatgtcaaaaaccttgtatgtggggatgggggagtgaggatgtccaaagtcaagaacagctccctccagggtcagtccttgcccaaggatgctggttcagcctccaaggctttgtctccataccaagtttacaccagggagcagcctctgacatgcccaaatccagggaatggatacaagagaggacaaggggccaattgcttctttaagatctgtcctgtggcaaattccgagtccagtggaagtccagccttcagctgctggggtctcccgtgtcttccttaattcatacaaccacttgatcatgggtgtgttgcactccaccaccaacatgccacaggggacatgctcctgggcccgctccccagcagtagccaaactgaggtgggagcagcttccctyggagttgcccccacccagcactgggcccagccagggacatgatgtccaagttggcaaggcccccctttgattcccaaatttaacaacgtgccagatgtgtgggttccagccctgaggcagggtcacaaagagatgtcagtttcctcaactataaaatgaggaattggtttagaatcagatcgtctccttagtttcttccagt

SEQ ID NO: 886748 - DNA, 533 bp, Homo sapiens
catgcccaactaattttgtatttttagtagagacggggtttctccatgttggtcaggctgggtcttgaactcctgacctcaggtgatctacccgcctcggcctcctaaagtgttgggattacaagtgtgagccaccatgcgcagacttcctgagtttttaaatatgtaaaatgtacaaggtctacttcatagggtggttgggttaacacatgtaargcacttagaacagtaccttgcatggttatactgataaccatgttatcagtatggtttgcttttataatgctttattgaaactcctccagtcacaaggtggcagcttttgttgaaagccatgtaattgattaaagccttaaaaaaaaaatctcaagaatttgccctgaaaagccccagttttttttctgtaacaccaataattgacaagtgatgccattcatgaggtatcagaattgaaaaccaatcaaggaagttacgtttctgaagtaacatggaagttacccatatagtaaaatcaattttaattattgagtaaa

SEQ ID NO: 886749 - DNA, 709 bp, Homo sapiens
aaaagtctattttggaatttcactgcctcttttttatttttttattttttggtgagaggttgctagagcagaggggctgtctccaagaccatgtcttcatcagaaactggggtttaatagacgttagaaatggtatatatttcttccaccatctcttaagctcttctgtttattacctgacttttgtttatcaaattccagagttgcttacttttgttttgttagctaataggggtgcttygggtgggttaagagaagaaatacttttttcaaaagtcaccatcattctgtgtgagagagaatgtaattcctatagagaaaagtaattagttagcttggtgtgttgtaatggcagctttgctatttttttgtactctttctctttcttcgtttcacaaagaaggttgacaagctacttacctttctatgaatgcttttctttaaaactatataattgaatgcctagagaaatgaaccttggctttagcagtactgaatggcaaaagtggaaagaaactcatttttcccttccttccttccctacttctctttctccttccatgctttccttccttctttccctgtttcttaaaaaatgcgatttgaatctagtttgggtaaagttgacctgtggggagttgaatgagaaaactgaaattaagtatttttcttctgagtattgtgttaatttgctccaaatgacagaatt

SEQ ID NO: 886750 - DNA, 709 bp, Homo sapiens
aaaagtctattttggaatttcactgcctcttttttatttttttattttttggtgagaggttgctagagcagaggggctgtctccaagaccatgtcttcatcagaaactggggtttaatagacgttagaaatggtatatatttcttccaccatctcttaagctcttctgtttattacctgacttttgtttatcaaattccagagttgcttacttttgttttgttagctaataggggtgcttcgggtgggttaagagaagaaatacttttttcaaaagtcaccatcattctgtgtgagagagaatgtaattcctatagagaaaagtaattagttagcttggtgtgttgtaatggcagctttgctatttttttgtactctttctctttcttcrtttcacaaagaaggttgacaagctacttacctttctatgaatgcttttctttaaaactatataattgaatgcctagagaaatgaaccttggctttagcagtactgaatggcaaaagtggaaagaaactcatttttcccttccttccttccctacttctctttctccttccatgctttccttccttctttccctgtttcttaaaaaatgcgatttgaatctagtttgggtaaagttgacctgtggggagttgaatgagaaaactgaaattaagtatttttcttctgagtattgtgttaatttgctccaaatgacagaatt

SEQ ID NO: 886751 - DNA, 709 bp, Homo sapiens
aaaagtctattttggaatttcactgcctcttttttatttttttattttttggtgagaggttgctagagcagaggggctgtctccaagaccatgtcttcatcagaaactggggtttaatagacgttagaaatggtatatatttcttccaccatctcttaagctcttctgtttattacctgacttttgtttatcaaattccagagttgcttacttttgttttgttagctaataggggtgcttcgggtgggttaagagaagaaatacttttttcaaaagtcaccatcattctgtgtgagagagaatgtaattcctatagagaaaagtaattagttagcttggtgtgttgtaatggcagctttgctatttttttgtactctttctctttcttcgtttcacaaagaaggttgacaagctacttacctttctatgaatscttttctttaaaactatataattgaatgcctagagaaatgaaccttggctttagcagtactgaatggcaaaagtggaaagaaactcatttttcccttccttccttccctacttctctttctccttccatgctttccttccttctttccctgtttcttaaaaaatgcgatttgaatctagtttgggtaaagttgacctgtggggagttgaatgagaaaactgaaattaagtatttttcttctgagtattgtgttaatttgctccaaatgacagaatt

SEQ ID NO: 886752 - DNA, 605 bp, Homo sapiens
atgctttccttccttctttccctgtttcttaaaaaatgcgatttgaatctagtttgggtaaagttgacctgtggggagttgaatgagaaaactgaaattaagtatttttcttctgagtattgtgttaatttgctccaaatgacagaattagcctmaatgttgagaagtgctaagtttcagcaaatgaaattgagcttaatttgtatttctttatgtttactgtgtatgtggtaaaattagataattaataaaggtttaaagggattctaactgataaactcaccgtttcaccttcttaaacctaagaagcataatttgcctaaattatgcaaaatgctaattaaagggtttaatttgctaatcatatccatttgattagaggcagatgctgattatctgcacaattctaaatggacctttcaaagatggctttcattatttaaaatcaacttgtcaaattaaggcataaacttaaggaataacaaataccagtagttaactatgtacttccagtgtaacgcagggcaagatgattcacaaatgctgtgcatcaaagacttggtgtattcaatgtcattatgaatttcagtagtcccaaagtttaa

SEQ ID NO: 886753 - DNA, 605 bp, Homo sapiens
atgctttccttccttctttccctgtttcttaaaaaatgcgatttgaatctagtttgggtaaagttgacctgtggggagttgaatgagaaaactgaaattaagtatttttcttctgagtattgtgttaatttgctccaaatgacagaattagcctaaatgttgagaagtgctaagtttcagcaaatgaarttgagcttaatttgtatttctttatgtttactgtgtatgtggtaaaattagataattaataaaggtttaaagggattctaactgataaactcaccgtttcaccttcttaaacctaagaagcataatttgcctaaattatgcaaaatgctaattaaagggtttaatttgctaatcatatccatttgattagaggcagatgctgattatctgcacaattctaaatggacctttcaaagatggctttcattatttaaaatcaacttgtcaaattaaggcataaacttaaggaataacaaataccagtagttaactatgtacttccagtgtaacgcagggcaagatgattcacaaatgctgtgcatcaaagacttggtgtattcaatgtcattatgaatttcagtagtcccaaagtttaa

SEQ ID NO: 886754 - DNA, 608 bp, Homo sapiens
cttgttgcccaggctggagtgcagtggtgcgatctcggctcactgaaacctctgccttctgtatgttcaagagattctcctccctcagcctcctgagtagctaggattacaggtgcctgccaccactcctggctaatktttgtatttttagtagagatggggtttcaccatgttggtgaagctggtatcggattcctgacctcgtgatccacccgccttggcctcccaaagtgctggggttacaggcatgagccaccgcacccggcttcctctgtcagagcacttgtacttgagggttatcacccgcctgtcttgaaatgggctctaagtctcctgaaagcaaaggaccctgaatatggtgtttattacctaacacaatgtctagcctataggaggtacttaatgtatgttggttgaacaaaggagtaaataaatgaagtagctacctacagttgttccccagaagatacattacttaagcaccctagaaactgtttggccttttgaatgtttattgtaaagtttaaattctcagttgtttgttcttagtttgtgctaacagcttcataaaatgggtagatcaagcaatagtgtgcagttagcaaact

SEQ ID NO: 886755 - DNA, 608 bp, Homo sapiens
cttgttgcccaggctggagtgcagtggtgcgatctcggctcactgaaacctctgccttctgtatgttcaagagattctcctccctcagcctcctgagtagctaggattacaggtgcctgccaccactcctggctaatgtttgtatttttagtagagatggggtttcaccatgttggtgaagctggtatcggattcctgacctcgtgatccacccgccttggcctcccaaagtgctggggttacaggcatgagccaccgcacccggcttcctctgtcagagcacttgtacttgagggttatcacccgcctgtcttgaaatgggctctaagtctcctgaaagcaaaggaccctgaatatggtgtttattacctaacacaatgtctagcctataggaggtacttaatrtatgttggttgaacaaaggagtaaataaatgaagtagctacctacagttgttccccagaagatacattacttaagcaccctagaaactgtttggccttttgaatgtttattgtaaagtttaaattctcagttgtttgttcttagtttgtgctaacagcttcataaaatgggtagatcaagcaatagtgtgcagttagcaaact

SEQ ID NO: 886756 - DNA, 610 bp, Homo sapiens
cattttaaactatttttaagtgtacagttctttgtcattaagtgtattcacattgttgtgcaaccatccccattcatctccagaactttttcatcttctccagctgaaactcattaccctttaaatactaactcctcattcttcccctgcccacctcttgatgtgagtgggttttggcaaatagagtatggatggcagcagtgacagagtaccagtgtctgggtacaggctttaagaaactgggggcttccactttctgtctctggtacacagtcttcaggagctctgggatgccattaagaattctaagtagacttgatggagaatctgttctgaaacctggcagtaactagtaattgccatrctggagaggcatgttgacattcccacctgagcccagccttttaagcatccctgtcacggtgccatacatgagagcagagccatctaagaacctccagattaatctgttcaccagctcagtacctctggtgacttcatttggtgccacatggagtagagacattgccagcagcaccctttctgaatacctgaccatcagaattgagagctgtaatacaatggctgttattttaaactgttaagtttt

SEQ ID NO: 886757 - DNA, 610 bp, Homo sapiens
cattttaaactatttttaagtgtacagttctttgtcattaagtgtattcacattgttgtgcaaccatccccattcatctccagaactttttcatcttctccagctgaaactcattaccctttaaatactaactcctcattcttcccctgcccacctcttgatgtgagtgggttttggcaaatagagtatggatggcagcagtgacagagtaccagtgtctgggtacaggctttaagaaactgggggcttccactttctgtctctggtacacagtcttcaggagctctgggatgccattaagaattctaagtagacttgatggagaatctgttctgaaacctggcagtaactagtaattgccatgctggagaggcatgttgacattcccacctgagcccagccttttaagcatccctgtcamggtgccatacatgagagcagagccatctaagaacctccagattaatctgttcaccagctcagtacctctggtgacttcatttggtgccacatggagtagagacattgccagcagcaccctttctgaatacctgaccatcagaattgagagctgtaatacaatggctgttattttaaactgttaagtttt

SEQ ID NO: 886758 - DNA, 610 bp, Homo sapiens
tagttcactctttctctgaagatgttcttcgtttgggtctccagtttaatatagggagggcctcttgcaagagtcttccgcttggcaggccctaatccttgtgttttgctaccttgccccttgagactgaagatctgaagtatgaggagatggcatttactaatgtcctcagagcaaaaatggcattagttctcctgggtttgcctcaaaatttggccaacaagttcccttttaaactaaatattagtttaacagtatttttaaaatgctgttaagctaatatttttaagtgttttgtccatcatttttgttgttttcagtgagatgtagatctgaataacttaagaaatcagaaactgctaatagcacggagcccatctgctgctgtgctgttggtgatgttgcaaatygttcccctctccccttaacatattctgagcctcaagtcaagacagcttactgggctggagaggtgatggtctaaagaattataaagattttttaaaaatttaagttaaaatagcttcttaaattattatatcaaattaatagagaagtattatttctttaatttgtttaactgcccttgtgctcatctggagaaactgtc

SEQ ID NO: 886759 - DNA, 553 bp, Homo sapiens
atacttgaatttagggaaaggtgagatactatattatgctaggtgaagtattagtggtacttagttattaatgtgggatttgtttagttagaacctaaaacaatattaggacaaacatctgtatgttcaaagatactagtttctttattgctgggtaaaaggtgattataaaaggatcatgacaggttaacacatttggcttcartttcagttttgccagatctaggcaagatttatttgggcaacaaacaatacatgtaatcaattataattattcttattaatggtggggaacacagagatgtatattaaaattttatttaatttcagataaatgtttactgggaaaatttgaaatatatttttatatttaggttggatgcttacttaaaaagcaatgaaagagcatcgtgaagacatgaagatttcttctcctttcaccctatctccccaatcagtttcttccttcattaattgctgtttgagaattataacttggctctaaaacttaaaatagctacttcctctcagatattttctgcattgtgtgtct

SEQ ID NO: 886760 - DNA, 553 bp, Homo sapiens
atacttgaatttagggaaaggtgagatactatattatgctaggtgaagtattagtggtacttagttattaatgtgggatttgtttagttagaacctaaaacaatattaggacaaacatctgtatgttcaaagatactagtttctttattgctgggtaaaaggtgattataaaaggatcatgacaggttaacacatttggcttcaatttcagttttgccagatctaggcargatttatttgggcaacaaacaatacatgtaatcaattataattattcttattaatggtggggaacacagagatgtatattaaaattttatttaatttcagataaatgtttactgggaaaatttgaaatatatttttatatttaggttggatgcttacttaaaaagcaatgaaagagcatcgtgaagacatgaagatttcttctcctttcaccctatctccccaatcagtttcttccttcattaattgctgtttgagaattataacttggctctaaaacttaaaatagctacttcctctcagatattttctgcattgtgtgtct

SEQ ID NO: 886761 - DNA, 553 bp, Homo sapiens
atacttgaatttagggaaaggtgagatactatattatgctaggtgaagtattagtggtacttagttattaatgtgggatttgtttagttagaacctaaaacaatattaggacaaacatctgtatgttcaaagatactagtttctttattgctgggtaaaaggtgattataaaaggatcatgacaggttaacacatttggcttcaatttcagttttgccagatctaggcaagatttatttgggcaacaaacaatacatgtaatcaattataattattcttattaatggtggggaacacagagatgtatattaaaatttyatttaatttcagataaatgtttactgggaaaatttgaaatatatttttatatttaggttggatgcttacttaaaaagcaatgaaagagcatcgtgaagacatgaagatttcttctcctttcaccctatctccccaatcagtttcttccttcattaattgctgtttgagaattataacttggctctaaaacttaaaatagctacttcctctcagatattttctgcattgtgtgtct

SEQ ID NO: 886762 - DNA, 553 bp, Homo sapiens
atacttgaatttagggaaaggtgagatactatattatgctaggtgaagtattagtggtacttagttattaatgtgggatttgtttagttagaacctaaaacaatattaggacaaacatctgtatgttcaaagatactagtttctttattgctgggtaaaaggtgattataaaaggatcatgacaggttaacacatttggcttcaatttcagttttgccagatctaggcaagatttatttgggcaacaaacaatacatgtaatcaattataattattcttattaatggtggggaacacagagatgtatattaaaattttatttaatttcagataaatgtttactgggaaaatttgaaatatatttttatatttagrttggatgcttacttaaaaagcaatgaaagagcatcgtgaagacatgaagatttcttctcctttcaccctatctccccaatcagtttcttccttcattaattgctgtttgagaattataacttggctctaaaacttaaaatagctacttcctctcagatattttctgcattgtgtgtct

SEQ ID NO: 886763 - DNA, 535 bp, Homo sapiens
tttgttcttacctatattgtttttattcatggagtctcatttcctggtgtgctttgttactgttgtatgctggagattgtgtttcgaaagttatgtgtggactatattgaagcttaggaggattatatctttctggaagggttttcatttgttttttttttttcattggcctggggtcattgctggtccaggctaattttaatttaaatctgggatctgagatctcagaatcactagataagttgaaaatgggttgtagatccatrtgaaggctgataaggttctggttcatcctcaagtaattgttcacagctacaggaatttcaggggtttcttcctgactccattgagttttaaatttctgtgcctaaattttttttgtctatttctagaaatttttttttctttttcctctttttccttatataggcctaatcatctctgaaatgtcatttcttacattcatctaaatgtgtgtttggaacctgtttaataaaacacaggtttcatttagtgatataaaacaacacatcac

SEQ ID NO: 886764 - DNA, 674 bp, Homo sapiens
ttataaattacccagtcttgcctaggcctagtagcttacgcctataatcctcgcactttgggaggctgaggtaggtggattgcttgagcccaggagtttgagactagtctgggcaacatggtgaaaccttgtctctataaaaagtatgattaatgaatgtggtggtgcaggccagtaggcacagctacttgggaggatcacctgagcctggagacgtcgaggttgcagtgagctgtgattgcaccactgcactgcagcctgggccacagagtgaggccttgaccatttattcatctactgggttgacaatattgtttaaattttttaaaatctgtgaatgtgtacttgattacattgattaaaacaatattaagtcaattttgcattcctgggataaacctactatgtcaaggtatattayctttttttatatattactgaatttttgctttactgccaatgagggatgttgatctagacttttcctttcatgtaagggctatctgattttggtatcaggtaatgctgaccttgttaatgagttgggaagtatattccttcttaagtatgcaatttatatagcagcatagtataaataatacaatttaataatgtaatatatagagttgtttaaattgccaacatttttctctattttaaagttttgtctaaaa

SEQ ID NO: 886765 - DNA, 674 bp, Homo sapiens
ttataaattacccagtcttgcctaggcctagtagcttacgcctataatcctcgcactttgggaggctgaggtaggtggattgcttgagcccaggagtttgagactagtctgggcaacatggtgaaaccttgtctctataaaaagtatgattaatgaatgtggtggtgcaggccagtaggcacagctacttgggaggatcacctgagcctggagacgtcgaggttgcagtgagctgtgattgcaccactgcactgcagcctgggccacagagtgaggccttgaccatttattcatctactgggttgacaatattgtttaaattttttaaaatctgtgaatgtgtacttgattacattgattaaaacaatattaagtcaattttgcattcctgggataaacctactatgtcaaggtatattacctttttttatatattactgaatttttgctttactgccmatgagggatgttgatctagacttttcctttcatgtaagggctatctgattttggtatcaggtaatgctgaccttgttaatgagttgggaagtatattccttcttaagtatgcaatttatatagcagcatagtataaataatacaatttaataatgtaatatatagagttgtttaaattgccaacatttttctctattttaaagttttgtctaaaa

SEQ ID NO: 886766 - DNA, 667 bp, Homo sapiens
ataatactagagtttctcaacctcagcagctattgacattggggactacataattcttcattgtgagaggctgccttgtgcattgtagaatgtttagcagcatccttggcctctactcacttaatgctagtagcaaccaatcatacccctcacccaaattatgacaacaagaaatatccccagacatttccaaatgtcccttggggcacaaaatatcttctatctctacccctcttctctgtcccttgagaaacactgatatacacaaaagaatgaaaaatgccagaaatgatagggaaagataatcctgaatgaagacaatgatgacaatttgacttgcaaatagtatctcaatatcttttgtttctttgtgattaatgtaatagttaattcctaactagttgctaaagaactaatttgtatgcatagrtaagatataacttgtaacacaggaatagagaacaaggaattttaaaatcaaaataatatatacttattatagaaaatttagcaaacatataaaagtaaaaaggggaacttcattatcctgccatccaaacataacattcattagcatttggtctaagtccttcaagtgattttttttctatacatacttgaccattatgacacacatacatacacacattagtttttattaactaat

SEQ ID NO: 886767 - DNA, 660 bp, Homo sapiens
atgtggacaaaacaaggaacttctgtgagatgagcccctcgtgttcttatcacccaatggcaagtggccttcacggggcagctcccttcactcctgcgctcctccacagaggcgccaggtgcccttaggctataaggattcaaatcaaaacaggacaagctttacaaagctcctggtattgggcacatattacaaattactctattttataacaggagtatacacagtgctctgagaacagagaargagggagtaactcagccaggggctttgagaagtctttccagggaaggtgatgtctttgaaggatgaatagaatttcaccagagggaaagcctttctgcaacggcaggctaataataaatatagaattcaaaacccaaggttctacatgagtaggaaaacacagaaaaggaaagataaaaatatcgaagaaggaatacaaagttttggaaaaaggagagaggagctataagaaaaaaagaaaggtgactttaaaaggaagtatgtggaactgaacatgggatggaattctctggtaacattactagattgaggaagaaggaaattaccagtaaagttgtagtttcagaattatagctagcaagcaaaattcggtttctaccaatgagaatgccaaactcctgtccccctactccc

SEQ ID NO: 886768 - DNA, 671 bp, Homo sapiens
ggggttgttcctacttcatctaggaatgtcaggtaagatctttctgataaggagacatctgagcagaaacctgaaggagctagatgcaaagatatgtgcaggaggggtactcccagcagagtgccagtaagtggagaggcaagtatttgcttgatatgttcagggaactgcaaggaggtcagcgtggctacagagaagtgagagagaggcagaggggataaagtcrgaatggtagtcccgcaaatccctttcaggcctttgtaaggattttggctttgctctgagtgagattttgagctgccaagtccattttaatggactcgctctggctggctgtgttgaaaatcggtaatgggggtcaagggaagaagcagggagaccaggtaagatgcttttgtaacaatggaggcaggaaatgaagttggtttggaccagaggcagcggtggaagaagctgtgagaaggggtcagattctggatacattttgaaagtagacctaacaggttttgctgatgtttttggtgtggtatgtgagaaagaagagtacagtcaatgatgactctaagctttttggcctgaggaagtagaatggagtctctacttgctgagagtaggaagaggaacttggcatgtgtgtgtgctgtgtggctaggaaagaatcaagagatcag

SEQ ID NO: 886769 - DNA, 685 bp, Homo sapiens
tggctcaaaagtatttgttgcgtggatatgtgtagtatgaccccatttatatgaatggaatcatagcaactataaaatctttctctcacataaatacactcgttttaaacccaggttttggggtagtgtatgaaaaataacagctctgggttcaaatcctagttgtcacttaccaattgatggctctgagmaagttatttaccttctttaagactcatgttcctcattggtaactaaggctaataataatacttcataccttataaagatactgggaagattcaaagacaactgtgtgttcgtcactcaagaacaccttcatcacccaaagcatacctgatactttgccgttgctcactgagtggttgttatttgtattctcaatctccctatattttctctgtatcacattggctacctaggaatcttttggtgtgaagttagagataacacattcagagttttctgagatgtaaatgaacttcactgtggccttctgtgggagattttgcaggacaataacccatcaatagagccttggttatctttgccttcacctgccatttccctcatcctcttatccctcagcccaacatctgagaagggcctatagtaggagtttatgtttagtacacatttaataggcatctgtcatgtatcagcactaaaagtacagtgatgcaca

SEQ ID NO: 886770 - DNA, 685 bp, Homo sapiens
tggctcaaaagtatttgttgcgtggatatgtgtagtatgaccccatttatatgaatggaatcatagcaactataaaatctttctctcacataaatacactcgttttaaacccaggttttggggtagtgtatgaaaaataacagctctgggttcaaatcctagttgtcacttaccaattgatggctctgagaaagttatttaccttctttaagactcatgttcctcattggtaactaaggctaataataatacttcataccttataaagatactgggaagattcaaagacaactgtgtgttcgtcactcaagaacaccttcatcacccaaagcatacctgatactttgccgttgctcactgagtggttgttatttgtattctcaatctccctatattttctctgtatcacattggctacctaggaatcttttggtgtgaagttagagataacacattcagagttttctgagatgtaaatgaacttcactgtggccttctgtgggagmttttgcaggacaataacccatcaatagagccttggttatctttgccttcacctgccatttccctcatcctcttatccctcagcccaacatctgagaagggcctatagtaggagtttatgtttagtacacatttaataggcatctgtcatgtatcagcactaaaagtacagtgatgcaca

SEQ ID NO: 886771 - DNA, 660 bp, Homo sapiens
gcacatatttattcatttcatgtacagaaggctaaacataacttaatgaacatatgttgaattgcagtgtccttaattcaaggaaataaaacttaggttgcctagtacatagattgcctcatacgaaggaggtggcccctgcctgttgtcatttgtggttcagcctctgccaaagggccaagttgagactgtgctgggaacaggccctgagaaggcaaagcttgacactgagtttgcatgtgatgggtgattttacaaaggagttatgatgcttgagttatttgttgttttaaaatttagacaatctgttggtgggactgtaaactagttcaaccattgtgaaagtcagtgtggagattcctcagggatctagaactagaaataccatttgacccagccatcccattactgrgtatatacccaaaggactataaatcacgctgctataaagacacatgcacacatatgtttattgcagcactattcacaatagcaaagacttggaaccaacccaaatgtccaacaatgatagactggattaagaaaatgtggcacatatacaccatggaatactatgcagccataaaaaatgatgagttcatgtcctttgtagggacatggatgaaattggaaaccatcattctcagtaaactatctcaa

SEQ ID NO: 886772 - DNA, 572 bp, Homo sapiens
aacatcacactctggggactgttgttgggtgggagtaggggggagggatagcattaggagatatacctaatgctaaatgacgagttaatgggtgcagcacaccagcatggcacatgtatacatatgtaactaacctgcacattgtgcacatgtaccctaaaacttaaagtataataataataaaaaaaagaaagaaaaaagagaaaaaaaaatttagacaatctgctccacaaatctcaaatagtatgggcagatacgagtttacaaagtgaagaggagaaaacatctataaccaaatctaaygttttttcttttaccatcgataggatttctaagctccctattctatttcttctccaccaaatccagaatacatttggtgtagaaactgttttgctttttagctgggcagatttggtatttggacatgtttatctgataaatgcagtggaaccaaattacattttttggggtcatacagtatttgaaatcagccaaatacagtatttttacttcacttgtaaaactcattaccatatacagcttttgtcaaatataactgcaaaatctca

SEQ ID NO: 886773 - DNA, 646 bp, Homo sapiens
ttgtccattcgttaactgaggagcatttgagttgtttccaccctttggttattatgaatgatgttgctataaacattcatgtacatgtttctgtgtggacatgtgttttcatttctcttagaaatatacctgagtataattgctgggccatgtagtaactctctgtttaattgtttaaggaactgacagactgttttcaaagcagctgccccattttacattcctaccggcagtgtatgagggttacagtttttctatatccttgctaacccttgtgggtaagaagtgatatctcactgtggttttgacttgcgttttcctaatgactaargatactgagcatcttttcatgtgcttaatgatcatttgtatatattatttagataaatgtgtattcatttcctttgcctagttttaaatttggttatttgcctttgtattactgaattgtaacagatatatattaaatacaagtcccatatcagatatttgatttgcattttttttttctattttataggcccttttcattttcttggcagtgtcctttgaagcacaagattttttattttggtgaagtccaatttatctacttttttctttcatttctcgttatttttgtatatatctaagaatcctttgccaa

SEQ ID NO: 886774 - DNA, 651 bp, Homo sapiens
tttaaatttttatcttttctggtctagtgatatgtggtaggatacttggcagtcagtcaaccatgagatcatgaggtaaacactgatattcttcagcatactgtgttactagatgattttgcccaattgtgcactaatgaaagtgttctgagygcatttatagtaggctaggcttggtaggttcagcatattaaacgcacttttgacttaaaatattttcaacttatgatggatttattaggacataacttcattgtaagtcaggggcatctgtatttatataaaaatatagaaaatgcaaattaacctatagtgacacaaagcccattagtggtttttggtggaggatgggaaatggttctgtgaggaagaaggaattaccaaggagcatgattaaactttttggggtgatgaaaatgttctttaacttggttataatgatggtttctcaggggtacacacgtgtgtacttacaaattgttcactttaaatatgtgtactttattgtatatcaattataccacaataaagctatgaaaatatgtgtccatatgccatatcgctctaattttgtggcttaatcatatgcaaaaactcctcatcttcctcttcctcctcctcctccttctcctcctcttcctcctccatttt

SEQ ID NO: 886775 - DNA, 652 bp, Homo sapiens
accaaacataaatattttccaatcagagctttttccaatgagatcaaagtttctgttacccaatagtggatgggtccgagcagagactggatgacaacctgccagatttgttgaacctatgaaggttctctgattctctggaagacctctttctccctgcacatgtaaaaatcctccctactgttcartattcagtccataccccacttccttttttgggtaccacagcttaaaatcatcttttctatctctacctttcttatcattttaagagcaggttagcatttacattatgctacctgcattaatgttttttctcagtggtctaatccttagctttttgagttaatgctaacctgcttgaagacacggaccacatctgagctaagtgacaaatgattctgtattgttatcttttagcattgaaggtgtatgtaagactcttttatcctttccacacagtgttaaatctaacccttgttgatctacctgcagtaactaaagtgcccgtgggagatcagccacaatagctctcttgctattgaccttgccatttcatcttcaagagtgaatattaaatgtttatgatgggtaatggtagtaaagctaccaataattgccacatctggctttttttttttttttgagatgg

SEQ ID NO: 886776 - DNA, 604 bp, Homo sapiens
tgctcttctgattcattttagaggttccaaaagcatatttttactttgtgaatcttatttttattttttaaaatagcatcatgttcttgttttcataaatacaatatcttcctccaaggactttagtgagagctttttgaaggttttcttttgtaatctacattgtctgaatctattgttttctgattgtttgtttttgtctctgtctttgatgttagagacctttttcaaatgtttgtcgatcttttgccgcttgttcgtgcatgagagtggagcaccaaaaagctgatttatgtacatgacagggattcattgaccagtgggttttcccatggagtaactgtgctgagagttgaccattttgttaggagacttcctcaactgttaggttckatgagtattttctcctgagctggtctggtataagcctgatgtctagtgttcttggagccaagaattggtgggtcaggggatggagtgggaggaggatggttctcactattcagtgtgtacacttttaattaattcctctgctttcatgatggcattcctgaaattcttctggagtccagagtccctctggttcaacctcttttgaagcaag

SEQ ID NO: 886777 - DNA, 661 bp, Homo sapiens
cctggccaacatggcgaaacctgatctctactaaaagtacaaaaagtaggtgggcatggtggcatgagcctgtagtcccagctactcaggaggctgaggcaggagaatcgcttgaacccaggaggcggagattgcagtgagccaagatcatgccactacactccagcctgtatgacagagcaagacttcgtccaaaaaaaaataaaaagaaggaaacttgaaacattagaaataaagaaataacaatgaaaagagttaaaatatgggtaaatrtaatggattgtccttctcctcttgagtgttctgaattatgttcaacaattgaagcaaaacttataatcttaccgatatggttctcaatgaatatagacaatatatttaagacaagtataaagatagactaataaagaaacctaatataggtaagttttctatacctagttcaactggtaaaatgtcaacactgataggtagatcaaaagttatgtatgtaaaatgcaatatgtacagcaaccagtaaaaaaactcttcaaaaagatacattatagataaatcaaaatggaattataaaaaatattccagtaacacacaggatggccaggaaagtgaaacagaggaacaaaataaacaaacaaaagcccagaagaacaaagagaaaata

SEQ ID NO: 886778 - DNA, 661 bp, Homo sapiens
cctggccaacatggcgaaacctgatctctactaaaagtacaaaaagtaggtgggcatggtggcatgagcctgtagtcccagctactcaggaggctgaggcaggagaatcgcttgaacccaggaggcggagattgcagtgagccaagatcatgccactacactccagcctgtatgacagagcaagacttcgtccaaaaaaaaataaaaagaaggaaacttgaaacattagaaataaagaaataacaatgaaaagagttaaaatatgggtaaatgtaatggattgtccttctcctcttgagtgttytgaattatgttcaacaattgaagcaaaacttataatcttaccgatatggttctcaatgaatatagacaatatatttaagacaagtataaagatagactaataaagaaacctaatataggtaagttttctatacctagttcaactggtaaaatgtcaacactgataggtagatcaaaagttatgtatgtaaaatgcaatatgtacagcaaccagtaaaaaaactcttcaaaaagatacattatagataaatcaaaatggaattataaaaaatattccagtaacacacaggatggccaggaaagtgaaacagaggaacaaaataaacaaacaaaagcccagaagaacaaagagaaaata

SEQ ID NO: 886779 - DNA, 661 bp, Homo sapiens
cctggccaacatggcgaaacctgatctctactaaaagtacaaaaagtaggtgggcatggtggcatgagcctgtagtcccagctactcaggaggctgaggcaggagaatcgcttgaacccaggaggcggagattgcagtgagccaagatcatgccactacactccagcctgtatgacagagcaagacttcgtccaaaaaaaaataaaaagaaggaaacttgaaacattagaaataaagaaataacaatgaaaagagttaaaatatgggtaaatgtaatggattgtccttctcctcttgagtgttctgaattatgttcaacaattgaagcaaaacttataatcttaccgatatggttctcaatgaatatagacaatatatttaagacaagtataaagatagactaataaagaaacctaatataggtaagttttctatacctagttcaactggtaaaatgtcaacactgataggtagatcaaaagttatgtatgtaaaatgyaatatgtacagcaaccagtaaaaaaactcttcaaaaagatacattatagataaatcaaaatggaattataaaaaatattccagtaacacacaggatggccaggaaagtgaaacagaggaacaaaataaacaaacaaaagcccagaagaacaaagagaaaata

SEQ ID NO: 886780 - DNA, 586 bp, Homo sapiens
aatgccatcgctttaacagtagacaccctgcaagtttgggagttcaacttgtattgtaattcagccaatcacaggatgaggttctgcatttggttttcagcctctcagctataggagataagtctcttcttcagggcacactacaagcttttaggtcatttatgccatgctccagttgggatatatrtatatatatatattttttttttttttttttttttgagatggagtctcgctctgtcacccaggctggagtgcagtggtgccatctcagctcactgcaacctctgcctcccaggttcaagcaattctcttgtctcagcctcccaagtagctgggactacaggtgcccgccaccacacccagctaatttttgtatttttagtagagacgggctttcaccatgttggccaggctggtctcgaactcctaacctcaggtgatccatccacctcggcctcccaaagtgctgggattacaggggtgagccactgggcccagcctccagtggggaatttaaatccccaagctcatccctttctttcaccactttgtccattgatattaggagaaaccaaccaatgtc

SEQ ID NO: 886781 - DNA, 566 bp, Homo sapiens; identical to SEQ ID NO: 876387

SEQ ID NO: 886782 - DNA, 564 bp, Homo sapiens
actccgggctgtttggaggcactcccaaggcccctgtgctgtgtcaggggcaggaggtgatggtggggggtgggtagtacgtccagagcttccccttcccaacaaatctgtggatgggcagggggtacactcatggggaaattaccaatttaaataggaaatgcaagcaatttggatagaaccccaggactgcagtttgagagctcattctctgccccgtgggggtttgattacaaccaacttggctgataacgtgcagagagggccagaaaaatggtttccaaggaaactcagatctttmtaagccccttctggctcaggtgggagccagggctggccgggaaagcagaggctgtgctgagtaccatggtgctcaattcccggtgagccctctgcccactctctgcctgcttctgtgcttatccctgcttccccaaacctggcctgcactttcattcctgtttacaacagttgtttctctctttgtctctgctccctttgtcttcttatttatctcagctgatgtctgcacttgggaaagttggcaaacattaaaaaaaaaaa

SEQ ID NO: 886783 - DNA, 616 bp, Homo sapiens
tctcttgaattggaagatcactgtcagtcctaatcaggactgtttgttttctgttctcagcagagagctcctctcccacagttattgaagacagatgcttttctttggtctgaatgaatcaacttatggccccaacaccaataaagacacaagggaataatatgtgcttattggcttagacttctactccaaccagttatwagcaagggggattattacgggatgggttgtcatgattgggttacacgggtcaaggcccatcctggatctggagtgattcctcacatcgcatttctgggacaggtggcagaaggcctgaatggatgttgtgcattgattacaatgtcaatgtcaatatcaaaatctaaattcatcctgtatgctcattccccacaacccagacctcctcttgtctcttctatttcagcacatgctcccaccatgaactcagctactttaaccagaaactagagtcagccttgaagttttctttttgaccctctcaatgattactcagttattcagtatttttctcatttgtagccccctcttctatctgctctccccaatctaacagctttttaattggtgttctttcttcaatcccagtaatttt

SEQ ID NO: 886784 - DNA, 616 bp, Homo sapiens
tctcttgaattggaagatcactgtcagtcctaatcaggactgtttgttttctgttctcagcagagagctcctctcccacagttattgaagacagatgcttttctttggtctgaatgaatcaacttatggccccaacaccaataaagacacaagggaataatatgtgcttattggcttagacttctactccaaccagttataagcaagggggattattacgggatgggttgtcatgattgggttacacgggtcaaggcccatcctggatctggagtgaytcctcacatcgcatttctgggacaggtggcagaaggcctgaatggatgttgtgcattgattacaatgtcaatgtcaatatcaaaatctaaattcatcctgtatgctcattccccacaacccagacctcctcttgtctcttctatttcagcacatgctcccaccatgaactcagctactttaaccagaaactagagtcagccttgaagttttctttttgaccctctcaatgattactcagttattcagtatttttctcatttgtagccccctcttctatctgctctccccaatctaacagctttttaattggtgttctttcttcaatcccagtaatttt

SEQ ID NO: 886785 - DNA, 644 bp, Homo sapiens
aacaatggtgaaggggattgtgatatttttgcttaatagccaggaaaagactgccagctctaagttagggatttgcaaaatgtgttttcattttattttatttcattttatttatttatttattttgagacagagtctcgctctgtcgcccaggctggagtgcattggtgcgatctcagctcactgcaagctctgcctcctgggttcacgccattctcctgtctcagcctcccaagtagctgggactacaggcacccaccaccacgcccagctaattttttgtatttttagtagagacggggtttcaccgtgttagccaggatggtctcaatctcctgacattgtgatctgcccggcttggcctcycaaagtgctgggattacaggcgtgagccaccgcgcctggccgtgttttcattttaattgtataatattatttaccttttttgctctttatttaaaccacaggtatagaaaggcagcacaacactaagagggtatgtatatgtgttagcatatgtctcataaattcctgtaagaaaggaaagtggtaggaagtgacctgaacagaagtaaattatttttgaataattcaagctaatttgtaggttcacaaaaataaaaagaaaagggaaaaagaaaaaa

SEQ ID NO: 886786 - DNA, 571 bp, Homo sapiens
tttatataacaatttcagaaaggccttgtaggttaaacaatgataaatttgtatgagaagactattcttatttgacactaaatacacctttgaaattactttgaaataaagaaattaattttacctaaaagttggtgtttagtccatcaaattggtctttccacaagttttgttgatctgttcataagtattcagacttgaaatagacaagctgaacagaggacaaatgaagactatatactcttctatcatggttaaattgcctcatgctcaatggaatgacgcttgacaaaagttcataatttcaaaaaattacctgcagattttttatgacaatgagtcattgtcataaaaaagctcttarctataatctaaaaacaaatccattaaacacaaacacagttttcagtttgtaaacttgaatgccaactttcaggacaaaattgcttttttaagataacttttctttctgactctaagtaatacatgcttacagaacatttgaaaaataccaaatcggttggacgcagtggctcacacctgtaatcccagcagtttgggaggctgaggc

SEQ ID NO: 886787 - DNA, 611 bp, Homo sapiens
tacctagaataaccaatgcagagaagtccttaaaggggctgacagagctgaaagccaaggttcaggaactacatgaagaatgcagaagcctcaggagccgatgtgatcaactggaagaaagggtatcagtgatggaagatgaaatgaatgaaatgaagygagaagggaagtttagagaaaaaagaataaaaagaaacaaacaaagtctccaagatatatgggactatgtgaaaagaccaaatctacgtctgattggtgtacctgaaagtgatggggagaatggaaccaagttggaaaacactctgcagtatattatccaggagaacttccccaatttagcaaggcaggccaacattcagattcaggaaatacagagaatgccacaaagatactccttgagaagagcaactccaagacacataattgtcagattcaccaaagttgaaatcaaggaaaaaatgttaagggcagccagagggaaaggtcgggttacccacaaagagaatcccatcagacttacagcacatctctcggcagaaactctacaagccagaagagagtgggggccaatactcaacattcttaaagaaaataattttcaacccagaatt

SEQ ID NO: 886788 - DNA, 644 bp, Homo sapiens
gggaataagcattaacagcaaagctagagatagctgggcactaaggctcatgtctataatcccagaattctgggaggccaaggcagaaggatcacttgagcctagaatttcaagatcaccctgggcaacatagggagactccatctttacaaaattaaaaatgtatcaaaagccaatcagggcttggtggtgtgcacctgtggtcccagccactcccaaggctaaggtagtrgaatcacttggcctgggaagttgaggatcatgccactgcactccagtactctgagtgacagagcaagacgctgtcagaaaataagaaaacaataaaaaaggaaaaaaggttagagaaaaaaaagaatgtctaaatgaataatgtcagcactggaatccccatgatcttttgctacttgccacactctgttctccatacaacagcctgagacatgtttttaagtaaattcaaatcctatgccccacctatttaaaacctttctgtggcttcccgatccatttactatacgctctaaactgatctccagctctcctgggcactgcatgatctgctcatccttccaacgcatttcctcatcactctccctttcactcatgatgcctgagccagattgacctcccttatattccat

SEQ ID NO: 886789 - DNA, 644 bp, Homo sapiens
gggaataagcattaacagcaaagctagagatagctgggcactaaggctcatgtctataatcccagaattctgggaggccaaggcagaaggatcacttgagcctagaatttcaagatcaccctgggcaacatagggagactccatctttacaaaattaaaaatgtatcaaaagccaatcagggcttggtggtgtgcacctgtggtcccagccactcccaaggctaaggtagtagaatcacttggcctgggaagttgaggatcatgccactgcactccagtactctgagtgacagagcaagacgctgtcagaaaataagaaaacaataaaaaaggaaaaaaggttagagaaaaaaaagaatgtctaaatgaataatgtcagcactggawtccccatgatcttttgctacttgccacactctgttctccatacaacagcctgagacatgtttttaagtaaattcaaatcctatgccccacctatttaaaacctttctgtggcttcccgatccatttactatacgctctaaactgatctccagctctcctgggcactgcatgatctgctcatccttccaacgcatttcctcatcactctccctttcactcatgatgcctgagccagattgacctcccttatattccat

SEQ ID NO: 886790 - DNA, 621 bp, Homo sapiens
tggggcataggcttcaaaagcacttacagcatctccaggaatttgctgagaattgttttgcaggcaaaaatataagataagttcaaacatctatgataaaagtaattgtggcatacaactaaaaatccctattcttgtggtacaggtcatatcattaagtggttatcactagatagctttccttcaatgatgttcttcatctaggaacacagaagtctccaggggaaaatggcgattgaagttttggatatattgagttcgaaagaaagtcaccyccataaaacttagtgattggagctgtcacccttgcaaatttctaaactctgcaagatagcagcaacatttcaaatgatactctgacagaggagataatgggctaacgtagatttccctccagatgtatttattgcacaaggacaaaattcacatttcactgggagatttctcccactctagtttaagatcacaggttgcagatcccagacagctggtatcaactggccagtatcatgttaagactaaacccaagactctatcacactgcagccttaagattggatttctcctactgttcctgggaagaactagatataacctaaaggtcactattctcctgagata

SEQ ID NO: 886791 - DNA, 533 bp, Homo sapiens
ctgacaaagggaagggtctggcagtagacaaaacatggcagaggcatcaggagagcaaacggtcctgcttgtaccccaagaaggaatttctccagccttgaatttttcactctgaattttactctcactgttctttagcctttgttgccagtttcagttaaactggcttattcttaccctttctcagaaaagctgattctaaacagccagtcctgcacctggggtacagggtacaaaaatggcasgtgggatgggcaggtttgagccttcactagaagcctggccttagatctctccttaacctcttagcctcagtttcctcaccaataaagtgggactcagaatacctacctcttgagatagagatacaaggaaataagcaagctgtgagccgtatgcaaattataaagcacaaatgagagtagagtatttatccgagctccatgtagcatggtgctcattttgtgggttaattccaggtgataactttactggcagcataactacctgtggatttcagagaagcctgaaga

SEQ ID NO: 886792 - DNA, 631 bp, Homo sapiens
atttggtgagattcccatggctctagcaatgcttacattctaagacacctgacaactcactgttcagattactttcctggaatgaggtgaggtacaaacaaatatttgttctttcccaatcaaccacaacacatgctgatttctctgtctttgtttacttgttccttttatggaatgtacaccctccactctaacacccccactctaacatccttgagcacttatgaaacatcacctttatcagaaaacttcctagccagatccagaaatcattgcaatgacctgacccatgttcatgcaaagctccaaaacaagaccaagctaacagtgttggaaggagacattctgaatgagtcatgccttaaaagagcctgccaggacatcttggtcrtcatccacactgcctctatcattgacgtcttcggtgtcactcacagacagtctatcatgaaagccaatgtgaaaggtacagtatcctggggaggagatggagcaatgtgggaaaatgagaatcagaaagaaggacaggatggaaagagaagtttctccactgaacacctgctgtactctgggccaagtgtctttgctgatcactaccaactagggagttcaagactgctaactttagttt

SEQ ID NO: 886793 - DNA, 631 bp, Homo sapiens
atttggtgagattcccatggctctagcaatgcttacattctaagacacctgacaactcactgttcagattactttcctggaatgaggtgaggtacaaacaaatatttgttctttcccaatcaaccacaacacatgctgatttctctgtctttgtttacttgttccttttatggaatgtacaccctccactctaacacccccactctaacatccttgagcacttatgaaacatcacctttatcagaaaacttcctagccagatccagaaatcattgcaatgacctgacccatgttcatgcaaagctccaaaacaagaccaagctaacagtgttggaaggagacattctgaatgagtcatgccttaaaagagcctgccaggacatcttggtcatcatccacactgcctctatcattgacgtcttcggtgtcactcacagacagtctatcatgaaagmcaatgtgaaaggtacagtatcctggggaggagatggagcaatgtgggaaaatgagaatcagaaagaaggacaggatggaaagagaagtttctccactgaacacctgctgtactctgggccaagtgtctttgctgatcactaccaactagggagttcaagactgctaactttagttt

SEQ ID NO: 886794 - DNA, 685 bp, Homo sapiens
cttggcattaataatactgttccatatctgattggtatttgtcaaatactttttcccttcctttattttcaaactatttttatagtcaaatttaatcctgttactcttattgtgatttttaatatagacttatttctatgatcttattttatgttttctatttactgtgatttttgttgatctttccccctcttttcctactgttgagtttttttaaaattctatttyccccccctccctcctattggcttagaaattacacattgcatctctctttctctgttaaaaatgtttatccttgatttggttgtcttgaaattaatcactgtttttatacttctgtgtaatataaggaccttagggggctttattctgatcaccttcctcctactttctgtagtatggttatttcactttgtttttaaacacacccaaattagtcattttgtttacatagtcagtgtttccttagatttaatttgtttgttgatttctttactcattgttgcttctagctccctactccttcattttggattcttattcccccaccaaccctatgcattctttacattctctagtagttttttcagggatgacatacaaataggaaatccttttggtctttatttgagaatctgtgtatactaccttcattcttgattagtaggttagttaagtataa

SEQ ID NO: 886795 - DNA, 586 bp, Homo sapiens
taatagtggcttcttgactcaacatataaatatagcagagaactatggtcattagataaagataatatttacttttctcctcaacagatgttgtcaaaccaccactctcttacctgtttgaagacaaaactcattcttctttctcttctactgtcaaagacaaagctgcaagtgaatctataaggtaactttgaatcaatagaccttcactctttcatgaatatacaacagcttattgtagtgtttatgtaatatttattttatataatgccatcattttcagaaaaatcctaaacaggaaaggctcaagggaggacaaggttatatggccaaaatccaaaaggaaatgacatttctgacagcaagagttcatgggatttcagtcatcatgttctggcccttgttagtttacatayacacacacacacacacacacacacacacacacacacacacacacacatataaatatgtatatatatacacatatatgggtacatatatatatacccatatatatgtatacacacacatattttgtaattgactgtttaacatctctatctattaatatagatagagctgc

SEQ ID NO: 886796 - DNA, 619 bp, Homo sapiens
gaaaacatgaagtttggttataaaataaatgtaaaaaaaaagtcatgaaagtatttaaagtagtcagaaatatgaacagcattcttttctcatttatatagcaattaccacagggtatgtcccagatagtaaaatatagttatgttatttttcaagatggatccttttatcagccaaggaatttaatagttgatgtatgagacaacttttttgtatgtccaaaagatgacagtttttccccttaaaaattctactcaatttgtgtttaactccatttgacatgaggtgacagaagagtctgagtccayctgtcgaatatgttggtttattttcagtgcttgaggatacattcacaaatacttggtctgggaagacaccatttaattttaagtcaacttgcatgctataaatgtgttttatatttaaataaagaggaaaatttttttttcaaatctaaaaatgcccttgcttctcaatagattgaaagatccttctttcctatgtacttttgtaatgttggttcttcttatataacatttggtatcttgcgttgtgtgtgcaaatgtgtgtacaaatatttcatgccccctttttgacccatacagatgtatttcatgca

SEQ ID NO: 886797 - DNA, 660 bp, Homo sapiens
cacagataattattaaaaaacagctggcattccacaaattaaaactgtaatgagatatcaccttactcctgaaagaatggccataattaaaaaatcaaaacataatagatgttgacatggatgtggtgaaaagggaacagttttacactactggtggcaatataaactagtacaaccattatggaaaacagtgtggagatttcttaaataactagaactaccattcaatctagcaatctcactactgggtatctacctaagsggaaaaaaaggtcattatatacaaaagagactgtaatacatgtttatagcagcacaattcacaattgcaaaactatggaaacaacccaaatgcccatcaaccaacgagtggataaagaaaatgtggtacatatacaccatggaatactactcaaccataaaatggaatgaaattaatggtctttgcagcaacttggatggacatggaggccattattgtaagtgaagtaactcaggaattaaaaaccaagtatcacatcttctcacttataagtgggagctaagctatgaggatgcaaaagcataggaataatataatggactttggggactcgggtggaagggtggggagggtgagggaataaaagactacacattgggtacagtgtacactgctca

SEQ ID NO: 886798 - DNA, 565 bp, Homo sapiens
tttttctctttaacacttgccaccatctagtataccatatatcttatttacttttttgtttttgagtcaaggtcttgctctgtcacccaggctggagtgcagtagcgtgatctcagctcactgcagcctctacctcctgggctcaaggctccaaccccagcctctggagtaactgggactataggcatgtgccaccatgctattttttttttttttacatgtatagcattttaacttttttatttttatttttattatttttatttattttcatagatctttggggaacagatggtgtttggttacgtgattaagttctttagttgtgatttgtgagattttggtgcacccattatccaagcagtgtacactgtaccyaatttgtagtcttttatccctcacctccttctcaccctttcccccaagtccctaaagtccattgtatcattcttatacctctgcatcctcatagcttagctcccacttatgagtgagaacatacgacgtttggtttcccattcctgagttacttcacttagaataatggtctccaattccatccaga

SEQ ID NO: 886799 - DNA, 600 bp, Homo sapiens
tctgagggcaggtgctggcacaatgaacaaagctgcccttttgatgcatgttgggctagtgcatttagccccctggctaccctcactgtggctgaatgtgatcagtccttggagttactccatgggataagtggtgtgtttgtggtattatggcagctcatgcatctttgaactggctcctgtgttctgtggtatgtgctgtatcatctaagccctcttcctccctatttcacatggaaaaatcagctctttctctctgagaaataatgcaggggsagagaagaaaagaaaagcgaagcatcttccaatggagctagagagtaaagctttagattcttaatctttggtctttggggtttgttgttgttgttgtttgagacagtttcactctgttgcccaggctggagtgcagtggcatgatctcaactcactgcaacctctgcctcctgggttcaagtgatcctcacaccttagcttcccaagtagctgggaccacaggcactcagcaccacacctggctagtttttttttttaattttttgtagagatagggtctcaccatgtcgcccaggctggtcttgaattcctggactcaagcaa

SEQ ID NO: 886800 - DNA, 629 bp, Homo sapiens
gcattatcagcatggtaaggcgctaaaatgctgatgcaaagctctgtgtgcatataaagggcttattgtctggtgacagtaaacagtggtgatcagatgggaaccaggctgttttgttaaagatctcccaaagcagcatccgtagacatttctcttgagctggccaatttccctattgaagaatctttgaggaatataaggttggcttctgatattctggagcagagtgtgscggtgcggggtggtgggagtgggcgggacttgggttctaagtattcacacgatccccgttttcggtagggaggctaatagccatcctcagttggacccagtctccccatgttccccaaagagcctgaatggttcatttctccagggagtaaatccctggtcccgctaaatatgaaaaaaagaagctagaccaaaaaaaaaaaaaaagaaagaaaaaaagactgagtgggtaaaaagtcagcctgggcaaggcaagaggagggataggtggctctcattgcttctttcagtcttttgatcgccttttttccagccccaatatgtacttctatcttttgaggcacatagtgtcttcaattcctgaacctttctagagatctgaagtatagagagtctcg

SEQ ID NO: 886801 - DNA, 610 bp, Homo sapiens
acagatgaatacttaaaagtataattaatgtcctattgtttttcatttctttaccctgacaggaagatatcagggatttcctgggtcacagatgatataaaacacattttggatgaaagctgcaataaagctactaagtataatttgggatttttttttaagtatgagataacttcatgggggctttatcatgcattagtttgcttatcttctgtcaagaataactggctaaacttaaatagaaatgtgaggttcttcagttacacattctcctaaaaatagcattttcttctgggatttgactactaaatgaagacatttaaatgaagtaaargttatttatcataactttaaaaaagtgtgctgcttaatctccatatatttggggattttccagagatctttctattactgatttctagtttaattccactgtgatctgagagcaggcattgcatgatttctattcttttacatttgttaagttgtgttttatgacccagattgtggtctgtcttggtgagtgttccaggtgagtttgagaagaatctgtattctgctgttgttggatgtagtcgtctgagtagtctgtagacggtcattatatcca

SEQ ID NO: 886802 - DNA, 609 bp, Homo sapiens
taatggaaaatgaggtaggggatttatatacttaattaaaaatagcaaactctcaaatccagacccacaaattgacttttagagttcttgttgctgaaagagttgcaaatcaaagcaatttcgggtgaaagttcatttttccttgagaccagttctttaaaaattgaaagctttaacttgacattaatttcactgataataagaacataaatgtagcctgaattatatgactatatataaatctgatttatgaaaatctgtcgaagaagctataaggatcagtaacagacayaacttgagaaggaaaatcacagaattgtctagcttaataacccctagagtgtataagacatataatttaaaatttgttgtgtttggatacaatgatcaaaaataaacaaatctggaaaaattgcagaattccgaacaagggtaggaagctgaagttactggtgttatccacacaaggtcgcaataaatttgttttccctcttattctgttgttctgaaaatattgttttgaactgatagctggttcgcatgtccttgtgttgctccattttattatcattctgggccttttgaaggacataactgctttttaatcac

SEQ ID NO: 886803 - DNA, 561 bp, Homo sapiens
atttctggttctagatccttgaggaatcgccacattgtcttccacaatggttgaactaatttacactctcaccaacagtgtaaaagcattcctatttctccacatcctctccagcatttgctgtttcatgacttcttaatgacagctattctaactggcgttgagatggtatctcactgtgattttgctttgcatttctctgatgaccaatgatgatgagctttttttcatatgtttgttggccacataaatgtcttcttttgagaagtgtctgttcatatcctttgcccacttttcgatggggttgttttttttcttgtaaatttaagtttcttatagattctggatattagccctttgtcagatagatagattgcacaaattttctyccattctgtaggttgcgtgttcactctgatggtagtttcttttgctgtgcagaagctctttagtttaattagatcccatttgtcaattttggcctttgttgccattgcttttggtgttttagtcatgaagtctttgcccatgcctatgtcctgaatggtattgcttaggttt

SEQ ID NO: 886804 - DNA, 561 bp, Homo sapiens
atttctggttctagatccttgaggaatcgccacattgtcttccacaatggttgaactaatttacactctcaccaacagtgtaaaagcattcctatttctccacatcctctccagcatttgctgtttcatgacttcttaatgacagctattctaactggcgttgagatggtatctcactgtgattttgctttgcatttctctgatgaccaatgatgatgagctttttttcatatgtttgttggccacataaatgtcttcttttgagaagtgtctgttcatatcctttgcccacttttcgatggggttgttttttttcttgtaaatttaagtttcttatagattctggatattagccctttgtcagatagatagattgcacaaattttcttccattytgtaggttgcgtgttcactctgatggtagtttcttttgctgtgcagaagctctttagtttaattagatcccatttgtcaattttggcctttgttgccattgcttttggtgttttagtcatgaagtctttgcccatgcctatgtcctgaatggtattgcttaggttt

SEQ ID NO: 886805 - DNA, 561 bp, Homo sapiens
atttctggttctagatccttgaggaatcgccacattgtcttccacaatggttgaactaatttacactctcaccaacagtgtaaaagcattcctatttctccacatcctctccagcatttgctgtttcatgacttcttaatgacagctattctaactggcgttgagatggtatctcactgtgattttgctttgcatttctctgatgaccaatgatgatgagctttttttcatatgtttgttggccacataaatgtcttcttttgagaagtgtctgttcatatcctttgcccacttttcgatggggttgttttttttcttgtaaatttaagtttcttatagattctggatattagccctttgtcagatagatagattgcacaaattttcttccattctgtaggttgcstgttcactctgatggtagtttcttttgctgtgcagaagctctttagtttaattagatcccatttgtcaattttggcctttgttgccattgcttttggtgttttagtcatgaagtctttgcccatgcctatgtcctgaatggtattgcttaggttt

SEQ ID NO: 886806 - DNA, 661 bp, Homo sapiens
gtaatctcagcactttgggaggctgaggcaggcggatcatctgaggtcgggagttcgagaccagcctgaccaacatggagaaacaccgtctctaccaaaaacgcaaaattagccagacatggtggcacatgcctgtaatcccaactactcgggaggctgaggcaggagaatcacttgaacccgggaggcagagaggttgcagtgagccaagatcatgccattgcactccagcctgggcaataagagtgaaactctgtctcaaaaaaacaaacaaaccaacaaacaaacaaaaaaaacagggtctcactctgttgcccaatctggaaggcagtgatcacagctcactgcagcctcaaatttctggattcaagactcttcccaactcagcctctcaggtagctggaactataggtgtgccccaccaagaaaataaaaacattmattttaaattttttatatagaaagggtcttgctatgttgccaaggttggcctccaacttctggcctcaagctatcctcctacctcagcctctcaaactgctagtattgcaggaatgagccatcatgtctgttctataccctaaattctgataatagaaaagaatgatatcaaatcaatgattttagcttttacttaaataaaaaaactagagacagaaga

SEQ ID NO: 886807 - DNA, 511 bp, Homo sapiens
ctatcttttagcagtttaatgaagttggtttaactagattagtgtttcatcctccatggccagagcttgaaaaattaggctttctgagatttagagttacgtgttattattacttcaaaagtgcttttttaataatattaactctgggtagtgtttattcagggagaacaagtgatgcatcatatttcatttttctttttttttttttttgagatggagtttctcgcttgtttccctgactggagtgcaatggcgcratctctgctcattgcaaccgctgcctgccaggttcaagtgattctcctgcctcagcctcctgagtagctgggattacaggcatgtgccaccacgcccggctaaatttgtatttttagtagagacggggtttcaccatgttggtcaggctggtctcgaactcctgacatcaggtgatctgcctgcctcagcctcccaaagtgctagaattacaggcatgagccaccgcgcctggcccatatttcattttttccaa

SEQ ID NO: 886808 - DNA, 636 bp, Homo sapiens
caagtgcagaagcccaggtgagcgcttttgggctccaaccccatggtagcgtcttgaggtgtgttacaattaatgttcttttagcatttgctgtccactgattaagtgttaaaccagctcagtggaaagtcagggtgacagtcttttacaccctgacctcttggtacctaggtccttgtccagcacccagggagaatcaggtcacgtggacttgaaggatggtgaatgcagggagggacggtgagtgatggaggtggctctcagtgggatggataggggcctggaaagcgaatggagtgggaaaatgatctttccctggagttcctccatcccgcaacttatctcctctctgactgtccccaggcatggtgggccagagcggtcttggaagaaataacattggacatgaaaacaggaatgcctsttcccatttagggccgtgagtttccatgcttgagggtagggcctttgccagggaccgctctcttctacccagtatttccctgccttctgtccatattataaccaactgttcaaatagcattcaaataaggcaaacactgggctgtaaccaagccagttgtttctgtgcctcacttctctttcctgtacatcacttttttttctgtctttctg

SEQ ID NO: 886809 - DNA, 616 bp, Homo sapiens
attctcaaatattgtttaaattaaatatgggaagaaaaatgtaaatgagaaaatttaaaatacaaaaatgcagtaacatattggcagttgtcattcatgtattatcttttatttgaagacatggcaaatgcacagagctagtaccatattctgcaaactctgatacaaaatttgatatgtgctaaaatgtcaaatctaccaatgtcagttattagtaccttctttggaagtgtatccagttccttttttatatcagctttctttcctgatactgttttgaaagcttcataagatattcatracctagagaaatctaataatttttcccagtaatttcttttactgctttatggaatttgttcagaggaatactaatattagatactaataagaaatgttgtcatattaaaaaatacctactgcttatccataaaaggggaaactttagcttcatctggtaaccagaaccaggataaccatggagccatctggtaaaactaaaacgctatggcaaattagcattaccaatcaccgctacattcttactgtgaatctctatatgccaaacagacctctcccaggaagatcataaaggaaaaacaaggtcatagtgtca

SEQ ID NO: 886810 - DNA, 646 bp, Homo sapiens
ctataaattgctttgggcaatataaccattttagtgatattgattcttcctatcgatgagcatgggatgttttccattagtttgtgtcttctctgacacaatttctttgagcagtgttttgtaattctcattgtaggaatgtttcacctccctggttagctgtattcctaggtattttattctttttgtggcaattgtgaatggtattgcctattcgattcagctctggacttagctgtcattggtgtagaggaaggctagtgatttttgtacattgattttgtaygctgaaactttgctgaagctattcatcagctgagggagcttttgggctgagactatggggttttctagatatagaattatgtcataatcaaagagggatagtttgactccctctcttcctatttggatgccctttatttatttctcttgcctgattgctctggccaggacttccaatattaagttgaataggagtggtgagagacagcatccttgtcttgtgccagttttcaaagagaatgcttccagcttttgcccattcagtataatgttggctatgggtttgtcatagatggctctcattattttgaggtattttccttcaatacctacgttattgtggtgttgaattatattgaaa

SEQ ID NO: 886811 - DNA, 611 bp, Homo sapiens
ttgttcctcccaacttataaaacctattttctcataagaatcactaccagcctgttcacagtgcaatgcttctgctcaaaccccttttccttgggccctgaaaggggcagggggcacaggctgttctgactcctgatgttgggacagaggcagaaggctgggaamctgtggcaagatgagcacatctgactaaagtacctctccatgctttctcactcacaaggatatagtcccttgaaagtattattctcagccaactggcttaatgtatttcttagttacccccggccagtctagttcagaatcaccacacctgtcttcttacatagcagacataagagatacaaaaagcaggcttttctcttttcagcaccactattttacattttaatcactatttctgataaaggcattaatatttgctgagcttctacctctttaccagactcaataaaagtcattttacttgcattagtttacctgattctcacaaccacccttaaagggaaggtaggtattattaacctcattgaattgatgagggacctaagccttgacgaggtgaagtaacaggctcaaagctgcatagatggtaagtgacagaactgtat

SEQ ID NO: 886812 - DNA, 655 bp, Homo sapiens
aaatgtgatatatccatataatggaatagttttcagtcataaaatggaatgaagtactgatacatgctacaacatggataaaccttgaaaacattgtgccaattgaaagaagccacagacaaaataccatatatcctatcattcaatttatatgaaatgtccagaatgggcaaatacatagagacagacagaagattactagttgcctacagctgggaatggggataggagagwaatagagggtgattgctaatggctcagggtttctttttagggtaaagaaaatattccaaacttagattatggtgaagtttgcttacctccctgaatatcctaaaaaccattgaattgcatactttgcatgagtaaattttatagtatatgaattacatccaataactatgtttttaaaatgtgaagtataatcatgatgatgattaaagagcctgtcaaggcagaagagaaacgaagaaaagtgccatgacagattaaggtggaagttagtgcatctttggtcagaaacagtttacctaacttaataaaggcatatgatctacaactaccactataagaatgggataaagagaagcaaaatatacagagcaaggtatagatttttaccgagtgcaaatctaaattatctttacactcaaca

SEQ ID NO: 886813 - DNA, 666 bp, Homo sapiens
tgttctgtcacattctatctttaaaagtttagaagtggaattttactttgcagggaaaagcattgataaagtcttggtattctctgtattctttgaagaaacctgccttttcttcttgacaaaggtcctggtattttcttgaattgtactctccattctgactatatcaatcaaccaataggggctttgtttatatgttagaaatttcttctccatttctactactactttttgatttatgatcttaaatcaccatcccaatgtatctmgtctctgacaagcccccttgccttcattctcttccctgtcttgcgacagcaattgttctaaactgcagtttttttcatacgacttaactgtttgaaaacatttagcacttccctattgcccacaggataaaatataatcactcttgcttgtttattaaagtcccaacttaggttagactcaatctatctttctattctcattgtatactaccagtacctctactacatgatcccgctgcttcagacaaactaattgattcctatccttcaaaatgattcctgcccaaccccccacccccatgccatcgcttgctgcttatccactgcccaaatgactggaaactcctttctctacacctgttcaacactgtaatgtcacactttaaggaccaactca

SEQ ID NO: 886814 - DNA, 662 bp, Homo sapiens
tcttgtggttctgttatatgtatctttttctctatccacttttacgattttatctttatcattagttttcagcaattatattattgcttctatcgttatgcctctgtttatactgcttagaattcattgaacttcttgaatctgtgggttattttcatcaaatctgaaaaatattcaactgttactttttaaaatatattttcctgtgtcagtatttctctcatcttgttctggttttctacagatatgttaaactgtcttattttgcccacaagtcactaaakctctgttcattgtccattttttgtcagccatttttttcctatatgcttcagtttgcatagtttccattgtagtgactttgaattcaataacataatcttctataatatctaatctgatagtaagcccatttagcatgtttttcatattgtgattaccagttctaaaatttccattttgttccttttcttaactctccattttcctactgatattcttatttgttttctatttatgatcaaagttttcctttaaagccatgagaccatttataatagatatttaaagtatttgtatgttaattatatcaatttgttttattctttttatttttcttatagatagtgttcattttgactgtatttgttggagtccaagaa

SEQ ID NO: 886815 - DNA, 591 bp, Homo sapiens
tggttattcttattagatgaacatttgtttatcctgtggtctatcagttccacatctagttatggatactcttgcttctgtgcactaggaggcaaggacaagaacattcaaacagcactgttggtaaaagcaaatagctggcaacctactaccataataaggattagacttatttagagttgctccacagagcctaacatagttcagtaaaaggaatcttcaggaaagcaggttttcttttagtgaaaagaactttttaacattcaaaaccatccaaargcttagtagactgcttcccacggaaagagttcccttaactggaagtgatcaagtagttctgtgtgttgcagagagaattccaccactgggtggaaggttttactaaatgaatagcaagatttttaccagctgttaaggttcagggattctacacataatccttacaaaaactcagccatgctactgagctgatattagaaatacattatttgtacatcagttgtttccagaaattcaccttaaaagcacagttctttctgggagtggtgggctttaagcaattagcatataacactgaccaaatatatcaaa

SEQ ID NO: 886816 - DNA, 591 bp, Homo sapiens
tggttattcttattagatgaacatttgtttatcctgtggtctatcagttccacatctagttatggatactcttgcttctgtgcactaggaggcaaggacaagaacattcaaacagcactgttggtaaaagcaaatagctggcaacctactaccataataaggattagacttatttagagttgctccacagagcctaacatagttcagtaaaaggaatcttcaggaaagcaggttttcttttagtgaaaagaactttttaacattcaaaaccatccaaaggcttagtaractgcttcccacggaaagagttcccttaactggaagtgatcaagtagttctgtgtgttgcagagagaattccaccactgggtggaaggttttactaaatgaatagcaagatttttaccagctgttaaggttcagggattctacacataatccttacaaaaactcagccatgctactgagctgatattagaaatacattatttgtacatcagttgtttccagaaattcaccttaaaagcacagttctttctgggagtggtgggctttaagcaattagcatataacactgaccaaatatatcaaa

SEQ ID NO: 886817 - DNA, 596 bp, Homo sapiens
actgatactatctaatttagaggactaatatgagaattaaatggaaatcatctgtgtgaatggcttaggatagtaagtttctttttcttctccttcctattattattacatggacatgaatgaaaggatgcagaaaaagtcccatacaaaccccagacttcctcctctgagcctattctagctgcacaaattctaccccyggagaattctttggaataaatgtaaatctgtttggagatagaacaaggtacattatcagctatttatatttcagggagcatacatatgcttctctatacgcattactcttcactttcatatgtgttaacatattcaggacttggacaggcctgaaaaagtaaagctcaggagggatcttctcttcattttacaaagggaaaaatatgagtcacagaatctaaatcattctgtgggagcctggacagaaaccaagtgctattgcactagggcagtgtttttcaaagtgtgggccaaggttgccctctgctccagaagactttgtcagggtttgtgtcaggatcaagccccagctgaggtctgaggggagtgggtggactgggggcaggaagctggaa

SEQ ID NO: 886818 - DNA, 555 bp, Homo sapiens
tccctagcatttttttttttagcaattaagtattttaaatttaggtaatctatattgtttttaaaaaatataatactattgcacttttaatagagtagagtgtaaacataactttttttttttttttttttttgagacggagtctcgctctgtcgcccaggttggggtgcagtgacacaacctcggctcactgcaagctccgcctcctgggttcacgccattctcccgcctcagcctccggagtagctgggaccacaggcgcccgccactgcacccggctaatttttttgtatttatttartagagacggggtttcaccctgttagccaggatagtctcgatctcctgaccttgtgatccgcccacctcggcctcccaaagtgctgggattacaggcgtgagccaccgcgcccggccaacataacttttatatgcactgggaaaccaaaaaatgtatttcactttattgcaatatttactttattgcaatggtctggaaccatgtctacaatatcctcaagatatggctatataacctgggagataattagacaa

SEQ ID NO: 886819 - DNA, 624 bp, Homo sapiens
aaataccttgagttaagagagaataagcagaattaactggtcattagtcagaggattgagccaactgagcccaactctctgccagtctatgtgcccaatgcagaccctctgccttcagctgactcatctttctttagctaggctatgactagactatacccaggctacacctaccctctgctcaagcttaatgttcctggcctttaagggacaatgtatatgtcaattctaacttactctacattgaaggttagaaatatctttggtggggtggaaggggagggggccccatgagtagccattttgtatactggagccttccatgagtactagaatgtacaggtgaagagaaaattggatagcmctggagacctgagtgggaaatggccaggcctgaagacacagcctttgatagaaacagctcattttacctgacttttggtgggggacaaagaagagggagtttgtggtcagccagggatagaataggttggaatgtgatatctggtcctgtttggtcagcagaagagatattcatgatcagcaaaataattattcgatatttaaaagtcagattttttaaggacccaagaatctgacaaacgccatcactgagatttctgt

SEQ ID NO: 886820 - DNA, 568 bp, Homo sapiens
acatttaagaggtataatgactggcctgggttcccttatttcttgtcaaggccagaatttaaatacaggaaacttgaaaaggaggccaacttgactagcatacacagtctgattagctgcagagatgagaaaaagtggatgaggtaaagagagaaattgaagatgacaccaccatttctagacaatatgccaggaaaaaaggaatgattattaaccataatacaagttattgcctaatctcacctatttcttggtgagaacaaatatttccatttatatcatgtgaaatttaggatactgatgggtctcttgttgaaaaygatacttagaaatgcaaatccgtgtatcagaagataggtcaagccccaaaataaagatctgggggtcattagcactcaggagctaagtgtaaccagaaaacaggtcaaaatcatttaaggagagaatgcagaagaggataagaccactgataatacttgaaactaccttttgcttaaagacagaataacaaagagaagtaaagtaattgacagagacacaaagaaactgccaaagaactagaagggct

SEQ ID NO: 886821 - DNA, 597 bp, Homo sapiens
actattgtgaatggcattgcattattgacttagctcttagcttggatgtcgctggtgtataggaatgctagtggtttttgcatgcacattcattttgtatactgaaactttgctgaagttgtttatcagattaaggagctttcaggcagagattatggggatttctaggtrtagaatcatatcttctaccaaaagggatactgttatttcctctcttcctatttggatgccttttatttcctttccttgcctgatagttctagctaggacgtctagtactgtgttgaataggggaggtgggagtgggaatctttatcttgttctaattttcaaggggaatgcttccagcttttgcccattcaatatgatgttggctgtgtgtttttcatggatggctcttattattttgaagtatgttccttcaatgcctggtttgttgagggtttttaacatgaagagatgctgaattttattgaaacctttcctgcatctactgggaagattatgtttctttttttagatctgtttatgtggtaaatcacatttattaatttgcatatatcaaacctaccttttatcccacagataaagcctact

SEQ ID NO: 886822 - DNA, 595 bp, Homo sapiens
gctggtttatgtagtcaagtgtgtttttgttgtagctggtagtgatgtttcctttccgtgttaacactgccttcaagatctcttgtgaggtagggtaggtctgatggtaacaaattcccctagcatttgcttgtctgaaaaggatcttatttctcctttgtttatgaagcttagttgggctgaatatgaaactattgactggaaattattttctttaargatgctgaatatgagcccccatctcttctggattgtaggatctgccaaaagatctgctgttagcctaatggggttctctttgtagatgacctgcctcttctctctagctgcctttaacattatttttttttctttttgaccttggagaatctgatgactatttgtcttgaggatggtactcttgtgtagtatttcacaggggttctctgcatttcctttgaatgttggcctctctagcaaggttggggaaattttcatggacgatatcctgaaatatattttccgagttacttgctttctctccctctctttcagggatgctagtgagtcatagatttggtctcttcacataatcccatatttctcagagattttg

SEQ ID NO: 886823 - DNA, 595 bp, Homo sapiens
gctggtttatgtagtcaagtgtgtttttgttgtagctggtagtgatgtttcctttccgtgttaacactgccttcaagatctcttgtgaggtagggtaggtctgatggtaacaaattcccctagcatttgcttgtctgaaaaggatcttatttctcctttgtttatgaagcttagttgggctgaatatgaaactattgactggaaattattttctttaaggatgctgaatatgagcccccatctcttctggattgtargatctgccaaaagatctgctgttagcctaatggggttctctttgtagatgacctgcctcttctctctagctgcctttaacattatttttttttctttttgaccttggagaatctgatgactatttgtcttgaggatggtactcttgtgtagtatttcacaggggttctctgcatttcctttgaatgttggcctctctagcaaggttggggaaattttcatggacgatatcctgaaatatattttccgagttacttgctttctctccctctctttcagggatgctagtgagtcatagatttggtctcttcacataatcccatatttctcagagattttg

SEQ ID NO: 886824 - DNA, 595 bp, Homo sapiens
gctggtttatgtagtcaagtgtgtttttgttgtagctggtagtgatgtttcctttccgtgttaacactgccttcaagatctcttgtgaggtagggtaggtctgatggtaacaaattcccctagcatttgcttgtctgaaaaggatcttatttctcctttgtttatgaagcttagttgggctgaatatgaaactattgactggaaattattttctttaaggatgctgaatatgagcccccatctcttctggattgtaggatctgccraaagatctgctgttagcctaatggggttctctttgtagatgacctgcctcttctctctagctgcctttaacattatttttttttctttttgaccttggagaatctgatgactatttgtcttgaggatggtactcttgtgtagtatttcacaggggttctctgcatttcctttgaatgttggcctctctagcaaggttggggaaattttcatggacgatatcctgaaatatattttccgagttacttgctttctctccctctctttcagggatgctagtgagtcatagatttggtctcttcacataatcccatatttctcagagattttg

SEQ ID NO: 886825 - DNA, 650 bp, Homo sapiens
taaatatattaacatgtataacctcattaataatcaaagaaatgcccattttaaaaaatgagaaattatttttcatctatcaagttgggaaagatttataagaagattaatgaccagagtgtgaggagggactagcactccttttttattttttatttttttgagattgagtttcgctcttgttgcccaggctgcagtgcaatggcgcgatcttggctcactacaacctctgcctcctgggttcaagtgattctcctgcctcagccacccagatagctgggattacaagcatgcgccaccacacctggataaytttgtatttttagtagagatggggttttaccatgtcggtcaggctggtctcgaactcccgacctcaggtgatccacccacctcagcctcccaaagtgctgggattacaggtgtcagccaccacgcctggctgggaatgacactcttatacagagtgggtagaagtaaaaattggtaaaagtctttttggatggaaatttggaagtatgtatcaattgtttaatgtgtataccttttgacccatccatttcacatccaataatttgaaggaaaaaactggacaatacataaacatgttccttgcttcattgttataatggtgaaaaaatggaatttaa

SEQ ID NO: 886826 - DNA, 650 bp, Homo sapiens
taaatatattaacatgtataacctcattaataatcaaagaaatgcccattttaaaaaatgagaaattatttttcatctatcaagttgggaaagatttataagaagattaatgaccagagtgtgaggagggactagcactccttttttattttttatttttttgagattgagtttcgctcttgttgcccaggctgcagtgcaatggcgcgatcttggctcactacaacctctgcctcctgggttcaagtgattctcctgcctcagccacccagatagctgggattacaagcatgcgccaccacacctggataattttgtatttttagtagagatggggttttaccatgtcggtcaggctggtctcgaactcccgacctcaggtgatccacccacctcagcctcccaaagtgctgggattacaggtgtcagccaccaygcctggctgggaatgacactcttatacagagtgggtagaagtaaaaattggtaaaagtctttttggatggaaatttggaagtatgtatcaattgtttaatgtgtataccttttgacccatccatttcacatccaataatttgaaggaaaaaactggacaatacataaacatgttccttgcttcattgttataatggtgaaaaaatggaatttaa

SEQ ID NO: 886827 - DNA, 612 bp, Homo sapiens
attttgcacctggcccagatattatgtggccagtcccagggccaagcaccatgctgggcaggaagacatggccatgagcgaacccacatggcagactccatcaaggagccggcctccaggccagggaagcaaagcaagagccttaaataagattcagggactgaaggagaggcagatcttgtctatcactctctctggraacaattcagaagccaggcagaggaggacatgcaggagggagaaggaaaggtgggcatcctggcaagcaggaatcctaccccagggagactggggaaattgcaggagtgccacagtcgtccagggtccatctgagagtgtacaactggagagcctgggtcacttcagcctgcaataagtgacaggcagtgggggcgggggcgcagataaacagggtgaggtgatggagggtgggaaggggagtttttggaggagatgccactgacctgagtcctgaaagacaagaaagagacaggcttttccagggaaaggcatcccaggtggaggaacagcaagtgcttgagccctgcagagcagggaacagaaaccaggctcggtccccagccctgcacacgccctccagcgctggcttgc

SEQ ID NO: 886828 - DNA, 612 bp, Homo sapiens
attttgcacctggcccagatattatgtggccagtcccagggccaagcaccatgctgggcaggaagacatggccatgagcgaacccacatggcagactccatcaaggagccggcctccaggccagggaagcaaagcaagagccttaaataagattcagggactgaaggagaggcagatcttgtctatcactctctctggaaacaattcagaagccaggcagaggaggacatgcaggagggagaaggaaaggtgggcatcctggcaagcaggaatcctaccccagggmgactggggaaattgcaggagtgccacagtcgtccagggtccatctgagagtgtacaactggagagcctgggtcacttcagcctgcaataagtgacaggcagtgggggcgggggcgcagataaacagggtgaggtgatggagggtgggaaggggagtttttggaggagatgccactgacctgagtcctgaaagacaagaaagagacaggcttttccagggaaaggcatcccaggtggaggaacagcaagtgcttgagccctgcagagcagggaacagaaaccaggctcggtccccagccctgcacacgccctccagcgctggcttgc

SEQ ID NO: 886829 - DNA, 661 bp, Homo sapiens
tttgtagttctccttgaagaggtccttcacatccgttgtaagttgtattcctaggtattttattttctttgtagcaattgtgaatgggagttcactcatgatttggctctctgtctcttcttggtttataggaatgcttgtgatttttgcacattgattttgtatcctgagactctgctcaagttgcttatcagcttaaggagattacaggctgagacaatgagattttctaaatatacaatcatgtcatctgcaaacaggaacaatytgacttcctcttttcctaattgaataccgtttatttctttcttttgcctgatttccttgccagaacttccaacactaagttgaataggagtggtgagagagggtgtccttgtcttgtgctgattttcaaagggaatgtttccagtttttacccattcagtatgatactggttgtgggtttgtcataaatagctcttaatattttgagatatgttccattaatatctagtttattgagagtttttagcatgaagggctgttgaattttgtcgaaggcctcttctgcatctattgagataatcatatggtttttgtcattggttctgtttgtgtgatggattacgtctttgatttgcataggttgaaccagccttgcatcccagggatgaggatg

SEQ ID NO: 886830 - DNA, 607 bp, Homo sapiens
cgatatgaaattctggtttgaaaattcttttctttaagaatgttgaatattggctcctactctcttctggtttatggggtttctgccaagagatccgctgttagtctgatgggcttccctttgtgttcaacccgacctttctctctggctgcccttaacattttttccttcacttcaaccttggtgaatatgacaattatgtgtcttggggttgctcttctcaaggagtatatttgtggtgttctctgtattttctgaatttgaatgttggcctgccttgctaggttggggaagtcctcctggataatatcctgaagagtgttttccaacttggttccattctccccatcactttcaggtacgccaaycaaacatagatttggtcttttcacatagtctcatatttcttggagactttgttcgtttatttttactcttttttctctaaatgtctcttcttgctttatttcattaatttgatcttaaatcactgatatcctttcttccacttgatcaaatcggctattgaagcctgtgtatgcgtcatgaagttctcctgccatgtcagctccatcaggtcatttaaggtcttctctacactgtttat

SEQ ID NO: 886831 - DNA, 671 bp, Homo sapiens
catatatatttctaaaaagcaatgtacagctaaataactttaatctgaaagtttttttaaattttgacatctttaaaaattataattagtgtgactgttggtattgttggatttatattgccggtattcttattgtgcttttttcatcatcacggtttttggggtttttttgtttgtttgtttgtttttagcttgctttcttcttttcttgccttctgtaggactgattattttcattcacttctttctactgattgcaaaattacatttatatccatatgtgtggtgattattcttaaaccattatcacagaatctccattttaagtgtaaaattaattaacaattctggttgccatttgtaaaataaatatccataaaacactttaattatagccctcctatcttaccttattttgtctattattttactttctacctagtttttttttattctccccaaattattattatggtggtggctattttgaacattaaatgcctggctggttaactgatttatatgattwactcattcttggctcagtcgcgcttgttgtactccactttttccacaaagatcaattttcttgtttctcaagattaggccttttgtagttctttcagtgaaatatcacagtcttcaatacctttacttcaccttttctctac

SEQ ID NO: 886832 - DNA, 549 bp, Homo sapiens
tcctctaatatatgttgatcctcattgtgtcctacatattcccttaacctttttttcattctcctattcttttgttgtttcattctaggtaatttaatcaattgccaagttccttgctcattatttagttgtgactaaatagttgttaaatgtattaattttatttataatttaaattactaatattttctaaatctgttttctatttcttcagtcctagatcatttcatttgattttatttcttaacatcttaatcattataaatatactaattttattttctgcataaggctataatcattccctaatctagtcataaacataaaactgataattttttagatattttatggtttgtgacattattttatacaggttcatattttcaytggaaacacatgtagtctgtgttgtaggagtatccctcaagaatggttttatgtttgtttctagcaggacctcagtagcgttaccagccagggaccaatttttattaaaatttgagggttttttttttataagctgtatgtgtaaaacaattcagacct

SEQ ID NO: 886833 - DNA, 633 bp, Homo sapiens
atattttgaattacttagagggtgaaaagagacaaaaaaaaaattctccataatcaccacaatattttagtgcttaggaactctaaagaccctgccttctaaccattgctggaggtttcaaaccatcattatgagtttgtactgtctaatcctttagaagttatagtaaaagtggcatgaattcatttggcaaacattaggcctaacaacaacattcttactttctgtagaaaatgtgagggcagcatcatataacgggcaagaaggaggcattgaagtcagaaaggctcatttccttacactttctatcagtgtgatttttggcaagttacataactctctaagccacaatttccgtctatataaacgaaagataattgagcccattttcctagggctaccatgaggattagaggagttaaggcatttggagctctgagcacagcatctgacatgtgataactcamtaaacattatacttgtaatagccataggagaaagaaaatcattagagtaaaaggcacaatagtagaaacaaacccacccatactttctacatgttgagcaatgaatattcttggcaaaggcgctattgagttagtaacaggatcattgaagaaccatcatagatag

SEQ ID NO: 886834 - DNA, 620 bp, Homo sapiens
ccccttagccatggtgatgccactgatttgtcctgctggactccagctatcaataaaacaggtcatccatttgggctttactaattgagactttgacattctttggagaggtgtgagctgaattttccctttgtacttatgaaagaagggtttgctaagcagatggatactataaacaaaactatacatataatgattgattcacttaattttaagtgcaggtcttcactctctagatgggttatgctccagaatgcctctgaaagttagcagtttagaatgtatcttccagctgagcgcagtggctcatgtctgtwatcccagcactttgagaggctgaggtgatcacctgaggcgaggatcacctgaggttgggagttcgagaccagcctgaccaacatggagaaaccacgtctctactaataacacaaaattagccgggcgtggtggtgcatgcctgtagtcccagctactccggaggctgaggcaggagaatcgcttgagcccaggaggcggagattgtggcgagctgcgatggcgccattgcactccagcctgggcaacaagagcgaaactccatctcaataaatgaataaataaaataaaataaaataaaataa

SEQ ID NO: 886835 - DNA, 531 bp, Homo sapiens
aaactggccaggcgcggtggctcaagactttaatcccaacactttgggaggccaaggcagatggatcacgaggtcaggagtttgagaccagcctggccaacatggtgaaacctcgtctctactaaaaatacaaaaattagctgggcatggtggcatgtgcctgtaatcctagctactcaggaggctgaggcaggagaatcacttgaacccgggaggcggaggttgaggtgagccgagattgtgccactgcactccagcctgggtaacaagagcgaaactccatcaaaaaamaaaaaaaaaaaaaaaaaaaaaagaaagaaagaaagaaagaaagccaaaccaacgaagatataaagagaaatgaggatttggaaggattctgagtaacacagcctccttctctattaatctctcctggccaaaatattttttttatcaccaaaatgatgctgcaaattccacagttgtggctagaagttcatatgacactgccataaatccacgtgataatttgaattctcacaacatact

SEQ ID NO: 886836 - DNA, 598 bp, Homo sapiens
tcgcacaagaggaaattacttctgtacctgccgtgggccgttgttattcaactcggagtataatttcatagcattagcaaaaatgattccttttatagctctataaatgtccttggcccacaaaatgcagtcttgaccttcagagagactgagttttcagggggtgcccttttcacgtggggttgttccggggcagggagcctttttggggctgaggacggtgcgctatcaccattgaggagggcaacctgtcatccacctccttcttggggggtgtccaggctgaagttgtgcgtgtttctgcgtggatctttacagccatggcttctcctctttcctcagccagttgggtatcttctggccactgctctcaggacttgggtaaccctctgctgcccggctgcggctcctatcycttttccctgttggctggggctgctcgtgcggtctcttgcaatggggcatggcggtatctcagaatgctctgtctagtggccttccttccctggagagaaatgtctgatctttattatagtaagaaaaagaaaaaggagggaagcaaagaaggacaaggagagaaggaagggaaaaatcagcg

SEQ ID NO: 886837 - DNA, 639 bp, Homo sapiens
gtgttgaagtctcccactattaatgtgtgggagtctatgcctctttgtaggtctctaagaacttgcttcatgaatctgggtgcccctgtgttcggtgcatatacatttaggatagttgcatcttgttgttgaatcgtaccctttaccattatgtaatgcccttctttgtcttttttgatctttgttgttttgaagtttgttttgtctgaaattaagattgcaacctcagcttttttctgttttccatttgcttggtagattttcctccatgcctttattttgagccttttggtgtcattatgtgtgagatgggtctcttaaagacagcataccattgggacttgcttttttatccatcttgtcattctgtgccttttaagttgagcatttagcccatttacattcaaagttaccattgttakgtgtggatttgatcctgtcattgtgttgttagctgattattatgttggtttgtttgtgtggttgctttacagtgacactattctgtgtgtttaagtgtgtttttgtattagctcgtagtgatcttttctttctatatttagtgcttcttttgagatctctagtaaggcaggtctggtagtaaagaattccttcaacatttgcttatctgaaaagaat

SEQ ID NO: 886838 - DNA, 639 bp, Homo sapiens
ttggttcttgacttctgtgcacccacaggctcaacaccatgtggaagctgccaagctgcaccctctgaaaccacaacccgagctctaccttggccccttttagccatggctggagcagctaggatgtaggacaccaagtccctaggttcctcacagcaatggggccctggacctggcccaggaaaccattttttcctcctaggtctccagtcctgtgatgggagaggcttccaggaaggtctctgacatgccctagagacttttccccattgtcttgggtattaacatttggctccttgttacatgcacatttctgcagctggcttgaatttctcctcagaaaatgagtttttcttttctatcacatcatcaagctgcaaattttccaaacttttatgccctgctttccttttaaacataacttacaattccaagccatatctttgtgaataaataaaactgaatgcttttaacagcrcccaggccacctcttgaatgctttgctgcttagaactttcttccaccagatgccctaaatcatctctctcaagttcaaagttccacaaatctctagggcaggggcaaaatgccaccagtctccttgctaaagcataacaagagtcacctttgcttcaattc

SEQ ID NO: 886839 - DNA, 669 bp, Homo sapiens
actaaaccctaatgtctcccacgcagattctaattatatcttatgaatttttaaacttccaagattagagaattgcaagattgaagtttttcatagactagttgtaatgagagcaaatataaattagaaggtgattggaagtgaatcagaagcctgaatttatagcttctaggatgctacttaaattaaaaagttaattataatgtgaatatgaatgaaaagtttattgctcattatttaaaatatatacacatttataagaaacttcatagaaaacacttggatgttcatttttcttgtgtctataatacccagtaactgttatattgtataatagaattcattagtttyaaaatatgtcaaaatccattgacatgtcaagtagagaaattatatctcttggagccttgaacactcttttgaaggattgataacagctcctggtgaaaattgaagctagatttggtgacttaatgtggtcctttcagggatagaaatccatccatgtattaatggagtgtagacaattattggtggtgacaatcaatacgttttattagatagcaaaaggagaacaaaggagaagcctgacttgcaaatgtttatttctgttagcattcagtcatccttacctcctagtccataccagggctggttttgaactgttgt

SEQ ID NO: 886840 - DNA, 639 bp, Homo sapiens
tctgcccacttctgcctcccaacatggtgggataacaggtatgagccaccaatccagctcacaattattttcattaccgaaaactgttatttgttttatagaaacattcaatgaagaaatctgttctgccaaaaccatttgaagtttttcctgaagttttatatcaagaaaataataaaatgaaaaaataccggattttaaaactttgacatattcaaatttagatttgttaattaaaattctatgtacatagaatgtttcttatagaaactaatttattgcattagggaaatattcctgcataggcttacgtgctacttttgggggtctgaaagtgaaccaacttgyagaacttatatgattatctagcaagattcactcattacagaattgtctcatctccttcaatgtgtcaacttggaagaaacttaagccatattcagactgtgaaaagatacatttagaaaaactattttaaacctctggaaacagcacatatttggccagatgatgctgatcgcccttggtggacttgaaatatagcagccaaaattgtcttctgtgctgtgtggccaatctgcagtgaagagggcccattatgtgcactcatgagaaaacttatgatttacagtccttgca

SEQ ID NO: 886841 - DNA, 704 bp, Homo sapiens
gcataggcttacgtgctacttttgggggtctgaaagtgaaccaacttgcagaacttatatgattatctagcaagattcactcattacagaattgtctcatctccttcaatgtgtcaacttggaagaaacttaagccatattcagactgtgaaaagatacatttagaaaaactattttaaacctctggaaacagcacatatttggccagatgatgctgatcgcccttggtggacttgaaatatagcagccaaaattgtcttctgtgctgtgtggccaatctgcagtgaagagggcccattatgtgcactcatgagaaaacttatgatttacagtccttgcacccagctgggccacatagttgacacttatgcttttgaatatcattttttggttctggaggtaatggcagytgtatacaacttttctaagcaagaagttatgctattcctttgaggaatctttcccagatctggtttcttgcaaggttttgaggagtcttactgaggcacagaaaatttaccccagataagcatcagacttgaaagtagccatcagtcagcttctcatttagctggtgtcggtggggtacatgtcaatttgacagagcccatggtgggcaaaaaagaatttgcaaataatggaatttattaatgcagcctcaacttatgaaaattactgagattcaagacactagaggaaaggga

SEQ ID NO: 886842 - DNA, 609 bp, Homo sapiens
gggtgaaaaaagatattccatgtaatggacatcaaaagcaagcaggggtagctattcttatatcagacaaaacaaactttaaagcaacagcagttaaaaaagacagaggaacattatataatgatgaaaggacttgtcggccaggcacggtggctcatgcctgtaatcccagcactttgggaagccgaggcgggaggatcacgaggtcaggagatcgagaccatcctggctaacatggtgaaaccccatctcactaaaaatacaaaaaattagctgggcatggtggcaggtgcctgtagtcccagctactcgggacgctgaggcaggagaatggtgtgaacccgggaggcggagcttgcagtgagccgagatsgtgcgactacactccagcctgggcgacagagcaagactctgtctcaaaaaaaaaaaaaaaaaaaaaaaaagaaaggacttgtccatcagaaaaatgtcacaatcctaaatatatatacacctaacactggagctcccaaatttataaaacaatcactactagacctaaggaatgacatagacagcaacacagtaatagtgggggacttcagtactccactgacagcactagacaag

SEQ ID NO: 886843 - DNA, 582 bp, Homo sapiens
aatatggtttttgccattggttctgtttatgtgatgcattacattgattgatgtgtgtatgttgaaccagccttgcattccagggatgaagccaacttgataatggtggataagctttttgatgtgctgctggattcagtttgccagtattttattgagaattttcacattgatattcatcaggcatgttggtctgaaattttatttttggttgtgtctctgccaggttttgatatcaggatgattctgtcctcataaaatgagttagggaggaatccctctttttctgttgtttggaatagtttcaaaaggaatggtaccagctcctctttgtacttctggtaaaattcagctgtgaatccatctggtccggggytttttttggttggtaggctattaattactgcctcaatttcagaacttgttattgatctattgagggattggacttcttcctggtttagtcttgggagggtgtatgtgtccaggaatttatccatttcttctagattttctagtttatttgcatagaagtgtttatggtattctctgatgatagtttgtatttctgtgagatcagtg

SEQ ID NO: 886844 - DNA, 582 bp, Homo sapiens
aatatggtttttgccattggttctgtttatgtgatgcattacattgattgatgtgtgtatgttgaaccagccttgcattccagggatgaagccaacttgataatggtggataagctttttgatgtgctgctggattcagtttgccagtattttattgagaattttcacattgatattcatcaggcatgttggtctgaaattttatttttggttgtgtctctgccaggttttgatatcaggatgattctgtcctcataaaatgagttagggaggaatccctctttttctgttgtttggaatagtttcaaaaggaatggtaccagctcctctttgtacttctggtaaaattcagctgtgaatccatctggtccggggctttttttggttggtaggctrttaattactgcctcaatttcagaacttgttattgatctattgagggattggacttcttcctggtttagtcttgggagggtgtatgtgtccaggaatttatccatttcttctagattttctagtttatttgcatagaagtgtttatggtattctctgatgatagtttgtatttctgtgagatcagtg

SEQ ID NO: 886845 - DNA, 609 bp, Homo sapiens
gagacttagagggctcagaagacagggacatctgagaaagtctggaacctcctagagacttgttgaatggctttgaccaaaatgctgatagtgatatgaacaataaagtccaggctgaggtggtctcagatggagatgaggaacttgttgrgaattggagtaaaggccactcttgctatgaaaggccactcttgctatgcaaagagacgggtggcattttttcccctgccctacagatctgtggaactttgaacttgagagagatgatttagggtatctggtagaagaaatttctaagcagcaaagcattcaagaggaagcagagcataaaagttagaagaatttgcagtttgacaatgaaattgaaaagaaaaacccattttctgggaagaaattcaagtctgctgcagaaacttgcataagtaatgaggagacaaatgctattcaccaagacaaaggggaaaatgtctccaggggatgtcagagaccttcccagcagcccctcccatcacaggcccagaggcagaggagggaaaaatggtttcctgggccaggtccaaggcccccctgctgtgtgcagcctcagacttggtgccctgtgtcccagct

SEQ ID NO: 886846 - DNA, 613 bp, Homo sapiens
ggagtagtttcatcatctgaagccttcttctctcaactcattaaagtcattctctatcctggtttgttccattgctggtgaggagctgcattcctttggaggaggagaggcactctgatttttagagtttccagtttctctgctctgttttttccccatctttgtggttttatctacctttggtctttgatgatggtgacrtaaaaatggcgttttggtgtggatgtcctttctgtttgttagttttccttctaacagtcaggaccttcagctgcagatctgttgtagtttgctggagggccactccagaccctgtttgcctgggtatcagcagtggaggctgcagaacagtcgatattggtgagcagcaaatgttgctgcctgatcgttcctctggaagttttgtctcagagttgttcctggccgtgtgaggtgtcagactgcccctactggggggttcctcccagttaggctacttgggggtcagggacccacttgaggaggcagtctgtttgttctcagatctcaagctgtgtgctgggagaaccactactcccttcaaagctgtcagacagggacatttaagtctgcagaggcttctgttgccttttgt

SEQ ID NO: 886847 - DNA, 689 bp, Homo sapiens
tactatcctagagatctcccataaggaaaaggcctgaatatggagctggacatgcctccattacactcccaacttgaagaaagcaaaacccaatacaactaaaattgtctaattaaattatttgcaagtaaataagttagtaaaggaaggcactcatacccaaaagaatgtgaaaacaagaacatagagttagagtttacccatcaacttatcttaatgtgtttctagtatctttatacaggcatttttggttcagtaataatgtatgctaacagtatctaatatgtaaacaacttagcttattgttctaccagtgcttctaattgttctatactgtggaattattataaggcakactcattgcgtatcttatccaaggacagttattattggaagtgcaggaaaacctaattaaaacactttaataattcaacacagtcgtccattaccaatctgtgacactgtgtggattagatgtatatcgcatgctttacacagtagtgtccccttatccactgggaatacattccaagacccccagtggatgcctgaaacctcagatagtaccaaaccctgtatataatatgttttttttcctatatatgcatacctatgataatgtttattaattaggcactgtaatagagtaacagcaataactaatcataaaatagaacaattattacaaa

SEQ ID NO: 886848 - DNA, 606 bp, Homo sapiens
ctctcatatgggcgaagaaggctgccaacatgtctgatgtatctgacctgagaattttttacagaggttcaggattaatttcttctatctccatagattggctttatcaaagaatgtatttcatcatggatgaactggttagtccgagaagttaaagaggaatagtgatagacagtgatactgwtatgcatatcttggtatatttaatactaaacacaattgccttattcaatacatactcaagtatttactatgccttagatactaggttatcaatgaatcatagatctggcctataggagggtgtagcctttacctagtgctagtcctgacatagcattaaatcacctttatttgtacttttttagagtcatgagtttatactaaaaataattcatcttctataagatagtggtggtacctgtcttattgttaggtaagactgccagtcatgatcaaagttagctgcaagcatttaaaattatatcataaccagagggaaatttagtagttctccaaaaacacagtagtactgtacttttcggaagaccattttttgttgttgttgttggtggtggtggtgcataaggactattttgagctgat

SEQ ID NO: 886849 - DNA, 606 bp, Homo sapiens
ctctcatatgggcgaagaaggctgccaacatgtctgatgtatctgacctgagaattttttacagaggttcaggattaatttcttctatctccatagattggctttatcaaagaatgtatttcatcatggatgaactggttagtccgagaagttaaagaggaatagtgatagacagtgatactgatatgcatatcttggtatatttaatactaaacacaattgcyttattcaatacatactcaagtatttactatgccttagatactaggttatcaatgaatcatagatctggcctataggagggtgtagcctttacctagtgctagtcctgacatagcattaaatcacctttatttgtacttttttagagtcatgagtttatactaaaaataattcatcttctataagatagtggtggtacctgtcttattgttaggtaagactgccagtcatgatcaaagttagctgcaagcatttaaaattatatcataaccagagggaaatttagtagttctccaaaaacacagtagtactgtacttttcggaagaccattttttgttgttgttgttggtggtggtggtgcataaggactattttgagctgat

SEQ ID NO: 886850 - DNA, 601 bp, Homo sapiens
taaatatattgcttagggatactcacatatgttacaatagtctttattaaaggaaggaaaagctgaacacaaaatttaggatagaagttacctcccagaaggaaggcagtggattgcaataaggaaaagcacaatggtattgatgatattctagtttttaaattcagtcayggatgtgcattttattactagccatcataacttatatcttgcatagttttatatgcagaaaatattacataataaaaatttcaaacaaatcatacataaattttattattctaccaaatccatagaatgacaattcagaaaaaaatttaagttgtgaaaaattcacgtttgaacacaattatataggaaattagataagatttatgccttaaatatttttctaattgatttgaaagcagagaaggcaacaacactgccaaagaagtcaagcaaaggacacctggcccttctgtttcttggctgttcatgaatgtaagaatgaaaattttgtcttttctcaaaaataattaataaccaattttcccagaggaattataagtttaagaagtaggcttggatacatttcaaaatggaatgtttttcgtacata

SEQ ID NO: 886851 - DNA, 601 bp, Homo sapiens
taaatatattgcttagggatactcacatatgttacaatagtctttattaaaggaaggaaaagctgaacacaaaatttaggatagaagttacctcccagaaggaaggcagtggattgcaataaggaaaagcacaatggtattgatgatattctagtttttaaattcagtcacggatgtgcattttattactagccatcataacttatatcttgcatagttttatatgcagaaaatattacataataaaaatttcaaacaaatcatacataaattttattattctaccaaatccatagaatgacaattcagaaaaaaatttaagttgtgaaaaattcacrtttgaacacaattatataggaaattagataagatttatgccttaaatatttttctaattgatttgaaagcagagaaggcaacaacactgccaaagaagtcaagcaaaggacacctggcccttctgtttcttggctgttcatgaatgtaagaatgaaaattttgtcttttctcaaaaataattaataaccaattttcccagaggaattataagtttaagaagtaggcttggatacatttcaaaatggaatgtttttcgtacata

SEQ ID NO: 886852 - DNA, 522 bp, Homo sapiens
tggtagaccaagccaaagaaaatatatttaataggagtaaactgtagtaaaaatgtatacgtgaaaacaaataaataccagttaccaaaagggaatttggtctctgcattaatagaaatagagtgtttagaaggagtgaagtgattattcctcgactttgaactggtctgcttgtactagggaaattttgtattcacttttgagtgccatatcttatagaagatgttgaagaaaacaacccgggataagaagtttcctcgaatcaacatactataygaaatagtgggaatctaagccaaggaagagaagacatggcaggtaggggaagatgacatctcaatagtgtgtacaaacactttatgatccctcatgtgagtgaggaaatgattcaatttgcacattgttgtttgtgatggtgaggatatggccaaagaaaggaagaattacctaatagttattcttccttggagataattaaactaaggcaaaatgctataaaggagactcaaatatttaacatag

SEQ ID NO: 886853 - DNA, 669 bp, Homo sapiens
gctggaaatattcctctcaaatacatgatacaggatactgaaactgtgaggaaactcttcactaacaccaaagactggtgttcaggtggtatcttattgagaaataccagtgcagtcatggaagtcctctgcaactgggcagtggccatcttctgataaaatattttctttaattcaaaattatgtctgaggggcaggcgccggaaaattctcactcttaacctcactctttttgtgtccacatctttgatctccatggtcatgagacaacaaacctcggatgttactccagacaatgaagcctcttcaatatattttgagggtacatgtaatattttgatacctgtatacaatgtgtaaagatcaaatcagggtaattgggatatccatcacctcaaacatttatcttttctttgtaccacattttctgtatccattcatccactgatggacacttaggttaattccaatatttcaattatttatttttaatttttrtgggcactatatatatacacactaggtgtatatatttattgggtacctaagatgttttgatgcaggaatgcaatgcataataatcacatcatggaaaatgggatatctgtcctctcaaggatttatcctttgtgttacaaaaaaatccaattatattctttaaattatctg

SEQ ID NO: 886854 - DNA, 571 bp, Homo sapiens
gtgctctgtgtaagacttgctgaaactttctatgaacacagagattctctaagatactttaatttttcatttcccatttcaaacaaagctctaaactgggaactttaaataagatggtttgtagtctaatttgtgatagaaaaatttgagtcagatgaaatctatttattgcctttttcaatattaatcattttatagataattaatagggaaaacactttagtttcatgggtaatttactgctaagaatattcaatargttattcaattaagtatgtaataggtacgtttatacaaaatcaagaaatgaattttacctgttctttcaaaatggaagcaaactctaaaattaaaaagtcttgtgatcaatgtgactgactgatgcgctccagtttattcctgagtaatagttttaggaagaaaccagaactacctgtacactatccctggtcagtcctagcagtcaggtatttggccagtgcccacgtggccttctatgacccacagacaatttcattgactaccaaggagtctgccagacagttttttccctatagcttgtgggccacag

SEQ ID NO: 886855 - DNA, 666 bp, Homo sapiens
taaccttagtcatatcaaacccatgtctgccatgcaagaactgcagcaattactactgctggcaagtccacaagcacttgctttgtatgatctctcttaatttacacaataaccttacggggcatatgcagttattattaccttttatagatcgggaacctgaagcacgcagcatcttaataattttgcaaccataagtggcagaactgagactcactccggtcttcctgctctgtgtttgtaaccatctcaatcccggtgtaaggaccaatgggccatagtcaacacccactgcaatgtattgagtaaacccaatgccaggcatttgaaccttgaatcctttcaaggtagacatcaccattccagggcaaaarcactcagtttagtttactcagttaagtaaaagtgtctccactagggccactgatgtttgtttttcccttggcaggcaacccacaaggctgtgctggatgtcagtgaagagggcactgaggccacagcagctaccaccaccaagttcatagtccgatcgaaggatggcccctcttacttcactgtctccttcaataggaccttcctgatgatgattacaaataaagccacagacggtattctctttctagggaaagtggaaaatcccactaaatcctaggtgggaaatggcct

SEQ ID NO: 886856 - DNA, 595 bp, Homo sapiens
tcagggcaacatagtaggattttttgttttcacaaaaaagaattttttaaaaaattagctgggcatggtggcacatgactatagtcctacttgggaagctgaggcaggaggatcacttgagcccaggagtttgagcgagctctgatagcaccactgcatttcaggctgggtaacagactaataccttgtctcttagaaaaaaaaaaaaaaaaaactaaaaactcatcttggtggtcaatacataggggtactcgtgtacttttytacaatgtaaaaacatctctaaaaataaataagacagctccagtaacttaagagatttgttaaaacagaaagtctgttatgggaattgcccaaagataatctttttattgtcttacgcaatagactttgttctgtctctaaaacaaaatgcaatatattaaatatgaaagacagaacagaggcatatgaaacccactcagatcaggacttaaaatggtactggtatttcagaagcaatctagttagtgtaatcagtcactgtgattcctatatatgtcctatatgtgttaggactgtattcttcagtatttactagttggaggtgcttcac

SEQ ID NO: 886857 - DNA, 682 bp, Homo sapiens
aagggaggatcacttgagcccacgtcaaggctgcagtgaaacgttattgtgccactgcattccatgtggggcaacagagggagaccccatctgaaaataataattatcaccagtaattaccttgcttccattttcacatggtaaataggtaacatcactctgccacacttatctactcaccaaatgccctgccytccctcttgtaaaaaaaaattattattattattgtgacctcctaggtcattcattcaaacaaatatctgagttcctactatgtcaggtactgcaccaagaggtggagattccctgataatctgtacccttaataagttcttatgtgggaaaaataacatacaaaatcattcccatgaaagtgttaagatatgcgtgtgcagggcactaagcaagctgttgattaaagtgggcctcactcacctggtgtccctctgaccacttgttctcagtctccttttctcactgcaactcatccacctataaacactcaagcaccccaggtgggcccttctctctacacccactcactaggatacatcctagttaagggatctcatcattctcgaagttaaacttcccagtgtctagctctgccagacttccttcctcaactccagaccacctacatgtactgctgtctaacaggcattttaaagtgaacatgttc

SEQ ID NO: 886858 - DNA, 590 bp, Homo sapiens
gttggttccaactctttgctattgtgaacagtgccacaataaacatatgtgtgcatgtgtatttatagtagaatgatttataatcctttgggtatatacccagtaatgtgattgctgggtcaaatggtatttctagttctagatccttgaggaatcaccacactgttttccacaaaggttgaactgatttacactcccaccaacagtgtaaaagaattcctatttctccacatcctctccagcatctgttctttcctgactttttaataattgccattctaactggcatgagatggtatctcattgtggttttgatttgcatttctctaatgaccagtgatgatgaactttttttcatacrtttttttgtctgcataaatgtcttcttttgggaactgtctgttcatatccttcacctacttttgaagtaggcgagtttttttcttgtaaatttgtttaagttccttgtagattctggatattagccctttgtcagatggatagattgcaaaaactttctcttattctgtaggttgcctgttcactctgatgatagtatcttttgctgtgcagaagctctttagtttaat

SEQ ID NO: 886859 - DNA, 728 bp, Homo sapiens
ctttgtacatctttcttaaacctaagctctcttccccaactcttgtctccacatcagtgcagactcttcatttcttactgagattatttcaaatgtttttttgttcccaatcttctttcctccaattcattttccattcttcttctagtgattttttttccaactaaaaatatgccattctccttgcttaaaattatttggcaggttcccattacctaaacaaaacatccaaacttcctggcattgcatacaggactctttatcatctcacccctgactgcctttatcatctcaccccgactgcctttccctaacaattttccactcagctccaataacactctacacattggatttgaacgtgatgacttgaaacaggtttgtactgaagtatgtctgagttctgccaggagtttttaaagataattaattgtcttcgtctgcaagaaaattcgcccttgaaacaaacrtgaaaagtgcacagaacatttgtatcctacagtcaatgagtttctgaaataatcagaattgtattctaggagcaagagatgaaacatagtacaatgactgcaaacctaccgatctcttggaatttaattttgtgaacttgattttatagacaagaaagcaaaaacctttcaaatcatttttataaaagaaaatagactttacttacttctgcagtaaaaaaaaaaaaaatagacagtggggaggagtaggaagatatg

SEQ ID NO: 886860 - DNA, 640 bp, Homo sapiens
ggcttttagggacagttatgtttgggtgatctgcaatcccataggtgtcatcgctagcctggttaaaactagagtactgccttctttgtattcttgtcatttgtgccaatcaattgtaactggagagagagaataaaaaagagtgtatctacaggtgcatattagttcacaggtttggtggtagaagttaaggaaacttccctctgtgaaggaacaaaatcaaagtcatctgtttgcgatcaagaggggcatggcagggttatacaaatgtgcaaagaagtttggattgtctccaagcttccatggataatgagaaataaagctttctggaaaaagtgaatggtccagactgctgttcattctggagtgcctagctaagtttataaatcatrtctttatacctgttgtaccaaactattcaattgaaaagtggtaaagatataacatggaaaaaaaatctttacaaagatttatgtctttcttgctctaatctatttatacatatagttaaaagcccattactaaaaaaattaaaatagatcaaaattctgtagatatgacaaagtaaattctgccccaaagaaaatgtcagcaaaaagctatattcagcttttaaaaaccatatgcatgttatccttaa

SEQ ID NO: 886861 - DNA, 635 bp, Homo sapiens
tgaggatacctcagaaagcagcaaaagggcaaagcaaaagtcctgaggtaggagaatggctgatatacttgaggaatagcaaagaggttatactgtctggaagagagtaaatgaggggtagaatactaagaaatgaaatcagagtgataatgtgagagttgcaacttttgtaggaccttgccaaacaatgctctttaatgtgcaggtgaaycctgggcaccttattaaaatgtatattctggttcggtaggtcttggttggagcctgaggttctgaattttacaagctaacaggtgatggaccatactttgaatagtaagattgtaaagcatagaaaggactttgttgttgaatggaaagctattagatactttgaagcagaggctagagatgatctgactatgcatttcaaagatcatactgtccattcttaatgatagactaagattgattaagatgttattgaaaaaaattagatgagagatgatggtgacttaggataatggagtcagttagaaaccagaaatgacagaatttgctaaaagaacaaatttgaggagtgaaagaaatgggagagtttgagaatacctctgtgttttttgtcctgaatcactcaaaaatagaattggtctttg

SEQ ID NO: 886862 - DNA, 675 bp, Homo sapiens
tttgtataattggaggtaagatattaaacaagtaagcaaggaaatgaccaaaataagtttacatagtaatatgtgttgttaaggcaaaaatattaaagtataacagaagatgaaaagaaaaactgctattaatcatgtggtcagcaagtcctctttaaggaggtgacataatgctaagccttgaatggattcttccaattaaatgaaccattaattctcattttctaaaagaaaaaccaatttgcctttcaatttaggtgcaaagtctgtataaaatataaatgtgtattgatgtttaattatgtaatatacataggctaactagttgcctgagctggccaccaaaatgacagggaacataaaggtcagatgagatgaattctgggactaactcagatacgcttttggaggccttatatagaattcagaaatctcaagtctctggccaaatgtcaaagattcaacaaagggtaataaaaaagataacctgaaagctgtaagtcacyaccaagagcaccttttaggcatgaccttcaccagcaggaaaaggaacaatgcatgtgctgtagatccacatggatagaagtggggaaaaggaggttgtattgcatatatttgtgtctgcagtttgagaatgggacggagttttagtacttcatcttggttgcacaagtt

SEQ ID NO: 886863 - DNA, 504 bp, Homo sapiens
ccacttgtcgattttttgttgttgttgttgttgttgcaatttgaggactcagttataaattatttgccaaggccaatgtccagaatggtgtttgctaagttttcttttaggatttttatagtttgaattattacatttaatctttaatccatcttgagttagtttttgtatatagtgaaagttagaggtccagtttcattcttctgtatacggctagccagctatcacagcactacttattgaaragggagttcttttcccattgcttatttttgtcagccttgtggaagatcagatggtcgtagatttgtggctttatttatctgttctgtgttctgttccattggcctatgtgtctgtttttgtaccagtaccatgatgttttggttactgtagccttataatgtagtgaagtcaggtggtgtgatgcctctggctatgttctttttgcttaggattgctttggctatttgggatcatttttggttccatatatatattggc

SEQ ID NO: 886864 - DNA, 567 bp, Homo sapiens
catgaattatcacctcatgtttgattcaacttaaaatcccacagtcttctcagtcttcaaggcaacttaatcctttgtgccatggatcttctctatgtaccaggtgaacaattttacccctgtgactctgtggctagtagctgcagtttatcaaaagttgtcaccatagaaaaataagtcagatcactcagcatcttttttcccccccactattagggccctgatgcrtcaggtaaataatatgaggggctgctatgtggcagtatgcctattaatttcgtttcattgtttttgttcagtctcccaatttcaaaatacatggaatgggagagaggatttgaaattagagctatatctcaagacacttcccaaattgggcttgggggacattttggaacagggtacaatagggcccctaatgtttattgctcccactgcaaagaatacaattaaggtcccttaatgtttattgctccagctctgaaagaataccattaagtcagatacatcacctgatggcagggactgctcaccaggctgcatttggaaaatcgtgtcaggaacctt

SEQ ID NO: 886865 - DNA, 622 bp, Homo sapiens
ttttatctaaatatgtggaaatgataagatgcgtactgcatctctcatataataaagataatcagttttatacagacatattctccatctactggcaattaccaagataagatggcactagaaatttctccagcttacgccatgaatactgcagaagctgatactatccgttgtggttttacaaattctagagggttctagccaaagcaacctaagaataggacatggtagcttaagtttttcagcttctyaactggccacacacacacaagttgtgtttgtacaattcttgaggtcaatcagaaccaaaaaatctgttgctggaagaaatattatcctcttcatagaaatatccaccagcagaaaattggtttctcaaggaatccctactgcccttgtagaaacatcaagattcttgcctggattctcaacataagtctttactcacaggcctattgcttggtttcagaagagtgagaacatgaaagttcataaatgcctgggccactgcaactctaaccactgtgtttcccccagtttgatatggttcaggatacatagtcatagaacagggcatgcagattgtatttaagaccactgcaagtaaggtctaaggcaaaag

SEQ ID NO: 886866 - DNA, 578 bp, Homo sapiens
ggtgggcgcctgtaattccagctactctggaggctgaggcaggagaatcacttgaaccccgggaggtggaggttgcagtgagctgagatcacaccactggactctagcctgggcaacaagagtgaaagtgtatctgaaaaaaaaaaaaaaargattgagagggaactaatggggaatgaagaaaatgacatgtgatgttgaaggggtgtttaggccaaatcataaaagatctggtgggctacggtagagtttagattttcttcacagttttgtctaaggctggacctgttagtagcaatttgaggggaaaatctgagatggtatccagatggtggaatctgggtttctggaccattaacttaagcttctgcataaagtttcttagatagaaatagagtggccttcacaaggcccacagactgatcctcctacaacagggcttccaagacagtaattcctgtaaaagaaacaacagccttctccctctatcagagcaggtctgcaacactcaaactcttctgttatgtggtccctctttcattacgtagctggccttatctccagctacaataaattgt

SEQ ID NO: 886867 - DNA, 637 bp, Homo sapiens
tcatgtcagttgagatcaagttttgctgccaaaagtctattttatcagtaaaacaggcttttaaaaaaaatgagatcatgacagcatagttttctgtgcacctttttcctcttcacattgcattgtgagcatttgtccatgtcattattcttctaaaatctgactctttccatggctctataatattcctccacatagacaaaccagacagtttcaaccatcctttaatactggacatgtaagttgtcccaactttgttttttatatagaagtcacatgtgaataaacactgttatgcacagatttatgtttctttgacaattaataaggaaagctgttttctcatagattttataagccacttgaatttctttttcagtgaattatctctttgtcaaatggactttgctcatttttctattgagaaagtaattttttccttattggtacatataagcactttatagtctagagacgttaattaactatttgcratcttattgcaaatattttacatcttcgtcattttgcccttaagattttttaacatatagaagtttagattttggggtcgcttccaagatggccaaataggaagagctctggtctgcagctcccagcgagatctacacagaag

SEQ ID NO: 886868 - DNA, 556 bp, Homo sapiens
gaagcagagacaaggggagtataaactgcattctaggtccaagaggagacaggaccaaccgaagtgaaggattttataggccagctctacgtaagactggaaagttaagcctatagtccatcctggcagttaaaaatgcagcaaaggccgggtgcggtggctcaagcctgtaatcccagcactttgggaggccgaggcaggcagatcacgaggtcaggaaatcaagaccatyttggctaacacggtgaaaccccgtctctactaaaaatacaaaaaatcagctgggcgtggtggcgggtgcctgtaatcccagctactcaggaggctaagccaggagaatggcgtcaacccaggaggcggagcttgcagtgagcggagattgcaccactgcactccagcctgggcgacagagagagactccatctcaaaaaaaaaaaaaaaaaaaaaaagagtgcagtgaagtgctgggaaaaaaagtttataatcagacaccatccggtgtccttgaacaagaaagaattgtaagaaaggacctagaattcattcatattctctc

SEQ ID NO: 886869 - DNA, 567 bp, Homo sapiens
gcagccaacagacacatgaaaaaatgctcatcatcattggtcatcagagaaatgcaaatcaaaaccacagtgagataccatctcacaccagttagaatggcgatcattaaaaagtcaggaaacaacatgctggagaggatgtggagaaataggaacagttttacactgttggtgagagtgtaatctagttcaaccattgtggaagacagtgtggtgattcytgaaggttctagaactagaaataccatttgacccagtgatctcattactgggtatttaccgaaaggattttaaataatgcttctataaagatacatgtacatgtatgtttattgtggcactattcacaatagcaaaaacttggacccaacccaaatgtccatcaatgatagcctggattaagaaaatgtggcatatatacaccatggaatactatgcagtcataaaaaggataagttcatgtcctttgcagggacatggatgaaacaggaaatcatcattctcagcaaactatcacaaggatagaaaaccaaacactgcatgttttcactcacaggtgggaattga

SEQ ID NO: 886870 - DNA, 567 bp, Homo sapiens
gcagccaacagacacatgaaaaaatgctcatcatcattggtcatcagagaaatgcaaatcaaaaccacagtgagataccatctcacaccagttagaatggcgatcattaaaaagtcaggaaacaacatgctggagaggatgtggagaaataggaacagttttacactgttggtgagagtgtaatctagttcaaccattgtggaagacagtgtggtgattcctgaaggttctagaactagaaataccatttgacccagtgatctcattactgggtatttaccgaaaggattttaaataatgcttctataaagatacatgtacaygtatgtttattgtggcactattcacaatagcaaaaacttggacccaacccaaatgtccatcaatgatagcctggattaagaaaatgtggcatatatacaccatggaatactatgcagtcataaaaaggataagttcatgtcctttgcagggacatggatgaaacaggaaatcatcattctcagcaaactatcacaaggatagaaaaccaaacactgcatgttttcactcacaggtgggaattga

SEQ ID NO: 886871 - DNA, 640 bp, Homo sapiens
ccaacaataaaaaaaaaaacccagtaccaatagcttcaccactgaattttaacaaacatttaaagaagaactaataccaatcccattcagactctctaaaaaatagaagaggagggaatacatccaaactcattctatgatgcctgtattagtccatttacatgctgctgataaagacatacccaagcatggcaatttacaaaaaaagaggtttaatggacttacagtttcacatggctggggaggcttcacaatcatcacagaaggcaaggaggaggaagtcacatctaatgtggatggcrgcaggccaagagagagcttgtgcagggaaactcccatttttaaaataatcagatctactgagactcattcactatcatgagaacagtgcaggaaagatctgtccccataattcaatcacctctcactgggtttctcccacaacatatgggcattgtgggaatcacaattcaagatgagatttggatgggaacacaaccaaatcaaagtcttaactcatttcagcattaactcaaaagttcatagtccaatgtctcatctgagacaaggcaagtcccttctgcctatgagcctgtaaaatcaaaagcaagctagttacttcctagattcaatgggggta

SEQ ID NO: 886872 - DNA, 622 bp, Homo sapiens
tatgtatgggtgggtttatttctggtctctgtattctgttttgattactatatctttgtaaaataatttgaactcagggtgatgcctttggctttgttcttcttagtattgatttagctatttgaggtgttttctggttccttaggaattatacacttatctttcttatttatatgacaaatgccttttgaatttttaatggtattgcattcaatctatagagctttggatagcgtgggctgtttaacaatattggttcttctgatccatagatgaaaatatttttcccttaatttgtgtcttcttcaatttctttcatygatatctcatagagttggtgtacatatctttcacttccttggttaaatttattcttaagtgtacttttatgctattgtaaatcagattctttatttctgtttttttggatagtttattgttgctatatggaaatgctactgacttttgaatgttggttttgtatcctgcaactttgctgaattcatttattagttctaactacttttggtggagtcttactatatacaagattatgtcatatgcaaactgagacaattttcacttttttctttctgatttaaatgccttttatttgtttatt

SEQ ID NO: 886873 - DNA, 605 bp, Homo sapiens
tatggtgaaacaagatctctactaaaaatacaaaaattagcagggcttggtggtgcactcctgtaatcccagctattggggaggctgaggcaggagaatctcttgaatcttggagtcagaggttgtactgagctgagatyttgccactgcactccagcctggagacagagcaagactccctctcaaaaaaaaaaaaatactaagagatgttaacaccaagaaatatctcctttcttctcctcaatagtacaaaaatcttagaaagcttgaaaacatgccatttcatatgagcctattctaaatgtgttctaagttttagagtttaattattttctacattcagattggttattgtaaaattaaacaataatttttgtagataaagccacatttaccaattatttctatcaacatttcaactgaaataattttccttcttcctgatgtaaatatctgtttcttaagtgacaaacactatgctttcacttatctaaaaagagtattaaaattgcctttattgtcaaatcacagttcagctacgtatagagttatggtttcacaattgttaattttcatattctcctaggatattaaccacattgcct

SEQ ID NO: 886874 - DNA, 605 bp, Homo sapiens
tatggtgaaacaagatctctactaaaaatacaaaaattagcagggcttggtggtgcactcctgtaatcccagctattggggaggctgaggcaggagaatctcttgaatcttggagtcagaggttgtactgagctgagattktgccactgcactccagcctggagacagagcaagactccctctcaaaaaaaaaaaaatactaagagatgttaacaccaagaaatatctcctttcttctcctcaatagtacaaaaatcttagaaagcttgaaaacatgccatttcatatgagcctattctaaatgtgttctaagttttagagtttaattattttctacattcagattggttattgtaaaattaaacaataatttttgtagataaagccacatttaccaattatttctatcaacatttcaactgaaataattttccttcttcctgatgtaaatatctgtttcttaagtgacaaacactatgctttcacttatctaaaaagagtattaaaattgcctttattgtcaaatcacagttcagctacgtatagagttatggtttcacaattgttaattttcatattctcctaggatattaaccacattgcct

SEQ ID NO: 886875 - DNA, 605 bp, Homo sapiens
tatggtgaaacaagatctctactaaaaatacaaaaattagcagggcttggtggtgcactcctgtaatcccagctattggggaggctgaggcaggagaatctcttgaatcttggagtcagaggttgtactgagctgagattttgccactgcactccagcctggagacagagcaagactccctctcaaaaaaaaaaaaatactaagagatgttaacaccaagaaatatctcctttcttctcctcaatagtacaaaaatcttagaaagcttgaaaacatgccatttcatatgagcctattctaaatgtgttctaagttttagagtttaattattttctacattcagattggttattgtaaaattaaacaataatttttgtagataaagccacatttaccaattatttctatcaacatttcaactgaaataattttccttcttcctgatgkaaatatctgtttcttaagtgacaaacactatgctttcacttatctaaaaagagtattaaaattgcctttattgtcaaatcacagttcagctacgtatagagttatggtttcacaattgttaattttcatattctcctaggatattaaccacattgcct

SEQ ID NO: 886876 - DNA, 591 bp, Homo sapiens
gacaaattcctaggtgcagaggggcgggtccccagtgaaacccaaccttcaagtgaaagacagttcaaatcctgaaaactgagctgccagttccaggtggagtcctcgatcggagtgagaatttcctcgatgtcttttagcccatcaaaagatgctttctttaggtccactcatggaccaaccagcatacactccctcagtttgagcccataaaatccccagactcagcctcacaaactgcaacctgctttgggccccctgtcayacagaagactacccgctctcaagtcccctctccactgaaagctttccttctgccactgaataaaattattctgtgccctactcactctctgatgtctacacacctttgtcctcttggttatgggacaagaacctgggactcacaaagtttcaggtgacaggaatgagctgtatcatgcctcttttcactgagctgcagacaggaataagagagagctgtaacatttcttgggggctcagacctcgggactccccagaaaagagctgtaaaaccccttggggctccatggtggctggcatctctgagttttcaggaatcaccagtgt

SEQ ID NO: 886877 - DNA, 672 bp, Homo sapiens
ccatctccaagtttgtcatggaattctgcttccaaatttatatggaattcagctttaactttacatgtaaaacaaatgttcaagcagcaattaagactcaggcgtctacattaagctaatgccttattcaataaaattcccactgatttctttttaggtactatatattgaagggaggaggaaataatgcttttctactaatagagtagctgycccctcttcatgtcatataaacacgtaaagtgttgtaaattctcaataaatgtgcttatttcagtgacttcttagaaaatacaagacatacataccagtaattgaacataattacagtgacatctccagaactataaaataaagttaattcaaacattcaaaatgcacacgaagatgcctcaataataattttatcatatatatatataatatatatatatattttttgagatggagtctcactctgttgcccaggctggagtgcagtggtgcgatctcagctcactgcaacctctgcctcccggattcaagcaattctcctgcctcagcctcctgaatagctgggactacaggcatgtgccatcactcccggctttttttttttttttttttttttttttttggatttttagtagagacggggtttcaccgtgttagccaggatgttcttgatctcct

SEQ ID NO: 886878 - DNA, 672 bp, Homo sapiens
ccatctccaagtttgtcatggaattctgcttccaaatttatatggaattcagctttaactttacatgtaaaacaaatgttcaagcagcaattaagactcaggcgtctacattaagctaatgccttattcaataaaattcccactgatttctttttaggtactatatattgaagggaggaggaaataatgcttttctactaatagagtagctgtcccctcttcatgtcatataarcacgtaaagtgttgtaaattctcaataaatgtgcttatttcagtgacttcttagaaaatacaagacatacataccagtaattgaacataattacagtgacatctccagaactataaaataaagttaattcaaacattcaaaatgcacacgaagatgcctcaataataattttatcatatatatatataatatatatatatattttttgagatggagtctcactctgttgcccaggctggagtgcagtggtgcgatctcagctcactgcaacctctgcctcccggattcaagcaattctcctgcctcagcctcctgaatagctgggactacaggcatgtgccatcactcccggctttttttttttttttttttttttttttttggatttttagtagagacggggtttcaccgtgttagccaggatgttcttgatctcct

SEQ ID NO: 886879 - DNA, 586 bp, Homo sapiens
acaagtgaacaagaggtctccccaccaacaactaagggattaggaaaaaatatcaggttaaagaccttcttgagacaccccacatggtcatgctaagaaagtagagggggccagaattggagaaaataaccaagagaccagccccggtgtccagaaagaggtctactttccttccttcagtttccagaattacccagggctcctggatgttaatggtgatctggaccatcagagccagggagagaagccccacgactcctcattcctactggaccatttgggaaattggctctgggcccagtgaccagmatccctgggggaagttcaccttccagtaatcctcactgtagattgaacagggtcaagatgggtttttcatgctgcctaggcaatcctccctaaaatgccctgatttaccaaatctgtagctgttaacaagtgcacctcagagattctggggcttgtgggcttccatggtggccattaaagtttctacctctttcctttgtcttctctctctctctctggggtcttcttgtatctattataaaagaccagggtggccactttcaggaggttctctaaa

SEQ ID NO: 886880 - DNA, 606 bp, Homo sapiens
ttcagttcttataaatgttaattttctaatataattatcacttttgttactattgttagtttctgtattaagacactttcttactttgcctgccaaactattgtttctatcctataaggtaaaaatacatgttaaactctttcaaaaaaattgaataagactaggcaataacaaacaattggccatataatgctttttaattwcatggagtcaatatacatgactataaaaagaaaatgatttctgagaatatattgagtgcttgttttacataatatttatgtgacataggggacattatagggaatttttaaatatatgttttacctcaatactctagcatattcctctaaaggaacaggaggagtctttgacacattacagattttttttgtaaatgactactctttctgtacattgagaaacattgtctttcaatttacaatgaattaggcagtggcaaagatttgaaatacaaagatttttaaaattcatctacatgcaataaaaactgaccaaagaaggaaaatagaaatacatattactattatatgccattggttctatgtgagcatattaatctaactttctgttgtttaagaagga

SEQ ID NO: 886881 - DNA, 606 bp, Homo sapiens
ttcagttcttataaatgttaattttctaatataattatcacttttgttactattgttagtttctgtattaagacactttcttactttgcctgccaaactattgtttctatcctataaggtaaaaatacatgttaaactctttcaaaaaaattgaataagactaggcaataacaaacaattggccatataatgctttttaattacatggagtcaatatacatgactrtaaaaagaaaatgatttctgagaatatattgagtgcttgttttacataatatttatgtgacataggggacattatagggaatttttaaatatatgttttacctcaatactctagcatattcctctaaaggaacaggaggagtctttgacacattacagattttttttgtaaatgactactctttctgtacattgagaaacattgtctttcaatttacaatgaattaggcagtggcaaagatttgaaatacaaagatttttaaaattcatctacatgcaataaaaactgaccaaagaaggaaaatagaaatacatattactattatatgccattggttctatgtgagcatattaatctaactttctgttgtttaagaagga

SEQ ID NO: 886882 - DNA, 606 bp, Homo sapiens
ttcagttcttataaatgttaattttctaatataattatcacttttgttactattgttagtttctgtattaagacactttcttactttgcctgccaaactattgtttctatcctataaggtaaaaatacatgttaaactctttcaaaaaaattgaataagactaggcaataacaaacaattggccatataatgctttttaattacatggagtcaatatacatgactataaaaagaaaatgatttctgagaatatattgagtgyttgttttacataatatttatgtgacataggggacattatagggaatttttaaatatatgttttacctcaatactctagcatattcctctaaaggaacaggaggagtctttgacacattacagattttttttgtaaatgactactctttctgtacattgagaaacattgtctttcaatttacaatgaattaggcagtggcaaagatttgaaatacaaagatttttaaaattcatctacatgcaataaaaactgaccaaagaaggaaaatagaaatacatattactattatatgccattggttctatgtgagcatattaatctaactttctgttgtttaagaagga

SEQ ID NO: 886883 - DNA, 549 bp, Homo sapiens
ttacaattaaaacacagcaaactgacctactttcttaagggtgttcaggaatagggatgaacagatatgtctttagttttaagtccagacagaagagtactatgaatagaatctgcaaagaaattctaggactccaagagcctggagctcatgagtgggataaagcaaatagcctgctgactctgaccttaatgatcaaccaggcacatatggtcatcacagaagatctaacaaatttcctgggactcattcattagccaagtcatcagtgactaatataccatttaagttggtattgggttttatggggatttaattctggaatgtataactggagggctcagccacctgagccaggcagccaaaaccactgactgargactactccatcttaagctccaggtcacaatagattcttttatcactgatgacggaagccaacttgtactctgaagtagagtgtgtagggggtagaagagagatatctacaagatagcagcccaagctgaggtcagagcacttacggagtagaacaccctggagccagca

SEQ ID NO: 886884 - DNA, 718 bp, Homo sapiens
gacatggttttttgtcccaccacttgcaatggcagattctaccttctaatgggttagtctacctgttaagatactgacttctgatacaacatggatgaacctcataaacatatcctatgttgtattaactagggttctccagaaaaacgacaaaaaatagaatatatacgaacagataattgagagaggatttattaggtgaagtggctcacatgattttggaggcagagaagtcccatgatgtgccatttgcaagctgaagaaccaaagaagatggtagggtggytgagtccacttttcaagtcaaccaggggagctgatggtgtgattctcagtttgagaccaaaagctggtggggaagggtagtggctagtgcgagtcccagagtcaaaaggccagagaacctgaagttctaatgtccatgtgatatagtttggccgtgtccccacccaaatctcatcttgagttgtaactcccataattcccacatgtcatgggaggaacccagtgggaggtaattgaatcatgaaggcaggtgtttcccgtgctgttctcgtgatagtgaataagtctcacgagatctgatggttttaaaaatgggagtttccctgtatagtctctctctctctctttgcctgcctccatccatgtaagatgtgacttgctcctccttgccttctgccatgattgtgagccctaccaagccatgtggaactgt

SEQ ID NO: 886885 - DNA, 718 bp, Homo sapiens
gacatggttttttgtcccaccacttgcaatggcagattctaccttctaatgggttagtctacctgttaagatactgacttctgatacaacatggatgaacctcataaacatatcctatgttgtattaactagggttctccagaaaaacgacaaaaaatagaatatatacgaacagataattgagagaggatttattaggtgaagtggctcacatgattttggaggcagagaagtcccatgatgtgccatttgcaagctgaagaaccaaagaagatggtagggtggckgagtccacttttcaagtcaaccaggggagctgatggtgtgattctcagtttgagaccaaaagctggtggggaagggtagtggctagtgcgagtcccagagtcaaaaggccagagaacctgaagttctaatgtccatgtgatatagtttggccgtgtccccacccaaatctcatcttgagttgtaactcccataattcccacatgtcatgggaggaacccagtgggaggtaattgaatcatgaaggcaggtgtttcccgtgctgttctcgtgatagtgaataagtctcacgagatctgatggttttaaaaatgggagtttccctgtatagtctctctctctctctttgcctgcctccatccatgtaagatgtgacttgctcctccttgccttctgccatgattgtgagccctaccaagccatgtggaactgt

SEQ ID NO: 886886 - DNA, 660 bp, Homo sapiens
gaatatatatgtacttaaatattattagggagtagtacagatatgttttatacaatttagttactaattctcaaaagtgaactaaaagaaaattttcagagaaagactggaaattcatatatttcaagcaaacaatttaggtttgtctgttgtgacaagaagaatgtgtctgtttgtgctgctttaaatttatattgataacagatgagttcctttaagttaaggtcatgggtcaaatttattaatgtgctctttccctaatcaaaattatgtgtacattttggttgacaatttgtgaactatttattttgacttattcaatgatttgttaattcaactgctttaagcttttaaaaccctcggtttctatataaaactatggctcatgatcttgggatatatccatgtgttgtaattgtttttagtgcctcgttgtcaagtgacacaaagaagaatttgatggcaggctttggaattcttttcttgtaagttgatatgcaaygcattccaaaatagaatatctgatatgtccataattggtaatgaatttaggttacaaaacattattgctacatttatatgttagccaacagaaggaagcaaattctatatctctccaagcttcatcaagatttgatgggtaatttggttggccctaag

SEQ ID NO: 886887 - DNA, 555 bp, Homo sapiens
ggcttttccctctttgctcaactctccttcttcctgctgccatgtgaagaaggatgtgtttgtttccccttccaccatgattgtaagttttctgaggcctccccagccatactgaactttgagtcaattaaacctctttcctctataaattacccactcttaggtatgtcttcattagcagcatgagaaaggaytaacacagtaaactggtatcacagagagtggggtactgctacaaggatacccaaaattgtgaaagtgactttggaactgggtaacaggcagagtttggaacagtttagagggttcagaagaatacataaaaatgtgggaatatttggaacttcccagaggcttggaaggctgagaagacagcaaggtgtgggaaagtttggaacttcctagagattgttgaatggttttgaccaaaatgctgatagtgatatagacaatgaattccaggctgagatggtctcagatggagagggacttcttggaaactggagcaaaggtgattctgttatgcttttgcaaagagactagtggcagtttgcc

SEQ ID NO: 886888 - DNA, 651 bp, Homo sapiens
aattatttaccacaaaccagtaaaatacactcttacctttttcactaaggttctgctaattttaaaatataagtgataatttaaaaatacacattctgtgacttcaagaatttggcaaattcttaaaataaatagcacggtcctttccttgaaacaacctagatcaaaatagcacttggaaaatgtatgtagaatgaatgaatgaataattgattaaattcccacagagttacacttcatcctgatcaattcaaatgaataatctgaaattttaaggtccccattagactactaaatcttgcaacattcattcccagggtcgctgtaattggttcaactccatacaaaaaaatgaggaagaagaagaggaagaagatgaagaaaaagacgattctgactacatagaacaggaagtggggcytcctcttttgacaccaatctctgaagatttaggttattttacgtaactattatcacacacagacacacaaacaatataatatactgtgtgcattatatagtaaatatgagagtcggaaagctctaaaaactggacaggagccaaggtctcatcctcttcccattcatgttctgggatgatagggagtgaagaatgtagctggccacatcaatgttctctgacagaggttg

SEQ ID NO: 886889 - DNA, 636 bp, Homo sapiens
ggaggatattttagtaacatcttaccctcaaatgaaataattgcacctaataacacgtacatttttaaaaatcgtgagaaataatgatgtattgtacagtgtacaattaaaacataaaaatcagaacaccttttatgcatatagtgatcaaaagttttcaaaggtctttcattttattcattttgctacctcctattgttcatttgatagatttgattcttattttaagatggaaaacactgagacacagagagtttgagggcattatgtgaatccattcagggtcaaaatgaatatcagaactcagtttcctcgactatcaatccagcactttcttcacttcagtaaaatggtatgtgtcatgctgcctggtattcatgccactaagaaagtgtaccaaattactgcgtgcctgtagtattgctggcactgagctaaataaattagacacatattttctatgaatcttctcaatgacccactatkttttttaaaaaaaaactgagtactgggatacagatagtataagagccagttacattactcactatgtaagtaatgaagtagcataatgcgtttcataagtaacgaggaataacttaaaactaggtttctaactccagcatctgagctgtt

SEQ ID NO: 886890 - DNA, 648 bp, Homo sapiens
atccccagcacaaagaacaccttatacagccttgggcctgaatagaacctggccctgtggagggcagggcctatgtctcggcctcaatgatcttattttgcagactaaaacgaagagccacagtctgatagacacaagtatacctatgaggtcaaaaggcrtcagactttaaattaggcctgccctggaacatctggtctgcagggtcgttatgtgtttgtgtgcaggcaagggaccaggagcaccccactgcaaggaaggggcccaattgggggcagggaggggctcacgctactcctggtctggactggactcagcccaccacaccctacttcatcctgcacacctgattcttctccctagattggaatccagaaaaggaaaaaatgatctgtgttacttctggctccaaagccttctgctccaccctgcctggtcctcctgtcctgcccctctctagtaccttgaagcagaaggcctttgggctgaatctccatctcaggccttctttccacctctgactgctctccttttagcaaaagagtctcctgccttattgtgcttcagtttctcttacaaaacaaggtgagagccacataaccctgctccccactccttccctgaatgaatacttaactcttactgccc

SEQ ID NO: 886891 - DNA, 594 bp, Homo sapiens
actgaataaacggggagactggtgaaaggaggtaagacagagcaggaaacaacataaacccaactgtgctcggatctgcaatgaatctgcaatggaagcaaaaaagcaaaataagggccgggtgcagtggctcactcctgtaatcccaccactttgggaagccgaggtgggcagatcacttgaggtcaggagttcaagaccagcctgaccaacatggcaaatcccagtctctactaaaagttcaaaaaattagccaggcgtggtggtgcgcacctatagtcccagctacttgaggcctcrcctgtgaggcctgagactataaaaatcctagaagaaaatctagaaaaaactcttttggacattggcctagatgaagaatttatgaataagaccgcaaaagcaaatgcaacaaaaacaaaattagaaaaatgggacttaattaaactaaagagcttcagcacaacaaaacaatcaacctacagaatgagagaacctacagaatgagacagacctacagtacagacaacatatagaatgagagaaaatacttgcaaactatgcattcaataaaggactaatatataagaaacccaa

SEQ ID NO: 886892 - DNA, 633 bp, Homo sapiens
ttctgttgaccttgcctgggggagaggccagcagagctaaggatgacctcacccccttccagcaggatttcctgggatgtacagaacctccttcttcagctgtccctctgtgatcagccacattcaatctataaacttccagtgcagatgatggggacatctaatattgggtctgttcacatttcagcaggaggtgaaacacacaaagtaatcattaggcttcctgaagtcccaaggaccttctacgtcagyggcagaggtgggaggtgggctggcgaggtggggcagtctaggaactgcgctggtggggacaggaaattgggctgaagggagatgtaaggccttggtgggaaataaatggcactgtgttgttgacggaaaaagatcttggcaggactgttgttgtgagtgttctgtggcttagaaaggaatttcctacaggctggactaaccattaaaaatgtctctaccttcaggagtccccggcgtgcagtggagcctcgctgggggaaatgacagcttggaccatgggcgcccgcggtctggacaagcgaggaagtttctttaaggtaaaaggaagccttgattgggatctcaactcgtcggcttgctgcctgagcctgggagctgcgg

SEQ ID NO: 886893 - DNA, 649 bp, Homo sapiens
ggacaaatggcattttccctcagactcccaccctctcatgcacacttgtttctggctatttgctgttgagtgcattttccaagatattttctaatcacccttctaaacagaagcaggttgttatgagcacagacagatgataccttggtgcatgggaccaattctgccctgcagatgccaagagggagctcagcctgttccaggccaccacacaggtgtgtggagccctgaccctttgtgaaccaacaatggcatcgtgtgggcagacatgctgcctgcatggacgcattgctgctaatgggtattcccaaggcatgggttgttatttgcattttctcattgtcacgagcacccaatgttctgaatattaatgaaacaatttccagcctcctttgcaggcttaaaatattsagcatcagacatactgctttgttcccatttcagccaagtttaatttctcttaaccagctttgttgttgtaaagtaaaattaatgtatgatttcagtgtttaaatctcaattctcggcaattcacgacagattgcaagtgaatgtgatttgttcgttaacacctaatgggttgaaataatttattgcacaaacatttccaggaaaacgaagccacttgagcaagagcaaagcaggaaat

SEQ ID NO: 886894 - DNA, 632 bp, Homo sapiens
gtggctcataccccgtaagacctaatttcccggctctgaaccagagtccagctggagatgacctgatggcttcaggggatgtcccagggctattcatttctctttaaaaattttaaatctatttatttgttttcgagttgacaaaaaacgtatatatttgccatgtacaacatggtgtcttgaaacatgtatatgtgccgggcgcgggggctcacttctgtaatcccagcactttggtaggccgaggtggacagagcatgaggtcaggagatcgagaccatcttggctaacayggtgaaaccctgtctctactaaaaatacaaaaaattagccgggcgtggtggcagtcgcctgtagtcccagctacttgggaggctgaggcaggagaatggcatgaacccgggaggcggagcttgcagtgagccgcacgccaccgcactccagccttggtgacagagtaagactccatctcaaaaaaaaaaaaatatgtatatgttggggaatggctaaattaagccaattaacatacacattacctcacacccttatcatgtttgtggtgagaacacttcagatctactctctgagcaagttttcaaagtccaatacgttggtataaccatagttgccgt

SEQ ID NO: 886895 - DNA, 624 bp, Homo sapiens
gagagagatttaggaggcagataagcctagtgttcactgtgggggcagatgccttccccatctgtgcagacgattggcccaagtggccatgatgacatggctcctacctacttcctaatggacctcagagaattaaacagcgaggacaacagcgagtgttgtctctcagacccttggctttttcaggactgcctgacctttctttgtccttatttggcttcaagtcaagtcagctcaaccctgattgagcaccggcaatgagtcatgtctgtgaaggcgacacagcccctgtccttgaggagcttygagtccagtgactgtcacttcagtggaagttgggctggacacagtcacatgtgtatgccagacatgaggctttgttctcattacaataattgccctgcattattctagcaattaagcttctccacgtgtgtggatgcatgttcccaattttttctggcctctaccgaacacaatgttaatatttgagagcagtcctaaaaaattaaataattatacaaactgaattaggatagcataatattaccaatcagagtaatgtggctttgtaatccagtgtgatgtcatatgaatctacaaattaggaagcatgtcagagga

SEQ ID NO: 886896 - DNA, 605 bp, Homo sapiens
taattttgcatgcattttatattttacatagcatatatagtagtggttctcaaacttagcatgcatcagaattacctggagagcttattgaaagacaaattgctagaccttacctccagagtttccatagtttattagttttagcgtgggacctgagaatttgcatttctaacaagtttccaagccctgcaactgctgctttggggacaataatatgggacccattaatatggtgagtgctaaggtgcactacacagattcccttttgagagtagrgcattcatttcctaactgcaaggggtactggctgtcatggtttccaggccctctgggagttgccctcagttgatgggcactgcctcacttaaaactccatttctgtccctagttgtagctcacataaaatgacaggttaatgcagggagtacaaaggcccatccttcttgcttcagttcaggataactgaggggccaccccagctcagaggcctctgctgcaattgcatcacagctcagcttttctctacttaatctctcttcccttactcccaagagcactctctgattaacctgtgtctcaaagtcttttccagagaatttggcctg

SEQ ID NO: 886897 - DNA, 623 bp, Homo sapiens
tgatttataactctgctagtacaagtctatgctttcttaaacacagttccctaatccaaaattaaaacctgtcctgaccagaagctttttggaacagagactgatctggattgatataaggttattttgccttttaaaaaaatcttamctaatatgaatattcatatcttttacagtagaactattcatatatttgaatagactaagctatctgagaccttacaatggatattatatattgcatgtaaactgtattttggtttatttcccttattaaagtgaagtgattctaaatcttaaaacacattttgccctaaggatttcaaatgagtgatcgttgacctggatttttatttttgagatatatcaagaaaaaaatttccaatgaaaatatgataggtcctgtgttagagtagttcttataaaatttagtgatctttgttatgatctttgtttcagttgttatgaaagaatagttgtggtcaggtaaatctttgtggagtaaagcttgatatattgggaagaactttttactaacattatttatcacttacaaggaaccatgcacattataagaaggaagatagtagtagcagtaaaaaatagcagtgagcggtgtttcc

SEQ ID NO: 886898 - DNA, 443 bp, Homo sapiens
aaaaaagaaaagaaaaatataataagcacattatattttatcctaaattatatatttttatgaaaaacaaatgtgtattccaaagaaaaatattaatgagtagcattgctttacattttctacatacctttttgctgtttggcttcatgagaataattggattctatgtttgcttctacattcaatttattgtaatatattgttttggttgaattatataagaaattctcgccatakgcacatatatagttagaaaagagaggagtatcgtaataaattattcagataattatagatatttttctttgatattgtgacaaaatttgttgtgtgatgattcttaaaggttagttgaatgtagaatttcaaatctccaaatagtgctgacttgactgcagttattcaaaggttagactgggctaggaagttgaagatgactgact

SEQ ID NO: 886899 - DNA, 599 bp, Homo sapiens
ggtgtagctgccacacctttgtaccgtgtgtagcacaaagaggtgcagcccttgtgatcacagagtgttctaaattgcataatactttctaaaggcctgtagcaatctcagtgcatttcttaaattctatgagtgccccccatttactttgattttatkttggcctaactagatggtttgtttctctgtttagttttggttgctggtttattttggagagttcacacttcactgggaaagttttaagttttcttgtatagaaataacttggtaatgttacattattagacattattataacaaactcttgattatatggcatcagataagcttgtttatggattgattgtaaaaactctgaaaaatgtaaattcttagaagtcatcaaaaaataaacacattaaaataaatctgttatttggaactctatagtaaccaacaaagcccagattctctctattgcacagttggcacactctttccccctcagaaaggaaagaaaaaaatacaggtttagtatctcttatctggaatgcttggaaccagagtgtttcagatttgggattttttctgattttggaatatctggttatacataa

SEQ ID NO: 886900 - DNA, 625 bp, Homo sapiens
atacctatacacatatttcattttattgtccttcactttattatacttcacagttactatacttgttgcaaattcaaggctgatggcaaccctgcatcaagtaagtctattggtgccattttctgaacagtatgtctttccttgtgtctttctgtcacattttggtaattctcacaatatttcaaactttttcattattattatatctcttatggtgatctgtggttagtgatctttaatgttactattgtaactgttacaaattgccgtgaactgagcacatataagatggcaaacttaatcaataaatgtgtgtgtttcttcttactgctccactgactggctgtttccccatctctgtccctttcctctggcttccctcttccctgagacacaacaatattaaaattaggccaattaataaccctgcaatggcctctagatgttcaartaaaaggaagagtcctatgtctctcacttaaaatcaaaagctagacatgattaaccttagtgagaaagccatgtcaaaagccaagataggccgaaagtgaggcctcttgtgccatacagttagccaagttgggaatgcaaaagaaaatttcttgaaggaaattaaatgtgctac

SEQ ID NO: 886901 - DNA, 596 bp, Homo sapiens
aacatcgctacctcagagattttattatgtatcacacattcttttatgtgcatacttgcattagctcatgtgaatctcacaactattcacaagtattatttccattttagtagtgaggaaactgagacccagaggagtgccttgaaaatagatgtgtttgactccaaagcccaygctctttattgctgggatactttataatgctttcgtttagttcagggtcgcaaaagaaacaaagctcttgggtttttgttgttgttgttgttgtcgttaatggtacatttatttcaagtggaaactttagaaaattgacaagcttttcactcatgtctcactgatgtcttccatgtgcctttgagtcttccttggccagtcacttatgtttttaagtaggattcagaatcagaggtggtcacaccacctacctcaaaggctgattcagcttcggactacatttttggactaatgtttaagactcagctgggccaggctcagagtccatcctgtgttttccacatctgatttcttacatagtgaaggacttgcttttgatatatacctagaagcagccattgaataaaagaccttggatgtaa

SEQ ID NO: 886902 - DNA, 700 bp, Homo sapiens
atcatttatttaccaggtaagctattgttgcttattcatttcatgtgtttgccttcttctcacagaatataaccttcatgagtgcgtacatatatataataatatacacattatgtaatgtattatcaatggtgattagaaccaaaaacacaaaagagtggaagagactgacttggaacagtatatatagagagaagagggcctagaatagaaccccaaggaactaaaacattttgggagcccatgtggtggttactctatttcttgattggtttagttcactgccatagtccaccatctatagtagagcatggcatactattcaacaaagttgttgaaaggagttccccagtacttcaccattttcctcaacctcccaaataaattttctttttcactcttagaatatttttaaattgcagaaaaaaataaaaactgtctaatgaaaattctttaacattctagtccctttgaccaagcttataaagtgcccatgtatcttttttygtatctcagaaaattgattctcctggtgtttgggggaaagattttgttacatattttttttttgttttgaattcctttattttggatcctgttccattctcttcatcttaagactttgatctattcactctctctcctttattggtgcctttcttcaacgtgagtctacttgtgtttctcccatttaaaacta

SEQ ID NO: 886903 - DNA, 570 bp, Homo sapiens
tattgccttgtagtatagtctgaagtctggtagcttgatgcctccagctttgttcttttcgcttaggattgtcttggctatttgggctcatttttggttccatatgaattaaaaattttttttttctaattctgtgaagaatgctaatggtaatttaatgggaatagcatcaaatctataaattgctttgggcagtatggccattttcatgatgttgattcttccatgatgttgaacctcctgagcatggaatgtttttccattagtttgtgtcctctcagatttctttgagcagtggtttgtagttctctttgaagacgtccttcacttgccctgttagctgtattcctaggtattttattctttttgtggcaattgtaaatggaacttcattcacaatttggctttctgcttgcatgttgttggtgwatatgaatgctgtagattttgtatcctgagactttgctgaaggtgcttatcagcttaagaaagttttgggctgaaaggatgggtttttctagatgtaggatcatgtcatctgcaaataaagacagtttgacttcctctctt

SEQ ID NO: 886904 - DNA, 570 bp, Homo sapiens
tcatgacatctggatatatgggacactataaagtgatgaaatattcaaaattttggcatcccaaaaggtgaatagacaacaaaagggttagaaaactatgtaacaaataatagctaaaaaagtcccaagtctagcaagagatttagacatccatatacaagatttccaaatagatacaatgtagaaaggtcttctccatggcacattacagttgaactgtcaaaagtcaatgacaaatagaaaattctgaaaacagtaatcaaaaagtatctgtcacctataaaggaatccttatcagtaacagcraatttctcagcagacactttagatgccaggaaagaatgagatgatacattcaaagtgctgaaggaaaaacaaaacaaaacaaaacaaaaaaacactgtcagcgaacttactctcttcccccttagaagaaacagaatggctaaataaatttttaaaaatgacctaactgtattctgtctaccagaaactcatctcacctataaaaacacatatagaaaaataatgagatggaaatagatatttcatgcaaatggaagccaaatg

SEQ ID NO: 886905 - DNA, 634 bp, Homo sapiens
taaataaataaataaaataaatccaggagttgttttttttaattaataaggtaaatagatcactagctagactaataaggaagaaaagagagaagatccaaataaacgcaattagaaatgacgaaggggatattaccattgatgcgacagaaatacaaatatccatcagagactatgatgaatacctctatgcacacaaaytagaaaatctagaagaaattgataaatttctggacacatacaccctcccaagactgaagcaggaagaaatgaaatcactgaacagaccaataatgagctccaaaattgaatcagtaataaatagcctaacaatcaaaaaaatcccaggactggatggattcacagatgaattctacaagatgtacaaagaagagctcatgccatttctactaaaactattaaaaagcaatgagtagaaaggactccttcccaactcattctatgagaccagcatcatcctaataccaaaacgtggcagggccacgacaaaaaaagaaaacttcaggccaatattcttgatgaactttgatgcaaaaatcctgtacaaaatactagcaaactgaatccaccagcacatcaaaaagcttatccaccatgatcaattaggctatat

SEQ ID NO: 886906 - DNA, 634 bp, Homo sapiens
taaataaataaataaaataaatccaggagttgttttttttaattaataaggtaaatagatcactagctagactaataaggaagaaaagagagaagatccaaataaacgcaattagaaatgacgaaggggatattaccattgatgcgacagaaatacaaatatccatcagagactatgatgaatacctctatgcacacaaactagaaaatctagaagaaattgataaatttctggacacatacaccctcccaaractgaagcaggaagaaatgaaatcactgaacagaccaataatgagctccaaaattgaatcagtaataaatagcctaacaatcaaaaaaatcccaggactggatggattcacagatgaattctacaagatgtacaaagaagagctcatgccatttctactaaaactattaaaaagcaatgagtagaaaggactccttcccaactcattctatgagaccagcatcatcctaataccaaaacgtggcagggccacgacaaaaaaagaaaacttcaggccaatattcttgatgaactttgatgcaaaaatcctgtacaaaatactagcaaactgaatccaccagcacatcaaaaagcttatccaccatgatcaattaggctatat

SEQ ID NO: 886907 - DNA, 634 bp, Homo sapiens
taaataaataaataaaataaatccaggagttgttttttttaattaataaggtaaatagatcactagctagactaataaggaagaaaagagagaagatccaaataaacgcaattagaaatgacgaaggggatattaccattgatgcgacagaaatacaaatatccatcagagactatgatgaatacctctatgcacacaaactagaaaatctagaagaaattgataaatttctggacacatacaccctcccaagactgaagcaggaagaaatgaaatcactgaacagaccaataatgagctccaaaattgaatcagtaataaatagcctaacaatcaaaaaaatcccaggactggatggattcacagatgaattctacaagatgtacaaagaagagctcatgccatttctactaaaactattaaaaagcaatgagtagaaaggactccttcccaactcattctatgagaccagcatcatcctaataccaaaacrtggcagggccacgacaaaaaaagaaaacttcaggccaatattcttgatgaactttgatgcaaaaatcctgtacaaaatactagcaaactgaatccaccagcacatcaaaaagcttatccaccatgatcaattaggctatat

SEQ ID NO: 886908 - DNA, 690 bp, Homo sapiens
cattaaattcaggtgtaggggcttttcatttcaaaaccagtaaacctgccagaattcttaaggaaaaagaagtcccaaaggtgaagttctgtcttctttgctttacacagttacaggtgggaaaatcagtgaggtggtataatcacacagaaaggattaatgccacatgaatattctcctatgattgtgtagctggtgagcctccttatgcttattctcagaaggctgtcttgataactttgccttacaaacctctaatgagtgagtgacagaggatgagggaaagtggaggagrgggcagcaagtgaaggttgatctactgccaataactagccaggctctgagcagggatctacccattgggagcaagcctggaaaagcgcattaggactttttctggagggtaagctgtaaactgtcagccatagctgttttaaatgactagcaaacacctccagggtctcctttgtcctttgaaggaagattatttttggtttaaagtttggagtagtaaagccatgtacaatgtagtgtgtaaatgaaacagtaaaactaactttggcatacaacaatttagtggaaattgatgaatatcactaatgctatttggcactttttaagaaggtccttgtcaaggggctttataatttaaacaaaaaagtgctctgtccttgtaaattatattctggt

SEQ ID NO: 886909 - DNA, 615 bp, Homo sapiens
aatgcaatctcaataaaattccagcaagctattttgtaaatatcaaccaactgattctaaagttcatgtgaaaatgtaagagatttagaatagctaacacaataccaaagaagaacacagttggagaattcacactacttgatttcaagacttaatataaagctacagtagttaagaccttattatactggggaaagaatagacacatagaacgatggaaagaatgtagagcccagaaattgaccaacacatatgtagtcaacttatctttgacaaagaagcaaagaaaattcaatggagaaagaagagccttttcaacaaatagtctagaacaattagatgtccatgcaaaaacaaaaaaaacaaaacaaaacctggagagaaaaattacatctttcacaaaaattaactcaaattgcattatggacytaaatgtaggatgcaaatcataaaacttctgtatgaaaatatcagcaaaaatctaggtgaccttcattatagtgatgagtgtttagatacaacatcaaaagcacaatctatgaaagaaaaaaattgatgtcattaaaattaaaaacttctgctctgtgaaagactatttatttgcagaattaaaag

SEQ ID NO: 886910 - DNA, 677 bp, Homo sapiens
ttagaacagtggcaaaaggacgtactttatagattctttagaacattatgtggactttgcttgtcacatgcagtgcagtgagaatccatagaagagttttagattttaagaagagcaatcttatgatctaatttacttctagagggatcattcaggctcctatagaaaatttattgtagagaggcaagtggggagatttgttaggcatctattgcaatagtgtggcaaaataatgggggatttmgccagaattagatgtttttgccagtgcctcctctttgatgattttctccaaatagacatcgattttctggctgaatttctctggtcacaggaaacttgctccctactgtacttctttgggtatgctcagatctttagttattccttttacttttactgttcctattactgttccttttacttttcctattcgttttactgagacagagtttgtcttctataggtttctttccttcatcattttggtcctaccccttaagttaattaaaaacaaatctttttcctcccttcgctaccatgccatcttaggcccctcttctccagaatcagtatctccagtccctggctcattcattgcttaccattgtcccagtcacacctctccatcctgagcaccctcctgtgaaggctctttagctgggagagtggtatct

SEQ ID NO: 886911 - DNA, 689 bp, Homo sapiens
ttgtgtctagcagtgagcaaactcccaactaatatgttctacttatgcagagcatgaggaccttcacacgggcgtccaatacacatacttcctcctctgctcaccatctcacctaatgggaaaatgcctaatatgaaactggagaaagcttagaatgattaaaaaaaaaaaagcattttaagggaggagagagggcatttgaaagggaaatttcaggaggataatccttttattttgtgaaatatatttttcaagtgagaactgaagaatagtcttgacaagtttagagaagatgtaaaacaattcatattgcccctttcttgatgagtcacttggggtaccatcaaggtcacatggaaagattttataagggttagaatcagtccatttttaagactagcctatcttgggcaatagataatagaggtggcctggttatagggcaaggcatgraaaactagagagaaacttaatggatgacagagtcattcagatgtcattcattatatttaggctcttatgaaggtcagatggaccaggagggtctgatatcctggaagatatcagtttggtattgcaacactaagtaaaaagcaagtttcataagaggatggccagacaatgggctctgggttcaagtgttaaggagtaacggttaaaaatgatgtacacttctgaagaatggactc

SEQ ID NO: 886912 - DNA, 658 bp, Homo sapiens
tgtgaagaggaaggcgtgtttctcaactgattctatgaggccagcattattctgatatcaaaactagacaaagacattacaagaaaaactacacaccaatctccctcataaatatagattttaaaattatcaacaaaattttatctaactgaattgaactctctctctctctmtatatataaatagttggagggagatatatacacacattaaatttatattggatatactatatctaactatatacatatttatttaatagatatagtatatccaatataaatagttggctatactatatccaattttacacacacacacacacacacacacagacatatatatatatatatatacacacacacacagaagtccaagaggagtttatcccagaaatgtaacattggtttaaaatttgaaagccaacctctgcaattcgctatattaacaaactaagacagagaaaagtcatatgatcatctcaatagacataaaaaatatttgacaaaatgcaatggtcatccttgttaaaaactcttagcaaactggaaatagaagagaaattccaagacctaataaacaacatctattcaaaatctacaggtgacatcatatttaatggtacaagactgaatgttttttgctgagagctggagca

SEQ ID NO: 886913 - DNA, 659 bp, Homo sapiens
tttccaatactacagacaataacaaatcaaagaaataaacaaataataaaattaagcatttatttaaaaaaaatccttgaaagcatgcattctctaatgtttacatttttaaagcaacttttgaagcttccagagaattgtgaggttcttggggacagaggctgggtcattcctcttgtgtttctgtgatccctagaaaggcagtaggcaggtagttagttttcaataactgtttcctgtttctgtcagatgctccccatccctctttgagaaaaatcttgctctaaggagcaaggacaatagagatggacctgtgtttcctgtatgggtcttgcacaaagagggaatgagaagaattttaaagtacttgctgaaaaagsctccaagcttttgatttttcaaaatttttactgctccggagctaaagcacaatattcagaaaatcataatgcctgcttcactatatttgcctgtgaagtccccatttgatcaaaataatgctagacagtttctctcttgatctgtttagaatcaagataaggtcaggtgttaattaatgttgaattaccaaaaattcccatggaaatgcatatgacatctacattataaccataattagctaattaaccaatcaattataatgattaatgtgatcataa

SEQ ID NO: 886914 - DNA, 601 bp, Homo sapiens
atgcgtcttcatgagcctgcatctcagggttaattcttccaagtcctgcccttagtctgcttcctactaaggactcttcctcctcctttctctttcttggaatagtcccaggactttattgtctcacgagacagagactttgccttcttcatagctttgccacaggcagttgatcaaattgcatggatgggraattctggtccttattagaaaaacagagaacttctcccagatgtgacaaatgttacacacacttgctctcattccttctccctgtgtctataaaaacatcactaaccaattactgcttctttccccttgggcttgggcatagctttagggtcttcagcacagtcttccaaacagctagtaccaatccactaaagatggcacttaagatgaaactgattgctcaaactagcctccaggttgtctcatcgatagttcttttgagaatataaccttagtatcctcccatggtaagtggcaacgtggtttgaagcttaattttcagataaataatgaaataataggagctgtaaagacagatagagatagacagaaaagttttaggtacactgcctacagaagagttgggtaa

SEQ ID NO: 886915 - DNA, 521 bp, Homo sapiens
gcgcttatggtctggaaggctgtgtcagttcaggagagtctggcaaaagccccagtcatctactcaaccctggcggaacatgaagccttgcacagaggcagaggagacacaggaaaacaaaagccagagaagccttgcagagatgcagaggagacacaagaaaacccagcaaaacaaaagtcagagcagtcttgtaaattgcctgaattttkaatgttcttcaacccatttagatgacacaggtccatcaagaaagggtagaagtcttactggcttgaggtgtctaattaccacatctgatcaatcattgactaaattctaagctatattgaccttggtgaaaaccttagaaaaccaaccttagaaataaacgtaaaagagaaaaaaataaaactgagcagaaacatcaatgtcaacacactatggaagagaaactctgcagaattagtccaggcaagtcacacaacaaatgtataaactaagaaaaacaacaaaaaacaccctctgaggggcacaccaaa

SEQ ID NO: 886916 - DNA, 606 bp, Homo sapiens
cagccaaattaagcttcataagcaaaggagaaataaaattctttatagacagcaaatgtggagggattttgtcaccacaaggcctgccttataagagctcctcaaggaagcactgaatatggaaaggaaaaaccagtaccagccactgcaaaaacacaccaaaatataaagaccaattacactacgaagaaactgcatcaactaatatgcaaaataaccagctagcgtcatgatgacaggatcaaattcacacataacaatatttmccttaaatgtaaatgggctaaatgccccaattaaaaaacacagactaaccaattggatagagccaagacctattggtgtgctgcattcaagagacccctctcacgtgcaaaaacacacataggctcaaaataaaggtatggaggaatatttaccaagcaaatggaaagcaaaaaaaaaaaaaaaaaaaaaaaaacccggggttgcaatcctaatctctgataaaacagtctttaagccaacaaagattaaaaaaaaaaaaaaagacaaagaaaggcattacataatggtaaagggatcaatgcaagaagaagaggtaactatgctaaacatatatgcacc

SEQ ID NO: 886917 - DNA, 664 bp, Homo sapiens
caggccatttcccacctaggatttagtgggattttccactttccctagaaagagaataccgtctgtggctttatttgtaatcatcatcaggaaggtcctattgaaggagacagtgaagtaagaggggccatccttcgatcggactatgaacttggtggtggtagctgctgtggcctcagtgccctcttcactgacatccagcacagccttgtgggttgcctgccaagggaaaaacaaacatcagtggccctagtggagacacttttacttaactgagtaaactaaactgagtgyttttgccctggaatggtgatgtctaccttgaaaggattcaaggttcaaatgcctggcattgggtttactcaatacattgcagtgggtgttgactatggcccattggtccttacaccgggattgagatggttacaaacacagagcaggaagaccggagtgagtctcagttctgccacttatggttgcaaaattattaagatgctgcgtgcttcaggttcccgatctataaaaggtaataataactgcatatgccccgtaaggttattgtgtaaattaagagagatcatacaaagcaagtgcttgtggacttgccagcagtagtaattgctgcagttcttgcatggcagacatgggtttgatatgactaagg

SEQ ID NO: 886918 - DNA, 636 bp, Homo sapiens
ctgtgcctggctgtgaatttcttaatcctgagttctaatttgattgtgttgtggtctgagagactgtttattatgaatttcagttcttttgcatttatttgttgaggagtgttttacttccaattatgtgatcaattttggagtaaatgccatgtggcatcaagaagaatgtagattctgtttttggtgagggttccatatacatctatcaggtccatttgmttcagtgctgagttcaggtcttgaatatctttgttaattttctgtctcagtgagctgtctaatattgtcagtggagtgttaaagtctcccactattattttgtaggagtctaagtctctttgaaggtctctaataacttgctttatagatctgggtgctcctgtgttgggtgcatgtatatttaggatagttgtttcctctcgttgaattgaaccctttaccattatgtaatgtccttccttgtcctttatggtctttgctggtttaaagtctgttttgtcagaaactaggattgcaacccctccttttattctgttttccatttgcttggtagatttttctccatccctttattttgagcctctgtgtctcattgcatgtaagatgggtctcttgaagacagcgtacctatgg

SEQ ID NO: 886919 - DNA, 635 bp, Homo sapiens
tgagcaagtgtcagtaagtgtcagagctaaaatgcaaaagcagtttgatgcccacacgcttaaccacaacactgaattactctcttagcctctttgcaacttgggtgttactactactactactaaaaaaaaaaaaaaaaaaaaaaaaaaaaaaaaaggaagtagctgtttttctcacttgccctgactctagctaaccgttcttgacttctttgcattttatccatgcagaacaaagctatatttgtaatcgaactccarataaataagtacctgttctttagcagagtcaaaatctgaaaatgtttagctgaagctggtaaaatatttaaatccaataacgtcctgaatagaatgtaaggattctttcctttgttatcaaaacctaaaggcatccataggttcattccattctgcacttcagttgtttccttacaaactccccaccctcacccctacccctagtttctggggccaccagatagggacagcacctcctgggcaggagaacgtggagcatagtggctgcgcacacaatcagcagtgagttagcggaaaagaccacagaaatgttgggcatctggaattatagttcgtgtctgactgagaaatcttaggaagcccatttaattgtt

SEQ ID NO: 886920 - DNA, 603 bp, Homo sapiens
ttttgagcctcaattttaccatctatgacacaggaataatacaagcatgctttattttctgcagttaatgtacctgtgaaaacttgtgtgaattgaattgtggaaaataaaattacaagctttgaatatattagaaaaaatcaatattttaagaaacctcaagatgaatccttttgtcaagtgaagaatcttctttataccttatttttaaaaataaacccaattttagtattatattttttaaaactagaacacattttaaaagggaaagaatggtgatttttgtggtcctcatggccatgggcttccctctcctcttggaaggtttctcargaaccaccttgctctgctcagctccttgccgcagtgctgggttgggaaggtaaggtggccaaagaagggtctgtgcttgcaggatgattcctcaggcattaaaaacactgtgtgttactgagaggattaagggaatgggcagtagaaaccagcgctggggagatggaaggtaagaagaataggcggacttagggctgatgaggaagtttaaagcagaactggtagagtgcttgatgtgtttgagaaacaaatcgttgcatgtgatttaga

SEQ ID NO: 886921 - DNA, 611 bp, Homo sapiens
tttgctaaagctttatttacagacatgtggcagaccagacttagaccatcctgatagtttgcttagctttcaccaagattgttggagttgccctctaacttgagtttctttttctttctttttcttttttctttcttgagatggaatcttgctctgtcacccaggttggagtgcagtggtgctatctcagctcactgtaacctccgcctcctgggttcaagtgattctcccktctcagcctcttgagtagctgggattacaggcacacatcaccatgcccggctaatttttatatttttagtagagacggagtttcgccatgttggccaggctggtcttgaactcctgacgtcaggtgatcagcccacctcggcctcctcaagtgctgggattacaggcgtgagccaccatgcccagcctaacttgagtttcttaatccaaagttgacactacgacatttccacacagaagtcagattaaaaaaaaacaaaaacaaaaacaaaaaaaaaaacagatcataccttcttgtaacataacatccttgaattgctttctactgcaaataaaataagttataaactctgcatcttggcctagaaatttctgcatga

SEQ ID NO: 886922 - DNA, 646 bp, Homo sapiens
ttccacagtaaaacgtaagtttcataagggcatacatttttattcttttatttaccactctatccctggctccttcaacaaagcatagccatactgggtgctcgatatggtttggtcatgtccccactccaaatctcatttggaaatgtagctcccataatccccatgtgtcatgggagggacccagtgggaagtaattaaatcatggggggtgtgtttttcccatgctgttctcatggtagtgaataaatctcatgagatcagatggttttataaagggcagttcccctgcacatgctttcttgcctgccatcatagaaaacgtgactttgcccctcattcgcctttccccatgattggattttaaggtctcaccagccatgtggaactgtaagtccattaaaactctctttcctgtttaaattattggyaatgtgagaatggactattacagtaaattcatactgggagtggggcactgctgtaaagatgccccaaaatggggaagtgacttttgaactgggtaacaggtagaggatgaaaaagtttggagggctgagaagaagataggaaaatgtgggaaagtttgaaacttcctagacacttagaggactcagaagacaggaagatgtgagaaagtttggaa

SEQ ID NO: 886923 - DNA, 646 bp, Homo sapiens
ttccacagtaaaacgtaagtttcataagggcatacatttttattcttttatttaccactctatccctggctccttcaacaaagcatagccatactgggtgctcgatatggtttggtcatgtccccactccaaatctcatttggaaatgtagctcccataatccccatgtgtcatgggagggacccagtgggaagtaattaaatcatggggggtgtgtttttcccatgctgttctcatggtagtgaataaatctcatgagatcagatggttttataaagggcagttcccctgcacatgctttcttgcctgccatcatagaaaacgtgactttgcccctcattcgcctttccccatgattggattttaaggtctcaccagccatgtggaactgtaagtccattaaaactctctttcctgtttaaattattggcaatgtgagaatggactattacagtaaattcrtactgggagtggggcactgctgtaaagatgccccaaaatggggaagtgacttttgaactgggtaacaggtagaggatgaaaaagtttggagggctgagaagaagataggaaaatgtgggaaagtttgaaacttcctagacacttagaggactcagaagacaggaagatgtgagaaagtttggaa

SEQ ID NO: 886924 - DNA, 658 bp, Homo sapiens
atcagtgtgacctgaatgtgagaaatggagtcaaaggagatcattttggagcttcaggatttgattgccctgctgctggatttctgacttgcctgaggcctgtagcccctttgtttggccaattttgcccatttggaacaggtgtatttacccaatccctgtactcccattgtatctaggaagtaactagcttgcttttgattttacaggctcataggcagaagggtcttgccttgtctcagattagactttgcactgtggacttttaagttaatgctgaaatgagttaaaactttgggggactgttgggaaggcatgattggtttttaaatgtgaagacatgagatttgggagggggcaggggcagaatgatttgttttggctgtgtcttcacccaaatatcatcttgaattttaactcccatgatacccaygtatcatgggggggatctggtgggagataattgaatcatggatttgggtttttcccatgctattcttatgatagtgaataagtctcaagagatctgatggttttataaaaggaagttctcctgcacatgctctcttttctgccaccatgaaagatgtgcctttgctcttcctttgccttctgccataatcgtgaggccttcccagccatgtgaaactgtgagtcc

SEQ ID NO: 886925 - DNA, 466 bp, Homo sapiens
ccagccatgtggaactgtgagttacttaaatctctttcctttataaattacacagtcttggttatgtctttattagcagcataagaatggactaatacataatacagtaaattggtactggtagagtggggtgctgctgtaaagacacctgaaaatgtgaaagcaactttggaactgggtaacaggcagagattggaacagtttggaaggcttagaagaagatagacaaatgtgggaaggtttggaactccctagagacttgsagggctcagaagacaggaagatgagggaaagtttggaacttcctagagacttgttgcatggctttgacaaaaatgctgatagtgatatggacaacgaagtccaggctgagatggtctcaggtggagatgaggaacttgttgggaactaaagcataggtgattcttgctatgatttagcaaagagactggtggcattttgctcc

SEQ ID NO: 886926 - DNA, 655 bp, Homo sapiens
aataagatttaataacattcccaaaagatttcgatgggaattgcaacagggtagcaacttcagtaaaactgacaagcttgcaagaataagctttctaattgtttcttcaaatattttatatccatcaaaatatttttttctatttttccagacagttatttttttccacttttttcttgtccttactttgttaactttccacttttacatttattttgtgctgggtgcagtagctcatgtctgtaatccaarcactttggggaactaagaggagacggatcacttgaagtcaggagttcaagaccagcctgggcaacatgatgaaaccttatctctgtaaaaaatacaaaaaaattactcaggtatggtgatgcgtacttatagtcccagctactgggaggctgaggtaggagaatcacctaatcctgggaggtggaggctgcagtgagccatgattacaccacttcactccagcctgggaaacaggagtgagatcctgtctcaaataaataaataaatttattttgttgctaatatgaataaaaatatttttcatgtgtgaagggttatcaacatgaaatgaattgattgattaccatctttgtctacagaaactgctgaacttagttaattttaagatttatagtttttccct

SEQ ID NO: 886927 - DNA, 655 bp, Homo sapiens
aataagatttaataacattcccaaaagatttcgatgggaattgcaacagggtagcaacttcagtaaaactgacaagcttgcaagaataagctttctaattgtttcttcaaatattttatatccatcaaaatatttttttctatttttccagacagttatttttttccacttttttcttgtccttactttgttaactttccacttttacatttattttgtgctgggtgcagtagctcatgtctgtaatccaaacactttggggaactaagaggagacggatcacttgaagtcaggagttcaagaccagcctgggcaacatgatgaaaccttatctctgtaaaaaatacaaaaaaattactcaggtatggtgatgcgtacttatagtcccagctactgggaggctgaggtaggagaatcacctaatcctgggaggtggaggctgcagtgagccatgattacaccacttcactccagcctgggaaacaggagtgagatcctrtctcaaataaataaataaatttattttgttgctaatatgaataaaaatatttttcatgtgtgaagggttatcaacatgaaatgaattgattgattaccatctttgtctacagaaactgctgaacttagttaattttaagatttatagtttttccct

SEQ ID NO: 886928 - DNA, 617 bp, Homo sapiens
ggatttcataccagtcccaaggtgctctgaggccattatttgcacataccgaatgagcatctatttatataggtggctacagaaacaccactctccaggcatttggtaaaccatatctaatacatttatttttcatatgtttattcttaaggctggaggaagaagttggccatcagggttatctattgtccctgtttgcagatgacatgattgcatatctagaaaaccccatcgtctcagcccaaaatctccttaagctgataagcaacttcagcaaagtctcargatacagaatcaatgtgcaaaaatcacaggcattcttatatgccaaaaacagacaaaaagagagccaaatcatgagtgaactcccattcgcaattgcttcaaagagaataaaatacctaggaatccaacttacaaaggatgtgaaggacctcttcaaggagaactacaaaccactgctcaacaaaataaaagaggatacaaacaaaaaggaagaacattccatgctcatggataggaagaatcaatgtgaaaatggccatactgtccaaggtaatttatagattcaatgccgtctccatcaagctaccaatgactttcttcacagaactgga

SEQ ID NO: 886929 - DNA, 622 bp, Homo sapiens
acccaaaggattataaatcatgctgctataaagacacatgcacacacatgtttattgcagcactattcacaatagcaaagacttggaaccaacccaaatgtccaacaatgatagactggattaagaaaatgtggcacatatacaccatggaatactatgcagccgtaaaaaatgatgagttcctgtcctttgtagggacatggatgaagctggaaaccatcattctcagcaaactatcgcaaggacaaaaaaccaaatatcacatattctcactcataggtgggaattgaacaaggagaacacatggacacaggaaggggaacatcacacaccggggacagttgttgggggagggggagtgatcacattaggagatatacctaatgctaaatgacgagttaatgggtgcagcaygccaacatggcacatgtatacatatgtaacaagactgcacgttgtgacatgtaccctaaaacttaaagtataataaaaaaaaagaaagtttaaacttacgttcatcaaaagccattcttaaaggagttgtaagattagccacgaaatgagagactataatttcaacacatgtaattgacaaaaagtagtatctaaaatgcataccaga

SEQ ID NO: 886930 - DNA, 581 bp, Homo sapiens
taatgacaaaatgtgagaaaggggaggttcttatatgctaataatgttctatttcttgaacttactgagtattacacagatatgttccctttttaaaagtatttaataatatgtacattttcatttgtgcatttttaatgtcttatttctttctttctttttttttttttttttttttttttgagacagagtcgcgctctatcgcccaggctggagtgcaatggcatgatctcggctcactgcaacctccacctcctgggttccggtgattcgtgcctcagcctcccgagtagctaggactacaggcacgcaccaccgtgcccgactaatttttgtttttcagtagagacgggatttcactrtgttggccagggtggtcttgatctcttgacctcgtgattcacctgcctcagcttcccaaagtgttgggattacaggtgtaagctactgcgcccaggctttaatgttttatttcaacaaaaaatttacttaacacaaaacaaactgcagggctgatgaaaatatagttcagaagaaaagttttagcttcatcttttcctctcttcactgacctgctatac

SEQ ID NO: 886931 - DNA, 636 bp, Homo sapiens
cagttaaggcaggaaccggccatctggatgtgtacgtgcaggtcacaggggatatgatggcttagcttgggctcagaggtctgatattcctgtcttcttatattaataagagaaagaaaatgaaatagtggtaaagtgttgggacggtgaaaatttttggggggtggtatgaagagataatagacaatgtttctcagggctgcttcgagcgggattaggggcggcgtgggaacctagagtgggagagattaagctgaagaaagattttgtggtaagggrtgatattgtgaggttgttagaagaaacatttgtcatttagaattattggtgatggcctggatacagttttgtatgcattaaaaaactaaacggaataagagaaggagaaaaacaggtatttaaggactaagaattgggaggacctaggacatctaattagagagtgcctaaggaggttcgcatagccttgccagcaaagattatttatttactttaagagttaagagtggcggtttggggatagcaccaggagatatcagctgtgatgtcttggagaaacagtgtaaactggcagcgtaaacaagagcagggcatgtatgagtagttgagaatggtgaataggagtatgactagaca

SEQ ID NO: 886932 - DNA, 636 bp, Homo sapiens
cagttaaggcaggaaccggccatctggatgtgtacgtgcaggtcacaggggatatgatggcttagcttgggctcagaggtctgatattcctgtcttcttatattaataagagaaagaaaatgaaatagtggtaaagtgttgggacggtgaaaatttttggggggtggtatgaagagataatagacaatgtttctcagggctgcttcgagcgggattaggggcggcgtgggaacctagagtgggagagattaagctgaagaaagattttgtggtaaggggtgatattgtgrggttgttagaagaaacatttgtcatttagaattattggtgatggcctggatacagttttgtatgcattaaaaaactaaacggaataagagaaggagaaaaacaggtatttaaggactaagaattgggaggacctaggacatctaattagagagtgcctaaggaggttcgcatagccttgccagcaaagattatttatttactttaagagttaagagtggcggtttggggatagcaccaggagatatcagctgtgatgtcttggagaaacagtgtaaactggcagcgtaaacaagagcagggcatgtatgagtagttgagaatggtgaataggagtatgactagaca

SEQ ID NO: 886933 - DNA, 601 bp, Homo sapiens
taccctgcctgtgtgggatatgagggagaaatatgggagcctcctcacttcaggtgtcactgctcagcatatatccaggctttgttttcatattggtcttgcaaagagccttttgggaacagttttcttattgaaacatactcagtgtttaaacctgcaggtgtggggtggtggcagtccacatggcatcctttgctctgtccctgttctcctgtctctggctattcaggttcccgtgaggatactgtcacccttgaataatggagcttgcataagaccaagcycctgtttttggagtccttgtgctgaggccacaagaacttccaaaaagttcactgaacatctaggaggaacaacagagggtaattggagcataaatttagttggctcagcacattcagatgtctgatcttggtggagttagtgtcctctggggcctgtcctattccatgaggaattccaaagagagagctcatctagggatttctcctttcttagttcttggatttatttcctcaccgttctccctgggtttccttactttcaagagcaacactcaagtcctgaaagcagagagatgcagcgaaggggtggttggttg

SEQ ID NO: 886934 - DNA, 649 bp, Homo sapiens
gatctagcaatcccactactgggtatctacccagaggaaaagaagtcattatatgaaaaaaacacttgcacatacgtttattgcagcacaatttgcaattgtgaaggatatggaactagctcaaatgcccatcaatcaaagaatgcatagagaaaatgtggtgtatatatatatatgtgtatatgcacacatatatgtgtatatatgtatatatatatatatgtatgtgtgtatatatatacacacacagaccakggacggaatactactcagctataaaaaggaatgaaataatggcattcacagcagcctggaaggagtcggacaccattattctaagtgaagtaattcaggaatgaaaaaaccaaacattgtatgttctgacttataagtgagagttatgctatgaggatgcaaaagcataagaatgatacaatggactttggggacttagggggaagagtaggaggagggtgagggataaaagactacaccttgggtgcagtgtacactgctctggtgatgggtgcaccaaaatctcagaaattgccactaaaaatattttccatgtaaacaaacaccacctgttccttaaaaactaatgaaaaaaataaaaaagacatgagatcaacctaaatgcccatcaatg

SEQ ID NO: 886935 - DNA, 649 bp, Homo sapiens
gatctagcaatcccactactgggtatctacccagaggaaaagaagtcattatatgaaaaaaacacttgcacatacgtttattgcagcacaatttgcaattgtgaaggatatggaactagctcaaatgcccatcaatcaaagaatgcatagagaaaatgtggtgtatatatatatatgtgtatatgcacacatatatgtgtatatatgtatatatatatatatgtatgtgtgtatatatatacacacacagaccatggacggaatactactcagctataaaaaggaatgaaataatggcattcacagcagcctggaaggagtcrgacaccattattctaagtgaagtaattcaggaatgaaaaaaccaaacattgtatgttctgacttataagtgagagttatgctatgaggatgcaaaagcataagaatgatacaatggactttggggacttagggggaagagtaggaggagggtgagggataaaagactacaccttgggtgcagtgtacactgctctggtgatgggtgcaccaaaatctcagaaattgccactaaaaatattttccatgtaaacaaacaccacctgttccttaaaaactaatgaaaaaaataaaaaagacatgagatcaacctaaatgcccatcaatg

SEQ ID NO: 886936 - DNA, 543 bp, Homo sapiens
tagggtgctgggctggttgttaggacagcctgggtgactggcctcattcatggcagaggcagcaggtggagagtggtcccggaaggatttgaggatctgcacggagtcaggcccggcccctggccccctgattgtcacctttctcaggatctgggatgctaattcagaaactcttgactgctggaggctgtgattgacccactgagagcttttaggcatgtggatgtgagtcagccaggattgatggaacattgactgctaattggactcctctgggaaggtagaggggggcaacacataatgccttcgctgtgggagcttcatcaagggcgtgattcttggacggacatcttttcctccctctttccacaggggcatgctacccctgtcattctaggagtttgctrtccttcagacacagctacttatgtttttaattccctcacaggatgaagacatgaagagaaagtttcaagatcttctgtctgaggaaaatgagtccacagctctatctcaggttctagcccaggtattcgtattcct

SEQ ID NO: 886937 - DNA, 513 bp, Homo sapiens
ctttctaatgactccttgttcatcaagatacctcttcaaattattctatttgtttcattcagtatattatctgtgtataccgatatgatattacactctttttttttttgagatggaatctcattctgtaactgatgctggagtgaggtggcatgatctgggttcactgcaacctccacctcccaggttcaagcgattctcctgtctcagccccccaagtagctaaaactacaggtgcayaccaccatgcctgtctaatttttgtatttttagtacagtcagagtttcaccctgttgtccaggctggtctcgaactcctgacctcaggtgatccacccaccatggcctcccaaagtgctgggattacaggcataagccaccgcacccagcctgatattgcactcttggattttgaacactgaatatctttttgaaagattacacctcttatctctttgtgcttcagaaattattttccttcaagtgttctaagagtctaatgaagaatgaagt

SEQ ID NO: 886938 - DNA, 645 bp, Homo sapiens
agcatgtgttggtgaggatgtggagaaaagggagcctttgtatactgttggcgggaatgtaaattagtacagccattatgaaaaataatatagaggtttctcagaaagttaaaaataaaattaccatatgatccagcaatcctagtactatttatatacccaaagaaaatgattcaatatgtcaaagaaaaatctgtacctcatgttcattgcaacattattcrcaatagacaagatatgaaaaaaacctaagtatccttaaacagatgaatgattaaagaaaatgtggtgtatatatacataatgaaatattgttcagccttaaagaaggaaatcatgtcctttataataacatggatgaaactggaggacattatattaagtgaaataagccaggcacagagagataaatgccatgtaatctcacttatatgtggaaactaaaaaagtcaaacacatagaagcagaaaatagaataatggttattaggggcggggggaggagggtagaactggggagatgtcggtcaaaggatacaaaaattaagataagcaggaagaacaagttcaagagacctattgtacaacatggtgactacagttaataacaatgtattgcatacttgaaaattgctaggacagtaga

SEQ ID NO: 886939 - DNA, 645 bp, Homo sapiens
taatgaatagttatgatcaatcaaacatttaaaaagtaaggataatagctcatattttgtgattggagtaacatttttcattttaaattttaaaagcatcaaaacgaaagcattaagcaataggcttaatatgttcttacctgtactgtagctttgggcatccatgctraagcaataaatattttctccttaaaactaaaaccagcaaagcacatcaatagatatgtggttaaaattcgaacacataatgccaaactcagagtggcaacagatatgcttacagcagatgaaaacataaataacaaaatatttgtgaagaagtgttctttatgcccaggaatatgatttttaaaacttttgaaagcattttaaggctactgtctcttcatgtgtttaatttttacataaaacaatcataataaaaaatgaatatgatggaggattctctgtaaagtgcaagacagtatctgatggtggagataccatgaaaaataagacacatgacatttatacaattctgaactaatagactttttttgaatacttttattattattaataatagtttactttttgagaaggattcttgctctgtcgcccaggctggagtgcagtggtacaatctcagctcactgcaacttccga

SEQ ID NO: 886940 - DNA, 666 bp, Homo sapiens
tgatctttgacaaacctgacaaaaacaagaaatggggaaaggattacctatttaataaatgacgctgggaaaactggctagctatatgtagaaagctgaaactggatcccttccttacatcttatacaaaaattaattcaagatggattaaagacttaaatgttagacctaaaaccataaaaaccctagaagaaaacmtaggcaataccattcaggccataggcatgagcaaggacttcatgactaaaacaccaaaagcaatggcaacaaaagccaaaattgacaaatgggatctaattaaactaaagagcttctgcatggcaaaagaaactgccatcagagtgaaccaggcaacatacagaatgggagataaattgcaatctacccatttgacaaagaaagaattcaaacaaatttacaagaaaaaaacaaccccatcaaaaagtgggcaaagatatgaatagacacttctccaaagaagacatctatgcagctaacagacacaagaaaaaaagctcaccatcactggtcatcagagaaatgcaaatcaaaaccacaatgagataccatctcaccccagttagaatggtattcattaaaaagtcaggaaacaacaggtgctggagaggatatggagaaataggaacgcttttacactgttggtgg

SEQ ID NO: 886941 - DNA, 442 bp, Homo sapiens
tgcagcacattgaatactctttcattaagctaaacaactattaaaaatgatatacaaatacatttactgaaaagaaacatgtttgtgatatacagttaagtgtaaaacaattcaggttataagaacatattaggccgggtgcgatggctcaygcctgtaatcccagcactttgggaggccaaggcaggaggatcacgatgtcaggagatcaagaccatcctggctaacacggtgaaaccctggctctactaaaaatacaaaaaaaaattagccaggtgcggtggcgggcgcctgtagtcccaactacttgggaggttgaggcaggagaatgacatgaacccaggaggcagagcatgcagtgagccgagattgtgccactgcactccaaccttggtgacagagcaagactccgcctcaaaaaaaaaaataaaagaacatattg

SEQ ID NO: 886942 - DNA, 442 bp, Homo sapiens
tgcagcacattgaatactctttcattaagctaaacaactattaaaaatgatatacaaatacatttactgaaaagaaacatgtttgtgatatacagttaagtgtaaaacaattcaggttataagaacatattaggccgggtgcgatggctcatgcctgtaatcccagcactttgggaggccraggcaggaggatcacgatgtcaggagatcaagaccatcctggctaacacggtgaaaccctggctctactaaaaatacaaaaaaaaattagccaggtgcggtggcgggcgcctgtagtcccaactacttgggaggttgaggcaggagaatgacatgaacccaggaggcagagcatgcagtgagccgagattgtgccactgcactccaaccttggtgacagagcaagactccgcctcaaaaaaaaaaataaaagaacatattg

SEQ ID NO: 886943 - DNA, 442 bp, Homo sapiens
tgcagcacattgaatactctttcattaagctaaacaactattaaaaatgatatacaaatacatttactgaaaagaaacatgtttgtgatatacagttaagtgtaaaacaattcaggttataagaacatattaggccgggtgcgatggctcatgcctgtaatcccagcactttgggaggccaaggcaggmggatcacgatgtcaggagatcaagaccatcctggctaacacggtgaaaccctggctctactaaaaatacaaaaaaaaattagccaggtgcggtggcgggcgcctgtagtcccaactacttgggaggttgaggcaggagaatgacatgaacccaggaggcagagcatgcagtgagccgagattgtgccactgcactccaaccttggtgacagagcaagactccgcctcaaaaaaaaaaataaaagaacatattg

SEQ ID NO: 886944 - DNA, 442 bp, Homo sapiens
tgcagcacattgaatactctttcattaagctaaacaactattaaaaatgatatacaaatacatttactgaaaagaaacatgtttgtgatatacagttaagtgtaaaacaattcaggttataagaacatattaggccgggtgcgatggctcatgcctgtaatcccagcactttgggaggccaaggcaggaggatcacgatgtcaggagatcaagaccatcctggctaacacggtgaaacsctggctctactaaaaatacaaaaaaaaattagccaggtgcggtggcgggcgcctgtagtcccaactacttgggaggttgaggcaggagaatgacatgaacccaggaggcagagcatgcagtgagccgagattgtgccactgcactccaaccttggtgacagagcaagactccgcctcaaaaaaaaaaataaaagaacatattg

SEQ ID NO: 886945 - DNA, 723 bp, Homo sapiens
tgattcacccacctcggcctcccaaagtgctgggattacaggtgtgtgcaatggcacagtcttggctcactgcaacctctgcctcctgggttcaagagattctcctgcctcagcctcccgagtagctgggattacaggcatgtaccaccacacctagctaatttttgtatttttagtagagatggggtttcaccrtgttggtcaggctggtcttgaactcctgacctcaggtgatccacctacctcggtctcccaaagtgctggggttacaggcacgagccactgtgcccggcctccaccttgagttaagcctttctgtttctaggtttctctcccctggtgactataaactccatcaattgtccatttgtggagccccacctgttagccaggcctggagacccagagagggaagatacaatcccagcagaggttgaaaagaggtggcctgcacaccagaacagacaggcagactgctgtgcctggaccatgtcacacagtgtatacaaatttagtagctgccaacatttaaaaattgggaatcacccttccagaaacagatttctggcttcactggaaaaatgagcagatctagcaatactgggcccatatttccataattagaatgcttgtttaatattatgtatcacataatttacatatgtgatctataaacacgtaagtgtatttgcattttagctgttaccattccctaaaatgtgg

SEQ ID NO: 886946 - DNA, 584 bp, Homo sapiens
ggaacaaaatggaaagtccagcaataagtagtacattgtggtgatttggtatacaataaaggcagtatttaaaatcatcaaaaaagaatagattatttagtaaatggcatttggacaattagctattcgtttgagaaataaaatttaatcctttttgtcacatcttaaaataaattttaactagttggaaaatatgaaggtaaaagagtgtaaaaagaaaatatggtttcttttgaaatggrgaatactttctaaacataacatatcatgcagagactgtgcactatggatgaaggctggtgaatttttgctacttgtaaaaatgaagaactgctgagtagcaaaggatcctaaagatggttgaagtgactaatgggattaagatttgcagcatacaaataaaaataaaatttacaaaacccagccttggcaagggtacagtgccaaatggcactgtatttccagcaggttcttctttctgggatccagttaggcaatatgtgtcaatatgcagattccctttgattaaggtacttcttgaaatttatcacaagtaggataattggggatgtgcaaagatgtat

SEQ ID NO: 886947 - DNA, 584 bp, Homo sapiens
ggaacaaaatggaaagtccagcaataagtagtacattgtggtgatttggtatacaataaaggcagtatttaaaatcatcaaaaaagaatagattatttagtaaatggcatttggacaattagctattcgtttgagaaataaaatttaatcctttttgtcacatcttaaaataaattttaactagttggaaaatatgaaggtaaaagagtgtaaaaagaaaatatggtttcttttgaaatggggaatactttctaaacataacatatcatgcagagactgtgcactatggatgaaggctggtgaatttttgctacttgtaaaaatgaagaactgctgagtagcaaaggatcctaaagatggttgaagtgactaatgggattaagatttgcagcatacaawtaaaaataaaatttacaaaacccagccttggcaagggtacagtgccaaatggcactgtatttccagcaggttcttctttctgggatccagttaggcaatatgtgtcaatatgcagattccctttgattaaggtacttcttgaaatttatcacaagtaggataattggggatgtgcaaagatgtat

SEQ ID NO: 886948 - DNA, 584 bp, Homo sapiens
ggaacaaaatggaaagtccagcaataagtagtacattgtggtgatttggtatacaataaaggcagtatttaaaatcatcaaaaaagaatagattatttagtaaatggcatttggacaattagctattcgtttgagaaataaaatttaatcctttttgtcacatcttaaaataaattttaactagttggaaaatatgaaggtaaaagagtgtaaaaagaaaatatggtttcttttgaaatggggaatactttctaaacataacatatcatgcagagactgtgcactatggatgaaggctggtgaatttttgctacttgtaaaaatgaagaactgctgagtagcaaaggatcctaaagatggttgaagtgactaatgggattaagatttgcagcatacaaataaaaataaaatttacaaaacccagccttggcaagggtacastgccaaatggcactgtatttccagcaggttcttctttctgggatccagttaggcaatatgtgtcaatatgcagattccctttgattaaggtacttcttgaaatttatcacaagtaggataattggggatgtgcaaagatgtat

SEQ ID NO: 886949 - DNA, 643 bp, Homo sapiens
tttttaggacattttgtcacatgtatagattatacaagcattaccacaattgagatacagaactgttccatcagcacaaagactattcctcatgttaccccttagcactcacaccctccctttaactctaatccctggccgccaccgacctgttcatcatcactataattttgtcactgagagtgttatataaatggaattatggaatgtatagccttttgacattggcttctttcagagagcataatgtccttgaaatccatctaaatcattgtatatatcaatagcccacttatttttaattgctgagtagcatctmattatatggacataccacaattggtttattcatttacccgtcaaaggacacgtgcaattacacaccactcttgaaggtcagggactaggaaagaatatgattgaaaaattggttacaatgaaatctggagaagaggtttttagatggacccctctgaatgagcaaataatgtgaagatatttacatcccatgtcatgctcaccaaagggtgacctcagcgaggaggattttaataatcaaattgataggataggataacctgctctgtagatgcacgtcagcttctttctccaaccacccctgtctttgcccagtgggcttctg

SEQ ID NO: 886950 - DNA, 509 bp, Homo sapiens
gtggtcactttctaaagggttttgtgcctcctttatactcttgtctccttctccttctttggcgggtccactcagttatttggctctgtttgggaaggctctgggaaaaatgccatttatctatcttttcaacttgaggggacatgctttcttcacagatttctttgggatggaaagttctttctttaacctgattactgtttctaggtgctgtaaattgctgatcattctcagtaaatcaccagcattytgttctttctcagtcttgacaaagttgccattgtgcatatgtgtatttgtgtgtgtgtgacagggaacatgcatggtttctgaaaaaaaaaaaaaaaaaaaaaaaaaaaatccttgccccttttagatttggaaattagcatagctaggctagccagatccctcttttggaggaaatgggaaagattggattgagcccttgtgtcaaggaaattgacttggctggatttcagggatccctgtggactggcccactaaag

SEQ ID NO: 886951 - DNA, 494 bp, Homo sapiens
tcactttctaaagggttttgtgcctcctttatactcttgtctccttctccttctttggcgggtccactcagttatttggctctgtttgggaaggctctgggaaaaatgccatttatctatcttttcaacttgaggggacatgctttcttcacagatttctttgggatggaaagttctttctttaacctgattactgtttctaggtgctgtaaattgctgatcattctcagtaaatcaccagcattctgttctttytcagtcttgacaaagttgccattgtgcatatgtgtatttgtgtgtgtgtgacagggaacatgcatggtttctgaaaaaaaaaaaaaaaaaaaaaaaaaaaatccttgccccttttagatttggaaattagcatagctaggctagccagatccctcttttggaggaaatgggaaagattggattgagcccttgtgtcaaggaaattgacttggctggatttcagggatccctgtggactg

SEQ ID NO: 886952 - DNA, 494 bp, Homo sapiens
tcactttctaaagggttttgtgcctcctttatactcttgtctccttctccttctttggcgggtccactcagttatttggctctgtttgggaaggctctgggaaaaatgccatttatctatcttttcaacttgaggggacatgctttcttcacagatttctttgggatggaaagttctttctttaacctgattactgtttctaggtgctgtaaattgctgatcattctcagtaaatcaccagcattctgttctttctcagtcttgacaaagttgccattgtgcatatgtgtatttgtgtgtgtgtgacagggaacatgcatggtttytgaaaaaaaaaaaaaaaaaaaaaaaaaaaatccttgccccttttagatttggaaattagcatagctaggctagccagatccctcttttggaggaaatgggaaagattggattgagcccttgtgtcaaggaaattgacttggctggatttcagggatccctgtggactg

SEQ ID NO: 886953 - DNA, 643 bp, Homo sapiens
tttttaggacattttgtcacatgtatagattatacaagcattaccacaattgagatacagaactgttccatcagcacaaagactattcctcatgttaccccttagcactcacaccctccctttaactctaatccctggccgccaccgacctgttcatcatcactataattttgtcactgagagtgttatataaatggaattatggaatgtatagccttttgacattggcttctttcagagagcataatgtccttgaaatccatctaaatcattgtatatatcaatagcccacttatttttaattgctgagtagcatctcattatatggacataccacaattggtttattcatttaccygtcaaaggacacgtgcaattacacaccactcttgaaggtcagggactaggaaagaatatgattgaaaaattggttacaatgaaatctggagaagaggtttttagatggacccctctgaatgagcaaataatgtgaagatatttacatcccatgtcatgctcaccaaagggtgacctcagcgaggaggattttaataatcaaattgataggataggataacctgctctgtagatgcacgtcagcttctttctccaaccacccctgtctttgcccagtgggcttctg

SEQ ID NO: 886954 - DNA, 643 bp, Homo sapiens
tttttaggacattttgtcacatgtatagattatacaagcattaccacaattgagatacagaactgttccatcagcacaaagactattcctcatgttaccccttagcactcacaccctccctttaactctaatccctggccgccaccgacctgttcatcatcactataattttgtcactgagagtgttatataaatggaattatggaatgtatagccttttgacattggcttctttcagagagcataatgtccttgaaatccatctaaatcattgtatatatcaatagcccacttatttttaattgctgagtagcatctcattatatggacataccacaattggtttattcatttacccgtcaaaggacacgtgcaattacacaycactcttgaaggtcagggactaggaaagaatatgattgaaaaattggttacaatgaaatctggagaagaggtttttagatggacccctctgaatgagcaaataatgtgaagatatttacatcccatgtcatgctcaccaaagggtgacctcagcgaggaggattttaataatcaaattgataggataggataacctgctctgtagatgcacgtcagcttctttctccaaccacccctgtctttgcccagtgggcttctg

SEQ ID NO: 886955 - DNA, 614 bp, Homo sapiens
acacaccactcttgaaggtcagggactaggaaagaatatgattgaaaaattggttacaatgaaatctggagaagaggtttttagatggacccctctgaatgagcaaataatgtgaagatatttacatcccatgtcatgctcaccaaagggtgacctcagcgaggaggattttaataatcaaattgataggataggataacctgctctgtagatgcacgtcagcttctttctccaaccacccctgtctttgcccagtgggcttctgagcaaagtggccatggtggcagggakagaagttatggcatatgctcagaagcaggaattttcactcaccaaggctgacctggctatggccactactgagtgcccaatctttcagtagcacagaccaacactcagcccttgatatggcaccatttcctgggggtgatcagccagctacctggtggcatgttgattacattggaccactgccatcatggaaggggccaggttttgttcttactagaatagacactctggatgtgggtttgccttatttgcacaaaatgcttctgccaaaactaccatctgtggacttacagaatgccttatccaccaccatggcattgcac

SEQ ID NO: 886956 - DNA, 614 bp, Homo sapiens
acacaccactcttgaaggtcagggactaggaaagaatatgattgaaaaattggttacaatgaaatctggagaagaggtttttagatggacccctctgaatgagcaaataatgtgaagatatttacatcccatgtcatgctcaccaaagggtgacctcagcgaggaggattttaataatcaaattgataggataggataacctgctctgtagatgcacgtcagcttctttctccaaccacccctgtctttgcccagtgggcttctgagcaaagtggccatggtggcagggatagaagttatggcatatgctcagaagcaggaattttcactcaccaaggctgacctggctatggccactactgagtgcccaatctttcartagcacagaccaacactcagcccttgatatggcaccatttcctgggggtgatcagccagctacctggtggcatgttgattacattggaccactgccatcatggaaggggccaggttttgttcttactagaatagacactctggatgtgggtttgccttatttgcacaaaatgcttctgccaaaactaccatctgtggacttacagaatgccttatccaccaccatggcattgcac

SEQ ID NO: 886957 - DNA, 572 bp, Homo sapiens
gtgggggccccttcaagatggctcctgtgtccatgtggcatgttcccatcacttacttttgacaaatttttcactttctggcataacaatgtgatcaggctcatcttgtatatactctagccctggagccatctgttcctttgaggatcccagattccttttagtggagaaagggtataggcagtatggtctgtgttttccatttgcttctgtgctgtgtgaagtgttaggcccaggctttgggaactatccatttcttggtagatgttgggtcaagtggaaatgttggggtactgaggaagaacaattttgatttgcaattggtaaatgaggaatatctgttcagagtgtgagtgagatgaaaattgttcttctrtttaatttgtttgtaaaccttggctagagttggcctgacagattgtgtccctttccctctggccatactttttttgggagggggctggcctgcattttaatgaacatgcacattttggcactctctcatgcttgcatttttagttgtgttctcgtctcaccatgctctgtaggtgcccctttaacattggttcatc

SEQ ID NO: 886958 - DNA, 669 bp, Homo sapiens
gcatatttggtgaaccttggccattctgacaactgttctggcagctgtttcttgtgtcattcttttctgggctttattgtaatgtaaacccaccaaacaagatttctggcagttctgtacatggaaaatataaggactcaatttgtaggtaagtggtttctatcctggagaaaacaaagcccatcatactggatgttcacatcagctgggctgtatgacaatgttggtgagtcagtgctttgaaggccctaaggttaaatgttttgaataccacccccatgcatagtattttgggttcagtggggctttaaaayatcctttattctccccacatcccatcatcttctgcaaacttaacaatttactatactttttctgaaaatgagccttttaatctcccaatccatagttggacgaggctcactttgaaaagtaaagaggttggcttattgataacttcaggcctgctccttgcttacatgctgatgtttactttttgaaatcgacctaaaaaatgtcaatactttgttatggttttgaaatgtatctgataattcctttctgggcatgttaaaagtcttaattttcttggcaacagaatattccttttagggttcagtatctgcttttcagggttatttctggaaagattttaagatagcttaaggg

SEQ ID NO: 886959 - DNA, 621 bp, Homo sapiens
tattgctgaaacaagttttatgaaaaaaggagagtattagcctgaggacaaaagtagtttggagttctgtagaggagctgccagtattaatgaactatcacttggagcctgcaacctgtcagccttgacttttcctctcctgggtcagccatcattggtcctccacattgcttttcactttgccagctaaggcttttcagtggcttctgatataggtcttgtttctcaagtgagtgtgccctcaggaggggaactgggcaatctgggaagggagctttgatttcacaaccatgtgggaatgccagtagaatgagaygccatgatgagtgtgggtacctgcccttcttggcaggagtggactagaaatcagttggtgttactgcaagcccagtccattgatgtgcacatccattgtgggaggatactactctcaatggctgcactgctgccagtgacgttaaaaagtcatccatgtaaaagcatgggtaactgcttaacatgtattaaatgaaaaagcaaaatacgaaatgatctaggtactgcacaagtgtcctaaatgttttgcatatcgtcaaaataatattaatataagaaagtgtaaatagctgtaataagttatgg

SEQ ID NO: 886960 - DNA, 654 bp, Homo sapiens
agtagaatgagacgccatgatgagtgtgggtacctgcccttcttggcaggagtggactagaaatcagttggtgttactgcaagcccagtccattgatgtgcacatccattgtgggaggatactactctcaatggctgcactgctgccagtgacgttaaaaagtcatccatgtaaaagcatgggtaactgcttaacatgtattaaatgaaaaagcaaaatacgaaatgatctaggtactgcacaagtgtcctaaatgttttgcatatcgtcaaaataatattaatataagaaagtgtaaatagctgtaataagttatggtgagattaaaagccatttctttttcttttttgcaccaacgtgttctttagtgttttrgcacatttgtagtagagttttgaagttatttttataaatcagatatgtaggattctaggtctgtgaaatgaaattgaatgaagaggatttgacagtcttcttaaacttctgggaaataaaggctgaaaacagcaggctttcatctgtgtatcttctgaagctgaaatgaacactatgcccattttgctgtatgtccatttgagtattttctaatacctttttggggagtaggtgtatgttcagctgaaagaatatttctaagtatccaagtccttaagg

SEQ ID NO: 886961 - DNA, 577 bp, Homo sapiens
acaacaggttttgctttttgtcttctctgatgatgaagtaaaatatgttggccatttggagaagtaaagatgtttgtaagtggggtgtttccagaccctctgaaatatatgcctcttttcttgctatgcctagtataatacctcactcattgtcaaccactagagacttagcttcttgttcttggttckactactaaattttttgacttgggcaaatcatttaaatatttctaggtgttctttaaggcttaaaaaccaaggttagtttagctttgtcattctttcttctcttaacctgtgacttggtttatttatggtttgttcatttcctttatatgtcttcagtgaaagcagcacagaaaatgactttggccatgtcagtcagccaacagcttttgagcagacactcttctggccctgggaattacagaaccacacaatacacacatgatctgtggcttttggagcctgtggcagggccctggatggggaagggtaagcattctgatgctatagtgtgatggaaacttctgtggggaagcataggattcagtgccagtacttgtgatgcaagtag

SEQ ID NO: 886962 - DNA, 661 bp, Homo sapiens
ttacttaagaagaagtatctagcatgggataaccgtggattgaaaagcaccaagtgcatcttatgaatgcatttctaggccctagcacagaacttgccactgtgggcagcatgggaatgttaggtaaaggtaatggatgaatggtctgtgttctaataacctgcctgacctgtctggaatttccaacatttatcccacacccaaaactcccatctttccaaacaatattatattgcccttcctgctaaactgtttgtgtacggaaaccttatgatatataacagcatggcataacctgatccatctttgcattctccacgttgatcatagctttacaaaatgacctttttcactactggagtcatgtcacagtacaacttccagcagtgttgctgttttgataatgataagggaaattaggtatcattttcttttgactcaggaagattattttcccattgtgcaagtttactagccatagagttaataaccctcatcacccttatatsaactggaatttttatattattcttggaaatgattttaagtggatatttaattcaaatcttgttactcttgtgtccactgtacgtactacttacctagtccttggtttagtctttaatgcccaaaccaaaattaaggccagttctctacttat

SEQ ID NO: 886963 - DNA, 631 bp, Homo sapiens
agtggcttaaaacaacatttatttgggccagtgtctgtggatcaagaatctgggtcctctgacactggatctctcacaaggctgcagtcatcgcaaggcttgactcagaaggattcacttcctagctcttccatatggctgttggcaggattcagttccacacagttcagttgttctcagttggacttagggcttccttgctagctattggttggagtctgtcctcagtcctttgccacacgagtctcttcaatatggcaacttgctttatctctctctctctctctcacacacacacacacacacacacgcacacgtgcacacccmcacacacacaccaggaggggattagacaagagcgtgaataacaagtggtgggaattattaggagccatttcatgagctgcccaccacagcaggtgtttaggtttggtgctctagataaaggggaggctactggggaaattgccttgaagctgtctgcaaggtgagcatagagtggacttagaataaatatttatttgtgaaggtttaggggaggaagacagatgcagcttatgggttgcaaaattacaactacttcttggtaccaccataggatatacataaaaagaaccctgcctagagtgag

SEQ ID NO: 886964 - DNA, 705 bp, Homo sapiens
tgttcagttttcatgtagtcgtgcggttttgagtgagtttcttcatcctgagttctaatttgattacactgtggcttgagaaactgtttgttatgatttccatttttttgcatttgctgaggagtgctttacttccaattatgtggtcagttttagaataagtgcgatgtggtgctgagaagaatgtatcttctgtttgtttggggtggagagttctgtagatgtctattaggtctgcttggtccagagctgagttcaagtcstgaatatccttgttaattttctgtctcgttgatctgtctaatattgacagtggggtgttaaagtctcccactgttattgtgtgggagcctaagtttctttgtaggtctctaagaagttgctttattaatctgggtgctcctgtattgggtgcatctatatttaggatagttagctcttctcattgcattgattcctttaccattatgtaatgtccttctttgtcttttttgatctttgttggtttaaagtctgttttatcagagactaggattgcaaacgctgctttttttttttttttttttttttttttttttgctttccattgcttggtaaatcttcctccatccctttattttgagcctgtgtgtgcttttgcacatgagatgggtctcctgaatacaacacactgatgggtctcctgaatacaacacaccgatgggt

SEQ ID NO: 886965 - DNA, 705 bp, Homo sapiens
tgttcagttttcatgtagtcgtgcggttttgagtgagtttcttcatcctgagttctaatttgattacactgtggcttgagaaactgtttgttatgatttccatttttttgcatttgctgaggagtgctttacttccaattatgtggtcagttttagaataagtgcgatgtggtgctgagaagaatgtatcttctgtttgtttggggtggagagttctgtagatgtctattaggtctgcttggtccagagctgagttcaagtcgtgaatatccttgttaattttctgtctcgttgatctgtctaatattgacagtggggtgttaaagtctcccactrttattgtgtgggagcctaagtttctttgtaggtctctaagaagttgctttattaatctgggtgctcctgtattgggtgcatctatatttaggatagttagctcttctcattgcattgattcctttaccattatgtaatgtccttctttgtcttttttgatctttgttggtttaaagtctgttttatcagagactaggattgcaaacgctgctttttttttttttttttttttttttttttttgctttccattgcttggtaaatcttcctccatccctttattttgagcctgtgtgtgcttttgcacatgagatgggtctcctgaatacaacacactgatgggtctcctgaatacaacacaccgatgggt

SEQ ID NO: 886966 - DNA, 703 bp, Homo sapiens
ctgatctttacaattaaactaactctggtaagcctagttaaggataaaagagaaaagtgaaaacatgcaacattagtaattagaaaagatgcaaaaggcattttaaaaattgtgaaagaataggtacaggtcaattttaaggtaatatatgatttgctagccaaatataaataacccagattcacttaagaagtggtagaaagtcagccaggcacagtggctcacacctgtaatcccagcactttgggaggctgaggtgggaggatcgcttgagcccaggagtttgagaccagcctrggcaacatagtgagaccccatttctgcaaataggttaaaaaaaaaaactgggcgtaatgacacatgcctgtagtcccagctactggggaggctaagatgggaggatcgcttgagtctggggacttgtgggtgcagtgggctgagactgcatcactgtactccagcctgagagacagagcaagatgctgtctcaaacaaaacaaaagaagtggtagaaagtcaaataaaccgtgacacataacagaaattagaatatagataaagatctgccatttagaaaggcagcaggaccagatgactttatcattaacatcgatctagcctcaaaaaacagacaattccttttcttataactacacacagaagaagatgaaaggatcccataagtgatggtatgaaacaagga

SEQ ID NO: 886967 - DNA, 658 bp, Homo sapiens
atgtgtattacactttgatatgccaaacaacttttctataacaacttaatcaatgggtatacttttgcgattttttcctctgaagttttcactctacaattcttgagattttcggctctaacgcagacatgtggattgatggttctctctcattcttttatgagtgatgaacacacagtactacttctgtgggcccgtgtgccctagagatgactgtaacctrctattgatcagctgattgaagataaatggcttagctgcttgtattgcagattacatcattaacatggtcagtaaaccatgaattgttcaataaggcgtttatcttttttcattttacttttgctcttttgtcatttttattagaaaagacaaaattacccacactaaccagcaagatcagtagaaaagagatccagtagggtaccattatggctgcaaagttgcagacatctaacttctaatggtttaataatatttagtatgtttttgaactgaagaaaatatagagttttaataatcttttttgtgtttcttttacagcttccttttgcctcatatttactagaagcagtactggaaaaaataaatgaaaaaaagaaactagttgaaggatatttcacaattatgaaagatattagatgatattaaaatggag

SEQ ID NO: 886968 - DNA, 529 bp, Homo sapiens
aatgttaccagagaggtagaaagagaaatttgaagatgccacagtactggcttaaaatatggaggaaacggccatgagccaaaggatgtggatggcccttggagaccagaaaaggcaaggaaacagattcttcctggagccttaggaaaagctcagtcctgtcagcaccttgactttaccccagtgaaactgattttggacatctagaactgtaagataatacattttatctaatttaagccactaagtttgtggtactttgtgactgcarcaatagaaaacaaatagaatttgccagaaatctgtttagaagttttacatctatgttcatgagggatattggtcaaaagatacacaatcaaagctggttcaatcagtgtaaaccaccatattaagaggctaaaaataccccacaatcataaaatttgatatagaaaaagcatgtgacaaaaattggcactcatttattttaaaaaaaactcagaaaactataaataggaacttctcaatttgataagaccatctttta

SEQ ID NO: 886969 - DNA, 543 bp, Homo sapiens
tgagaagataggagacgttcccagtgatccctgttgaacttgaatgcggaacattgttaatagtctctggcaggcttctattttgaagacagaaaatacaaagtttaggaagccataaatggtaaaataatatattcttctcagcaacccaaacaaaatacataaaaatggaaaaaacactaccgtgaaacgtagcctcagtaatgagatgggcaggccacktttgcctttctcccaaagaggacacgtctagcaagatccactggactgctgacggtggtggattgctgggcacaagcatgcctttatggatggtctggctttctctggggcctgccactctttgatggcttcaatggcaagtgcttcgacctctgagataaataatttctgtgaaatcatttctagagtgaagctaacttttccaacctctgcagcatcttgtgatgtttctggggataatattaacttgtaagctgagaaacagttgagactgcttcaagagatttgttttcttgtgtagtaatctgctgaagcatatac

SEQ ID NO: 886970 - DNA, 625 bp, Homo sapiens
atccgttgtaaattacctacgtgacataccagatagtgttcatgatccatttagtactctgttctaaaaatgaracaatatccatttattcatttgttcatttatttagtgtttgttcagcccttactgcatattccaggcactattctgactgtggcaggagtgaacaaacaggcatggttcttacttgtatgtaattacagtcttatagtgaaaacaagtgttaaacaacaaaatctcccaattattttaaaattataaacttgattcgatactatgtggccatataattgttcctaatttggttggagaagggaggcagttagggaagccttccctgagttagtgccattcaacctgaattatgatagatgataagtaatttgtcaggggaaaaatactccaggaataaagaacaggtacaaaggtcaggttctgggaagagcttgtcttggtccaggaattaaaaaatgttagagtggctggatctgggaaggagacaaaaagttattaaatgaggcagcaggcttcagcaggtgccacattgctcagggccttgtaggccatgctaaggatttgggatgttaatgtcagtacaaacaattgagtcataagcagaaagtaa

SEQ ID NO: 886971 - DNA, 603 bp, Homo sapiens
cagttactcatctttgtgttttccactcctttatagctaagtgtaaggtgcttttgcaaaatccagtactgcatatttgagaaatactttttattcctacacatactacatatactgttacacaatttgattttgtgggtctaatgaagttggtctttctatgagttcctatggctaaaaatagtcataattgtgtactccmgtaaattgttagaatgaaggaaaatactttgagtgaaattatcaatctggtttttctgacttcagctgtgtgtcatgtttggttagtcaagagaagcatctaatgtgaggcccctggaggacagctgataagtaagcataccaagtagaatggctactggaaaaagtgtgccagctagagagagagagaaaagagagagttaatttaccatttgctcaagtaaggaatgatccacaaattcaactaaatctaagtagtcttaaaggacatgtcattgacagatttatcttctagtctcccactttgtctaacactgcttcaaaacaaagcaatttactgaacccagtggtctcattattctggaggtttataaggttaaaaatacctggagttttgggagc

SEQ ID NO: 886972 - DNA, 603 bp, Homo sapiens
cagttactcatctttgtgttttccactcctttatagctaagtgtaaggtgcttttgcaaaatccagtactgcatatttgagaaatactttttattcctacacatactacatatactgttacacaatttgattttgtgggtctaatgaagttggtctttctatgagttcctatggctaaaaatagtcataattgtgtactcccgtaaattgttagaatgaaggaaaatastttgagtgaaattatcaatctggtttttctgacttcagctgtgtgtcatgtttggttagtcaagagaagcatctaatgtgaggcccctggaggacagctgataagtaagcataccaagtagaatggctactggaaaaagtgtgccagctagagagagagagaaaagagagagttaatttaccatttgctcaagtaaggaatgatccacaaattcaactaaatctaagtagtcttaaaggacatgtcattgacagatttatcttctagtctcccactttgtctaacactgcttcaaaacaaagcaatttactgaacccagtggtctcattattctggaggtttataaggttaaaaatacctggagttttgggagc

SEQ ID NO: 886973 - DNA, 623 bp, Homo sapiens
tgccaatcacctttccctatgccttagaccacctgcttctctaatccataaatatttcctatctttggggaggcagatttgagagctgttgtccacctccttgctgggatgcctaattaatcttttcttttgcaaaaacccattgtcccagtaatttatttactgtgcaggtagagtgaacctggctggtatcaaaaatacacaaagagacatcaacaaaatgatagtatcatgataactgtcctatacataatacattttaataacttaaatacatgatttcttcagtcatctagagttctgtctttctctgttacttttagtaggtcagacaattgttcaaagtttgcagcagcttgaaagcaaattcttyagtgaaaggtgccaggtctctagagataacaagaaactaggtctttcttacgtggttctcatggaagtgatggtgggagggagaggctgctggccttgctccaatgccttcaagccttcctggagttcaccgtttttttctagctgtcattcccacattatgatgagtgtcaaacctccaagattaggacccttttctgttttccagagggtgagctcttcatgggacagccatactcccaagtttccac

SEQ ID NO: 886974 - DNA, 623 bp, Homo sapiens
tgccaatcacctttccctatgccttagaccacctgcttctctaatccataaatatttcctatctttggggaggcagatttgagagctgttgtccacctccttgctgggatgcctaattaatcttttcttttgcaaaaacccattgtcccagtaatttatttactgtgcaggtagagtgaacctggctggtatcaaaaatacacaaagagacatcaacaaaatgatagtatcatgataactgtcctatacataatacattttaataacttaaatacatgatttcttcagtcatctagagttctgtctttctctgttacttttagtaggtcagacaattgttcaaagtttgcagcagcttgaaagcaaattcttcagtgaaaggtgccaggtctctagagataacaagaaactaggtctttcttacgtggttctcatggaagtgatggtgggagggagaggctgctggccttgctccaatgccttcaagccttcctggagttcacmgtttttttctagctgtcattcccacattatgatgagtgtcaaacctccaagattaggacccttttctgttttccagagggtgagctcttcatgggacagccatactcccaagtttccac

SEQ ID NO: 886975 - DNA, 567 bp, Homo sapiens
aaaccttgatgagaactttggaatgtctctgctgccatttgagttccatattattttttttaaccaatcctatttctagaccagtgctattatttacttaattacacttaaatcaaatttaaatcgatacattcttagctttgctccaagtattactaatcataaaataatgtgtttgatgtrctagttatgtactactttatcctaatacataataaaataatacattcaaataaaacattcagcaagccgccaaaaaaatggtaaagcaaggaagggacaggaagaatttactgacttttaggagcctcattcagtgtggagaatagaacatagttaacgttggagtcaggaaaaactgttaggatgtcatttgcagtcattccagagaaatgataaaggcctaagttagagcagtagagggagggagggaaaaggagaactatttccagaaatgttaagactgcacatgtagaagtgcagactgatttgattttgaaggttggaggaggagaaggaaatcaaggttagctctaggtttctttggggggcaaacataaggatagt

SEQ ID NO: 886976 - DNA, 615 bp, Homo sapiens
ccctttgggcttaattcattagtttaatcaattaaatttgctataagattgatatttatttacttatattacttatatttatttacttacttacttatatcttactgaatttttagtttgtaggatatacaaagtttgccacagatataagtatgaakgttatttctttgtatatttgtcagtgtcagcctttattctcaaatgcccttggataaagagaagtgacttttaggccaattcattcaaagcatttatttactggttgcttcctatgtgtcagcgacctgaaagtactagtgatattcaaggagaatatgtagatgacagataagcaaatacagcccaatattccaaattccaggatggaggaagacagagcaagggaaaagcatagcatggcatcaataacccagcataaggcctcagggaaagttccccaaagaaaggtagggaagaaagaatgttccaggtggagcctatggcagaatccagaaagcaggcaggagacaggagagataaatggggtcacatgatgaagggccttgtaagatgcattgaagagtttggatctcatctggaaaacaatgtggaccctctgaagcatttaacccagtg

SEQ ID NO: 886977 - DNA, 615 bp, Homo sapiens
ccctttgggcttaattcattagtttaatcaattaaatttgctataagattgatatttatttacttatattacttatatttatttacttacttacttatatcttactgaatttttagtttgtaggatatacaaagtttgccacagatataagtatgaatgttatttctttgtatatttgtcagtgtyagcctttattctcaaatgcccttggataaagagaagtgacttttaggccaattcattcaaagcatttatttactggttgcttcctatgtgtcagcgacctgaaagtactagtgatattcaaggagaatatgtagatgacagataagcaaatacagcccaatattccaaattccaggatggaggaagacagagcaagggaaaagcatagcatggcatcaataacccagcataaggcctcagggaaagttccccaaagaaaggtagggaagaaagaatgttccaggtggagcctatggcagaatccagaaagcaggcaggagacaggagagataaatggggtcacatgatgaagggccttgtaagatgcattgaagagtttggatctcatctggaaaacaatgtggaccctctgaagcatttaacccagtg

SEQ ID NO: 886978 - DNA, 633 bp, Homo sapiens
aatggaatagattgggagcaacatgctaggattccagagctctttgccttttgaggatccaaccaccatgtaaagagctcaagatgatttactgaatcatgacagaacatgcagagagactcagccatcccagatgttccagtcaccccagctgagataccagatatgtgaggaaagccatccaggattctccatccccaggcaacccaccccagccaataccatatggatcagagataagtcctctctgccaaaccctgcccagaatcatgaacaaatagatactatttctttaaaccactatattttaggagacattatggaacagtaaatcctgaaacacttacttaaactttagtagagatggaaaagtgtagaacacagttagtaaactcattccattcttctwtagttatggccttcgtgttttttgtttttattttccagtaacttttgactttaaaatagtataattgaatagattcaatagctttcaaagtaccaatgagatcatgattataagcttaataccactacattttgcataaaaggagacaaaacttattttgcccttgacttacatatgatatttaagtgtaggccaatggctatatatttagatagggtagctta

SEQ ID NO: 886979 - DNA, 618 bp, Homo sapiens
aacgctactgaacatactttatttaatggcctctttcagtgttttaattatttatgaacagcaatgatccataaaacactgagataatttatattggcttttgattctagaggttttgattaatgataccaacttacttagtaatcatttatcctatatcaagaaaattagattgaaagaacaaatctggttattagaacattagattcctaaataaaacttttttttttttttttttagacagagtcttactctgtcagcaggctgcagtgcagtggcgcaatctcggctcactgtaacctccgcttcccgggttcaagcaattctcctgcctcagcctcccgagtagctgggactaaaggcacacaccaccacactcagctaatttttgtgtgtgtatatatgtgtatatatatatatatatatrtatattttttttagtagaggtggggtttcatcgtgttggccaggctggtcttgaactcctgacctcaagtgatctgcctgcctcagcctcccaaattgttgggattacaggcgtgagccaccgcgcccggccaataaaatttctatatcatgggggtcgaactcagctcctacgcttatcccactttcaac

SEQ ID NO: 886980 - DNA, 740 bp, Homo sapiens
ctgggaaaactggctagccatatgtggaaagctgaaactggatcccttccttacaccttacacaaaaattaattcaagatggattaaagacttaaatgttagacctaaaaccacaaaaaccctagaagaaaacctaggcgataccattcaggacataggcttgggcaaggacttcatgtctaaaacaccaaaagcaatggcaacaaaagccaaaattgacaaatgggatctcattaaactaaagagcttctgcacagcaaaagaaactaccatcagagtgaacaggcaacctgcagaatgggagagaattttcgcaacctactcatctgacaaagggctaatatccagaatctacaatgaactccaacaaatttacaagaataaaacaaacaaccccatcgaaaagtggaccaaggatatgaacagacacttctcaaaagaagacatttatgcagccaaaagacacatgaaaaaatgctcatsatcactggccatcagagaaatgcaaatcaaaaccacaatgagatactatctcacaccagttagaatggcaatcattaaaaagtcaggaaacaacagatgctggagaggatgtggagaaataggaacacttttgcactgttggtgggactgtaaactgatacgtcctctttagcagcctgagttactgcatgaggtcacagcatccattcatgaagtcaaaggaaataacatcttccttcccagcaacagatcctctt

SEQ ID NO: 886981 - DNA, 686 bp, Homo sapiens
ggttgtgagggaagaaatgtgattttacccaattatagaggcactgccaggaaaatggaaaagttgagctagatctctacaaagatcaataataaaatcttaacttcaaaattgcctaagaagacacttcttggtcattgtaaggacaggaaaatttatacaactatgaaaaatagcatcaagaactcataagtatcctccctattttgtatatttaatttcatcctagaggaaagtcccactgtgatctactgttattaaagttattttctttctagaatttgctagtaactatttcacatctagtgaaaacaggattcttctatgccagatttgtgtaaaaactctctgaaaagctcagcataaagtaaggcattcaccagcaacatttctggagtgcttgctcctccatgaggttttgtaamagaccgcctagaattcataaatttagtgctaaagaatatctttactgggttgctctctatcaagtcaaaatgcaaagtgctacgtttgcttctataagaagtatatttggtaaaaaatatgacacattatttgaaagatcctaatgtgttagtcaaaatctttttatgacagcaaggattttaattagccatacattggtaatttcagttagtcatacattttgtaaataaaaacggaagtgaggatggccaaataggaac

SEQ ID NO: 886982 - DNA, 686 bp, Homo sapiens
ggttgtgagggaagaaatgtgattttacccaattatagaggcactgccaggaaaatggaaaagttgagctagatctctacaaagatcaataataaaatcttaacttcaaaattgcctaagaagacacttcttggtcattgtaaggacaggaaaatttatacaactatgaaaaatagcatcaagaactcataagtatcctccctattttgtatatttaatttcatcctagaggaaagtcccactgtgatctactgttattaaagttattttctttctagaatttgctagtaactatttcacatctagtgaaaacaggattcttctatgccagatttgtgtaaaaactctctgaaaagctcagcataaagtaaggcattcaccagcaacatttctggagtgcttgctcctccatgaggttttgtaaaagaccgcctagaattcataaatttagtgctaaagaatatctttactgggttgctctctatcaagtcaaaatgcaaagtgctacgtttgcttctatargaagtatatttggtaaaaaatatgacacattatttgaaagatcctaatgtgttagtcaaaatctttttatgacagcaaggattttaattagccatacattggtaatttcagttagtcatacattttgtaaataaaaacggaagtgaggatggccaaataggaac

SEQ ID NO: 886983 - DNA, 593 bp, Homo sapiens
cctcctattgtgccaggggaacatctggagctcccctgactatgattgctaaattgtcagattaagattggagccaagactttactaggttctatccaaactcctgatcaatcagaagatggaccagagcttccttaacttaaaagctccccagccaaagggttggaatccttctcctggaatctgacatccagctctaccagatctttgtgcacaccctgagaacacatgatctctcctatctccctgagtttccccccagtacataccactccacaaaatctgatgcgggtgcttcctggttatgtgacattgtttgcacaacagtcaggaactttacaaaatatatcttattgttgaaatgttccccagattttaacaagatagactattaaggctgtgaagccacttgaacttaatactctataacactggctctctccccsacccacccatgaaaagtcactagaatatgcaattattagaactaaaatcaaactgaatattcgaagcacagtgcctcttcactcacattgcaccttcccttgggtatgtggctgggcctgtgctttctaattccaaagcacttctca

SEQ ID NO: 886984 - DNA, 636 bp, Homo sapiens
ccctgccctagagatctgtggaactttgaacttgagagtgataatttagggtatctggcagaagaaacttctaagaagcaacgcgttcaagaggtgacagagcataaaagtttagaaaatttgcagcttgacaatgcagtagaaaagaagaacccattttctggggagaaattggaaattgtgttttattaatagacttcggagkatgtatggaaatgcctggatgtccagggagaagtctgctgcaggagcagacctctcatggagagcctctgctagggcagtatggaaaggaaatgcgggattggaaccccaacacagagtccccactggggcactgcctagtagagctgtgagaacagggccaccattctctaggccccagaatggtagatccaccaatggcttgcaccatgcacctggaaaagctgcaggcactcaacaccagcccatgaaagcagccaggttgagggctgtaccctgcaaagccacagaggcagagttgcccaaggtgtaggagcctacctcttgcatcaacgtgacctggatgtgagacatggagtcaaacgacatcattttggaacttaaaggtttaatgactgccctattggatttccaaattgcatggggcctgta

SEQ ID NO: 886985 - DNA, 626 bp, Homo sapiens
ggggaaactataaaagtagttcatcaggaattctcactggtttacagaagtaactttgattagcaattggctatacattgttaaattacagggtaagagttatggtggtaagagtatgttattttatggctacttggtattagttagtagccacaaaatgctcacacagcaastggtttcaagaggtaatggtactcagttcaatggggagtgaaatttgttacattttaaatgcctctttgggactgaaaatgtaaaggagctctcattgctcagataatttttttctttctcacattcaatatttattcaacaaatgcctattgaatgaacggatggatagatggtgaaagataaaatgaaaaaaattcaatggtgtgcaatatcaaagaaacatcagcttggagccagacatacagggattcaaatttcctatctgccactaactagctgtgtaatcttgggaaataacttagattctctgagtttcaaagttgttgttgttgttgtgtgtgtgtgtgtgtgtgtgtgtgtaaattggtgacaatgatatctgctttgtaggttgcctaggaaaactaaatgagctaataagcccaaaataaaataccgactactactcttta

SEQ ID NO: 886986 - DNA, 666 bp, Homo sapiens
ttttagtataaatttttcatctcatcctttatatcttgcatgtattaatcacagatacttataagtccatgtctgattcactcaatatttgtttgtttttatgtgttttttctcgtgtgtgtgtgtgtgtgtgtgtgtgtgtgtgtgtgtacatgtgtgcctggtcttttctttgatatgggtaagttttttattcaaaaatgagtgttttgaaagaaaagttgcataaataaattgaagccttagaraatgttatctgcttccaaagagtatttagtcatacttctgttagaaagagtagaagctgattgccttaatccaacaggattaatcacttttaaaagagagtttccaactttgtgatggtttatttctagtttcccatgactcatagaatatagtccctcccatatgaaagcctgggaggtttaccaaggcttctgctcatttttttaatgtaaatgtattacaatagaaataattcaaagttctgctccacttcctagtctcttaaccacaattttctgctcagtctcagcttctaaactgctggttccaaataagcaaatctctcaaggaaaaggcattgcagaatattgggattatctcaatgcatttcccatctcaggaatcttggccttcaagccccattgccttcaagctctc

SEQ ID NO: 886987 - DNA, 613 bp, Homo sapiens
atttctggaattcctcgaagagccaagaacacacacataattcccctatgcacatacaggactgaactgtaaatctgcattagaatttcaagataatctgcctgggcaaggtgactcatgcctgtaatcccagcatcttgggaggctgaggcaggagggtcgcttatgcacagggtcaagactgcagtgagccgtgattgttctactgcaccctagcatgtgcaacagagcaagaccctgtcccccacaccccraaaaagtttttcaaggaagcctaaaataatgaatctggcaagatagagtagaggccaggtgcagcggctcatgtctgtgatcccagcactttgggaggccgaggcaggcagatcgcccaggagtttgagaccagcctgggcaacataatgagaccatatctctaccaaaaatacaaaaattagcctggcgtgctggtgcacatctgtggtcccagctacttgggaggctgaggtgggaggattgcttgagcctgggaggttgaggctgcagtgagccatgattgtgccactgcactctagcctgggtaaccaagtgagatcttggctaaaaatgtttttaaaaattaaaaacagaaaag

SEQ ID NO: 886988 - DNA, 686 bp, Homo sapiens
tgaattgatttgaggaaaaatcattgtgttagtttgtgtttccctggatgcagactcagaaacagagatagcgaagaaagtttcctttttgggattggattccagaaaatgcagtgggaaacactgggaagtgagacagggaagggaagtgatatggttaggctttgtgtccccactcaaatatcatcatgaattataatccccataatcctcacatgtcaagggtgagaccaggtggaggtaattgaatcatgtggccggtttctccratgctgttcccgtgctagtgagttcgttcttactagatctgatggttttataagtgcttggttgttccttctctgttcattgtccttcctgccgccttgtggagaagtgccttgcttcgccttcgcctttcaccaagattgtaagtgtcctgagccccccaccccggccgcccccagccatgctgaactctgagtcaattaaatctctctcctttataaattacccagtcttgggcagttctttaaagcagcgtgagaacgaactaatacaggaaggaagtctatgcaggatgtgttctcaggtagatgaccaccttgggcaaaagaagattaattccactagagaactctgagagccagaacagaactgcataattatccccctcaaggggtgagagagctggggtagttagacac

SEQ ID NO: 886989 - DNA, 645 bp, Homo sapiens
tggctagaaataggggttggagggaacctgggaagtgagccaacatttcttcttgtgctgtgatccgtgctattcctggtctcaaattctctttcccctccacattctgcagtgcctcactttgcctgtctgtgtgctgcttacatggatacccatatttttaggggataagcacattgacagggaatcrgcagaatgcagtagaggcagggatggaggagaaaacagagcatgagcaggctgtgctgaaggggaaggttcacctgaaccccaggagatgctgggagccagtggtgggtctcacaggtgcctcaactttggcctgtggcccagtggggaagggtatgggggtctcccccatgtatggaaagtgccatgctggtggcttacccctgaggggcaccttccataccccatggctctgacacaatgtggcttctaagccaaacacctaaaaggtgtttagaagaaaagaagtctgtgttacgggcaatattgcacccctctgtaaggctttgccagccttagaagtctctgtagcagacctcatctgcagctagagacagaactgaaataggacgtagctgagatacctgggtgtaattccgggggacaccacccggtacaggggaaactttgaagacc

SEQ ID NO: 886990 - DNA, 645 bp, Homo sapiens
tggctagaaataggggttggagggaacctgggaagtgagccaacatttcttcttgtgctgtgatccgtgctattcctggtctcaaattctctttcccctccacattctgcagtgcctcactttgcctgtctgtgtgctgcttacatggatacccatatttttaggggataagcacattgacagggaatcagcagaatgcagtagaggcagggatggaggagaaaacagagcatgagcaggctgtgctgaaggggaaggttcacmtgaaccccaggagatgctgggagccagtggtgggtctcacaggtgcctcaactttggcctgtggcccagtggggaagggtatgggggtctcccccatgtatggaaagtgccatgctggtggcttacccctgaggggcaccttccataccccatggctctgacacaatgtggcttctaagccaaacacctaaaaggtgtttagaagaaaagaagtctgtgttacgggcaatattgcacccctctgtaaggctttgccagccttagaagtctctgtagcagacctcatctgcagctagagacagaactgaaataggacgtagctgagatacctgggtgtaattccgggggacaccacccggtacaggggaaactttgaagacc

SEQ ID NO: 886991 - DNA, 670 bp, Homo sapiens
tgtcacccaggctagagtgcagtggcatgatcttggctcactgcaacctccgcctcctgggttcaagtgattctcctgcctcagcctcccgagtagctgggattatagacatgtaccaccatgccccgctaatttttgtatttttagtagagacggggtttcaccatgttggccaggctggtcttgaactcctgacctcgtgatccacctgccttggcctcccaaagtgctgggattacaggcctgagccaccgcgcctggcctgagggaaggacctcttgagaagggaggtatcacaaagatggccactgccaatttaccttcccttgtggatcttttgctttctaatcttygctgtggtggggaataatctctactcaaagtgtttggtggattacatgaaaaatacacagcaggtatttggaagcatttccatcttcctttcttccttctttcctctttttctcctatctctcttttcttccctccctccttccttctccccaaccttaccttcctttcaaggaactttccccaaagggagattatttaggtacaggcttggcaactttttcccagtgacttctcttccatgggactggggcagccacggggcagtttcttgaaggcttcagtgaaggtgagatttgtagggcttttgtgatcacct

SEQ ID NO: 886992 - DNA, 539 bp, Homo sapiens
gaggtatcacaaagatggccactgccaatttaccttcccttgtggatcttttgctttctaatcttcgctgtggtggggaataatctctactcaaagtgtttggtggattacatgaaaaatacacagcaggtatttggaagcatttccatcttcctttcttccttctttcctctttttctcctatctctcttttcttccctccctccttccttctccccaaccttaccttcctttcaaggaactttccccaaagggagattatttaggtacaggcttggcaactttttcccagtgacttctcttccatgggactggggcagccacggggcagtttcttgaaggcttcagtgaaggtgagatttgtagggcttttgtgatcaccyggaggatgcagggctgagattggtagagggtggaggttaaaggagcagatcctttttggccatgaaaaagaactttctaaccaaagcatttttcaataaaggcaagagcatcttaggtggtgtttccaacctggggcatccagccaaggattaatg

SEQ ID NO: 886993 - DNA, 601 bp, Homo sapiens
cggggtattaacaggaaaactaggagttccgttttcagaggaaggagagtggtctgggcagacaaaactgttaaggtccatgacactaacttaatgatgagcatataagtagaaagttatagatgtcgccacgtctggtgttttctcagtttktttcctagagaggaaagtaaacatattattctgttttaataggttgccaggtggcccatcctataatcccatatcctcacgttctgttaatatgttggtatttttccttctagtcttttcttttctccaccccccactccaggctatggtttcttaggctgccggtttttgctttgcatgaagctagactgacttttgggttcttagctaacttccaaatctgtgagcttttttcaaatgaagttggaatagtctccctagccagctatattgacaggaaactaggtgaaaagatctttgaataaattgtttgtctctgcttgccaattctagtgaatcttgaaatatgactctcaaagagaccattgaaaatgacctggaaactttggccacttggtcccatgaaatagagggcccccaaagtttggtataacaaaatcacttccaa

SEQ ID NO: 886994 - DNA, 657 bp, Homo sapiens
gtaatccttatggaagcagagaatggaatggtgattgtcaggtaccatgagttaagtgggtaacagcacattgttgctaattcaacattttgggaggctgaggtgggaggatcacttgaggccaggaatgtgagactagcctgggcaacatagtaaaactccaattctagttgggcacggtggcataaacctgtagctatagctacttaggaggctgaggtggaaggaacacttgcacttggcaggtggaggctgcagtgagccatgatcatgtcatggcactccagcctgggtgacacaattagaccctgtctcattaaaaaaaaaaagaaaaattagtgagaggatagatctaatgttaaatgctcttaacattaccacgaacacaaacacacatatacacacatggacacaagaggcaatggatatgtttggaggcaacagatatgtttggaggcaatagatgtrtttagtaccttgagttttttgatggtatcacaggtatacacacatacacacacacacacatacacacacacacacatacatacatacatatacatacatatgtccaaactcagggatgtacacatcaaatacgtgcaatttttgtacataaaaagctattagcaaaatagagattgatgcataataact

SEQ ID NO: 886995 - DNA, 648 bp, Homo sapiens
ttgggctgtagcttaaatttaaaaagcaaaagagtaaggtgaccactgagagaatggctttcctactttagttcaccaaaggattacctgaggaaattacaggataggtccaggcagggccagtaaatttttatgttaatattgggccaagcgtggtggctcacgcctataatcccagcactttgggaggctgaggcaggcagaccacttgaaatcaggagttcgagaccagcctggccaacatggcgaaactccatctctactaaaaatacaaaaattagttgggcatggtggtatgcacttgtaatyccagctacttgggaggctgaggcaggagaaacacttgaacctgggaggcagagattacagtgagttgagatcatgccactgcactccagcctgggcaacagagactgtgtctcaaaaagaaagaaaggaaatttttgtgttgatattgttctagaattcttactactctaagtgtggtcctgggaccagcagcatcagcaccgcctaggagtgtgttagaaatgtacattcttggccagacacagtggctcatgtctgtaatcccagctactcaggaggctgaggtgggaggatcgcttgagccccacaggtcaaggttgcagtgagctatcgtgccac

SEQ ID NO: 886996 - DNA, 616 bp, Homo sapiens
gaattcaagatgttctttgaatccattgagaacaaagacacaacgtaccagaagctctggtacacagctaaagaagtgtgagagagagaaacttacggcactaaatgcccacatcagaaagctagaaaaatctcagatcgacaccctatcgtcacaatttaaaagagctagagacgcaagagcaaactaatccgaaagctagtagaagacaagaaataactaagatcagagcagaattgaaggagatagagacacaaaaacccctccaaaaaaatcagttaatccaggagctggtcatttgaaaagattaacacartagatagactgctagccagactagtaaagaagaaaagagagaagaatcaaatagacacaataaaaaatgataaaggggatatcaccactgatccaacagagatacaaactaccattagagaatactataaacacctctaggcaaataaactagaaaatctagaagaaatggataaattcctggacatgtacaccctcccaagactaaaccaggaagaagttgaatccctgaattgaccaataacaagttctgaaattgaggcagcaattaatagcatactaaccaaaaaaagcccaggac

SEQ ID NO: 886997 - DNA, 667 bp, Homo sapiens
ataaggatatagtatgttaatgtttctacaccttgattttctcacttaaaatacagcatagaagttcctccctagcattgacaggattcatttttagtggttatatagcactccattttgtaaatgtgctgatttattgaatgaatcttctgttaatgaatatttagtttctggtagtttttctttttgctgttataaacagtcatttaataaccatgttaaatatatatccttacatactagactattatttcttaaagaatgtgattagtaggtcaatgagtacatcagtttttgatttaactttttacagattggtttccaaagtctgttacaattcttgtttctattagggattccagagtatacttctcccccgactttatatccccatgacaatagttcttttaagaaaaattatttgctaattaattagcaaggtgagtgcaaatgtaatctcrttatgattgccttttcctcagtactggtgcgggtgggcattgtttcatatatcacagtcatttagatttatttagtgaattgcttattcatgtcctttgtccattttcctattgggctttgttttatttgcattgaatcaccaatttgtcttgttatcactttgtgggaaacttctgtatcttatgccctaatttttcatgtgcat

SEQ ID NO: 886998 - DNA, 607 bp, Homo sapiens
ggctttcatgataaaaataagggtttgagatcagaggatgaactcatggacttctttgaccttttattcttgcggaacttcacagttgagtgatacattgatgcttggttaagtgacatgggtaaagtttcggtcaactgttttcagttgttgtaacatgacagaacatgctagccatcttcagtgggcgtcctcaaaacagagagggatggctttagaattctgtttggaaatgacctaggaagtcagtcatctaatctagctcctccagccctgttgcaacccaggagtcctctgggtgcctctgccacaggcaacttagcctgcacttgaatctttgtagggacaaaaaactcactccctcatgaccaatccttttctttcagasacaactttaatgattaaaaatgaaattggttttgttgagcttaaatgtgattccttaacacttctactcatttgctggtattattggtctccacttgtagatgacacaaaaacagtcctcctgcttatagggaattctttgttgcatataaattctgacttttgtcagaatttgtgttttctcagtgtgcttctctccgataagatcttacgatatctg

SEQ ID NO: 886999 - DNA, 578 bp, Homo sapiens
aaggagttggcaaaaattttctgtaaagggacagatagtaaatatttttagctttgtgggacatacggtttctgttgcatctactcagttctgccatggtagcacaaaagcagccatagacagtgtatgaattaatgagtgtgactgtgttctaataaaactttatggacattgaaatttgaatttcatataaatttcacaggtcatgaagtattattcttttttaaatttttttctcaaccattaaaaaacataaaagttatccttaacttstgggccataggaaagcaggctgtgggctggatttggcccatgaactgtagtttgctaactttttctctaaaggatagtagtgctttttttgtgtgtgccagaacatgaatataactgtgtgtccttggaacggtataaagctttgattatatcatagctagacatctcccttccaacattgttttggatattaaaaacaaaaaacaattctgtgttgaactatgctttggcgatcaagagtcagattactgtgaattgcaattagttttttctagcattatgacttacataaactgtaaagtaat

SEQ ID NO: 887000 - DNA, 616 bp, Homo sapiens
gatcattagagaaatgcaaataaaaaccacagtgaggtaccatctcatgccagtcagaatggctgttattaagaagtcaaaaaataacagaggctcaggaggaaaagaaatgcttttacactgttggtgggaatgtaaattagttcaaccattgtggaagacagtgtagtaattcctcaaagacctagaggcaaaaataccatttgacccagtaattccattactggatatatatccaaaagaatataaatcattcttttacaaagatacaagcatgtgtatgtacattgcagcactattcacaatagcaaagacatggaatcaacctaaatactcatcatttatagattggataaagaaaatgtggtacatatacaccayggaatactatgcagccataaaaaggaatgagaccatgtcgcatgcaaggacatgaatggagctggaaaccattatcctcagcaaactaacacaggaacagaaaaacaaataccacatgctctcacttacatgtgggaactgaatgataagaacacatggacacactggaggaaacaacatacactgaggcctgtcagagggtgtggggtggaaagagagagcatcaggaagaata

SEQ ID NO: 887001 - DNA, 691 bp, Homo sapiens
cttccctcttaacatgctttggctgtttcccagagcttctggtatgtttatcctttttctctcattcatttcaaagaatttcttgaatcctgccttaatttcattatttacctagaagtcattcagaagcatgttgtttgattcccacttaattgtatggttttgagtgattttcttagcattgatttttatttttttggcactgtagtccaaagaatatggtaagtatgatttttttgttgtttttttaatttgcagaggatggttttatgccaaattacgtagtcaattttatagtgtgtgtcatctgcagatgagaagaatgtatattctgttgtttgggggtggagagttctgtacatgtctattagttgcatttggtcaagtgttgaatttgggtccaaacatctttgttagttttctgcctcgatgatttatctaatactgtcagtggggtgttaaaatctttcactattattgtgggatgtcttaatctttttgagggtctctaaaaattygctttatgaatctggatgctcctgtgtggggtgcatatatagttaggataggtaggtcttcttgttgaatcaagccctttaccattacataatgctcttgtcttttttttaatctctgttattttaaagtctgtttcttctgaaattagaacagcaacccctgcttttctctg

SEQ ID NO: 887002 - DNA, 650 bp, Homo sapiens
taaatatagatatgtgtgtacttatttatatatctgtgtatttttttttagctttgtctcctgagggggcataggaccaatgacacatcagggcaatgtgcatacgtagtacctagatctttatttataaatagcattttccaccaaaaggaactaatgcacttggagaaaaggctaatttcaggacaggggcagaaaaaatatatataatgaacacagaacatcttcctgtggcagaaggtaaagaagtgctcacagaattatgtaaaaaagatacaagagtctaccgcaggttaaatctggggaaatttgagcctcaaaataagtaattgtgataagcaattataatccactgagtgaagtaaratccatgtgtccatgctgatatgaatacatatatcaacagtcaataaatggggagaggaacacttccttacaatagaatagcaactaataattatagaaggagagaattagaaaatcatcaatagttgctaaaaattcatgtgtgaaagcattctaaagagctgaatattcaaatagccttaaagaatctttcataatcaatttattaatcataggggaagatagtaacttcacagtggaggaatgttatgggcaccatcacaaccaagtgatcaaaattaaat

SEQ ID NO: 887003 - DNA, 650 bp, Homo sapiens
taaatatagatatgtgtgtacttatttatatatctgtgtatttttttttagctttgtctcctgagggggcataggaccaatgacacatcagggcaatgtgcatacgtagtacctagatctttatttataaatagcattttccaccaaaaggaactaatgcacttggagaaaaggctaatttcaggacaggggcagaaaaaatatatataatgaacacagaacatcttcctgtggcagaaggtaaagaagtgctcacagaattatgtaaaaaagatacaagagtctaccgcaggttaaatctggggaaatttgagcctcaaaataagtaattgtgataagcaattataatccactgagtgaagtaaaatccatgtgtccatgctgatatgaatacatatatcaacagtcaataaatggggagaggaacacttccttacaatagaatagcaactaataattatagaaggakagaattagaaaatcatcaatagttgctaaaaattcatgtgtgaaagcattctaaagagctgaatattcaaatagccttaaagaatctttcataatcaatttattaatcataggggaagatagtaacttcacagtggaggaatgttatgggcaccatcacaaccaagtgatcaaaattaaat

SEQ ID NO: 887004 - DNA, 624 bp, Homo sapiens
cttaaactgtgtaatctgattcagtgagtctgggatgggggctgaaattctgcatttctaacaagctctcaggtgatgcccacactgatagcccatggaacacatgtgcagtaatattaatcaaatctgagaatccatctttccctttcttaataaaacatatcgttggcattcccccgttttwccttccatggttttaactattaagttgcctcaagggtttaagacatatggtggtttgtcatttgctaacacaaaaattaattagttttcctagattatttgattttattcctttttggaaagctagttataaatgctataatattcaaaagattaaaaatgcagtgaaaaataaccccctctctcatctctgctggccaactaactcctcagttctactcctaagagacaaacgctgctgccagttttgatgtgtccttccagaagtgctctgtacatacagaagtaaatgtgtatgttacacaaatggcactaaattatataaattatcttgaacatttgctttttatttaacattatatcttgaagataatgcctctaaaatacataaagaattctctcattttttaaagaaacaaatgtataacagttcactctctg

SEQ ID NO: 887005 - DNA, 617 bp, Homo sapiens
tggattatctttttgttttttgccttgttttatgtatgtgtatgtgtgttcatactttttattcaacgccaaacataaaggaacagtagagactgaggtaaatagtatttatacccagaattaagcttgccttttctaccagatcataagttgggggctgggggaacaggctagatttggggtttgttttactgaattaacttgtaatgcatcacactcctcagattctttccacgatgagctgctgctgccttgtgcttactgtgaggcctggagggccagaggggctattccttgtttcttctctactctcagctctcagcatgcctgtgccacatgcgtggttctctctgtgtgctccccagcagtagagaccaactcatcccggtttgcggggaacttttgcagtttaagcatggaaagtcctgtgtcccaggaaacccctcagtctggggcagaacwgggtgcttggtcaactgagtatctgaggctcccagggattctaaactcatgctaggccccactcaactattgataatttgttgaaatttcccttcttttcttctttgctcttgctcactattgggtgtgaggtgtatgctggacttaggatagtt

SEQ ID NO: 887006 - DNA, 589 bp, Homo sapiens
agacaagagttggctaaagacaattaaaagacaagagttgactaaaacataaccaaacaataggttgatgacaagaaactcactcaaatataacaatatagtcagggtaaacgtaataaaaaggggaaaagatgtatcataaaaacattaaataaaggaaggtagggagagcatcctggggarctgcaagagtaagaaacacgaggaatctgtctccctgcttaggcaataattgcactgacagagtatgtctgatataactgttttggaaatctggagtctattgaaggcttgcaactttcagggaaacatttggatggtacattgcagttaactttgatttcagctcagtcaattttagctcttagcacagtaacagctacccatttcctatccccacccctgtggcaggcagctgtgcatgtattcctgcagcagcttgttgcacacagcttgaaggagccaggataagcaaaatggaccctgtcctctaagtatcaggcatatgtgcttagattgatgattgctgcttctgatcagagaggtacagacaaagaggtggtgggtctttgctgttacaccttattcc

SEQ ID NO: 887007 - DNA, 596 bp, Homo sapiens
gaaaaggacagagacacacggagacctgcagagaattttcctcaagtattagcagagtgttaattcatgcatttgtgtgaggaaagaatcacccaaaagaattaaagggaacagtatccagtgatcacacatggccacaaatagagcctgtacccataagccagatagaaaagctcatataagacattgggtagaatactcaaaaaggctttacctcagaggaaattattaattagccctagcattaacactcttctggaaccactgaacaaatcagatcaaarcctgaaatgatcaaattgtttccaagtaacttaacttcatcccagaacaaagctcaagaatatttatagaaacacaaaaatatccaacacccaatgaggtacaattttctgaccctccaatcaaagattaccaggcatgcaaaaagggaggaaaacactgcttattataggaaaaataattaatcagtcaaaactgacaccgaaatgacacagatattaggttagcaatgatattaaaacagctgttataactgcattccatgtgttcacaaaattaagtagggacatggaagagagaaaaaaagaccgaaa

SEQ ID NO: 887008 - DNA, 585 bp, Homo sapiens
tttttgttttttttaattctatgtgatgtatcatatttattgactcatgtatgttaaaacatccttgcatccctgggatgaaacccacttgatcatggtgtattatcttttttatgtgctattggatttggttagtattttgttgaggatttttgcatctaygtttattagggatatttgtctatagttttcttttttttgttatgtactttccttgtttttggcattagggtgatactggcttcatagaatggtttagagatgattcattctttctcaattttttggaatagtttcagtaggattcataccaattcttctctggatgtccggcagaattcagttgtgaatccattttgtcctgggcttttgttgttgttgttgttgttgttgttgttgctgctgctgctgctgctgctgctgttgttggcaatttttcttttattactagttcaatctcactgcttgttattggtgtgttcatgctttctatttcttcctaatttaatgtaggagggttgcatgtttccaagaatttatttcctctagtttcctagtttgtgtgcatagaagtgttcatagtag

SEQ ID NO: 887009 - DNA, 590 bp, Homo sapiens
agttcattgaagacttgcgtctctgtctgttcttgactgagtcaagctttgagaaggagggtgacttggaagcccaagcttgaaagtctcattctgccaggaaggggcagaaagcactgatggactcattggacttcagcagctgggggagaagcacatccttgtccgtgtcctcctcagacaccacctgggccatgatctgtgtggcagtccaatcctgagtctgcagtccctgctgagcactattctgggtgctgggctgtccccaggccattgtggacccagtgggatagagaactgcctatgctcttaggtgagctgctactgtggctttttgcccaggggcacagcttcctgctgtccactgctacccctagcaggcggcttgtcttcacccctgaaactaagctgcattctccagggagtctgtgctgcagaggagmaatcagctgaggggcagttgtgcggggaggaaggaaacacagtggaggctggggcagggctggggcacactggggtatagggccgagggaacagggtggagtgcaccgaggtatgggactggggaggagtgagtccactatgtacgg

SEQ ID NO: 887010 - DNA, 649 bp, Homo sapiens
gtccagaaccccctgctgtgtgcagcccaggaacttggtgccctgcatcccagctgctcctgccataggtaaaaggggccaaggtacacctcgggccatggcttcagagggtgcaagttccaagcctttcaggttctaggcggtgttaagcctgcagatgcaccgaagtcaagaattaacgttcatgaacctccgcctagatttcagaagatgtatgaaaatgcctggaaatccaggcaaaagtttgctgyggggggggggccctcatggataacctctggtagggcagtgtcaaagggaaatatggggttggagcccccacacagagtccccactggggtactgccaagcagagctgtgagaaaagggccaccatcctccagaccccagaatggtagatccactgacagcttgcactgtgtgcctggaaaagctgcagacactcaatgcagccagaaggggggctgtaccctgcaaagccacaggggcggggctgcccaagaccctgggaacccacttcttgcatcacctagatgtgacacatggagtcaaaggaggtcattttggagctttaagatttgcctgctgggttttggacttgcatggggcctgtagctctttcgctttggccaatttctcccatttgaaa

SEQ ID NO: 887011 - DNA, 645 bp, Homo sapiens
gtgctgtggccgagtttaggatcccaaccagcctgtgattactgtggtcaccacacagattccctcttgttccatcttttagattccatcttctcactctcataactgtgtggatagtaaaacaattatccatacaggtatgatattggcagagaaaatcacaaaatgttttaaggagcaaacactttggggatggtaataatctttctaccaccttcattgtcttgtttaagtatctctacattcttctttaaaaattaggaatatatctttcttgctctttcgttgttgttgaacaccagaaggggatattccttaattctccatagctaaggacagtacagcacaatattccattcagcaggtgaagtcagtatgaatgaatgcatttcaatcagcaaattgctggttgtgttgcaactcctagttatgatgttttgcgtactttgaagggctcccattaattaaggtatttcttataagcatttagaaagattttyttttcttggcatgcgacttgaaaatttgtcctgatattttccctgtgacaacgttttgtgaattgtaactcagccacttaagtggctcctcataataaagccacatggtatccatgtacacatatttaacaaatcaaacaagtgg

SEQ ID NO: 887012 - DNA, 555 bp, Homo sapiens
tttaactaaatgctgtaaggactcaggaaatccattctttcaacaaaagttactgaagactttccccattagtatcctaaacaatgtctgcaaaattggttttcatacctggataccttgtcttgtaagagacacggcagagaaagatcataggaaaaaagtcaatatcaggcacagctaacaactagcaaacccacagtctttaaaagactgatcctttgattcctatctctcaagtaaagaggtttaggtcatcttcatgttacaggaaagtatccctaccaaaaacttctaactaatgactcttaggattcttccaaaagcaaatagtctttgggagaagacagcttccatcaaatgcctttggatcaagtgaatcactatatgagatatcggtatctgcaaaccaagatccacawaaaaagatccattgtttgtcatatttaatctgtatatcttgagttttcattttcctagttaacttttttttatctttttatgcttaaggttacatttaattactttacctataaagctactattcctaattcctct

SEQ ID NO: 887013 - DNA, 604 bp, Homo sapiens
caaatatttcttaatgaaatgaaacacaagcttctgagttgagaaagcctcagtgacctaaaggataaagtatctgatttacagtttctgtagagtcagtgtcctcaccctgaggtttcttctcatttggtactaattttcctttttcaacttgctgcagttctgatgttgaagtactgtagattgtttagtctcctcacacagtatgcaggagttaggggaaaataactctcaaaatgaaacagcaatttgaaagaaaaaaggagggaaaaaaaagacccattacccccaacacagtatttcaacagagaagttgaagtggaaaagggaaaatgaggcacatgcacctgaatcttgatgactttgctgcccatttgctttcattttcagtattctaaggcccctcatgaatgtctgacagaataattcatatacaagtacttrtttttgttctttcctggattccaacacagaaattagttaagatttggaaattctggacaagggtgccaggcttcctgtcagtaagaaaacttagaatattcctgtaattaggcctggtgtggtggctcaagcctgtaatcccagcatggtgagaggcaga

SEQ ID NO: 887014 - DNA, 566 bp, Homo sapiens
aagttgtgaatatgtcagcattgtttttaaccctcttccctattattctttcctgagagggactgggaaccttccttactgttgtttgtttatgctatgtggtgtttgttttggctgtgacactgaagctgaactaagattgggtgagggctgcatggaggcactctgcccaagggtgggtgctycctgggctagattgggtgacatggtcatcacaaagtcatctatctgggttgccatgatgcaggaacaccacaaaagcagcatccaggaaactaagccatggccaggagctggaagttagcctatcaccggatgaaagtagaaaagcaagccagagggtgaaatgatgagcaggcaaggttgaaaatgaggcctttgaggcctggagcagagcataagcaagtaggagttaagattgcttaactctgaacacccagtaggtgttctatactagagtagacacttgaggggggcccactgagataggcaagggtatagtgcatgtttgagtttgtctctgttccacacttgaatatcgttcaacgttgtcctgaacacatcat

SEQ ID NO: 887015 - DNA, 620 bp, Homo sapiens
caccatctgttgaaaagggtgtactttcccttcatgtttttgtttgctttgtccaaggtcaattggctgtaaatatttgagtttatttctgagttctctattctgttccattggtctatgtgcctatttttataccagtaccatgctgttttggtgactatggccttatagtatagtttgaaatcagatagtgtgatgcctccaggtttgttctttttgtttagttttgctttggctctgcgggctcttttttgattccatatgaatttcagaattgctttttttctaattctgtgaggaatgatggtggtattatgatggggattgcattgaatttttagattgcttttggcggtatggtcattttcacaatattgattctacccatccatgagcatgggatgtgtttccatttttttgtgtcatctctgatttctttcagyagggttccatagttttccttgtagaggtcttttgacgcctttgttaagatatattcctaagtattttttttttttttttgcagctattgtaaaaggggttgagttattgatttgattctccacttggttgctgttggtgtatagaactactactgatttgtgtacattattcttgta

SEQ ID NO: 887016 - DNA, 578 bp, Homo sapiens
ctgagctctgccccctgtcagatcagtaatggcattagattcttacaggagcatgaagcctattgtgaactgtggatgcaagggatctaggctgtgtgcttattatgagaatctaatgcctgatgagctgtcactgtctctcatcacccccagatgggactgtctagttgcaggaaaacaagctcagggctcccactgattctacattatgatgagttgtgtaattattttattatatgttacaatgtaataataatagacataaagtccacaataaatataatgcacttgaataatccgaaaaycatccccaccctgccttcgtttgtgaaaaaaaatgtcttctacaaaaccggtcgctagtgcagaaaggttgaggatcactgttgaagatggaggaaggtggccaccagcccaggaatgtggcagtctccaaaatctgcaaaaggcaagaaataggttcttccctacaccttctagaagggaatgccagccctaccagcacattgatttttttttattattattatactttaagttctgggatacatgtgcagaatgtgcagatttgttacgta

SEQ ID NO: 887017 - DNA, 599 bp, Homo sapiens
tccatgctaagctcttggcgtgccttattttatttattcatcatgatacttaagaggtgtctacttattgtttctattctgtagcagaggagaatgaagctcacaatgttgaataacttgtccaaagataactgttaagtggaacggatgggagtcaaccttgagtctgttccagactttaccctccttagttgttattagaatatttgattcatttattcttcctttctgatcattgttctcagtgacattggctttcttactgaaagttcatcaagcaagctttacggactcatagtatcaacagtcgcagcattccactctccctgtttagctgccatgctctggaattgctcatcatataccgctgaaatctgagttggtgggctcattgcagacacactgttttgcttgccatstctccctcttctttatccccattgaacctaactctcagtatctctcctctcctgatccacactcccttttagtttattttattttgccccagtatttcatgtcttttgatgacatcatctttccccagctgaatgatgaggctgtctctagttttagtggctcatacacatcagtctaga

SEQ ID NO: 887018 - DNA, 602 bp, Homo sapiens
aaagtagcaaccatgactgaacccataggaggtgctcaataaatatttgttggatatatggatgactttagcctatctttaagaaattcccagaactttgtgtctctaatatatggtgctcttgctgtcctaatcaaagcacagccaatagacagatgccagtttttatccttaaacccagccagtaatgtggtagagttctctgacaatcctagaattctgtccatcccatgtgaagatgtatccttgcataaaacatggaattttaaatcccaagaatggaataggatgtgatctggataaagaaaatataaggagggaaataggtgcccatctcataaaracgtggcagtagctgaccttcttctcaaaactatacttttatatgcccaaagctacagatgtactggtttctgtaaaaaaaaaaaaaaaaaaaaaaaaaaaaaatttaccaaatcctaaagcttcttccttctaaatgtatctcaaatcttcttctgcaactccttgccttgcctcagtgtagagcttcactaatctctttctatagaaagccacaccctcccaaccactctcccttactccagtggttctacctgttc

SEQ ID NO: 887019 - DNA, 661 bp, Homo sapiens
acaaacaacacaataataagtaaattatatgctgtagaaggtaattagtgccggtaataaagaagaagtaaagcatgacctaccatagaaaggaaggttggaattggaggacagcaagatggtggaaggggaaatggtaaaagtttagtattaatattgtcagtagaggccactttgcaaaggtgaaatttaagcraagacttgagttagagagggagtcagccaagcagttatctgaggcaagagaatccaaaggagtggaaaacataacaaacataccctaaggggaagcatgattgacctgtctaaggattgtaaagggtcatggtggctggaggaaatgagggcaggttgaacaagaagtatgaggaagtagcaaatgcaaaagaactgaaaccataacaaacagtctcttgggccacagctcaaacaaattagaattcaagattaagaaatgcactcaaaaccacacaaccacatggacattgaacaatctacttctgaatgactcctgggtaaataatgaaattaaggcagaaatccagttctttgaaaccaatgagaacaaagagacaatataccagaatctctgggatacagctaaagcagtgttaagagggaaattgatagcactaaatgcccacatcaaaaagctagaaag

SEQ ID NO: 887020 - DNA, 589 bp, Homo sapiens
atcctacatctagaaaacctcatcatctcagcccaaaagcttcttaaggtgataagcaacttcagcagtctcaggatacaaaattaatgtgccaaaatcacaagcattcctatacaccaacaatagagaagcaaagagccaaatcataaattaactcccattcacaattgctacaaagagaataaaatacctaggaatacagctaacragggaagtgaaggacctcttcaaggagagctacaaacctctgctcaaggaaatcagagaggacacaaatgaatgggaaaatattccatgcccatggacaggaagaatcaatattgtgaaaatggccatactgcccaaggtaatttatagattcaatgctattcccattaaactaccattgatattctccacagaattagaaaaaaaactttaaatttcacatggaaccaaaaaagagaccttatagacaagataatcctaagcaaaaagaacaaagctggaggcatcacactacatgacttcaaattatacgacaaggctacagtaaccagtaaccaaagcagcatgttactggtacaaaaacagatacatggcccaatgg

SEQ ID NO: 887021 - DNA, 608 bp, Homo sapiens
agggaaagcactgcattaaaaataagaaaacctgagatttgctcccagctttttcactatctgttgtgcttagacatataatattaataggcttcagtagtattatggccatgcatccctaatcaacagaaatatgttctgaaaaatgcatcattgggcaatttcactgttatggcaacatcatatagtatacttacacaaatctcaatggtacagtctgctatacacctaagctataaggtataagctattgctcctaggctataaacctggacagtgtgttactgtactgaatactgtaggcaatggtaagttcttatatatctaaacatagaaaaagcacaataaaaatatggtattataatcttatggggccaccatcatatatgtggtctatcattgactgaaatattatgtggtgcatgacggtaaataatttttgagaccaaaattataatatgcarttattctgatccttaaatatcaacaacttcagaatagacattaggctttacacaattttttttactgtgtcaatttttaaagacagaaactaaatgtatatatataaatatcttgagaaaatgtccactgatatttctctctta

SEQ ID NO: 887022 - DNA, 629 bp, Homo sapiens
ttgctgtaagatatcctaggccaaaggccaggggagccaactgggcaggaaagagttacgtccacttacctggtttcctcaaacacaagacattccaaagaaagtactgttttcagaactagtccttaacacactcctgggagataaccgctgtacattggaatattctccctcaaaaaggtttcgttttgtttaggtttttgtttagttttttttttttttttttttttttttttcggwattcctgaaaccttgggccctgctgcaccagttagacaagatactttttatcatgcatggtgaatgcctgtttttggttctaagagtggaccgggggctgtggtctaaattggtgaggtcatacaagccttgcatctctatgtgacagatcaccccaaaaactctggatgtcaactctcagaggagcttcctaagttggtaacacatcacctgtgttgccacacactgttgcttggggatttaagtgtgtccctgggaaagttcactgggcggggacccctagaagctagagcctggttcctcctagacttcacctgacttaacttttcccattgcatattcaaagctattttactgaaatttcactgtaataaactgtaactgtgatc

SEQ ID NO: 887023 - DNA, 577 bp, Homo sapiens
agcaacaccccgaagatcttgtgacatatgcatgattaacaaattaactaggtgatttctacgtagctgatgttttgaaaaccacttgatagctactggttgctgtagctagctatcaattttatccaaattttcawtcccttatctaattcccaaatgttatgaaaggcaacaaaagtagtgttacaaaaggtccaaataatatattggaggtaaatatataagattgatttatgggttttagagttggagactatatctttctactagtttgtattcccatcctcaatttagaaataattaagaagtatatttttatacctttttaagaaaaatgaaaaggacagtgccatatcaatttactccttggaccatagcataatgatctttttttttttttaattctttaacttgtcagtcactttgaggttatttttaataccgtgtgtgtgtatgtgtgtatgtgcgtgtggagtatgtgggtgtggtagacagtatatagagatatttttgtttgtatggaaaataagtagaggggagtctgcttttagaagaaatacacctctgtagagagatc

SEQ ID NO: 887024 - DNA, 669 bp, Homo sapiens
aaaagcaaaaacaaaatagaaacccaattcaaaaacagcactattgattgctgctgggttactgtggatactggaacagataatgtccgcattttcaaaggattttcttgagacacattcatggagacacatgtggccctggtaaagaacaagttgtgagtctacttttgaggattttacatatccaggtatagtgttaactcaragatttgaggacagtgagatcctcttgggactactgtaaacacattaaactatgtatggccctatgttcctatctacttatttttaagtagtctcaggtaaaatatgatttttgaggatatgatttaaaaatgctttccaatttgttttctaaattttttttctgtttttatgattcagactgagttctgagacatatagaaatattagcaaatgtctacacattaaacttctgagattttttaatactctatgtttatgaagccagggtttttatgttttgtcctcaaatagagaatgcattgctgctatttcactataggtaagttggatctaaaagggtaactactaatatttttacatttctactgatctgctggcatattataattttccagcttcattggaagagataaaatagccataattctttggaagataaatggagaaatagagtattgctaa

SEQ ID NO: 887025 - DNA, 643 bp, Homo sapiens
ttaagaaagtcatgcaaaaataaaaatattttgagaagaatacttgatcatcttgaaaatagcattagttttataggacaatattattgaagcatgtaaaaaaaacagtgagttttaattaacttttagaagattctactcctactccttggcttatcaatagtgcattgcaaggttcacttggctcactataatttttattttaatgatgttgttttccagggctgagtttagactgtgatttccttagatttatgcatgtaacttaatctaaaactgaacctgacaattttttctaactgattgttccatttaactgtattctgtctctttggaaaatgtgtgtcctcatattgcagaaatgcctcttaaatttgatttgaagaaggagtcaattttttttttttgggtggggggacggaatctcactgtcacccaggctgkagtgcagtggcgtgatctcagctcactgcaacctgggaggagtcaactttacagaggtacatacatgtcttctacattcttttaaagaatgtagctaattaatctgatttttaaagactaagttaagtattaacaaggaattcagggatctttgcctcattcagactgtagttacaaggacagagtactcattagagat

SEQ ID NO: 887026 - DNA, 677 bp, Homo sapiens
catattattggttttgtgtcatgtctcaatatgtcaccaaagccagcccagattttaaattcttattattacttaataacacctacattttaatcttagaaattcttcttcaaggcatcacaaagcagaattaaaaaaaaaaaaaaaagaatactttctgagtatcaaccaatattttaaatgattctatatcatgtgcagcctctttcctatrtagtgtgcaaataatgtacttctttttggattaaatggactcaggagtgagcatgtactatctagaatattgtacaaaattgccttgaatatgttatatgcaatgatatggtttcactgtgtcccaacccaaatctcatcttgaatttaatgcccataattcccaaatgctgtgggaggaggaacctggtgggaggtgactgaattatggggcaggcctttcctgtgctgttcttgtgatactgaatgagtctcacaagatctgatggctttaaaaacggaagtttccctgcacaagctctctctttgcctgctgccatccctataagatgtgacttgctcctccttgccttctaccataattgtgaggcctccccagccatgtggaactgtaagtccattaaatcctttcccgtataaattacccagtctcagatatgtctttatgagcagcatgaaaatgg

SEQ ID NO: 887027 - DNA, 677 bp, Homo sapiens
catattattggttttgtgtcatgtctcaatatgtcaccaaagccagcccagattttaaattcttattattacttaataacacctacattttaatcttagaaattcttcttcaaggcatcacaaagcagaattaaaaaaaaaaaaaaaagaatactttctgagtatcaaccaatattttaaatgattctatatcatgtgcagcctctttcctatgtagtgtgcaaataatgtacttctttttggattaaatggactcaggagtgagcatgtactatctagaatattgtacaaaattgccttgaatatgttatatgcaatgatatggtttcactgtgtcccaacccaaatctcatcttgaatttaatgcccataattcccaaatgytgtgggaggaggaacctggtgggaggtgactgaattatggggcaggcctttcctgtgctgttcttgtgatactgaatgagtctcacaagatctgatggctttaaaaacggaagtttccctgcacaagctctctctttgcctgctgccatccctataagatgtgacttgctcctccttgccttctaccataattgtgaggcctccccagccatgtggaactgtaagtccattaaatcctttcccgtataaattacccagtctcagatatgtctttatgagcagcatgaaaatgg

SEQ ID NO: 887028 - DNA, 640 bp, Homo sapiens
ggtgaaggatctaccccttcagacactccctactgtgaccatgtcttacaaagtataaatcacctgatcgtgctaccaaattctaatgtgtaacccatcacccttttaagtcatggcgtaaactagtaccatttttgtagaatggcattgacatgtgtctccttaaataatattccaatagcaactgactcctttttcagaaacaacaagttcacaggctctggaagagaagggaggaagagcaaagaggagtattgtataaatcattcaactaacaagtgccaaaaagctttttacattcttaatcactgaacagaaacatatgyatagaatttgcatttaaccatgactgtagacaggtttgggtgtattttggtgtatttgtctcagtgcctcatgagagcacacagttgaataatcagggaacttactttagaagagcacattttatttgggagaaatctggaagggcaccggcgtcaacgtatgggacccctcctcccatgctaagctttccagaacagtcctgatttcaaatattcagtcctgttgtataaccaattgatacttcaacactttctcatccaaactgcatctcctgaccatctcacacacataggagtccatgtatcctgattta

SEQ ID NO: 887029 - DNA, 616 bp, Homo sapiens
tggtctgcaccatccaaaacctctgtcttatactgtagttatatttattcagtactgtacatgccagtggggtaattttgtacccctagaggcatttttcaatgtcttgggacatatttgattgtcccaactggagagtgcgtgtgctaccagcatctagaaggtggagaccagagataccgctaaagatccacagtgctcaggtaattccccccacaacaaagaaatggtgctcgggctgagaaaccctgattatatcctgcacactgtacatctggtaagtggttaattttatattgcacgttataattacatataactcaatcagttgttttctcagtagctaaaagagtgaatgccaatccaaatgtgcctcctccagaataagtaagtagtttaggtaagaatttggctcaacattttatttttattctatcttggcttaggatgasatgcatacaaactctgttgaatgttttgataaaaactttcagagttggaggtaaactgtcttcataataagctattttcctagggcttcgttatatacagcacagcatttttttacagcattttattttatgtgcacatttatttttgccactttttaaaggaa

SEQ ID NO: 887030 - DNA, 615 bp, Homo sapiens
ctttcattaaaactcttttattctttctgctttgctataatgaaaaaatcttaacctgtcacacctgtagtgattatagaagggtctcaactctggtggggagagaagctcagaacaggcatgtataattttcaaagaccacataactgcttcaaaaaaaatgacagctgtcaccaacattttacatccaaaaacaagtttaattgttcagactggtgttttaraaagctccagttattggaaggctcctcaatttttgtatagccagagactcaaataactctaggctagaaggttttatttactgatgagagagggcatattcaatatcaaaaaattgtcatttttatttgtttgcattgaggctgagactaaaaagccaagcagcacaccaaaaggagaaaatttactgtatgcaaattaaaagctaaaataattgcctgccatgaaaagaaaagtgaagcacaggagcctgaggtaggccatatttgacttactcatctttagaacaatcttaatgcccatcgtttcaccttccacatagtaaatagtaaatgtctggtgcatgaataagaataagaggaactgaatagacatttctcaaaataagatata

SEQ ID NO: 887031 - DNA, 662 bp, Homo sapiens
aaaattaaaaaaaaatagaaaagtactgccatttaaatgaatgaatgccaggtcactttacccaaggctgcagggtacccacagcagcacaggtgtctccctcacttccttcaggcctctgaacaagtgtcaccaaagagaaggtacagaatgcagtgagaaccatgacaatatttcattgcctttaatgtagaatgagtctttggaaaatatttgaatgtgaaaatttatcttgaaggtaacttggcaatatgtatcaagatcagtaatgtgcaggcttttgacacagtaattgcatttatcctacagataaattacatagttatatttgtaggataaataattacataaatatatgataattatttaacgtatatatttatctgtccatgtatacagaggtagaattacaaagatgttcaatgytatatttttgtgattatagaaaacaacctaaattgcccaccagtaggcgaacagttaaatgacttcacaaccttaagaatgctaggccattatttcacaaaatgaggtaagtttatacatagcaacatgaaaacatatctaacttatatattaaatttaaaaagctagttgtagaattttatatctagtttaagagtcattgttttattgcttagaatacacacatatgtatattg

SEQ ID NO: 887032 - DNA, 413 bp, Homo sapiens
tcactattactctctggagcaagcaagattctatactgaggtccttttctgtccatttcttaataacatttagcatttaactggcacttattctctgccaggccttgttgtaagtgcttttcatatactagctcacatactcttcatttgttttagtttcctttttttctaatttagagamagaggtcttgctatgttgcccaggctgctcttgtactcctaagctcaagtaatcgttctgccttagcctccagagtagctgggattacaggtgtgtgccaacatgcccagtgtatattagctcgcatactattaaaacaaccctatgaggtaggtattattactctctttctacaaatgaggaggttgaggcacagagaggataaacaaatcatccaaggtcacacacctag

SEQ ID NO: 887033 - DNA, 413 bp, Homo sapiens
tcactattactctctggagcaagcaagattctatactgaggtccttttctgtccatttcttaataacatttagcatttaactggcacttattctctgccaggccttgttgtaagtgcttttcatatactagctcacatactcttcatttgttttagtttcctttttttctaatttagagacagaggtcttgctatgttgcccaggctgctcttgtactcctaagctcaagtratcgttctgccttagcctccagagtagctgggattacaggtgtgtgccaacatgcccagtgtatattagctcgcatactattaaaacaaccctatgaggtaggtattattactctctttctacaaatgaggaggttgaggcacagagaggataaacaaatcatccaaggtcacacacctag

SEQ ID NO: 887034 - DNA, 629 bp, Homo sapiens
ttgaatgcagtacaactgacatcctgggatttcccaggctaggtcatataaagccttgcagcttctgcttggtcttcctggaaggtttgctcttggaacccttaactaccatataaaacatgttagtctatccacatggaaaggtcctgagaccacagggggaatcaggggacccagttgagcccagctttccactgtgccttcctttgtaggtgttaagcttgagtgaggtcctttcagaccttctaacctacccatctaccagctaaataccatcaaatgacctccaatgatgccacatggaacagaaaactcacccaggtaatccctgctcaaattycgaatccacaaaattatgagtaataagatggtggcagttataagccactaagtcttggggtgctttgttacacatcaacagataataaaacgcaaacactgctggactcttgtgactcaggctcagaggcggaaccaaccactaatgaaggcttttggcaagggctcattcactggattttggaagacaacaacacctgagtggcacagatgagacaaaggggaatgtgtttctgtaggccatctgtcctagatgctgctttcaaatgaatttgaatagttcccttttg

SEQ ID NO: 887035 - DNA, 575 bp, Homo sapiens
aacattgtggcaaaaaaaatgtgttttaaaaacatagtggcaatgaagggtgtggaagagatggggcttaggataggggtgggatgggtgagcactttccaggtgagttccggtgacagttctcaggccaagtacagagcggcatgggggtggggacagtggaggacatcccagcggcccaagcaccccatggctctggatacaccccacacygcaatcttgggcttcttatattgattctgcaagaaagaagactttgcactgatgtttgactatgaatcacaactacaaacttttctagtctgcaaacaatttctaaagcagttattcttgtccagtcctctatttttaaagaagaagaaaaggatccctagagaagtgactttgaaatgcacagggcactggacctgggtcagatgattcaatcagtgtcttgtttctgcgtcttcctacctgtgtgatcttgggaaaggcattggcctttctggctacagcttctccactgatagctttgtgatcatcctttctatggatgctaggaagattaaatgggacaatgcacatcaaatcaccat

SEQ ID NO: 887036 - DNA, 660 bp, Homo sapiens
gataggggtgggatgggtgagcactttccaggtgagttccggtgacagttctcaggccaagtacagagcggcatgggggtggggacagtggaggacatcccagcggcccaagcaccccatggctctggatacaccccacaccgcaatcttgggcttcttatattgattctgcaagaaagaagactttgcactgatgtttgactatgaatcacaactacaaacttttctagtctgcaaacaatttctaaagcagttattcttgtccagtcctctatttttaaagaagaagaaaaggatccctagagaagtgactttgaaatgcacagggcactggacctgggtcagatgattcaatcagtgtcttgtttctgcgtcttcctacctgtgtgatcttgggaaaggcattggcctttctggctacagcttctccactgatagctttgtgatcatcctttctatggatgctaggaagattaaatgggacratgcacatcaaatcaccatggaaatgatgtacagctgtacaatcactgcttcaaagcaacttactctaggcacacagctaatcagaatgcaaggaattctggccactttgtgtaactaatagtcatatcagtatgttctggtgcctataaatcttcttagatgcttcttttcctc

SEQ ID NO: 887037 - DNA, 559 bp, Homo sapiens
tgttttcatgtggcaggtgtccctgacacaaggtayagcagcaagcattgcccagaacatggctactggcttagcaatgccatggaggggatgcagaaatgggacattaatggcaatttaagggcaggacaacatgtacatatacagatacaagagaagaacatttctggatttagatgaaaggggaaaacaaacaagatgtattaccagtaggaaaggatgagtacccagttaatccattagataccatttatatttcaattgttaatgccaatcccttaagtgaacataggttctcacctctatataaatcattaacttctattagtagatgaaaaaatacttgatttcacaagcagcacaaagagaaggcctgcaataaacaaggttatagggtatctcacttgagttggacaatatctattttatagtgaatattccaataacgattgtgaatcctgagtttgaacttccttcctcttcctattggtggtagtgacagggaacatgtatggaaggcaagaaagaaagataaaagataagatgaagagccaactag

SEQ ID NO: 887038 - DNA, 646 bp, Homo sapiens
ccaagacagccttattcactagttctcataaataaaaatggtgctaacattaactaaagtggcataaactatagtaggcagtgggcaatcattagtttaygcaatagactaacaacccattaaggtagatattattatcttcattagccacatggggaatagaggtgcagcaaggttaaacaacatgttcaaaggccgtccaattaatcagtggtactgccacatctgtctgattctaataaaaaagggaaatctgccaaataagaataatacagttcaaaaagtcagattaaatgaattcagagaggtagcaggagattcagtgaggaaactgagttaaaaaacccctaaatcccctgaaatctaagcacccaaaggagttggatggcacttatggagatactttcaaaacacaagagaaaaagttgaggtaagaaaaagaatcaatttggctaaaactagaacctacaccaacataatagaaagctaggtaacaaggcaactaaaccaggtcacttaagcagaagtgaagaaaataaaattcacctgtagaaagaaagcccagaataggagactatttttaaatgggaattagttggaataggataagcattatttaattctactgggcaggaggaaccgaggt

SEQ ID NO: 887039 - DNA, 630 bp, Homo sapiens
tgttgtaattttccatcgttgctgccaataatgggcaagtctgtctactgaccctcaggaagcctatcaacctatgtgagtgtagattcctgaaaatatgttgttttatcaaaacacatccgagagcttttcacctgctccatccagaccacctaaatagacmttgcacattccaccatattctctttcttctggcaaatccttcacctttatgtgcacctgagccttactcattctttacagtagtgttcaagctccatgtccttctctgctattcctggccaagatcttttgatctctagacaactgctgtccaacagaaataaaatgtgaactgcacatgtcattgtgaaaattctagtaaccacattataaaagtaacaagaaacaggtaaaaataattttaaagacatatttaacataatcgaatatagccacattattattgtttcaacatgtaatcaatagaagaattagtaatgagatatgagatatttacttttttcagcatcagctttctgaaaaccagagtgtgtgttaatacaacacatttcaattcagactagacacatttcaagggctgagtagccatgtgtattggatagcgcaacactggaccgcatgttctga

SEQ ID NO: 887040 - DNA, 644 bp, Homo sapiens
gaaaacaagagggacctcttccaagagaatacattgatttccaccctcatggtcttatgctcttaaaattggtaggcattaaaaacagtatccatacatctgagttcctacagaactcagcagtgtgtaagcagacactctgagaaacggtattgtgttagttctaccatgagggtgacatggggatgacagagtccaggaacagactggaagacttcttggtcattgtgtgttgagaggattcaaacagcaattggtagtttttttctgtctttccaacagtgagattataaggttatatcttttaataagttaatctctcagtgaatttggtggtatctcgtgttccctgaatgtatcttctcagttgccgggcttctccttagagtgcctgctctggtaatgtctccatggtattgatgagaaacaatatgaaatggytactggctggaaggtcttatgggttgtactcaggttcacattctaaatgttcaaggctcctgtgctgttcttgaccaacgaagcctaatgagtctgtaaaaataattttaattttaagattacacaattatatttcttcttactgtagaaacagctaaatgaaaaaccttttgtgtactatgtgttgaatttgtttactgtga

SEQ ID NO: 887041 - DNA, 640 bp, Homo sapiens
ttcaaaattagtatttatctttaaaacaattattcttaaaatcttttgaaagtatgtgcgcatggtaaaatttttgcacaaagtgaaagcgatttcagcgaaagcaaatctctctaattccagcccatgccttcaggcttcctcctcagagatggccaatgttgctgttccctcrtgtatccttcctcacatcttttatacatggatattacctttttcctcagtggtagcatatcatacgcactgttatgaaccttgttttttacacctaacaactaattttggagctcattccccatccatatatacaaaactgcctcatgattttttacattaaaacagttaactattgctagaatcttgctgtactcaacaaagcattatgtaggagttgttaatgtccatgacatgtttgttttattttagagtaggatgaaccctctttctctggcccttctggtgggtagattttgaaacttcatactcagagagataacagagcagagttccactgtgtggctcttcagttctgtgttttcaacaataggtggcaccagcaatttctgtatttgggctgtatgtagagaggaagcatcatcattttgatcatttttcatttcatattgtgttcacagattat

SEQ ID NO: 887042 - DNA, 618 bp, Homo sapiens
tttcagtcctctccaggccaaatagcatcacaggaaatgacttccagacagcacgtgggcctcaccactatctgtgtcagctacccataaccatccttcactgcgattgagaaaggggattagagtgtgagcggtggggtgtcatttacaagcttttgtatgtcctttggcaagttccatgtatttctgcttctcaattcccttattagtaaactaggagttgttgggagaatcagacagggtgatacatagagagcactcagatgcttttactcatggtaggtgttcagtaaatggtagcagttgtcatcacccttgagtgattctgatcatcattactattgcgttttcaagacattagtggtagctaagtctccaagatagtcgccartgatctcatatattatcttgtgttttattcctttattgggagaaccatgactcatggagatcttgcccatataaaagaggaagatgaagagtgagtgcgattgaatctctttccctgtgaacattctccaagatgtttgtggtgatacccacaactccccatgctttctcatcatcttttctcagtttttaatccatttttcaattcaacctctgccctatactgtc

SEQ ID NO: 887043 - DNA, 649 bp, Homo sapiens
tatatttgcacttgcgtgtttggaatagctaaggtatatgtaggtcaagccctaggcaaaaccatgaaacaagcaaagctcaccaaagctctgtaactatttgtattcagcagcagtctagacattggatgctcctagctgcagatttttctagtatcgtccctcccttcccctccttctcctatctcattgccataagagtcacatctctactcaacctaaaggccgttcataagtgatcataggtcatatgatctcctgtccaacctcttccaccctcctttgcaggatatcttttagaaaagtgacctagaagagtaagtaggtatcttaggcacggtggcagagtaaattgtgggggcagaaattttgggggcagggctgtcttactcagcaactctaagatctccttgtgtaaatgcstagtccacctacccagcctgcattatgcaactgaccagagtcattctagttcacttggagataggaacatatctttaagaataagaaacagtcctatgaaaagatgttctgaaatgtggggcttttgagaaaggatataataattgctagcttcactccataaattactgtatttccccaaaggtagtgataatcaatgtgctttgacactcagtttcagctggaa

SEQ ID NO: 887044 - DNA, 658 bp, Homo sapiens
tttccattgaccttgaggaatgtgtaagggcaaagtcataagccgagtttaattgataatttcactgtccatatgtgaagaaagagcaatgaaccacaagacttgggctcaaggcccagctctgcctctaacatgctgcaggacctaggatcagtcctttcctgtctccaggactcaattttcttgctatacaatgaagggattgtacggagtgatytacatggactagcagctctaaggtttgtaagactgtattataaactttgaagagaatgagggaagggtccaaggattctcctttgcagctttcctagaaaaccatgtatcttccccatgaaaggaagaatacaaataatgatggtcaaatttactgaatgcctattatgtgccacatactaatgtccatagttaagagtcaaactaagacccaaagccaaaagaaagtattgtacccaaggccacataactagtaagtgatgtaactgagacttcagatatcaaactaactccaagcctgtgctgaacaccgttctcttcatctacccagccactttttgttgttattgtacctttgtttgtttattcttccattcactcatgctaccaatgttccctaagtactttctctgtgcacgaaactgtgtaaacaccagtaagc

SEQ ID NO: 887045 - DNA, 552 bp, Homo sapiens
gccccaccttcaggcctgggatggcctgaaccctgggggctgggctgccagatctatggaccagagtgagaacttacagtgatttttccagacttgaccatggacacctatggacaaatcagtatacagttcctcctccctgaagcccataaaaactccggactcagccagactcagatagatgtcaggactatcagcwgcaggattgagctacccaggaaggagctttggtctcctcgacttgcccatggaaagcagtgacccattgtaggtctcctctctgctgagagctagagagctggacactcatcaggatgacctgccttcagaaaggagctacccacttcaagtctcctgagggctgttctgtcactcaatgaagctcctctttgccgtgctcacccttcacttgtctgtgtaccttatttttcctggaagcaggacaagaactcgagacttgccaaatggcagggctgaaaaagctctaacacaaacagggttgaaagacaccccttgctcaccacattgcaggcaatgaggagagaagagctg

SEQ ID NO: 887046 - DNA, 594 bp, Homo sapiens
ctacaggacttggaatgggttgtattttgtggggaatgggtgcaggtggaaaggaaagaggagttatcaaggctgactccttggtttcaggattttaaaaatggaaatagaaaatactgtcagaagaaagggaggcaattcatggcaaccatagtasagtggtctgcaagggttacaaatgagaagttactgtacttttattttatggtaggagccaatcctagaatgaatcgaagtgaatcaatgtagacagagatgcctgctttttcaaaagttttggctgttaagaaatgaagagacagtagctggagaaggtaactgaatgcaatgacattgtctttagcatgcattagactttaacttttatttaaaatttgaagaagagaagctagtagagaggaaagtgagaagaggctcaggtgctcaggtcaaatcctggctctacaagttcctatttgtaagaccttgagacaagtgatttagcttctccatgcctcagttttcatgttggggaaaaaaggataataatagcacccaccatgtggacttgatgagagggttcagtgagccaagtacataaagtgctttagctaa

SEQ ID NO: 887047 - DNA, 594 bp, Homo sapiens
ctacaggacttggaatgggttgtattttgtggggaatgggtgcaggtggaaaggaaagaggagttatcaaggctgactccttggtttcaggattttaaaaatggaaatagaaaatactgtcagaagaaagggaggcaattcatggcaaccatagtacagtggtctgcaagggttacaaatgagaagttactgtacttttattttatggtaggagccaatcctagaatgaatcgaagtgaatcaatgtagacagagatgcctgctttttcaaaagttttggctgttaagaaatgaagagacagtagctggagaaggtaactgaatgcaatgacattgtctttagcatgcattagactttaacttttatttaaaatttgaagaagagaagctagtagagagraaagtgagaagaggctcaggtgctcaggtcaaatcctggctctacaagttcctatttgtaagaccttgagacaagtgatttagcttctccatgcctcagttttcatgttggggaaaaaaggataataatagcacccaccatgtggacttgatgagagggttcagtgagccaagtacataaagtgctttagctaa

SEQ ID NO: 887048 - DNA, 638 bp, Homo sapiens
ttacatcacagtaatcagcaataaatctcttaccatagcagtctatggacaatcaataggtaattggttgaaaaactatgaagcatccaaacagtggggtactatatacctaaaaatgaattagaataatattgtatgtgattggagtaatcacaaatatattttactaaatggaaaaaaggaaagtgcagaacagtgtttaaggttttttgtttttttttaatataggcacagggcctcactatgttgcctaggttggtcttgaacttgtaagctcaagsaatccaccctccttggcctcccaaagtgttgggattacagtgtgagccaccatgtccagcccagagcactgtttagagtgctctcttttgtatagaaatatatataatatatatatatgtatatgtatatatgtatataaattttttattaggaaacactgacaggttacccaaacctaacacaatagttatctacaggggaaacaagaaaacaaggtccagggataagaatagaagccagagttctgcagtatatcttcatttataagttttagctttgcaccacacaaaagttttacatacttttttttaaagcacaaaagaaaaaaaaaaacaatctctacaaattatataccc

SEQ ID NO: 887049 - DNA, 598 bp, Homo sapiens
catgagatatgatggttataaaaaggggagtttgcctgcacaagtgctcctttctttgtctgccaccatccatgtaagatttgacttgctcctccttgccttccaccacgattgtgagacttacccacccacatgaaactgtaagtctgattaaacctcttccttttataaattgcccagtctcaggtatgtctttatcagcagtatgaaaatggactaatacagtacattggtaccagtacagtgaggtgctgctgaaaagatactcgactatgtggaggcaactttggaactgggtaacaggaagaggttggaacagtttggagggctcagaagaagacaggaaaatgtgggaaagtttggaacttcctagagacttgttgaatggctttgaccaaaagcctgatagcaatatggacaatawggtccagactgagatggtctcagatggacatgaagaacttgttgggaactggagcaaaggtgacccttgttatgttttagcaaagagactggaggcattttgctcttgccctagagatttttggaactttgaacttgagagatatgatttagagtatctggcagaagaaatttt

SEQ ID NO: 887050 - DNA, 585 bp, Homo sapiens
gctctcacggagaacttctgctagggcagtgcagaagggaaatgtagggtcagagcccccacacagagttcctactggggcatgacctagtggagctttgagaagaaggccaccatcctccaggcctcagaacggtagattgactgatagcttgacccatgcrcctggaatagcagcagacactcaaagcctgtgaaagcagccaggagggaggctctactctgcaatcccatgggggcagagctgcccaagaccattggaacccacctcttgcatcagcatgacctggatttgagacatgtaatcaaaggagatcattttggaactttaagatttgactcccctgctagatttcaaacttgcacggggcctgtagcccctttgttttggccaaattctcccatttggaatggctgtatttaccaaatgcctgtaccagcattgtatctaggaagtaactaacttgcttttgattttacaggctcataggcagaagggacttgccttgtctcaaatgagactttggactgtcaaatttgagttaatgctgaaagagttaagacactgggggactattgggaaggc

SEQ ID NO: 887051 - DNA, 585 bp, Homo sapiens
gctctcacggagaacttctgctagggcagtgcagaagggaaatgtagggtcagagcccccacacagagttcctactggggcatgacctagtggagctttgagaagaaggccaccatcctccaggcctcagaacggtagattgactgatagcttgacccatgcgcctggaatagcagcagacactcaaagcctgtgaaagcagccaggagggaggctctactctgcaatcccatgggggcagagctgcccaagaccattggaacccacctcttgcatcagcatgacctggatttgagacatgtaatcaaaggagatcattttggaactttaagatttgactcccctgctagatttcraacttgcacggggcctgtagcccctttgttttggccaaattctcccatttggaatggctgtatttaccaaatgcctgtaccagcattgtatctaggaagtaactaacttgcttttgattttacaggctcataggcagaagggacttgccttgtctcaaatgagactttggactgtcaaatttgagttaatgctgaaagagttaagacactgggggactattgggaaggc

SEQ ID NO: 887052 - DNA, 514 bp, Homo sapiens
tgagctgatggatataagcagctcttacaagttacacaggatatactgattttttttttttttttttttttgagatgaaatctcactcttgtcgcccaggctggaatgcagtggtgcgatctcggctcactgcagcctccacctcctaggttcaagcgattctcatgcctcagcctcctcagtagctgggattacaggtgtgcgtcaccacacctagctaattttttgtatttttagtagagatggggtttcaccatgttggccaggttggtcttgaacaataggcataarccagagccatcttaggcaaatcaagatgtttggtcataccagtgataagtaaccagagaagctatcaccttagaaatggttgtggatgttgaaaataagtgaattgagccctcaactagatgggcatgagtggagattactagcctaagatgactttctctagtcacatgatattgccctgaaatatcatgggctatttcttctgggtacatcttcctatata

SEQ ID NO: 887053 - DNA, 605 bp, Homo sapiens
ccatatgtgtgcaggtgtctttttcatataatgacttatcttcctttaggtacatacccagtagtgggattgctggatagaatggtagatctacttttagttctttaagaaatctcaggctgggcgtggtggctcatgcctttaatcccagcactttgggaggccaaggtgggaggatcacctcaggttgggagttcgagaccagcctgaccaacatggagaaaccccgtgtctactaaaaatacaaaattagctgagtgtagtggtgggcgcctgtaatcccagctactcaggaggctgaggygggagaatcgcttgagcccgggaggtggaggttgttgtgagccaagatcgtgccattgcactccagcccgggcaacaagagtgaaactctgtctcaaaaaaaaaaaaaaaaaagaaaaaaaaaaaagaaaaagaaaaaaggaagaaaaaaaaagaaatctccatactgctttccatataggtaatactaatttacattcccacccgcagtgtataagcgttcccttttcaccacatccatgccaacatctattgttttttgactttttaataatagccattcttgcaggagtaaggtggta

SEQ ID NO: 887054 - DNA, 662 bp, Homo sapiens
agaatttttttcaacattgaacttgatttctctctggtcaataaaaatccatgatcctgtttgaattctgtatagccaagcatttcaaagagggattttcttgctggagaagtgataggcctttgggggtagtttaattagttgacattggtgtatgtctactctattagggttttccagagaaacagaaccaataggatgaatggatggatgaatagacagatagatcaataaatacatagatagataataaggaattggctcacatgattatggaggctgacaagtcycaagatctgcagggtgagtcggcaagctggagacccaggagagctaatggtgtagttcccacaagaaggccagcagactggagaactaagaaagagtctgtgttttagttcaagtcctcaagtccaaaggcagggaaaagctgatgtctcagttcaaaaggagtcaggcaggaggagttctcctttactggggcaagtgtcaaccattttgttctattcaggccttcaactgattggatgtggtccacccacattaggggaggcaacctgccttactcagtctactgattcaaatgttaacctcatccaaaaacaccccaaaggaacacccagaatcatgtttgaccaaacatctgggcacatgatggccca

SEQ ID NO: 887055 - DNA, 543 bp, Homo sapiens
cattacaatcctatgaagttggtatataggaggaaaattgaggtactaacataagactaaaaaatttgaagtttcccagctagtcaaacaacctaaatgattgtataggttgtccggggtggagccaagatgactgaataggaacagctccagtctacagctcccagcatgagcgacgcagaagacgggtgatttctgcatttccaactgaggtaccgggttcatctcactggagagtgctggacagtgggtgcaggacagtggatgcagygcaccatgcatgagccaaagcagggtgaggcatcgcctcacctgggaagtgcaagtggtcagggaactccctttcctagccaaagaaagaggggacagatggcacctggaaaatcggatcactcccaccctaatactgcactattccaatggacttatcaaatggcacaccaggagattatatcctgcacatgccttggagggtcctacgcccatggagcctcgctcattgctagcacagcagtctgagatcaaactgcaaggcagcagcga

SEQ ID NO: 887056 - DNA, 562 bp, Homo sapiens
gcaggacctgatatgcatactttggacttttttttatactttaagtttcagggtacatgtgcacaatgtgcaggttagttacatgtgtatacatgtgccatgctggtgtgctgcacccattaactcgtcgtttagcattaggtatatctcctaatgctatccctcccccmtccccccaccccacaacagtccctggtatgtaatgttccccttcttgtgtacgtgtgttctcattgttcaattcccatctatgagtgagaacatgtgtttgattttttgtccttgtgatagtttactgagaatgatgatttctagtttcatccatgtccctacaaaggacatgaactcatcattttctatggctgcatagtattccatggtgtatatgtgccacattttcttaatccggtctatcattgttggacatttgggttggttccaagtctttgctattgtgaatagtgccacaataaacatatgtgtgcatgtgtctttatagcagcatgatttataatcctttgggtatatatccagtaatgggatggcagggtcaaatggtatt

SEQ ID NO: 887057 - DNA, 562 bp, Homo sapiens
gcaggacctgatatgcatactttggacttttttttatactttaagtttcagggtacatgtgcacaatgtgcaggttagttacatgtgtatacatgtgccatgctggtgtgctgcacccattaactcgtcgtttagcattaggtatatctcctaatgctatccctcccccatccccccaccccacaacagtccctggtatgtaatgttccccttcttgtgtacgtgtgttctcattgttcaattcccatctatgagtgagaacatgtgtttgattttttgtccttgygatagtttactgagaatgatgatttctagtttcatccatgtccctacaaaggacatgaactcatcattttctatggctgcatagtattccatggtgtatatgtgccacattttcttaatccggtctatcattgttggacatttgggttggttccaagtctttgctattgtgaatagtgccacaataaacatatgtgtgcatgtgtctttatagcagcatgatttataatcctttgggtatatatccagtaatgggatggcagggtcaaatggtatt

SEQ ID NO: 887058 - DNA, 613 bp, Homo sapiens
caatctcttaatacaacctagtacttagtctatacccaaattttcctgcttgcctcaaaaatataaattagtttgaatcagattctaaacaaggtctgtgtattgcatctagttattaaccagatcatgtgtttcatgatgaaaaggtatttgacgtcagacctaccttatctggatgggttttgcgtgcctttctggccagatatgtagcttagatcgttagaagccctgaagggctgtgaacccctgccaatactgtcaggttatttcccagagggatattcagaaatcctctgcccttccttcattgttgctaacaaaactgtggctctttcggtgtcagaagcaatgggggtatgagtttgggctttctctgctgacccakaggtgagtcccgactgtcctgaaggctgtcacgattctagtcccattgagagtgattggtttcagaacaggcatgtgacccagttcaagccatcaaggcctgagggaaggatgctaggtggagcttctctggaagggtttcttttcccttggtttggggtcttgagacttgaatggtatatgcgaacatcatgtctagagctgcggcagctgccatctcatgactgca

SEQ ID NO: 887059 - DNA, 604 bp, Homo sapiens
tggggtttttcttggtttgtttgttttgtgtgtgtggtttttttttttttttttttttttttttggagacatggtctcagtctgttgcccatggtggcacgatcttagcctcactgcaaccgtgaactcctggcttcaagcaatcctcttgccgtagcctcccaaagtgctgagattatagttgtgagccactgtacccggcctatgtagaattgtttttccacaattttggttctaaraatttggacacaggagtaaagcatactggatacaatgcaaaagataattcttgtagaattatctgaaagtttagaatcttctgaaattatcagaaattttagatagcctttttatcactcttattgttggattctcacctaaagtattcagtcacaaaggttctcaaagccagtaaatgtgtggaagagtaagtatatgagaggataaaggttatggctttgtttaagttgtcttataaaagtattaaagcagtgccatgcatgtgtttttgcttaataaataatacagacatttctttgacttttccccctcagaggtgacattgtgattgcaaaaagcccaagtgatccaaaatcaaatattt

SEQ ID NO: 887060 - DNA, 604 bp, Homo sapiens
tggggtttttcttggtttgtttgttttgtgtgtgtggtttttttttttttttttttttttttttggagacatggtctcagtctgttgcccatggtggcacgatcttagcctcactgcaaccgtgaactcctggcttcaagcaatcctcttgccgtagcctcccaaagtgctgagattatagttgtgagccactgtacccggcctatgtagaattgtttttccacaattttggttctaagaatttggacacaggagtaaagcatactggatacaatgcaaaagataattcttgtagaattatctgaaagtttaraatcttctgaaattatcagaaattttagatagcctttttatcactcttattgttggattctcacctaaagtattcagtcacaaaggttctcaaagccagtaaatgtgtggaagagtaagtatatgagaggataaaggttatggctttgtttaagttgtcttataaaagtattaaagcagtgccatgcatgtgtttttgcttaataaataatacagacatttctttgacttttccccctcagaggtgacattgtgattgcaaaaagcccaagtgatccaaaatcaaatattt

SEQ ID NO: 887061 - DNA, 631 bp, Homo sapiens
tagatgaatcctaatatcacattattaggttccaaataggcaactcaaaacactacattgtttaggaacacgaatatatgtggtaaaattagaaagaaaaacgaggttagaataaacataaaatttcttcagcagtttccacttcagagcaagtaggcagagggatgggtgagtcatgcaggaattttaagttattggcaataacttaagctgtttggttggtacataggtgttttaaaattattgtacttaaaatgtacatatattccatatgcattcttttgcatatattctacatgttaccaaataaatgcaacacaaagtgataagtgcaactgcacaggtgmatttaagtagatgacaaaaaggagaacatgatccactgcctgcaagattcagacagatcttcagagaagaggatatgagtggatatgtttctaaaggattcatgggagtttacaggtagaggtagaaaaaaatatttttatgcggagggtttagacacataaaatagtttgggctttggagggattgtaaagaattcaatatgctttggagcattgaaagtaggggaaaatgtgagctattgatgcttgataaatgtagaaagattaaaacgacaaacagaggg

SEQ ID NO: 887062 - DNA, 644 bp, Homo sapiens
agcagaacaagggaattcaaaagaaaaatggaattttgttggagggggtcaaagtagaaatgtttcttaagtgttacagtgtgaaaacagagaaatgttaaacttgatgctgtcatacaaataactttgacctcaaaaagccagaaactttgaagaaatcttgatgagtcctacagattctatcatcacctacatatagatctcgatgccaaatctcaaggcagggtacccagcagagagcttctgggacatgtgtccactggggctgcagcaaagtttgtgttacataacactgctggggagattaagcacacagcgaggagggtagcagaactgtagtcactgctgtgaatactctccattaatcaatcgatcaacccacaggtagatcccgagcacctcacctgtgtacaggaaccagacttrcacaagttcgccaaagtgtttcacagaaaaacctaaaaccagctttggcttatgagtttggacagcaaagggcgagaaaaagaaaattgttgggaagaggcagagttaccaatagaaataattaccccagcctctaacagaaaaataacccttatatgcaacttgtgtaggaagtatttaggattcaatattgtaaatagaaatcaccatgtaaattc

SEQ ID NO: 887063 - DNA, 639 bp, Homo sapiens
agcatgaattaacgacataattatttcagcttatactttagctaccaagtcctggcataggtgtaataggatagagtgctaggaagcacaagcctctaaaagtgagaactcagatgttcaaacacagaaacccaacaagcctgaaaaatattgccctacgagaaattagaactccaaagagttgctttccaaagttaaaatttctgtggtacaacattttcattctcatgaaaatgataacttcttagaatggataccaaaaaatagcaactgggcacagctggatggctgcctggtctttagtgcaagagtcctgatgtttttcagacaagaggccagttgttattgagtttcagagagaaagaattatttagtgcaggtatactccttacccatttgtgtatatgcacgttttatgtatagctctgttctawaactgagagcttatgacagagagtcataagtctcttgaagaagcaggaagaagaaatgataaaagggaagccaaggaaagccctgcctgacaaatagaacacctgtcaggtcaacgttccatgggatctaacagtacacactggtgcaggcccaattagctaggcaaatgatttaggtattaaagggacataagtcatgagaaca

SEQ ID NO: 887064 - DNA, 645 bp, Homo sapiens
attctcatctagggaagtgaatattaggcattttatcagctactagtatttcttgatttctggtcatagtttgcaatttcacctcaataagggattcctcagaaataagaggcactaacatttaaacacataattagcaacggtcattcatgtcatttaatagcacaccgctctgcattcaaagccagatgacaacaagcaccaaattaccattaagtacatctgtgaagcaggcagaagcaggcagagctcaatttcatasacaagaaaaccaaaaggatgaggccattaacaagtcattttctgaaggtccacatgaaaggtaggactatcttgcataggtagttgggcccctgggtgaaatttctgaagtgtggatcatggttagttctgagatcaagctagaacaatgtctaagcacatagcaggaactcaaatacttaaacaatagctcaatgaacctgtgaagtataacttgggggtttagggaaactgaaaatttctggaacttagagtaccaggcacgagataagaatttagtaaattaaacagaataaatgaaaatctgagaaaggtatgccttcagcatacttcagcaccctagctaaaatagtggctgcacagactctgattttgcagagatac

SEQ ID NO: 887065 - DNA, 645 bp, Homo sapiens
attctcatctagggaagtgaatattaggcattttatcagctactagtatttcttgatttctggtcatagtttgcaatttcacctcaataagggattcctcagaaataagaggcactaacatttaaacacataattagcaacggtcattcatgtcatttaatagcacaccgctctgcattcaaagccagatgacaacaagcaccaaattaccattaagtacatctgtgaagcaggcagaagcaggcagagctcaatttcatagacaagaaaaccaaaaggatgaggccattaacaagtcattttctgaaggtccacatgaaaggtaggactatcttgcataggtagttgggcccctgggtgaaatttctgaagtgtggatcatggttagttctgagatcaagctagaacaatgtctaagcacatagcaggaactcmaatacttaaacaatagctcaatgaacctgtgaagtataacttgggggtttagggaaactgaaaatttctggaacttagagtaccaggcacgagataagaatttagtaaattaaacagaataaatgaaaatctgagaaaggtatgccttcagcatacttcagcaccctagctaaaatagtggctgcacagactctgattttgcagagatac

SEQ ID NO: 887066 - DNA, 619 bp, Homo sapiens
gatgaagaaaatgtggcacatatatacaatggagtactatttagccagaaaaaggaatgagatccagtctttgcatcaacatggatagacgtggaggttattatgttaagtgaaataagccaggcacagaaagacaaacttcacatgttctcacttatttgtgagagctaaaaatttaaaacaattgaactcatggagataaagagtagaattatgtctaccagaagctgggaagggtagtggctggggggaagtaaggatggttaatgggtacacaaatatagataaataaaatgaatatcatctagcatgtgttagcacaacagtatggctacactcaacaataatttattgcacatttacaaataactaaaagagtataattggattgtttgtaacacaaagaaaggataaaygcttgaggtgatggatacctcatttactctgatgtgattattatgcattatatgcctgtatcaaaatatctcatgtaacccataagtatatacacctactatatacccgcaaattaaaaatttaaaaaaaaacttagaatgaaaagacaaaccacaaagaaagagaaatatttgaaaatctcatatttgctaaagaattttta

SEQ ID NO: 887067 - DNA, 553 bp, Homo sapiens
tttccaaaatgtgtttcaatacacattttagaaaagaaacttcagaagcaggaaatttttcaaaaattgaaagtccatatgattacaataaaaaaagaaaaagagatacaagatgaagaaactgctgcttcagaaagaagctgcagaaggatagaagttattaarataaaattacatacgaatatgataaaaaagaaagagaaataaaagcacaaaatttttttaaatatattatagtccatgaatctagcatcttactgataaagatgattcttggttgtattcttagattttaaaaagtagccctgagattcccggaggctttgcatgattgggttgcactgaattatagctgtcaggtctgggttatgatttcataggcaatgttaattcttaccaattctttaagagttttgacaaataaggccccttaatcttagtataaatattttctgataaaggtggtgtagtataaataataatagaaaaccaaacatatgtaaaataaactcgaaagcccactctctcttttaacacaggtgttccaaatttg

SEQ ID NO: 887068 - DNA, 641 bp, Homo sapiens
gaaaaacgttcctttgtttttacaatacagacatgccttgttttattattctttgcttaattgtgccttgcagatgctgagtttttgaacaaatggaatgtttgtggaaaccctgcactgagcatgtattggcttttccaacagcatatgctcacttcatgtctctgtgtgacggctgggcaattctcacaatatttcaaacttttcattattattttatctgttatgatgctctgtgttcagcgatctcttatgttactaatggaattgtctcaaattgccacaaactacaaccacataagtcagataacttaattgctaaatgttgtgtatgtyattactgttccaccaaccacccattcatctgtttctctgcctctcctcaggcctattctatgagacacaacaatagtaaaattaggttaagtaataatcctacatggcctttaagtgttcaagtgaaaggaagagtagtgcacctctcaggttaaatcaaaagctagaaataattaagcatggtgaggaagggatactgaaagctggccgggcgtggtggctcacgcctgtaaccccagcactttgggaggccgaggcaggcagatgacgaggtcaggagacagagaccatcctggctaacatgg

SEQ ID NO: 887069 - DNA, 603 bp, Homo sapiens
aaatacttgcaaatcaaatccagcagcatatgaaaaagataatccatcataatcaagtaggcttcatctctgggatgcaaagttggttcaacatatgtaaatcaatgaatgtgattaatcatatacacaaaaataaaagcaaaccccatgtgattatctcaatagatgcataaaaggctttcaataaaattcaaaatctcttcatgttaaaaactctcaacaaactaggtattgaaggaacatacctcaaaataatgaataatctatgacaaacccacagccagcatcatactaaatggacaaaagctgtaagcattccccatgaaaaccagcacaagacaaggatgccatctcttaccgcttctattaacaacatagtattggaagtcctagctaggttaatcagacaagagaaataaataaagsgtattcaaatagaaagaatgaaattcaaactatcattgttagcagtcaacataattctatatctagataaccccatagtctcagcccaaaagttccatcagctaataaacaacctcagtgaagatttaggataaaaaaaccaacgtacgaaaatcactagcattcttacacaccaag

SEQ ID NO: 887070 - DNA, 608 bp, Homo sapiens
ctgtgacttgccaaaagaaaatcagcttgtacattactctggccaaccagtgccaataccctgaacaaggagctatctctaggcaaatgacactgtagattgatatgctaacttacccttcaatacagcatgtatgtatctggggatgcagagctacaaagaaaggttctgaccctgtgaaaacaggtgatcaccatgctgccttgtgccatttacaactgctaactagaaataatttggtctattttcagtggttaacttaarggtaatgcattgtattcatttgtacttttttttttttcaaattttaaagacttccaaaatatctattgcttttgaaatctactcagtggccattcagctgtttaaattgaaatggccaatgtaaggaaagaaaaagattaaatatattcaactggccatgataaatacaatccaggtcctttggtgttagaagctcagtatgattaaactgtttttaatgattaggcttttgatttttacacataaagaattcttaatcatgattttttatcataaaaaacaaaaacactcaattagaaaaaatatggatagcatttcccaggatagggcacgttaacaactat

SEQ ID NO: 887071 - DNA, 611 bp, Homo sapiens
taaatttaacttgattatgtttgtaaagaccctatattcaaattaagtcatattctgaggtactgcagattaggactccaacatacctctttctggacaggagggggcacaatttaacccatgacactttggatgagtttagggtggggatgatgaagatcacagaaggcccaaaggctccaagccatcgtaccctcgtgatgccaaaatttagtccaattctagtgcctgcctctgagtacaaacgccttgggtttgggtgttcagtgcggtggcgggcctctgggatttgatggtatatgacttttaagcagatgaaaataatttgggatagcaatcccattaggaaagtgggcatrtatgtattaaataaaaaagacaagaaagtttcctggatctgtttttcctgccagtgaaacaatgatgaacttggcctatttgagctctgcctactatggccctttcacatctttttttttcaccaaacatacttcctttggatattacaatatccaactgtacgtctctgatagacatctaattctcgctgaattaatgggagattttaggcttaataataacttccagtgaatataaagatgtaattataa

SEQ ID NO: 887072 - DNA, 589 bp, Homo sapiens
tacgtagtccagtttttctccaccctgctaagcttcacaaaatattgatgcctggacctcactcctagtgaatatgattgaatggatctgtgttggggaatggaggcagtcttcaaaaactggctacaaggtttcttggttcagccaggcttgagaacctcagcctagcctaattccttccccatgcaaatgaaagcattgtaacatgcctgagggccaccggctcagatgagttttctctacttcagaaagctattttccctttccacatttcytttttttttttttttttttttaatgtaaagccatttcccagccagtgcagtcttctgtggtcactacattcctcatggaatatttaaaattaaatattccatgaggaatgtagctggaacgtttaaaagcttactatccttgtcctgttttaccgttacctaatgggaagacagctttctggaaaaacctgaagaccattctttcttagtgagctgttcttgacggtggtgactttatctttggaaatttgcccgattcccatatcacaattaaggaagtggcttaagaaagtagcttgtaattctctagagtg

SEQ ID NO: 887073 - DNA, 660 bp, Homo sapiens
tggctgcattgtgtttataccctgggaatctgtgaaagtttgaatttgagagtgatgatttagggtatatggtagaagacatttctaagcagcaaaacattcaagatgtggcctggctactgctaacagcttatgctgagatgtaggaccaaaaaaaaaawgttttaaagtcagagcttatattgaaaaggaaagcagagcatgaaagtttaggaaatttgtaggtttgtcttgtggcagagaaataaaaagcattttcaggggaataattcaagccagccgtggagcaacaacttactagagagactggcataaataaaaaagaatcaggggaaagacaatgggaaaaagatcttgaaagtatttcagagatctaggaagtagcccttccaaacacaggctctgaggcctatgaggactgagttgttttgtggggcaagcccagctcttcactgccctccacagcctcggaacattgctccttgtattgtggtaactttgtctccaaattcacctcaaagggctccagatagagcttgggctactgcttcagagggtaaaagccataatccataacagcttccatgtagttaagcctgcaagtatgcagagtgcaagagtaaaggaggcttggtacccactgcctagatttcaggggat

SEQ ID NO: 887074 - DNA, 660 bp, Homo sapiens
tggctgcattgtgtttataccctgggaatctgtgaaagtttgaatttgagagtgatgatttagggtatatggtagaagacatttctaagcagcaaaacattcaagatgtggcctggctactgctaacagcttatgctgagatgtaggaccaaaaaaaaaatgttttaaagtcagagcttatattgaaaaggaaagcagagcatgaaagtttaggaaatttgtaggtttgtcttgtggcagagaaataaaaagcattttcaggggaataattcaagccrgccgtggagcaacaacttactagagagactggcataaataaaaaagaatcaggggaaagacaatgggaaaaagatcttgaaagtatttcagagatctaggaagtagcccttccaaacacaggctctgaggcctatgaggactgagttgttttgtggggcaagcccagctcttcactgccctccacagcctcggaacattgctccttgtattgtggtaactttgtctccaaattcacctcaaagggctccagatagagcttgggctactgcttcagagggtaaaagccataatccataacagcttccatgtagttaagcctgcaagtatgcagagtgcaagagtaaaggaggcttggtacccactgcctagatttcaggggat

SEQ ID NO: 887075 - DNA, 643 bp, Homo sapiens
gatgatccgcctcttctctctagctgccttcaatatattttctttcatgtcgaccttggagaatctgatgtctatatgtcttgagtatggtcagcttgtacagtatcttgtatgggttctctgcatttttaaaatttgaatcttggcttctctaatgaggctggaaaaattttggtggatgatatcctgaaacatgtttttttgttgttgctcactttttctctcttttaggtatacactttttctctctttgagttatatatttggtctctttatataatcctatgctttttgctttttgaaggttttgttcattttttacattwtttttttctttacttttgtctgggtaaattcagagaactagtcttcaagctctgagattatatccacagcttggtctattctgctatcaatatttgtgattgtattatgaaatgtttgtggtgagtttttcagccttatcagatcatttcggttctttctctttcagctcctgtactattttgttgtattccttagattccttgaattgggtttcaactttctactaaatcccagtgatcttcattctgacccatattatgaattctatgtttgtcattttagccatttcagcctggttgagaaccattgctagggg

SEQ ID NO: 887076 - DNA, 585 bp, Homo sapiens
ctcagaaataacaccacacatctacaaccatctgctctttgacaaacctgacaaaaacaaaaaatgggaaaaagattccctatttaataaatgatgctgggaaaactggctagctatatgtagaaagctgaaactggatcccttcctcacaccttatacaaaaattaattcaagatggattaaagacttaaatgttagacctaaaaccataaaaaccctagaagaaaacctaggcagtaccattcaggacataggcatgggcaaagacttcatgactaaaacaccaaaagcaatggcaacaaaagccaaaattgacaaatgggatctaaytaaactaaagagcttctgcacagcagaagaaactatcaccagagtgaacaggcaacctaaagaatgggagaaaatctttgcaatctacccatctgacaaagggctaatatccagcatctacaaagaacttaaacaaatttacaagaaaaagacaactccatcaaaaagtgggccaaggatatgaacaaatacttctcaaaagaagacatttatgcagccaacagacatgtgataaaatgctcatcaccactggtc

SEQ ID NO: 887077 - DNA, 651 bp, Homo sapiens
agagactgttatgaacatctctatgcacaaaaactagaaaatctagaggaaattaataaattcctggaaacacaaaacctcccaagattcaatcaggaagaaattgaaaccctgaacggaccaatattgaattccaaaaytgaagcagtaataccaaccaaagaaagcactggaccagacagattcacagccaaattctatcagatgtacaaaaatagctagtactaataatatggaaactattccaaaaaattgagcaggtgagactcttcccaaactcactgtatgaagttagcaacaccctgataccaaaacctggcaaagacacaacaaaaaaagaaaactataggccaatctccctgctgaacatagatgcaaaaatcctcaacaaaatactagcaaaacgaatccagcagcacatcaaaaagttaattcaccatgatcaaataggcttcattcttggtataaaaagttggttcaatatacacaatcaataaacatgatttactacataaatagaactaaaaaaatacacatgatcatttcattacatgtggaaaaagcttgcaataaaatccacatcctttcatgacaaaaaaccttcaagtaagaaggaacatacctaaataataagtactatctatgacaacc

SEQ ID NO: 887078 - DNA, 627 bp, Homo sapiens
gtttagaggaaatttttatatttagtatatttgactgtttttgtcccagctcaggtctactctagacttggggcctttaaaaagattaagttcggagagctaagagataagattcctgcagtttgagggtctttttttttttttttttaaacctcattaaaaccttgattcttttttctatgcagttataaaccttagtaaatttgcctgctgggaaaagacagatgaaacaaatggccttctacttaaatggcttttacctgaatttaatttcatctatgtatagcctcagtataaagttgctttagaattctcttgataagaagcaatgcagaaaaaatgtgatcatcatagtggggggtgtcgggggggtagaactcagatagctttggccttcctttttttttttttcttgtttggktccaagttttcatcttctctgcatttccaaacagatgctgaattctcgtttgtccctaatggacacatcaagtgtactctagtcgctgtgtctgctttgctgtgagtagtttgcaattcctatgattaaatatgcaattaagatttaaatacaataaagcacatgaaattttgcaattaggatgaggctgcactgctcatgacaga

SEQ ID NO: 887079 - DNA, 610 bp, Homo sapiens
ctcctatatgtcaaaatcctgcctccacataccatcttattggtgttgacttggacagcattctgcagcatgattgagcttaggatgcatttttgccagagctttaatatgaaccaacaagcatacaccttgataggaaattggcacctaaaggcacctggtggaaagtacctctgtggttagatgagtaaactccagcagtgaatagggatatccggttttttgtttatgaacataaagtggcaaacaaaacaattacaagccaagaaaagtctggaagtgtcctttcatctttgagaaaaaaaaaatcagttagcagagtacttacgcagtctttgtgcagtagcaattgccaaacacccctcacaatccagattttattacttgatttttcaccaacagagaacagcgatgtaacctccttctgatttttgtgccatatgaaacagtggtgtttacagwattgaggaggaagtttctcagagttcagtcctattgcagcttgcatggaataatttgggatcttacttgtttatgtgaatattcacagattcctttagaataatgggactttccattgaaaaaaatgtaatgtgaatttccagtgatt

SEQ ID NO: 887080 - DNA, 561 bp, Homo sapiens
ccatgggggtcctcaacaagcccaccgtcccagtgatgggtcaggtttcaacacaattgaaacggacaagagccagaactccccaggaaagaggggtgcccaaggttcagaaatgtttgaaatcaagttcagtgtccagcaaagtcctcaccaccagcaacaagtcaacccgggggcagagtatgcaaactggcaacccacaggtttggcccacagtcatgtttggtttggcccatgaagtgtttgttaaaaatgtgattgagttgccaacttttaaaaatcgagtgatttcataccaaaaactccacatttcctgccrttggaaaatgtctttaagaagtcaagagatctggcaataccgggctcgagttcccgcacggggactgctgcctggggctgagaggtggctgcttgcttgacatgggacatgtgctccagaaggcacagattggggttgggggcctgcctgtgggggctcacttctgtgcctcagtttcttcatctgtaaaacagcttccccataggactggtgtctggcacccagcaagcactcaataaatg

SEQ ID NO: 887081 - DNA, 554 bp, Homo sapiens
aagagaggggctgaggagaggcccagggacagggtccctaagaggggccccggctgcctacagtcctcggggactgggccttggatgttggggagacagcagtgctatttaacatttattgagtgcttgctgggtaccagacagcagtcctatggggaagctgttttacagataaagaaactgaggcacagaagcgagccactgcagtatctcataggggtttttgtgactagyctatgagttgattaagtgaaactctttagtacagttcccaatgtattgaaaccctcacatgtcaactattattgcaaaatgtcaccaaaagtcaggtgacattgttaatgtaattctcttgcgtccttatcctcagtcactaacatgacacctgatgtgtcatgtatgtatttgatgaccggcttactgtctgcctcttaccagagggttagatccataaggacaggggctcgggtctgttccatcacccactaaacactcagctcagcccagaactgtacctggcagagctgggatgctggttctgccacgtatttgct

SEQ ID NO: 887082 - DNA, 618 bp, Homo sapiens
agaatcaacatcattaaaatatccatactgcccaaagcaatctacagattcaatgcaattcctatcaaattaccaatgtcatttttttcacagaattagaaaaaacacatttctaaaattcatatggaaccaaaaaagagcctcaawagccaaagtaaacctaagcaaaaataacaaagccagagccatcacattacccaacttcaaacaatactacaaggctatagtaaccaaaacagcatggtacttgtacaaaaaataggcacgtactaatagatcaatggaaaagaatagagaactcagaaataaagccacatacccacaaccaactgatctttgacaaagctgacaaaaataaacaatagagaaaggacaccctcttcaataaatggtgctgggaaaactggctagacatgaattggatccctaactctcattatatacaaaaatgaactaaaaatggattaaagacttaaatgtggctgggctcagtggctcactcctataatcccaacactctgggaggcagaggtgggcagatcacctgaggccaggagttcaaaaccagcctggccaacatggtgaaactccgtctccacaaaaatagaaaagttagct

SEQ ID NO: 887083 - DNA, 557 bp, Homo sapiens
ctcttacctgaattcctctctataggttcaaacactgaaatggtgtcatcaccgagataatatgaaataacaaacatcctgtccaagtcaacacatttgtctgtgactagttttgcaaaaaaacggagtatattgcttttgkagccatagctaaatggaagagaaatgagagttagagcattatacaggtaatcttccacatattatgtttttaaaagtctgcaaaagatataatatggctttaatatagtaggcataaactgtccaaagtgaaagagttcaaccatcgtctaattaaggttctaaatctaaatgcagaggaattttctcagtatattaagatatctctgattctttacatgtcctgggtaacacattgggaaaatgaacccaaaacaaacgtcataaacacactgttcaaaccagctgcactaacaggctgttctctaatgacaaggctagtcaccaatcacaataatcatgctggaaagaagagcaagcacctagccctactgcctgggcaatcctgggctctgccagtatctggggctacctcc

SEQ ID NO: 887084 - DNA, 592 bp, Homo sapiens
aaaaatggagatggtacctggcaaaaagtggatgccaagtcagtgtcaaataaagacagtcttgagttgtataacggaatctcaacatgttagacacatgagtgagagtgttacggataccaagttgaactctattaggacatgtttatgttcacattgacccaggataagaactagtgacagctgatggaatttatcaaaattgtaattttttttgtttatcaccttaggtaaataaattataatgaattctttgtttagtaagttgtaaaaattatttacttcaagtctgtttaccttactaatttctaaactccatgaagattgggccyctgtacatattaggttggaccataggaaactgctgatatatagtttgtgacctacaaaagtagcaaattctcatggttcaacatacacacacacacacaggtacacacacatatatgtatacatgggtgagtgatttaaggcagttagagttttgtactccagctgtgtctattagtactaatcaggaaatgatatggagaaatcatctgtttcaacccagtgccttctggtgcatgacagagtcttttgttacagagaa

SEQ ID NO: 887085 - DNA, 555 bp, Homo sapiens
tttttgaaacacctattaaattattcatcaccctgtatatgtcaactatttatgttgtaacatctctgttgtgacttctcaactctctgatttggcttgtcaatttaacaaaaaatatttttgtgtgtcttttatattcaaggcagagtggattctttctatttcaccaaatattaattatgatgtttactgtaaggttttttttttttttttggtttgtttgttttttgtcttttggtttatttttagagatgtggtcttgctctatctcccaaactggaatgcagtggcatgaacatagctcacggcaaccttgagctccttggctcaagagaccctcatgcttcagcctcctaagtagctgggattacaggtgcaagccactgtactcagctcactgcagatttaaaaaaawatatattttatcagattaaggaatttaccttgtattcccaattgaatatttttctatcatgaggggatgcagggagactagtgaggaggctgaagctgtggtacagatgagagatgaagctgatttgggcaagaggggtt

SEQ ID NO: 887086 - DNA, 597 bp, Homo sapiens
accctgcccatcctctgagactcaggtcaagtacttttcctccttgaggctttttctatttggggccaatctggcattgccttcccctagaacctattggcctgacagtcaacccctccctttagtcctttctccatatggccccatatgaagggktattcagcccacccagagagagtagatttctcaccagtgtagacccttgctctgagacccagcccttttcatccaaagtacacagggcagttctgggcatctggggagcctccaaaataactattgactcatcagtgaacaaagggaaggaggttgaatgaagaagatgggagaaaacatagggatgtattgagacagtcctcattctaaaactggattaattcccaggcttggcactaaccagctatgtaaccttggatattttacttaaacctctctgaaggagaggcttggatatcttacctaaaactctctgaaggagagggggtgacaatggagggagaaacaccagagaatgggctgccctaatagttcatatgtaagatgataagggcctaaaccaggagagtgacagattcagccatcagagtgaagaaagac

SEQ ID NO: 887087 - DNA, 593 bp, Homo sapiens
tgtcagtcttttccgctgctcatgctgagtaaggggcattgtgggccgcttcataccaggggtgaccacgtggccccccataagtcaaaggttaacttaatatagagttttcttctgaaacacaatctttctctctccaggcctcacttccaccaaagacaagtaacagcaggaccaacctacatgcaaaagaaactttagtcccctacaggtagcctgatgacccacacaaagcgcagcaagaatccttgtccacataggctttcctagattggactggctggaacctctcacagkgccatttcagtcaaagccctgggaaaacagccagttcctccactgtgtcccagtatacaagaaaacagattcctattgaagttatgcaaacaaacacattgccatgaattaagaatattcataaatgaattacaaattctggagaaagtaggcagagaacaaaatatgccttaatttcagtttacaaaagtataatctactcaattgttaaaggctataaatagctcaaaaggaaaaacgttctccagactctgaagaatcagcaatgtttcaaacaaacaaaaaaggccatgaaa

SEQ ID NO: 887088 - DNA, 697 bp, Homo sapiens
acctcagcctcctgagtaactcggatgagaggtccatgccaccatgcctggcatatatttttatttttaaactttttttaaagatagagtctgactgtgttgctcaggctggccgtgaactcctcccacctcagcctcccaaagagctgagattacaggcatgagccatcatgcctggcctagwtcttagtttcaatggagaccaatttattaaggttttcttttggtgtgtgagtgtgtatcttgcttttgctgttgaatctaagaaatttcaaggctaccaagattttcttctctattttcttttataagttttatcgttttagctcttacatccaggactatgatctatttcaagttagtttttataagtgatgttagattttttttgtcactgtcagtttttactcattaatatttctctgcgttcttatcatgtgtgtacataaagagcttccttttgtttttccaggtacaacagcaggttcttttctgattccgcaaagtcctgcatggggtggaggcagagacagaagagaatgtaaacactgggttccaccccctggaaattaagggaagaccccttacccagatagggactgattggagaggtggaagggaacaaggtgaaaggtaggggtcctggtaagagaaagcaggggggcctgagaacacagaggaaagtggttgagaaatg

SEQ ID NO: 887089 - DNA, 547 bp, Homo sapiens
tttattataatactttttagaataatgaatttgttctctgtcttcccttgaattgttttgtcattatgaatgtagatttagatatattttgtgtgttttaatccattgtagttattctgcttattgatgaacaaaatgttctatctttggctagtgagagcttcttcaaactggttcctgagatcttttgatgtgaccttggtagcctaataattcttttggtttcagcattttcttattcttgaaattatcttggtttagctactcaawagtagctttgtgttttttaaagcttagaataataaagacccttttgggaaatattatgttattttcttatcaacaaagactcagtattccactatagtcagttttaagaaacatctttattctatgttactttcctgtacatagagaggcaaccctataatacaaaaatttaagagaactagcttaactttaattaatttttaaatttgagtatgagtaacacaatgtgggctgcagagtatagctgagttaaaaacagagttttactctagcttta

SEQ ID NO: 887090 - DNA, 611 bp, Homo sapiens
gcatgtcaagaatgttgctggaatggctttgccatcagaggaatggttctagcaccacacatcagtccttcacttggggaagtgtgaaattcctaaggttttaaaaataacagaacgatgtaataggctctcattgcaacaaactgaatctcacccacaattataataaataagatttggataatgatgacattttaaattgacaccaaagtgtctccaaccagaaagcagtaatgactaatttcacattgtgcagaataactcacttgtcagggaaaacctaacttgtatacttagattctcattgttctttttatgataactgcccakcgtctctgtttagttatgatgtcagtttgatataatatgtaatattaacaactcatcacataaaacaaacagtgagctaattttctgcaagtgcgcaagtaaatactgaattatggttaacccttagagcaatgcacttgagaaaacttccactttccttttacagtctgccaatctttaaaacaatttccaccatcccacatgttttttataaaacctcagatggaactatcattttattttatttaatatggatagtgattctatttttaagtactatt

SEQ ID NO: 887091 - DNA, 648 bp, Homo sapiens
cttccatcatctgtcacaaataaacttgaagaaaatgcatcttaactgacagtttatgtttcagcttttcagaacattcattcatccctgtctgggatgattcagccccatagcctactttggctcaatggtgactgggaaaaagaggatcattaatttatcaacaggttccacttgagccatctccaagcagtctgcgggaagggctgtgaagtggtcaaaacagtggaagccatagccttctgccctcctcatgctttctatgtagcttgttggaaaaccaggcagctcagtgagtttcgttatctttcaggatacactgaattgaaaactgcatgatttatctcaactcaacttctagttgaaaatttcacaaaattatctatgtaaatgttgtccaaatacagctggaaaaatgaataagagttggcagaagtgctgatattaagtgacactttatayttaaaagcatccaaatagaaaaaaaaaagatttgatgtttgtagtctggaataaaaacaaacataaagagattttaaaattagggaatgtgtgaagatagaaaaataagagcatgtgctgaaaagcagcattattattttccacatttacttatgtttaaagaaatattcaaagttaaatacagga

SEQ ID NO: 887092 - DNA, 611 bp, Homo sapiens
attaagtccatctgaggacaccaatgctcagagttgtgaatcaggttagagattcagtaagggcgggaacacttctcatggtaaatgaggacagagcactagtttaaacggtagactctttcaaaaagatccccacactccatgctatcaccacagaagccactgtgggggctcttttagtcttggtgcttgattgattacaggaatatttcaaatctggaattctggttgggtgtagtggctcatgcctgagaatcccagcactttgggaaaccgaggtgggtagattacttgaggccaggattttgayactagcctggccaacatggcgaaacattgtctctactaaaaaaaatacaaaaattagctgtgtgtggtggcaggcacctataatctcagctacgtgggaggctgagacagagaatctattgaaccctggaggtgaaggttgcagtgagccaagactgtgccactgcactccagcctgggtgacacagtgagactctgtctcaaaaataaataaacaaataaaaacctcaaaactggagttattttatgatgacattttcaaggagcagctctgacaaaccaagatcatttgtaatagtgat

SEQ ID NO: 887093 - DNA, 611 bp, Homo sapiens
attaagtccatctgaggacaccaatgctcagagttgtgaatcaggttagagattcagtaagggcgggaacacttctcatggtaaatgaggacagagcactagtttaaacggtagactctttcaaaaagatccccacactccatgctatcaccacagaagccactgtgggggctcttttagtcttggtgcttgattgattacaggaatatttcaaatctggaattctggttgggtgtagtggctcatgcctgagaatcccagcactttgggaaaccgaggtgggtagattacttgaggccaggattttgatactagcctggccaacatggcraaacattgtctctactaaaaaaaatacaaaaattagctgtgtgtggtggcaggcacctataatctcagctacgtgggaggctgagacagagaatctattgaaccctggaggtgaaggttgcagtgagccaagactgtgccactgcactccagcctgggtgacacagtgagactctgtctcaaaaataaataaacaaataaaaacctcaaaactggagttattttatgatgacattttcaaggagcagctctgacaaaccaagatcatttgtaatagtgat

SEQ ID NO: 887094 - DNA, 600 bp, Homo sapiens
gcagtacagaagggaaatgtagggttgaagcccccacacagagtccccactggggcattgcctgggggagctgtgagaaaagggcccagacaccagaagggtagatggactgacaacttgcactgtgctcctagaaaagctgcagacactcaacaacagccagtgaaagcagctgggaaaggggggctgtaccccaaaaagccacaggggcagagctgcacaagaccatgggaggccaccttttggatcagcgtgacctggatgtgagacatggagtcaaaggagatcattttgtaactttraggtttaatgactgccctactggatttcggacttccatggggcctttagcccccttgttttgaccaatttctcccatttgaaatggctgtgtttacccaatgcctatattcccattgtatctaggaagtagctaacttgcttttgattttacctgcgcataggtgaaagggaattgtcttgtctcagatgagactttggactgtggacttttgagttaattctaaaatgacttaagactttgagggaccttggggaaggcatgattggttttgaaatgttaagatatgagatttggga

SEQ ID NO: 887095 - DNA, 676 bp, Homo sapiens
cccaatgcaaggacactaagaacctggataaaaggtcacaggaaccactaactagaataaccagtttagagaagaacataaattacctgatggagctgaataacacagcccaagaactttgtgaagcacacacaagtatcggtagccaaatcaagtggaagaaaggatatcagagattgaagatcaacttactgaaataagacatgaagacaagattagagaaaaaaaaaatgaaaaggaacaaacaaagcctccaagaaatatgggactatgtgaaaagaccaaacctatgattgattggtgtacctgaaagtgatggggagaatggaaccaagctggaaaacacacttcaggatattrtccaggagaacttccccaacctagcaagacaggccaacattcaaacacaggaaatacagagaacaccactaagatactcctcaagaagagcaaccccaagacacataatcgtcagattctccaagcttgaaatgaggaaaaaaatgttcagggtagccagagagaaaggtcaggtcacctacaaagggaagcctatcagactaacagcggatctctctgcagaaaccctagaagccagaagagagtggaggccaatattcaacattcttaaagaaaataattttcaaatcagaatttcatatccaaccaaactaag

SEQ ID NO: 887096 - DNA, 669 bp, Homo sapiens
gttttgactcattgccacctggtttcccaaagaataaaatatctgattggttgttttggatagctataactgctaagctcttttagctgattaaggaattttctcatgtggtaacattcctatcttttgggatgttacatacmctgcttaagggcaagaagcatttggttgtacttttgcatgtaaaagcataagggctgtgatgcatgaacagtgttaccggtaggtggctgaactgagatgagcttgggactccaaggaagcctgggatacacggtcaatacttatatcaatccacacttaaagagagccacacaaaagcaacttgatttcagattgtcgtaccaagactctaggggcaaaagtttcctgtgagtcagaaaaagaaaaaaaaaatcacaggaagtcaaaagatttggactactgattctttgtatctaggtaatcagaattcaaagtcaggatttcacagaaaatcctgtgtctagtctgtgcaattaaccaaggtggccctatattggctgtgggtgagtggtacaattggatgaaactttcctcctcctccctcacaaaaaggctctgtcccttgtcctttgtcagcttttaagacacaacttatccctcacaaaaaagaacatattctatgatttttatttgtgcaaacttcta

SEQ ID NO: 887097 - DNA, 480 bp, Homo sapiens
gagaccatgccttccaaatctgaagaagattcaaatctgagaagtgaatacattttatctaagcagagcctgtcagaacatttttaataaagacctggcccaatttcagagctttcttttcattagggcaggtctgaaagcaaaggccttgaaagtggttagaaaaacatagtgtaatcactatggtaccattatcctgtccctgggtaatcattaggcatcagcctgccaaagtgaagggcrgcaaattactcatttattgttacctgagctgtgcagaagattgaaatctggactactaatgattttttttcaccttgtttaggagattctgtagaaaagttcacatgtagcacacatgctggcttgctggcgaaagtgcttttagacaaatatgaaagggaagcaaagcatcaccttccttcaaaagtaaagctgaaaagctcctatcatttcatgaaagcagttctaagggagaaa

SEQ ID NO: 887098 - DNA, 529 bp, Homo sapiens
tgtctttcttttgtaaattgcccagtctcgggcatgtcttgatcagcagcatgaaaagggaccaatacaccttcttacttgttagaagggtataaccgagagccttcaggattttgttgatttaccttccttctctcaatattgcctcaacaatgaactattatagattattgggtaacttttgagattgaggtagacttggagatatcttattaggtctaacagaaattagaaaaacactgtcaccaagacaagacagaggctgtgtttttttgtttgttgtttttaacacacagcattttttattgtatagtttaaaatttcttcygatctccagtttcttctgatcttcagtctctgatacgattttaaatgacgaagtttctgatataacttcaaaaagcatggttttgcaggcctcaatattttgtccttgatgttcaccagcaaaagcagttttacagttatacaatctcctctattggtccttccttgtttgagaataaggacagaccacaaaatcctgatg

SEQ ID NO: 887099 - DNA, 652 bp, Homo sapiens
tgaccaatctttccttttatggttagcactttttacttcttgtattctatttaagaattctttgcctatcccaaagctatgaagatattctcctgttttctggaaattggttgttttagattttatatacagatcaaagtaaaatctctaattttgtatatgtcatgaagtgaggttcatttttttccctgtatgactaccagagcctctactctggccttgaattgaatattcatcccaagcttttctttctgcttttgtaagctctccaayatatccatagaagtcatgccaccccacaatctttgtaaaaattatggttgtcactgtaatcaactgcagctactccaatggaccacctcaagtcttgccctccacagacactgcatcccacactcgccacagagataatttgagtaattgtgaagcccttgcttgctatggtttgccaggcataagtggtcatctgttcactcattaagtgtgtaagcaactcagtcccagaatcccaccactatattctatgccttagggacactgtaggtaaaaacactatatcagttttggaccatgcaggaaacgtaattcctctcaggtgttttacctgaagaagctttacaaggggactatttgcagagggcagacatagtta

SEQ ID NO: 887100 - DNA, 546 bp, Homo sapiens
tgcacacaccatatttaaaattccccattccccaaaactataggtcagagaaccaatattttatttgatcatcatttgacctcagacatagtgattaattttccaggcctcagtggccaccttgccccaccccatctgctgcctacagatggctgcaggatctctgtcagcaatgtcatgtccctcctggtgttagtctagcctggcagtagttgcttagtagcaagagatactgctaygtcacatctataaaaatagccaaaatctggactactgacaaggacccaggagttacaattttatcactctaaatgtcaaaaagccagaacatattctaatataccctctccaaaaagttttagtgtattctattaagaaatgttttctacagaaaatacaaatttaaatgtattgcataaatctataggaaaatgttatttgtttgaaaaaaagattctgtcaaaagaccaataagtttttttacttacatttgatcatgtgagccatagtgacccatggttgtgtaaaaactggaaaaatgtgtag

SEQ ID NO: 887101 - DNA, 608 bp, Homo sapiens
cttccttgttctcagtgactgactttataatatttaacagaaatgtgaacttataaaataaacttatattaatagaatatttttatctgttctggatatattgaggttgcctataaggtttatcttgaaaagggttccactgcttaacaaatttaaaacagtgatactaaagtctcttctagctctaacatttataatgctttctatttttatatgccattgaaagaaagactaactcctgattgcatataaatggtgcaatgcaagttaagttattttccttagtagaaaagttaagttgcactgggaaaactgttgcataatgtgcttccccaacytgtaacttaaatcacttaaatacattattttagaaattctcagagacttgaaatcttctgaggtgtctaccaactgataatccatgcaaataatttccacagcttgtttgatatttgcaagtgaaacacacttttgcttgttcgtaactaagctcatctctcctgcattaactataatgtcaagtttgggggggggggcggctctttaattaaagagccccagacctttcaaggatcagcattgattgtcttctgcttcagatcccttct

SEQ ID NO: 887102 - DNA, 645 bp, Homo sapiens
ggttcccccgatagagttaatctttgtataaaatgtaaggaaggggtctagttttaattttctgtatgtggctagccagctctcctagcaccatttattaaatagggaatcctttcctcatcgcttgtttttgtcagatttgtcaaagatcatatggttgtaggtgtgcagtcttatttctgagttctctattctgttccattggtctatgtgtctgtttttgtaccagcaccttctgttttggttactgaagccttatagtacagtttgaagtcaggtggatgatgccttcagctttgttctttttgcttaggattttcttggctattcaggctttttttggtttcagatgaattttaaaatagttttctctaattctgtgaaggacatcaatggcagtttaatgggaatatkattgaatctattaattactttgggcagtgtggccattttcatgatattgattcttcctatccatgagcatggaatgtttttccatttgtttgtgtcctctctgatttccttgaacagtggtttgtagttctccttgaagaggttcttcacttcccttgttagttgtattcctaggcattttattgtctttgtagcaattgtgaatgggaattcattcatgatttggctctc

SEQ ID NO: 887103 - DNA, 630 bp, Homo sapiens
cctcaatcaaactgttttctcaacttaaaagtcagtcaacttgtaattactgtctttaaattgataaggaaaaataactgccatttagaattctatatccagcaaaactatcttcaataattagggcaaattaaaatgtttttgagacaataaaacgaaaattgaaaaagaatttatcattaatagcaaagccactgctaatggctatacctcaggaagaaagaaaataaactccaaaaggaaatatacgcaaaactgataagaaaaaatagtaaacatgggggatagattaaaataaatagtattgtctaaaaaccatggttaaaaaaagcagagtagagttagaatagtgttaaaagagttaagatagagtttaaaatacagtgaaactacggaatgtatgcaagaaggtagrtaactgaaaatacatgttttgcattttactcgatgatgatgattaaatttgatttggcctcagaattcatggtaaagttttaagtgcaaagataaaataccagaaaaacaatatatatcttctaaatcagggtcagcacactttttctgtagagacctaacagtaaatattttaggctttgtagttttgttccaactactttactctgcatctgt

SEQ ID NO: 887104 - DNA, 787 bp, Homo sapiens
ttagggcaaattaaaatgtttttgagacaataaaacgaaaattgaaaaagaatttatcattaatagcaaagccactgctaatggctatacctcaggaagaaagaaaataaactccaaaaggaaatatacgcaaaactgataagaaaaaatagtaaacatgggggatagattaaaataaatagtattgtctaaaaaccatggttaaaaaaagcagagtagagttagaatagtgttaaaagagttaagatagagtttaaaatacagtgaaactacggaatgtatgcaagaaggtaggtaactgaaaatacatgttttgcattttactcgatgatgatgattaaatttgatttggcctcagaattcatggtaaagttttaagtgcaaagataaaataccagaaaaacaatatatatcttctaaatcagggtcagcacactttttctgtagagacctaacagtaaatattttaggctttgtagttttgttccaactactttactctgcatctgtagtgtgaaagcaaccataaacaatacctaaatgaacgagtgtaggtctattacaataaaactttatttacaaagatgtgttggattggatttgggtccttgaattgtaaacttttgasccctgttctaaaccggtaattgcaatgtgataaaatgcaattatttcaacaaaataaaaaaaaggaggaaaagataaaagagacacattaaaagggagaaatgttgcatagagtagtatgatagaaataaatctaggctgagtgtggtggctcgcatct

SEQ ID NO: 887105 - DNA, 629 bp, Homo sapiens
tgagaccccttaaataataaggatgacattacagtttacatttgctacaattcaaaataagtcctttatatgctatataacatggtctctagtgagacaaaatgttgcttttaattttaagttaatattaacttctgtagtcattctaggttagaaaacctgatttgttcttccttgaatctttagtttttacttattgtgatgtaattgttgctttgcaaatgggtaaaatccatgaagggtaggacttctagaggtggctatattttttcctggagtcattataatacataatttatttaaataaacttttgaatgarttgcatcttctcaaaaagaacctttctaattttgaaaaaaattttgtttagtttgtatagtgtcactcatagaaaattgcaccaaacaggcacttcataaattcaataaatttttatacaacaaataaaaatacctgctgactttaaaaatagaccaagtaggtagaaagccatttgacttctttcaccaaatatttgtaattgtttgtctggaacaagtacatagagacacaagattttctctatggttcattctataattaataatttttattctctcttttaaagacttttctttatgagggtttt

SEQ ID NO: 887106 - DNA, 633 bp, Homo sapiens
tcactgtagtgtgggagaacaccacttgaacagagctttgggaatgtctcagactaggaagcgcaagattgaattttattgagattctgaaacttggttaaagaaagcaatggagggaatggggcaggaagaaggggttgtaggaggaagcttgattagctttgggaaattcttatgacataagaggctataattggtacaagcagcaatgccaagatttttaggcaaggggttcaaagaatcttgttaggttaactgtctgtttatgtcttctattgaaaagttgataagtcttttcaaaagttcctgtagtaaacaagaaagacaattccataaagaccactgaagccaggttaatgtagacattaagayatacaggaataggtttcttttttcatttgtcaaataacataattaaaaacatacttaaagattactggtcaggcgtggtggctcatgcctgtaatcccagcactttgggaggccaagacgggcagatcatgagatcaggagttcgagaccagcctgaccaacatggtgaaaccccctttctactaaaaatacaaaaaattagctgggcttggtggtgagtgcctgtaatcccaggtactcaggaggctgaggcaggagaat

SEQ ID NO: 887107 - DNA, 600 bp, Homo sapiens
atattgtttaaatgaatagaaaatattaggtcactattaaaagacttttgaatttattggggctaaccaaggtcaagtgctgtaataaaaaaagactgagaattttgaaagtagtgtttatgattacttctaaaataaatggtctttgagattcatattttctcagtaagaatgcctactgtcttctaatataatttcacaaggttacttaggtttatgaatactacaagaaataacttaaaagttagaagtttaggataaagtattaaaatcaggatggaattgcagagaaaggaatataacaagagcaagagagacagataatagataagttgaacaagraaataatttaaatgttctagctttagaaagaggctttcataaagaataagtgccatctacccaaagacagcattttttaatgaaaatatttctgggttaaatgatcaatcctaagcattcttaaatcattagcttcactattataaagacagttttccccaccactatacagaggctgaaagagcctaatgtggaagctgatcaagtagtatgaaatacttgaaatgtatctaacataatttatatctttttgttaag

SEQ ID NO: 887108 - DNA, 615 bp, Homo sapiens
cttcagattcagacctcagaaaatgacttaattccataacctgacactttccactgctataggttaatcttctataaactcattttgaaatgatatgttatggttatcccaaaactccttaaagtagacatatctcaaaagtctgaaatgttaatcatgagaactaaaagaactcatttttccccaaaagaaaatttgatctgtcgccaaagccaaataaatattttctataaaatgctgaaataatgtatggaaaaatctgtgaaactaaaacctccatacaatctaagttaaatgcccatatttatttatataaggagagtgaccctcagtgtatagaagatacctcttttygtgactgtgggttttttttttttttttttttttaaatgaaggcaacactgcatggcctgcattctacttaattaaaagctatagtgggccttcccagatgttaaaggggcctgagctgaataaagtgttgacatcagatgaatgggcgaggccacctgctagctccactcttggctttgtggatgatttgcattcctgtggcctgttgctcggcatgaccactctcagcacttcacagcaccatggcctgtttaatatcat

SEQ ID NO: 887109 - DNA, 615 bp, Homo sapiens
cttcagattcagacctcagaaaatgacttaattccataacctgacactttccactgctataggttaatcttctataaactcattttgaaatgatatgttatggttatcccaaaactccttaaagtagacatatctcaaaagtctgaaatgttaatcatgagaactaaaagaactcatttttccccaaaagaaaatttgatctgtcgccaaagccaaataaatattttctataaaatgctgaaataatgtatggaaaaatctgtgaaactaaaacctccatacaatctaagttaaatgcccatatttatttatataaggagagtgaccctcagtgtatagaagatacctctttttgtgactgtgggttttttttttttttttttttttaaatgaaggcaacactgcatggcctgcattctacttaattaaaagctatagtgggccttcccaratgttaaaggggcctgagctgaataaagtgttgacatcagatgaatgggcgaggccacctgctagctccactcttggctttgtggatgatttgcattcctgtggcctgttgctcggcatgaccactctcagcacttcacagcaccatggcctgtttaatatcat

SEQ ID NO: 887110 - DNA, 570 bp, Homo sapiens
cggaggccacaaggaatgaaccaattcttggtctactcctctctcctaccgtcccagcccagcctatccttggggacagggatgcaaatgagtaagccaagtcaaagtcccttctctaagaagagagacagagaatagagaagatgtcacagagccccttttgccacctactagtcttctcttttttttttttttttttttttgagacaggttctcactctgtcacccaggctagagtctacagtgcagcagcatgatcatagctcactgcagcctctgcctcctgtgctcaagcaatccttctgcctgagcctyttgactagctagaactacaggcatgcaccaccacatttggctatttttttctttttttttgtagaaacaggatctcactatgttgatctggctggtcttgaactcgtggcctcaagcaatctgcccacctcagcctcccaaagtactcagcttacaggcataagccactacaccggtctcatagtgtattttttatctagtgctttctctgtggtgggagagggggtatcaggaggcattgtcagatgtgaagat

SEQ ID NO: 887111 - DNA, 637 bp, Homo sapiens
gtgatattatctcctattgctcagataaggagattgagaatctaagaggttaaaaaccagtccagaacaacacagctattaactggggaatctggctgtttccactcaagggcactcccttcctcaatcaatacaaaacctgaggtcaatgggcaaggtggggggtagggtagggttaccagatttagcaaataaaaatacaggatgcccaattaaatttgaatttcagacaaacaacaaatacttaagtatatcccaaatagtgcatgggatatacttatactaaaaatttattgtctgtctgaaattcaaatttaatcagstgtcctgtattttatctggcacttcttggcgggaagtggggtgacagcctggcccagctctgcccccgtttcctaagaaagtcctgaggggtacaggcctcaagtaagggatggtctgagctcaattagattgtgcaggctgggctgacagcccttttctcccttcttgagtgtggctaggaaaaggcagggcttggagtctaggctaccctgtccagcctcccaggctctgtgctgaggacgtcagagatcacacccatttaccaatcaatcaaaagggatttttcatcccagtactaggctgctcaacagac

SEQ ID NO: 887112 - DNA, 659 bp, Homo sapiens
ttgtactagtcaattcaatcctggacactgaatatgtagctctaaaattctaccccttgagtatatcttttagattatgtaactcagaaatactgaaactatgtcctgtcactttaccttaattgaaatcaagatatccaaatattactaatgattatttgttccaatgctcactggtgatgctgagcttgttcctgtttcacgggcttagcctctgacctgtctgaagtttgtagatgaacttcactacactgtttttattttaacatttctattaaataagacttatcattttatatgcattatttgtccctctgcatgtcaattttgttgactctaaacctacaracataacagttcccataataaaagtgaaggagaaaagtcttcattcatgaggcattgtgaaagtggaatgttttagagatgtggaagcctggcagcataattctcagacaggaaggcaatgtatataaaggccaaattccccttctccagtatgggagtgtgctgcctgtgaacatccaaatatggaggaaagaacgttttcacaatgagctttcagcttccaccagcttcatgtggcaccaagatgttaaaatacatcacagtatattcaggaaattgtttagccataccctaccactgccccatccatg

SEQ ID NO: 887113 - DNA, 700 bp, Homo sapiens
atcagtcaaaatgtcccactctatcaataaggcagtgggctttacaccaattaggttgatatctggggaaataagtacctttaaatatatttttttctgccttagaaaacaaagtgttaaaaaatctacaagcttcctagcataatttagaaaatctgcttttatgaaatgggttaattatgcccattgaatgcattcactgtcacagtctcatcctcccacttctgttccaaaatgacaagtgaaaccagggactgtgcaattttggaagacaatcagatcacatattgagtattttgcttattcatacaaccataaacggcctatgcttgagttccctcaattacacagctcagtatgcaggccagaagcagacaagcccagctcaagtgarcactttcctggaatacacgggggaacgagtttgaaaaatgtccaaagtggcagatgtgaaaaattctcattcaacatccagagctgcctttgctgcaatccttcacctgttaatcgcactgcctctgaacttgtgaaccagggatgctagcgatatcttagactgagacacttaggagctatagatctttcaaggtatggtgccagtatatgccaaggtgggggaaaagctagcgagacaagacaagatcatggatcacagcactgctcagaattttcagacattcaccaagaataagcatgtcgc

SEQ ID NO: 887114 - DNA, 453 bp, Homo sapiens
atatgtgtaatttgattaatttgccaatagtctgtcaagtgaatagcaccccttccaaaaacagtatgctaaaatgtttttacattgattttgaggtagttgccatgcatagaaagattacctctcatttctattaatataattgctttgcagaggaacggtatttctggataaaattattttaaaaataccaaaaattgcaaatttcwaacctataccaaactggggcaggatgaaaaatattctctcatattcaaaacttttgttttggaatctgtgttataataaaccaccagaaggaagccactgtgaagattggcgagggaaggtagcggggaactgggggatctatatgggagcagcaaagacagcagttcctatcaacaatgaccctgttgaagaagcactgataggggtcagaaaacctgaggaagaaagcagactccttatgaa

SEQ ID NO: 887115 - DNA, 621 bp, Homo sapiens
ggattggagctcataatgcagggattgagcaagctgactctacaccatttcctccaaccaaaacctgctaactgaatctccaacaggctgtcaattgttacagcgtcccatcacatactagatattgagaagtaggcataaactcatggaggaagcaaaagaaggacctcacagaaataccaaaagggaactccttattccacccttttgggtgaaaagcagagtatttctgctttaaaggaacaaatcaatgggtctagtataatctctgcaataaaatgataaggggacatcagacatatctgtgaataaaaaattggggctagtttgtgcccaagaatcaatgacaatgtgtccctgtattcttgttagagagagctcacaaacaggaggatgggcagggaaaaatgagaacaagaatcaggggatctgggatccatcctgtactttgaaagggagccaggcttmtaagatgcagataggggctaaggatgatattccagatggaacaggcagagtaagaaaaggcaataaagtgtgggatgcctctgtcatgtgtcaaaagcggcacttgaattatccacccggttggaacttgcagaacttctgagaatggagtag

SEQ ID NO: 887116 - DNA, 641 bp, Homo sapiens
tcatatatcagtgctgtcagttttcctgtcttgaatcattttcctagcttcatcatctccctttctagcctctttcagttacgtacacccctcaccatgtaaaacatactatccatcaatgataaactagtgtaaagacagcagagggctttatttcatagtgcaaccactagtcaagtaggaacagaygtcagtggtcctgtgtcaagaaggattctgaggttgcttccaggcaactggaactgaataataatgcctcttatgaatatacttgtgtgtggatgtgtagggtaggccagggtagggcctgcggcactgatgcagttcagattttgttcctctctgatatacgtgcaaagctacaccattctctgatgttgccttagtctttctgttttctagtaacttctattcccttctttaactgattttacacccttcaagactcagcccaaatgcccctgcctcagttattccttcctctttgttctcataatatactctttatataagtctacttttgctctaaattataacttttgacatatttgtacttatatgtcttattaaagtgtgccttattaaaggtttttatctctgcagcttaaaacagtgtctattgaataataggcaccaaatct

SEQ ID NO: 887117 - DNA, 641 bp, Homo sapiens
tcatatatcagtgctgtcagttttcctgtcttgaatcattttcctagcttcatcatctccctttctagcctctttcagttacgtacacccctcaccatgtaaaacatactatccatcaatgataaactagtgtaaagacagcagagggctttatttcatagtgcaaccactagtcaagtaggaacagatgtcagtggtcctgtgtcaagaaggattctgaggttgcttccaggcaactggaactgaataataatgcctcttatgaatatacttgtgtgtggatgtgtagggtaggccagggtagggcctgcggcactgatgcagttcagattttgttcctctctgatatacgtgcaaagctacaccattctctgatgttgccttagtctttctgttttctagtaacttctattcccttctttaactgattttacacccttcaagactcagcccaaatgcccctgcctcagttattccttcctctttgttctcatartatactctttatataagtctacttttgctctaaattataacttttgacatatttgtacttatatgtcttattaaagtgtgccttattaaaggtttttatctctgcagcttaaaacagtgtctattgaataataggcaccaaatct

SEQ ID NO: 887118 - DNA, 672 bp, Homo sapiens
tgatgtccaatatagtggcatagtgttaataattatcctgtttctatctgttggtttcctttttcttttatgccacacaggaaagataatctctccttcacccactaaacaaaagttctgggctctctgtaattgctcaccttgggtcacaaacttatcaacaaatcmtagtgactgagggcattgcatgttttaattggctttgacttggattatgtgcccatcctgaacctgtcatcgtagccattgggtagaattatcctcctttggagtcagggagtaaacccaacccactccttcatgatgggataaggtggaagggatattaaggaggcaactgcaattgaggatggtgatggtagtaatgacgattctgatggtcatgataataatgataatatgatgatcatgatgttgatgttaatagtaacaatagcaatgacactgaagctgtcttgagtacataacataaactgttgtgctaactacatttttatcagatttaaattcactaatttcatttggttcttgtgtaaactaaataatattatccacgtaaggtgctttctacctaataataataatgataataataataataaaataatgattatgatcattcaatattaataagatagtagtcataataggaaaaggaataatagtggcaat

SEQ ID NO: 887119 - DNA, 672 bp, Homo sapiens
tgatgtccaatatagtggcatagtgttaataattatcctgtttctatctgttggtttcctttttcttttatgccacacaggaaagataatctctccttcacccactaaacaaaagttctgggctctctgtaattgctcaccttgggtcacaaacttatcaacaaatcatagtgactgagggcattgcatgttttaattggctttgacttggattatgtgcccatcctgaacctgtcatcgtagccattgggtagaattatcctcctttggagtcagggagyaaacccaacccactccttcatgatgggataaggtggaagggatattaaggaggcaactgcaattgaggatggtgatggtagtaatgacgattctgatggtcatgataataatgataatatgatgatcatgatgttgatgttaatagtaacaatagcaatgacactgaagctgtcttgagtacataacataaactgttgtgctaactacatttttatcagatttaaattcactaatttcatttggttcttgtgtaaactaaataatattatccacgtaaggtgctttctacctaataataataatgataataataataataaaataatgattatgatcattcaatattaataagatagtagtcataataggaaaaggaataatagtggcaat

SEQ ID NO: 887120 - DNA, 631 bp, Homo sapiens
accattcaacctagcaatcccattactgggtatatacccaaatgaatgtaaatcattctaccataaagacacatgcacacgttatgttcattgcagcattattcacaatagcaaagacatggaattaacctacatgcccaatgatagactgaaaaaagaaaaagtagtacatatacaccatggaatactacacagccatacaaaagaaaaagatcatatcctttgcaaagcatgaatggagckggaggtcattatcttaagcaaactaatgcaggaatagaaaaccaaatactgcatgttctcacctataagtgggagccaaacattgagtacacatggccacaaagaaaggaacaacagacactggggcctacttgtggatggaagctgggaggggagggtgaggaccaaaaacctatttatcgggtactatgcttattacctaggttatgaaataatttgcacaccaaatccctgtgacctgaaaattacctgtgtaacaaatctggacacgttcccctgaacctaaagttaaagtttaaaaaaaaaaccacagtatcttaagataaaaattttaaaacttatgatggccataaagaggaatgaagtattaagttatgctacaacttgg

SEQ ID NO: 887121 - DNA, 631 bp, Homo sapiens
accattcaacctagcaatcccattactgggtatatacccaaatgaatgtaaatcattctaccataaagacacatgcacacgttatgttcattgcagcattattcacaatagcaaagacatggaattaacctacatgcccaatgatagactgaaaaaagaaaaagtagtacatatacaccatggaatactacacagccatacaaaagaaaaagatcatatcctttgcaaagcatgaatggagctggaggtcattatcttaagcaaactaatgcaggaatagaaaaccaaatactgcatgttctcacytataagtgggagccaaacattgagtacacatggccacaaagaaaggaacaacagacactggggcctacttgtggatggaagctgggaggggagggtgaggaccaaaaacctatttatcgggtactatgcttattacctaggttatgaaataatttgcacaccaaatccctgtgacctgaaaattacctgtgtaacaaatctggacacgttcccctgaacctaaagttaaagtttaaaaaaaaaaccacagtatcttaagataaaaattttaaaacttatgatggccataaagaggaatgaagtattaagttatgctacaacttgg

SEQ ID NO: 887122 - DNA, 679 bp, Homo sapiens
cagttagggtggggcaggaacaaatcacaatggtggaatgtcatcagttaaggctgtttttacttcttttgtggatcttcagttactttaggccatctggatgtatacatgcaagtcacagagatgcgaaggcctggcctgggctcagaggcctgacaattaagccttcagaaaaggaacaaaattccctgaatattggctattcaataatttgaatatttggcaagttgaccagggcattagatcagtaagtcagtaggctgcaactaaaatatcttcaggaagaagaaaaggattttacaaaaatacaaaataaaccagaaattgcattattaggaataagatgggaaaagtctatgttttatctcatgagtggaaaggcaaagcaatcagaaactccaggggaggaaaattctgtagaagwaaactatgaatctgatgattatgaagctaaaattcagcatggttttaaccatctgaacggtttttctttaaaaacgaaaatccatttgatcttcacataaggaatagtcttgattgagtggcataaagtgaggaatggggcagcactgggaccatcagggaaggaaattatatcatagcacacagttgaaaatgcagaaagcgggggagtgagcttcaagtatgatcaggacatgactccacgtttctgtaattc

SEQ ID NO: 887123 - DNA, 600 bp, Homo sapiens
aataataatagttgaaatttaccccaaggagataatcccagaagtgtgtagcaatattgtttacactggcaggaatttggacccattctatctatacgtcagaaggggactgaaacattagtgctaaaaacttacaatgcactattttttccatcacctaacatggtgatacatatctattttcattcacatggaaaaatgcccagaacatattattgagagaaaaaatgttagttatgcatccgcatgtatatacaaacctctttatgtaaaattatatattgaaagctatgtgtgtatgtgtgcataagaagatgaataaaggaatgttagatgaacttgtaattattatctctagatggtggaagttcagatgaactttacattctcctttctacttttctgtactgtttttaaaackctgcaatgtatctgtatctgctataacaaaaataatttcacagaaataaaaaatttaaatgacaatgacaaatattactaatgtatagcaaactgggaaaatatttataataatttatgagaaaaaaatcacaaaattattacatctacactatgcttgcatctccaaaataggtaggt

SEQ ID NO: 887124 - DNA, 554 bp, Homo sapiens
atttcattaattttcatcataaaaatttatttaataaataaagaataatataccctcacctttcacatatgactgtgatatttaatcactatatattttactccatatttcactctttagcattcccttccagcatccaccagtgttagcacagagtaggtgttcaataaatgttgttaaataacctagaaactgtacatggcattttaatacctactgataaccatatgcaactgtgaccttaaaatgaaaacagragctgagcatttgttcttcatgtgcacagagatgtctagtgttcacttttagttctttcattattgttcctcttccctaaactctctttgactctgcaattctaggatgttctataattagaagccagcaaggcatcaactacttcctctgggcaagtttgtgccttaacacctctcagtgaccttctgtgctaattaaactacgtgtgagaataaagaacattggtacttaactgaaataaaaagcaattaagtgggaacatttggagatgattgtatgttaataagaaatcttaa

SEQ ID NO: 887125 - DNA, 554 bp, Homo sapiens
atttcattaattttcatcataaaaatttatttaataaataaagaataatataccctcacctttcacatatgactgtgatatttaatcactatatattttactccatatttcactctttagcattcccttccagcatccaccagtgttagcacagagtaggtgttcaataaatgttgttaaataacctagaaactgtacatggcattttaatacctactgataaccatatgcaactgtgaccttaaaatgaaaacaggagctgagcatttgttcttcatgtgcacagrgatgtctagtgttcacttttagttctttcattattgttcctcttccctaaactctctttgactctgcaattctaggatgttctataattagaagccagcaaggcatcaactacttcctctgggcaagtttgtgccttaacacctctcagtgaccttctgtgctaattaaactacgtgtgagaataaagaacattggtacttaactgaaataaaaagcaattaagtgggaacatttggagatgattgtatgttaataagaaatcttaa

SEQ ID NO: 887126 - DNA, 650 bp, Homo sapiens
agcagttgatacaagggaaactagtaagtggcagaacaaggatccaaacagaatagaaccaattccacacctttgctttacctctaacccttattgcctcctctgaaaatggagctagattcagattctagctctgccctccactatctatattacccaagcaaatcacttaacctgctggcttcttcatttcctcatccacaatattgcaattataactactttgaagcgtggttctaatgaaatatgagataacacacaggtgagctggaatgcattatgcaaatataaggtatatttactgctgttattttggaatacaaagactgtacttcccatgatgcttttcactctcctatttcttaatattcaccaaggagagaaggaagagatgtatctttggaacaatgttaatttcatcctacggcttttgattattcatccctctgagtgatccagtctcattacattcagtcattcgctctaaatgcttggcargcatccaaacagttatttgttcaactcaataatctaagtttattgtcttaaataaatcacacctgacaaataacccgtgcttcaaaacgatctttaaaagtgggtgctaaagtgacactgtcaattccaaaaatcatgggtgatgttaaggc

SEQ ID NO: 887127 - DNA, 689 bp, Homo sapiens
acaataagtattcatcatataatgaatggttatcatggtaacaataaaactatacacaaatattacatttatgttgcagaatattttgttatgagtaaatgctcacgatttattgttaaatcagaaaaagtagtaatgaagtagaaaatagtgaataatcttaatttttttwaaaaaagttatgtaggtgcctgtcgaggggtcagggggagggagagcaacaggataaatagataatgcacgcagggcttaatccctaggtgatgggttgataggtgcagcaaactaccatgacacatgtttacctgtgtaacaaacctgcacgtcctctgcatgtatcctggaacttaaaatagaataaaattaaactttaaaaataaaaataaagagcaaagatctctctaaaaaaattaattacaggaaagatagaacaaactttagtagtatatacttctggtgacagaattatgagtaataactggttttttcttcatgctttgcttcattgattatattatatattgaaaactgaatattcatattttgcaaacatgtaaaaaggtgactgctgccataaaaataaaaacaaaataatttgctctaaaaggcaggagagagctgagcactgtggctcatgcctgtagtaccagctctttgagaggctgaagcaggaggatcacttgaggcca

SEQ ID NO: 887128 - DNA, 689 bp, Homo sapiens
acaataagtattcatcatataatgaatggttatcatggtaacaataaaactatacacaaatattacatttatgttgcagaatattttgttatgagtaaatgctcacgatttattgttaaatcagaaaaagtagtaatgaagtagaaaatagtgaataatcttaattttttttaaaaaagttatgtaggtgcctgtcgaggggtcagggggagggagagcaacaggataaatagataatgcacgcagggcttaatccctaggtgatgggttgataggtgcagcaaactaccatgacacatgtttacctgtgtaacaaacctgcacgtcctctgcatgtatcctggaacttaaaatagaataaaattaaactttaaaaataaaaataaagagcaaagatctctctaraaaaattaattacaggaaagatagaacaaactttagtagtatatacttctggtgacagaattatgagtaataactggttttttcttcatgctttgcttcattgattatattatatattgaaaactgaatattcatattttgcaaacatgtaaaaaggtgactgctgccataaaaataaaaacaaaataatttgctctaaaaggcaggagagagctgagcactgtggctcatgcctgtagtaccagctctttgagaggctgaagcaggaggatcacttgaggcca

SEQ ID NO: 887129 - DNA, 649 bp, Homo sapiens
gagaccaagattggaggttatagtgactttgattgcaccactgcactccagcctgggcaacagtgcaagaccctgtgtaaaaaaatcaaacaaaaaataagcaggagatattccttccagctgggtggattagagaaatctgcatagaagatatcgcacatgaaatgaaccccaaaatacatgcaagatttggccacacagggataagaagggcaattctgaggaaaaggatagagcaaaatgcaaagatataaatgtttgaaacttgtttagggaacaacacatagaagttcagtttccctgaaatgcaaggaaggattttctgcatccagaycagagacaatatgaaggccaaggttaaacatctggacattgttctaagccctacagcatgttaataaagctccaggaataaaatttttttaaaggatttatagtcaaataaaaaaaatttcatgttttacccccttcagagattctccatgtgatttagtatatttaaagctttgtgaaattgtgcttttaaaaatattttttaaattttattatgttttattttttaattgacataattatatacatttatggggtacatagtgatattttgatacataatgtatagtaatcagatcagggtaattagcatatt

SEQ ID NO: 887130 - DNA, 634 bp, Homo sapiens
tttagttatccagtttgcacatatttttataggtatcttaggcatcgattggtattttttaactgggccaagcccattaaggtctttcttctgttgggtgctatcattttctgattaagtctttttgactattgacatacagtctttcacrgatggtggagtgtttttcccccaaatctgttgtttgtcttataatgttgtatatgaggttttatggtgtatgaatatgaatgcttctgtaatgtcaaacagatccctagtaaactccttcttcacttttactgtcagatttacaaaggtcctcccattgcaaagcagtgtttgtcctaatttatatattgtttttctagttcattttgtgtttccaacttttcatgtaaaattttaattatttttgaatgtgtggatgtgagactgaggtgccttttggtactgaaattctttttccatgtacctgaagtgttacttttgtgatataggaaatccttgtatatatactttattggtccctaggcttcctattttgttaccttgctttctctatggcatccaccattttgattgttctacttttatgatatgttttcataagtggttaagcaagtattctcgttacttttgctcttaaatccct

SEQ ID NO: 887131 - DNA, 574 bp, Homo sapiens
gctttagcctggtgatgtgctgcagttctcctttgtaattgaagaattccccaaaacattttacaaatagagtaaagtgctttgggatactgcctagcagctctatgatgtaggctatacatcttcatctcttgaatagtcttcccagaatgcagtctttgaacatatttaaaatagctgatttaaagtctttgtttattttagtaattccaacatctatgcttccttaaaaacagtttctaggccgggtgtggtggctcatgcttgtaatgccagcactttgggaggccaaggcrgggggatcacgaggtcaggagatcgagaccatcctggctaacacggtgaaaccccatctctactaaaaatacaaaaattagctgggtatggtggcgggcacctgtagtcccagctactctggaggctgaggcaggagaattgtgtgaacctgagaggcggagcttgcagtgagctgagatcacgcaactgcactccagcctgggcagcagagcaagacaccatctcaaaaaaaaaaaaaaaagcagtttctattgcctacttttcttctgtgtatgaa

SEQ ID NO: 887132 - DNA, 574 bp, Homo sapiens
gctttagcctggtgatgtgctgcagttctcctttgtaattgaagaattccccaaaacattttacaaatagagtaaagtgctttgggatactgcctagcagctctatgatgtaggctatacatcttcatctcttgaatagtcttcccagaatgcagtctttgaacatatttaaaatagctgatttaaagtctttgtttattttagtaattccaacatctatgcttccttaaaaacagtttctaggccgggtgtggtggctcatgcttgtaatgccagcactttgggaggccaaggcggggggatcaygaggtcaggagatcgagaccatcctggctaacacggtgaaaccccatctctactaaaaatacaaaaattagctgggtatggtggcgggcacctgtagtcccagctactctggaggctgaggcaggagaattgtgtgaacctgagaggcggagcttgcagtgagctgagatcacgcaactgcactccagcctgggcagcagagcaagacaccatctcaaaaaaaaaaaaaaaagcagtttctattgcctacttttcttctgtgtatgaa

SEQ ID NO: 887133 - DNA, 574 bp, Homo sapiens
gctttagcctggtgatgtgctgcagttctcctttgtaattgaagaattccccaaaacattttacaaatagagtaaagtgctttgggatactgcctagcagctctatgatgtaggctatacatcttcatctcttgaatagtcttcccagaatgcagtctttgaacatatttaaaatagctgatttaaagtctttgtttattttagtaattccaacatctatgcttccttaaaaacagtttctaggccgggtgtggtggctcatgcttgtaatgccagcactttgggaggccaaggcggggggatcacgaggtcaggagatcgagaccatcctggctaacayggtgaaaccccatctctactaaaaatacaaaaattagctgggtatggtggcgggcacctgtagtcccagctactctggaggctgaggcaggagaattgtgtgaacctgagaggcggagcttgcagtgagctgagatcacgcaactgcactccagcctgggcagcagagcaagacaccatctcaaaaaaaaaaaaaaaagcagtttctattgcctacttttcttctgtgtatgaa

SEQ ID NO: 887134 - DNA, 574 bp, Homo sapiens
gctttagcctggtgatgtgctgcagttctcctttgtaattgaagaattccccaaaacattttacaaatagagtaaagtgctttgggatactgcctagcagctctatgatgtaggctatacatcttcatctcttgaatagtcttcccagaatgcagtctttgaacatatttaaaatagctgatttaaagtctttgtttattttagtaattccaacatctatgcttccttaaaaacagtttctaggccgggtgtggtggctcatgcttgtaatgccagcactttgggaggccaaggcggggggatcacgaggtcaggagatcgagaccatcctggctaacacggtgaaaccccatctctactaaaaatacaaaaattagctgggyatggtggcgggcacctgtagtcccagctactctggaggctgaggcaggagaattgtgtgaacctgagaggcggagcttgcagtgagctgagatcacgcaactgcactccagcctgggcagcagagcaagacaccatctcaaaaaaaaaaaaaaaagcagtttctattgcctacttttcttctgtgtatgaa

SEQ ID NO: 887135 - DNA, 654 bp, Homo sapiens
tatgactcaacattcacagatctcatagagactgctacagtaatggtgtagcacagaaaacactggctaaactggatatttctactcagtctttcatgagaggttatactggctaaatgatcaaacctcacattaaagagacttcagtttttgcagattgatgctcttttgcttatttcttgttttagctttaacagggaaaattattctacaraattaacctatataatttatcagattcatagaaaattaaaatgtacaattttaggatgacaaacctttaagatttttgaggttcagcgttatctagccattatcgttttatactgttgggtctgcagcaaccactttatgtatgtatatatttgatttcccaagtttatttgcctagagttagtggtagagcccaaataagatgcaatcaaagcttactttccactcttctagaccagaggtcagcaaactttttatataaacagccagatagtgaatgtttcagttttgcaggttatgtagactttgtcacaactacttatctctgcacttactgtatgaaggtgaacacagacaacacataaaagaatgtatgcagctggattccagaaaacctttatttacaaaactggcatagttttccaatgcgtttaagtctag

SEQ ID NO: 887136 - DNA, 598 bp, Homo sapiens
gctacaggagaggctgaggcaggaagattgcttgagcccaggaatttgaggctgctgtgagctatgattgcattactgtactctggcctgggtgacagagccagaccccaactccctattttattttatttattttttgagacagggtctcactctgttgctcaggctggggtgaaatggtgcgatcttggctcactgtagcctccacctcccggattcaaacaattctcctgcctcagccaccagagtagctgggaggcgtgcaccaccatgcctggctaatttttggatttttagtagagatgaggttttgccatgttgcccaggctggtcttgaactcctgagcttaagcaatccacccaccttggactcccaaagtgctgggattacagacatgartcaccgcgcctgggcagaccctggctctcaaaacaaaaaacaaaaacgcatgctgtgacatgaagagaacagggcatcatctgcaaaaatccaactctaaatatccctgagaaagaagattatgaagcacatggaataaaaagagggcccattttatataaacttaatgctgaaaaaaattctttttttaattgcact

SEQ ID NO: 887137 - DNA, 557 bp, Homo sapiens
tggggtggaagacacgtgagaagacttcctggcatgttgggcgaggaatgcttgaaggactgaattagcccaaaggccaataagttaaagatctgcgggaaccccgggagcagagacacattgacacgcagccagtcccctggacaggtggtgcgggctgagggcgagttctgcagagtgccttctcctctacatggtgtccgagcgctgcgcagaaggggctggaggtgcattcctgggctttccaaagcaagagactcattggtattgggtgaccattttgggccttatacagaagggacttgctcaggtgtccctgttacarttagtactgcaaggcaaagtcaaaagtgaatatgggagcaagtatggggccagattttcctgtaaacagaatgcgatttttatgctgaatgtgaccccgtcagtgttcacggtggatttgcgtcagagcaattttgcaaaccaaattaaacggttgttatcgagaaggacagcagatagcgccagagagctgacaaagaccgcagccggtcggtgggaaacccgggcttctg

SEQ ID NO: 887138 - DNA, 556 bp, Homo sapiens
tcaatcatcattgactaaaagcacagataagaggcattcactggagattctcctgacaaccaactaatgaacctgagtgactggaacactcacatgttaagattcccttcagagagtctgggttgtttagctctttggaaattcttctgaggcgagcaggaggatacagagatgtgaggatgtatgacagaaggaaacagctctgacttcagagtgctattgttagaaccttacaagctatgtgattttgggcaacttaacttgtctacaccttggtttgaaaaatctgcaacaatcggccaggtgtggtggctcacgcctgtaatcccagcaatttaggaggctgaggcaggcggatggcttgagccaggagtttgagamcagcttgggcaacatggcaaaaccctgtctctacaaaaaatacaaaaagttgccaggtgtggcagtgcatgcctgtagtctcagctactggggagactgaggcaggaagattgcttgagcccgggaggttgaggctgcagtgagccataattgcaccactgcactccagcatagg

SEQ ID NO: 887139 - DNA, 662 bp, Homo sapiens
gaagaacttatctaatggccaggaccatgttttccatttctttctcactctacccactatcactaccatagggctgtcacatagtaagtgctccataaatgcacatttatcaaataaatggttctgaggaaggtcagagagtatctaatggcttgggtacaacccaaaacgattacaatgtgatgaaatgatgggctggatctaagaaggggacgtggaagtgagataattccaaggtcctacaagttgatccaaaaaccaactacacaaaacccagacggagagatgggggtgttcactctggcttcagggaacagtgagcctctgcatataccattctattcacccactcaatcaacaactaatattgaacacctattctgtgccaagaactgtgctaaaccataggactgggacagatacataccctactttcaaagaagcttacattctagtgtgagaacacaaatccccctccccaaaataccccaataaataaactataagcaaccctcactacttaaacctatgagagtttgtacacaagtctagttagtgarggatgccacctcacgcattcagggctctctgagcttcaaaagattaaccaaagttctttagagtaatcaaagatcagatggtagcgatttacttgataagta

SEQ ID NO: 887140 - DNA, 622 bp, Homo sapiens
cttagcccaaaggaagtctaaacgagaaaaaaatacagaaatgcactattcctagccattaaagaaaaacaagccaaagcaactttaaactaccactgaacacattaaactaaaataagtacaaatagtaaaattcaatgttgacacagttctatgggaaaaaaatgtgagttgctaatggtagatttagcggagggtggagatggcatcatgtcccttaagcagcagctaaatctgactcctacatccacgtgatgtcctaggagggagctgggcttctgatgggggtgacacatggctgctaggaaactaagccataaggcccccagccttggcaaacagtggcagtctcactgcagagtttggcacaaagactgcaaagagtctggcacaaacggagaataggaaaaccactaactttcaaatggcccaccagracttgggtgatgagcttcttgcagtgtctatgtggactgaagaccagagatccttccccaaaatttctggtaaccccttgtagctttgttacaaccttagggatacaaatcaccatcccaaacacacagttaccatataacccatgaattacacttctaaaagtatacaccaaagagaaatgaaa

SEQ ID NO: 887141 - DNA, 628 bp, Homo sapiens
ttttttctcacactgaatttccaaaactgataactgcatttataattttttaaatgatgaagagaaaccttagtcatcttactttgataagtttggagcaggaactatcacaaaagtttggatagtaggaactatccaaacaaaagtttggatgcttttgatcacagttttgtcactagaatgctagcaactagacatgcaataagtaatctgactaacttaatacacagtggtttcaagtgcagcaggcagtagcctctgaacaccaaatcacagtgttttaatttgtgaaacgatagagaaaatgatagcactttctgtggtataaatatcttattaacccatccttgtgctgttaagttatagggctttgaatcctggaacttaacagcasaaagtgcctttgtatctgaaaaggcacacacgatagagaaaatgatagcactttctgtggtataaatatcttattaacccatccttgtgctgttaagttatagggctttgaatcctggaacttaacagcacaaagtgcctttgaatctgaaaaggcacacacttctgctaaattttgagcattgacaacagtctaagctgtgttttgagaccacagagaaagtgaaaatcagaa

SEQ ID NO: 887142 - DNA, 610 bp, Homo sapiens
tcgttctttttgttaatagcccgtctaacaaatgtgaggtgagaactcattgtggttttaatttgcattattccgattattagtgatgttgagcattttcttcatatgcctgttggtcatacgtatatcttattttgtgaaatgatttattcaggccctttctctattttttcaattatttgttttcttactattgagttgtttgcrttccttatgtattttgagtatcaactcttatcagatggatggtttgcaaatatattctcccattttgtaggctgtctcttcactttgttgattgtttcctttgctgtgaagaagctttttagtttgatggaatcccatttgtctggtttttcattgcctgtgtttttagggtcatatcccaaaaatctgctcagaccaatgtcatggagtttaccccggtgattaccttagtacccctagaactacttctagtagttttacagtttctagtcttacatttaagtcttccatccattttgagttgattttgtacgtggtgtgaaatgggggggtaatttcattcttctgcatatgaatatccagttttcctagcacagtttattgaagaaactattgtttcccc

SEQ ID NO: 887143 - DNA, 611 bp, Homo sapiens
aggaggtttgctcaaaatgaccagaaaactgatttgcaatggtcatactattacaatgaagcattctgaagtccttgaaaatagcacccataaacaaatggtatctgtctcttttctccttacctatttgctttagtcagcctctgtttctccatggatactgcaaagataaatttctgccttatcatatgataaattcctacttggtaagaaaaaaaactgggatgtgtttaacagttcttagaagaccactttgtggatgtccacttgtagacaaaggtratggattattaccaccatatgacagcaaaagacctagccattgatgttggaaacagcaattcagcaaatcagcctgacatccctggaattctgaattttgatagaatctacaatagtatgtgaaggactcagtaataataccattttattcggtctacccaggtcagctagtgttattcagcccaaaaccctcctcctcttctctttttttttttccatagttttcttaattatctccatatagtgaatagagggtcattttaaggaaatcataggcatagtaagacaaaggtatgggcggaggaggacatgctgcctacaagcatgtt

SEQ ID NO: 887144 - DNA, 611 bp, Homo sapiens
aggaggtttgctcaaaatgaccagaaaactgatttgcaatggtcatactattacaatgaagcattctgaagtccttgaaaatagcacccataaacaaatggtatctgtctcttttctccttacctatttgctttagtcagcctctgtttctccatggatactgcaaagataaatttctgccttatcatatgataaattcctacttggtaagaaaaaaaactgggatgtgtttaacagttcttagaagaccactttgtggatgtccacttgtagacaaaggtgatggattaytaccaccatatgacagcaaaagacctagccattgatgttggaaacagcaattcagcaaatcagcctgacatccctggaattctgaattttgatagaatctacaatagtatgtgaaggactcagtaataataccattttattcggtctacccaggtcagctagtgttattcagcccaaaaccctcctcctcttctctttttttttttccatagttttcttaattatctccatatagtgaatagagggtcattttaaggaaatcataggcatagtaagacaaaggtatgggcggaggaggacatgctgcctacaagcatgtt

SEQ ID NO: 887145 - DNA, 608 bp, Homo sapiens
tataaagaccaatactgtaagatctcttctataagtggaatctgaaaaagtcaaacttatagaggcagagtagcatagtggttcccagggactacagggtggaggaaatggggagatgttggtcaaagggcaaaaacttttaattacacagtaggataagtaagttctggagttctaatagacagtgtggtagctaaacttaatattactgtattgtacacttgaaatgtgctgagcaattttaaatgctctcaccacacccacacacacagataactgtgtgaggtgatggatatgttaattagcttaacagcagtaatcatttcacaatgtatagatatatcaaaatatcacattttgcaccttaactacatacaatttttatttagcaattaraccttgataaagctggaaaaaaacttaatcacaacttcttactcaaagcagatggtagaaaggttaagaactattaataagcataaaggaaatctgactactgaaatcaagtttctgttgggatggcagaagaccttaaaatatcatgaagccttgatttttttagtttctagaatacactagaactttcttcctggcaaagtgttctgaat

SEQ ID NO: 887146 - DNA, 643 bp, Homo sapiens
caagcactaaacctccaagtggaagaggaaggagatgaagccctcagctaagagctaacactgctctaatccccatttctcagatgcagcaatggaaagacgtacactaaaaacacctatgtcacactgtgagtcacagtgctggcagctcacagagttgaccagtcagtgctgctcaaaaaagaggtgggctgctttggaggtcatgaggctcttatcaagagctagatgaacatttcatgggtcatcagccgtgtggcctgagtcttctcatcaccctgtgagtctatgatataactttcttttttggttakgaagacagaaaaacgtgacttataaatagtggcattacatgcagctgaaattctgcaatgtccctggaattctgaaggctgggagcagagggagcaaaaagtgatgcctggagaggtttagtttgaagaacagagcatcagagtgggggaagtgagaactgtctgcaagtcacggctgagttgatgacctgggagttagaatcctgggatttctcctctctgggctctagtgtccctattaggtttgtgcaaaagtaattgtggttttggcattaaaagcaataacaaaaactgcaattacttctgcaccaacataatagatgaagagc

SEQ ID NO: 887147 - DNA, 643 bp, Homo sapiens
caagcactaaacctccaagtggaagaggaaggagatgaagccctcagctaagagctaacactgctctaatccccatttctcagatgcagcaatggaaagacgtacactaaaaacacctatgtcacactgtgagtcacagtgctggcagctcacagagttgaccagtcagtgctgctcaaaaaagaggtgggctgctttggaggtcatgaggctcttatcaagagctagatgaacatttcatgggtcatcagccgtgtggcctgagtcttctcatcaccctgtgagtctatgatataactttcttttttggttaggaagacagaaaaacgtgacttataaatagtggcattacatgcagctgaaattctgcaatgtccytggaattctgaaggctgggagcagagggagcaaaaagtgatgcctggagaggtttagtttgaagaacagagcatcagagtgggggaagtgagaactgtctgcaagtcacggctgagttgatgacctgggagttagaatcctgggatttctcctctctgggctctagtgtccctattaggtttgtgcaaaagtaattgtggttttggcattaaaagcaataacaaaaactgcaattacttctgcaccaacataatagatgaagagc

SEQ ID NO: 887148 - DNA, 602 bp, Homo sapiens
aacgctataatcaaagcaaaatccatctcagggttaggacatctggcttgttcccctcacttctgatattttagaaaacaggaaacccaagaccctgagagggaaagtgaattgcttcaagtcccaagacttgaatgtcagcattccaaattcctgggccagtcctctgcatttcataccccaactttggctrcagactgaattcaggcgagggtggagttgtcaggacccacacgaggtctatccactgttccaacttccttagggcctccaggaacctttgggtgttggaggctacattacatttgtaggaaagacaaatctgtcttaactggtaggcagtggggaaggaattgtcccaaggcacatgacccttcagctgcaaagccagagctgaaattcagcctctagaaccctcgccatggaccatgtttcccctcagcacttcacctcattcaaacccatgcgtgtggccctctgtgaccctgagcttggtaacagagagtgcacttctgagacatgaaagccaagagctgggggccgcaggtgccgaagaagtgatagagctgatagagccctggaaggggatatgtagacttggc

SEQ ID NO: 887149 - DNA, 600 bp, Homo sapiens
gcctctgcctactagaagccagtagcaaccttctcctgagttgtgacaaccacaaatttggcaagagattgccaaatgctgaacacctttattgagtgcttctttattccagctactgtgctaagagatttccatgtcctaatcttaatcagtcctcatgacatccttgtgaagtcagtaattatcttttgctttgcaaacgagggtgatgagctgctgataaatcacgaagctgggatttgtacccrtgttttcctgacttcagagcctgtaagcttcaccattctgaaaattttgaaatacagaggtggtcttttgaagaccaaggcaaaatggttgaagtagtaaaagcacaggatttgggaccaggtggacctgacttggaatctcaactccatgctgatgagcttatcactgtctccatgctgacccccacttctgccattgttaaattgggagtaactccagccatgcagactgttggaggatagaataaggctgcaggacaccggacatatcaggtccttttcccgctaaaccatatgcttaacgacaatggagagctctgtgaacgttgcttttgttccttccccaccatcc

SEQ ID NO: 887150 - DNA, 499 bp, Homo sapiens
gttatcacgttcttttcctttgcaactatatagaagttagagagaaaggagaaagcagacatttaacaagcaattatacaattgcttcattaactgacaatattatgaagaaacaccgggttttctgtaaacctatggagggagataggagtgtgactgatctgggtagtccaggaaggcatctcagaggaggtgatttttactagctctgaarggcaaacagctgggtgactgtgagtatggagggttttaggtgctttcagtcagagggaatagcatttagaaaaaccctgaggctggaaggagcctggcatgattgagggtctgaaaggtggctcttgtggctggaatacagatagagaaggaaaggagaggctgtagtttctggctgtgattctggaccctctgtgggtccttgaatcaacctgactgtgccaatgtcaggggtattgtttcatcatcactactataatctgcgtaatcacagcacttgtccata

SEQ ID NO: 887151 - DNA, 499 bp, Homo sapiens
gttatcacgttcttttcctttgcaactatatagaagttagagagaaaggagaaagcagacatttaacaagcaattatacaattgcttcattaactgacaatattatgaagaaacaccgggttttctgtaaacctatggagggagataggagtgtgactgatctgggtagtccaggaaggcatctcagaggaggtgatttttactagctctgaagggcaaacagctgggtgactgtgagtatggagggttttaggtgctttcagtcagagggaatagcatttagaaaaaccctgargctggaaggagcctggcatgattgagggtctgaaaggtggctcttgtggctggaatacagatagagaaggaaaggagaggctgtagtttctggctgtgattctggaccctctgtgggtccttgaatcaacctgactgtgccaatgtcaggggtattgtttcatcatcactactataatctgcgtaatcacagcacttgtccata

SEQ ID NO: 887152 - DNA, 634 bp, Homo sapiens
tcagagactattatgaacacctctatacacacaaactagaaagcctacaaaaaatcaatacattctgggaaacatacactctcccaagattgaacaaggaaggaactgaaatcctgaacagaacaaaaatgagctccaaaattgaattggtaacaaaaaacatatgaactagaaaaagccctggaccacatggattcacagccaaattctgtcacatgtataaagagctggcaccaatccttctgaaattatttcaaagtatgaaggaggagggactcctctctaactcattctatgaggccagtattattttgataccaaaacctggcagatacacatacaaaaaagaaaatttcagtccaatatccctggtgaacatagacacaaaaattgtcaacaaaacacwagcaaatcaaatccagcagcacatcaaaaagttaactcaccaataccaagtaggttttattcctgggttgcaaagttggctcaacatatgcaaatcaatcaatgtgattcatcacataaagagaactaaaagcaaaaaccatattatcatttctacagatgaagaaaagcctttcaataaaattcaacatcccttcatgttaaccatcaacaaaccaggtactgaagg

SEQ ID NO: 887153 - DNA, 606 bp, Homo sapiens
ccctttcactcacattacttcatatataaccctgtgatgttggcaaggccatgttcacctctcccactgcccagagaagccaagtgagccccagaggggccaagtgacttacctaaggtcacgtagctagtaatgagacagaggcagcattgccagccgggtctccaggtgctgaacttcagagttctgtctcatgggagcctcagctaccagttgggaaggcccaggtatgtgaaagcttgtgcaatccctgagacattttgatggctggtggccagttaacatttaggtcatgtgttttcttccccaggkgtgtgctgaccctgttctgtaccctgtgtcatatgacccctaaaggtaaggactggtagcataaagtaaaatgataaccaccatcaaccagccagttcctggccttctaggtcatcagaggcaggttggggccccaccagccctaggtccatccccattagtactcatttgtcccatttctgtgaggttggcactgactcagtgattgccaccctctgggttatcagcctgtggtgcaaccagaagagattctcatctgtgtgaggtggctcgagtgtggttgggtcttgactg

SEQ ID NO: 887154 - DNA, 528 bp, Homo sapiens
cttaccaactacagaaatttatttctcacagttcttgaggctggtaagtccaagatcaaggcaccaatagatttgatgtccaatgagggttcacttgctgattcatagatgacacctctgactgtttcctcatgtggtggcaggagctagctagctctctgagatgaatctcttttataagagtactaattccaatcataagagctccaccctcaagacctaatcacctcccaaaggccccctcttctaataccatcaccttcgggattaccatttcaacatataaatttgggggcgacacaactrttcagaccatagcatctgccaaagaaaatcccattgacatcctccaacagagaaatttaaaagaaatcagaatactttcgcttaaattcataagtgccttatgaacaattttaaattccctgtaggctaaactacaatggtcatttttaagatacattcaattaacaatagtatagggtaggataatgaaaatcacaataaaaccttgtaactactgatatc

SEQ ID NO: 887155 - DNA, 615 bp, Homo sapiens
tcccttacaaactgaagaaatgaagattagtgtcatcatttcacatattgaaatgatttattggatcaaaaacacaaaaattggtgctttgaaataaatagattgcataaattttaaaaaattgagtgaatgaatgaagtcatacgcttttaccaaaggggagagattactggtatataaaagatatacataatacttacatatgcacatttataaaaatatatacattaaatcatattagtttatatacattatatatgcttattttatatgcatttatatataaaatgtgtgtgtacacatgtgtgcattaggtgaatacacacacatacatacacatatawccctaacaaattatatatggctgttgtctttcgggaaattgtacaacttcactgtgacagacaattgcaaagtgaaaggctgaagtttctccagctctagttcaacagtatagctgtctacacatcgtccctccaatgcttccaatctacaatgcaagaccctacacagtaccacccttagatccaggcctatgacctaccctgcacacctcaggttacctgcactttggatgtcttgtgcaaatttttccaagtcttcctcaggtgtctg

SEQ ID NO: 887156 - DNA, 609 bp, Homo sapiens
ctcaaaaggtgtaacaagcagttggaacagacactgactggtatacggtggggtcttcctgattagtgccagctgatggcaaccctgcctccatccacaatggcttccaaaggagcatgttctttgatctttgggaccctcaccagggcatccaaggctgaacaatctacttcctgctctgttctcaggctgccggtttcaaagatcacacagttgattccagaagcttataagctatttgacatctaaataagagaaaggaaaacyagaatgcaacatgattaacatttatagaagttatggatttatgtgttaaaaaatgataaacccaaaaggccactctaatactcatctcaggggaatgggagatgtttggctctctggcatctcctgggactgcaggcctgttgggtactgcttcaggctttctctgcctagaccttcctattgctgctgcagagccatgctggaatgggagacttatctacaatcattgctcccttttcctaaagcttcatcagcaagcaagatacaaggcagcaaatgcatcctatcctatgctatcattaggttccccaaagacttggcaggaggtggataggcacaaag

SEQ ID NO: 887157 - DNA, 600 bp, Homo sapiens
gccacagaggaaaactggctttcgtagccctttctgaccacggtgtttctttcagctcagcaaaaggcaacatctgtgtatatgcagagtacatatctataccctcaatgtatttctgacaagttcagcttgtgatccctgtgggcatagctggtaagtaagtttaaaccatcatttcccaaagacagaactgtgatgaaatgattacttcccagacactggagaataccactcctgatgcagtttgggatgtctttgtgatagcctggcaagaatctccagaatcaatcataagagacaagacacagtaacagaagtcagacggcctgacatagtgtttgttgaccataacctgaactggagcctagccattgatcagctttgagaattcrgctgtcagtggtttaagcacacatccttaggaagatcagaagcttccctatgtgtgaaaagtaacctttgctggcagagcaatgccataacttactttcctaggaccctcccaatgtgcatagagatgagtggtgggatgctctcttatggagcaagcaattttgttagttactattgatgtgctcagatatttgtagctctagctac

SEQ ID NO: 887158 - DNA, 613 bp, Homo sapiens
ctgggttagctttactgtgttattactcactgtgactcatacattgaggtttatttttttcccccagaacagtctagcccactttatcccttttggctttttaagtaaggacatcagtatcattacacmaattaaagggaagagaggatgaggatgcccaatagccagccataatgagaagtcaggaattccaaaacttgaattttagattttatcaaagaagcaggtggagatgaaaattatgggttatctgatatatttaattattcaaaatcgtaaacaaacgtactacacagaactctttataacaaattcttcatttttcagcatacactcacccaaacataaacctacaccactattctctagccggagccatagctgaaggtatttttaatgcctttcatgttagtgaaaatatctctgtagtagctatggacttgaactcagcagaccaagatatgagtctctattttctattaccagcaagcaagcactgacaagctgtttatcatctcctatcctttgtttcctcacttttaaaacaagcatagtcacactgcaggggcttttgaaaggaatatttgaaaagctcctgcacaagtcttagcaa

SEQ ID NO: 887159 - DNA, 600 bp, Homo sapiens
cccaatagccagccataatgagaagtcaggaattccaaaacttgaattttagattttatcaaagaagcaggtggagatgaaaattatgggttatctgatatatttaattattcaaaatcgtaaacaaacgtactacacagaactctttataacaaattcttcatttttcagcatacactcacccaaacataaacctacaccactattctctagccggagccatagctgaaggtatttttaatgcctttcatgttagtgaaaatatctctgtagtagctatggacttgaactcagcagaccaagatatgagtctctattttctattaccagcaagcaagcactgacaagctgtttatcatctcctatcctttgtttcctcacttttaaaacaagcatagtcacastgcaggggcttttgaaaggaatatttgaaaagctcctgcacaagtcttagcaaagtaggctatcagaacacgaactttaatctgaatctcttctgttgtgtccaagactaaagaggagtctgacttgatctttggctcctttgacattgggagatcactgctacaaacaatcatactgtgagaagcccctgggatt

SEQ ID NO: 887160 - DNA, 645 bp, Homo sapiens
catctttaaaatggagaaataagttttacttgaatggctctttcaaaggtcaaataaaatatttaatgaaaataaaaagcttaatggagtgactgacacatagaaaggactcagtaattattagctagtaatagttatatcttatacatggtgtttatacctaagacagtgcaaaagcttcatgtttcagaatcagctacaaatccaaattgtacctttctcctgagaccgtaagttattctgtcttgttacccattgctgtcacagagcgtggttcctagaaacaactggaagccatctgcagtgagtttgggcaacctcatggttgtgttgagtgatctgatcccacagctcaggcatctgacagctgcagtattcrtgcctcacttttctgcctgactcttgctcttggtgaaagcagttactgcaccaccactctctggactttttccgctgcatcgtccttttgtcttttcaatatggaactgagattctgtgaacaacagggccattttacagcctataggctgcactctgcttgggggactgagcattctgaggcaggttcctgccctcatcccgttctggtcccatatcatgattgttccagtgaagaaggtgttgggaggtgccccataaaccttc

SEQ ID NO: 887161 - DNA, 619 bp, Homo sapiens
tttttggaagaggaaacgtgtagcaagagaaatcctttcaatagactgccccccacaaagaaaacaaaaactaacaaaaaaacccctactttttcaacaaaattaagtggcagatgtgggagaagggggggaataataaagaacaaaaaaattaacatataataatatgccaccacaatgacatacgtgagatccaaataattaaattgttaaatataggttcatgtgttattaatttattaaaacatataatacattatttttaggagatctgtacggtctaaaatcacaaaagatagtgtaaartatacaaaagtacacaactgaaagatacttgaactgaaaagtcccaaaggatcacaaggtggtcaaatcctaaccacagcccacttcttataaagaataagagctttaacctaaccctgtttgagaactggagctgggcagaggtgaggagccatttactaattgcattttctccaaattcaggtttgacaggggttactgcaacttctaagatctcatattgaggtaaaaagtgaaggtattctaaacatttatttcagtgggacgggggagtggatatgtaaagtgtcagtgggaaaaatacaggtttaat

SEQ ID NO: 887162 - DNA, 623 bp, Homo sapiens
tggctccttgcaaccaagaacagcataattttctatatttttttattttacaaagaattatcttttcctttagggtaaagcaactgctttcattcattaaaaagaaaagcaaaaataaataaaacacatttttaaaaagcaaacaaaaaagtacacagcttattcttgtaaaaactttatcgacatggctattttctcttctagcgtttcaggttttagattaaaagcctcagattagacaaatttttgttcctcccaagatgccaacatatttgtatttatatattttaaaaattcttgtaagttttattattttctgccaaaatgattttagcatttaaaaatccttatcattaaaaaggtaaagaatatagaccattaattctattatttttatgtacttctcagtaaatctctgcaatttaccaatacagtttctcccccatattatggaaatgtctcttattacraatgtggttattgtctttcttttcattttcctaatctttccaagactctttcctcaggagaacctattatttctattttaggtctctattctttgttcattctaaaattttctttcttgccatttttatctcattgttctcctactttttatt

SEQ ID NO: 887163 - DNA, 618 bp, Homo sapiens
ataaaaagtaatgtcttctaggttccatatggagaggactgatgaagccagcattaggcgtgatggggacgtgcataaatgtgtatgttatccactgagacacagattctgaagcaccagaacattaaaggcacttctacttgtttcttctacccagctgaaaggacagaaagcttcttccacagarccaggacagtccaggggaacgtagtccttcgactgaaagctatgcttcctattttctaacaaagaggctaggtcatgttgaccacccagttttggcctgcctggcttgctttttattccagcctggaggactttcagggttgaatatccactcaagccaaatcccaagaagcataacctgctattagactcttgtcacttatcgggtgaggggctgtgcggctgttccagtgcttccccacttgggtcttgtgacataccctggggccaagccaagccctggaggttagcttctacagtctgtccttaaagagagctcagggatgtctggacaggacctggagacagtgccctgggccagagacctctgatctctaggccagcagagtcaccatgcagacagatttatgagccttaggcaaaacagctggc

SEQ ID NO: 887164 - DNA, 618 bp, Homo sapiens
ataaaaagtaatgtcttctaggttccatatggagaggactgatgaagccagcattaggcgtgatggggacgtgcataaatgtgtatgttatccactgagacacagattctgaagcaccagaacattaaaggcacttctacttgtttcttctacccagctgaaaggacagaaagcttcttccacagagccaggacagtccaggggaacgtagtccttcgactgaaagctatgcttcctattttctaacaaagaggctaggtcatgttgaccacccagttttggcctgcctggcttgctttttattccagcctggaggactttcagggttgaatatccactcaagccaaatcccaagaagcataacctgctattagactcttgtcacttatckggtgaggggctgtgcggctgttccagtgcttccccacttgggtcttgtgacataccctggggccaagccaagccctggaggttagcttctacagtctgtccttaaagagagctcagggatgtctggacaggacctggagacagtgccctgggccagagacctctgatctctaggccagcagagtcaccatgcagacagatttatgagccttaggcaaaacagctggc

SEQ ID NO: 887165 - DNA, 571 bp, Homo sapiens
cccctaggggagcattcatctgttttaaaaagcagggagagaaaacaagttctgtcaaacagtgaggtttggaaatcagaactgtacttacttgcctttcaggaggacatattctaaagagttgttttttgggtggaagagaaggaagtcatctcctctgcccccactccacccaaggcacaccacacacacacacacacacacacacacacacacacacacacacacacattttcacctccacccagaggttccttgtggcagatgtgaaggagtttagaacacagggttcccattataacccctttgttgtacgagaccaaacrtggcttttcagccctagagtaaatctttttctggcaggccactttcttggcctttatatccatgtctagggccctgggctggcattggccctgaaggccagggccagcctttggggattgcacttgagcatgtggtcagggacagcatctgagggcattttggacaggaaagatttctgattattaggctgttttcatcacacctatgcttcagggtcatagaactgaggattgccagggactga

SEQ ID NO: 887166 - DNA, 526 bp, Homo sapiens
tgctccttctccatcttttcacaaaatacctatccctcaaatgtgggtattcctcagaatgcttctaagcccctttgtcctccctttctacatcttgtcccaaggtcatctcatctgttcctgtggtttctttttctttttatttttttctttcttttttttttttttttttttttttgagacaraatcttgctctgtcacccaagatggagtgcagtggagctgtctcggctcactgcaacctcttcctccagggttcaagcgattctcctgcctcagcctccagagtagctgggactacaggtgcacaccaccatgcccggctagtttttgtatttttagtagagacagggtttcgccatgttggccaggctggtctcgaactcctggcctcaagtgatcagcccacctcagcctcccaaagtgttgggattacaggtgtgagccaccgccctggcctgttcctatggtttcaataaccatatatacaatgatgactcccaaaagtatatcatcagcccaactg

SEQ ID NO: 887167 - DNA, 659 bp, Homo sapiens
agcagcttctcatgagtatgagccctagagtcagactgcctggccctgccttaccctagctatgtgaccttagggaaattattttacctcttattcctcagttctcagtctgtagctaaagataatgaatatttattttcatagggttatgtaaaaattaaatcagctaatataagtaaagctcttaataaagtgcctagaataatgtaaaaaaccattaagcaaatgacaggttaataatttttagtaaatagacaaatgtagtttattcattatgttatttaaacttatggtgattgttatttacaatgcccagacttagtaagctccatttgggaagtacaaatcaggtgaaaagtgaatgaaatgagtcgtactaaccacaatgatttctaagccagyccaaaaatggctacacatttgagtcacttagaaaacttttacaaacagaacacaggggcccactccatctttactcaaactgtatttctgagaatggttctctgaaagattttcagacaagaatctacagatcttggaattaaaaattgatattcaagaccactagtgagttctaaccataccacaaatcctcttaccagagttgcacaaagttaggttttgatgggttattgtatgttactactgaatatataaca

SEQ ID NO: 887168 - DNA, 659 bp, Homo sapiens
agcagcttctcatgagtatgagccctagagtcagactgcctggccctgccttaccctagctatgtgaccttagggaaattattttacctcttattcctcagttctcagtctgtagctaaagataatgaatatttattttcatagggttatgtaaaaattaaatcagctaatataagtaaagctcttaataaagtgcctagaataatgtaaaaaaccattaagcaaatgacaggttaataatttttagtaaatagacaaatgtagtttattcattatgttatttaaacttatggtgattgttatttacaatgcccagacttagtaagctccatttgggaagtacaaatcaggtgaaaagtgaatgaaatgagtcgtactaaccacaatgatttctaagccagtycaaaaatggctacacatttgagtcacttagaaaacttttacaaacagaacacaggggcccactccatctttactcaaactgtatttctgagaatggttctctgaaagattttcagacaagaatctacagatcttggaattaaaaattgatattcaagaccactagtgagttctaaccataccacaaatcctcttaccagagttgcacaaagttaggttttgatgggttattgtatgttactactgaatatataaca

SEQ ID NO: 887169 - DNA, 669 bp, Homo sapiens; identical to SEQ ID NO: 885864

SEQ ID NO: 887170 - DNA, 660 bp, Homo sapiens; identical to SEQ ID NO: 885865

SEQ ID NO: 887171 - DNA, 670 bp, Homo sapiens
tctgtctctatgattttgactcttgtaagtatcttatataaaggaatcatataatatttgtccttttttgactggcttatttcgcttagcacaatatcctcaggattcatccatgctgtggcatgtattaaaatttcattccttattaaagctttcttaatttctacctcatttttgaaaaaaagaaacagcaattttgccagacaatttagcacttgggctaacaatttgcttttaatttctttttcttttggtactttgaatatatcagttcactggcttctagaaagcctctgagctttctaataagaaatttgctgataacctgattcaggatcacttacayaggacagcacacttctttcttgctggtttcaagattcattttctttttcttttcaaagcttgattataatcaagctgtattggtatgagtcttcttgagtttatctacttggacttccttaaaattcttggatgtttatatttatgtctttcatcagatttgggaagttttcagccattattttgttttccaatatcctttcctcccccaccatctcttcttctgtaactaccacaacacataagttggcacatttgatgttgtcccacagattgctaaggcctgttcactttttaaagatcgttttcttcctattcgttagac

SEQ ID NO: 887172 - DNA, 488 bp, Homo sapiens
ttttctcattgtggctgactttcttcacttcatgtgaagaaaggaagataggaagtagctgtcaaaattttcttatagttcctgcaccatcctaaaaggtaagtggaggaagacaaagttgatgtctcttttccctttcaaaggtcccatgtttgtttatttctttmattcatgagccccatatttggtaaatgaaaggggtatggcatgccttttaccttactcagtgtctctttttaggttaaccactagtgggagaaatggaggatggcagattaatgtagcaaccagctcagttggcagttttctctgtgcctctgctaaactgaatgtatctcttctactatcctcattatttgttttttggattctctgaactatggcatccatgatcatctttaattcatacagtgcctgctctcagtagtttggtcttctcctttcagaccaccacactttactggtggaaacgacaccttagactggat

SEQ ID NO: 887173 - DNA, 488 bp, Homo sapiens
ttttctcattgtggctgactttcttcacttcatgtgaagaaaggaagataggaagtagctgtcaaaattttcttatagttcctgcaccatcctaaaaggtaagtggaggaagacaaagttgatgtctcttttccctttcaaaggtcccatgtttgtttatttctttaattcatgrgccccatatttggtaaatgaaaggggtatggcatgccttttaccttactcagtgtctctttttaggttaaccactagtgggagaaatggaggatggcagattaatgtagcaaccagctcagttggcagttttctctgtgcctctgctaaactgaatgtatctcttctactatcctcattatttgttttttggattctctgaactatggcatccatgatcatctttaattcatacagtgcctgctctcagtagtttggtcttctcctttcagaccaccacactttactggtggaaacgacaccttagactggat

SEQ ID NO: 887174 - DNA, 670 bp, Homo sapiens
tttcacaagattggagacatttgacaaagcaatcaagtccaaagcatattgtgaaagtttttgagatgtaaaatattactttaactatttcaaagtagaaatacccctgctttggagcagactgtttaacactccagggacatgtgtttttcattcctacaactttctattaacctatctgctaatttaagagcttaactgaaacattattatgcatataatttattgttattgtttttaaatgttaaagtattctgtgtgctgccatggttccgaaggcatcaagacaatgaaagaaatataaatgattaaaatgatctataatcattgtaaaaaattttaaaaataaaactcttcccatatgataacccaaatgtcctactatggtcccatggaatcttctggtcaaagartgaacactcctttatacaatgctacaggattaagtagatttttgggagactattgactggtgtagtatgtgctggaagacaagctgtatgtatctgctactctagctaggacaccgtctcttgaaaaactgaacctgtgaaacattgtataattgtatggatccaatgagaaattttttattgggtctaaatgcaattgcattattgaatttctatttggtagtcaagaattaggcaacatattactgcaatggtat

SEQ ID NO: 887175 - DNA, 620 bp, Homo sapiens
ttacaaacatgagtattatattcattctgccttggctattaaaacagaaaagtcttagtttacatcgtcaagttctgctctccagatccctatgcatttctatatttgcaactgaagaaaatagaaacatttatatgtttctctgcaatattccctcattcaaaaagatggatttttctgccttgttctttttagtttctaaaatgcagagtccaaccaggaaaaaaattaaccattctataaaggttgtttttaaggagaacaatgtttgtatggcaattacaccacaatcaatagaaagattctgcacaccctgatttgcagtaaattctgggtttaaatttagagacatttctwgcattgttcatttggctgcttttattgaactattacaagaattagggggaaaatggcttcttagaacagtttagtcatcatgagcattgcttctggtttgtttctgccttgtttaattagttgaggttgatacacaccacctagtttcatagacgttgcttattgctaaacatgacaaccccattaaaagttaccttgtgaagtacaaaaaccaaaatacatgatatataacatagcataaaaccaagcccagtcttaacaat

SEQ ID NO: 887176 - DNA, 659 bp, Homo sapiens
ggaaccaacccaaatatccatcaataatagactggataaagaaaatgtggcacatatacaccatggaatactatgcagccatgaaaagggatgagttcatgtcctttgtagggacatggatgaagctggaaaccattgctctcatcaaactatcacaagaaaggacaaccaaacaccacatgttctcactcataagtgaaaggtgaacaatgagaacacatggacatagagaggggaacatcacacactggggcctgttgtggggtgggaggctaggagagggataacattaggagaaatacctaatgtaggtgacaggttgataggtgcagcaaaccaccatcgcatgtgtatatctatgtaacaaaactgcrcgttctgcacatgtatcccagaacttaaagtataataaaataaataaataaataaatgaaataaaaagaaattgccttttcataaagtggtccattttgttgctaaccacttctaattattagaaatttttcccttaaagaagtcaaggtatgtttcctggtattctttggtactagttctgcttgctagagcaattcagaatcaggtgtatcccatcgcaagcatcatgtcaatatttgaagacagctgtaatgttctgaagagggaaaccttctctcctccca

SEQ ID NO: 887177 - DNA, 606 bp, Homo sapiens
tggtggtccactgatcagacttagtccttgtctgtctttttgttgggcttgcagcaagactccaagactcttaattacttgtaaatattaaaacattaggatatttcacatatagtagcagatttctcttcaaaaatagaaagatctggcactgcaaatgcaaccgtctcctaaagtagcataggaatataggctttagactaaatgggtcatttaattgaccatctttatttattcatcttacctccctttccctaaagggtaaggtaagggagaagatgtcaaagtcagttacagactacaatgactatgactgtagggggaagttttggttagagttttagggatgctgattctgggatgcactaacctgtgcatacatttgattgagggccatccataacctacatttatgcccaagaacaagacactttgagctcmccgcaaattttgcaaaattgatttcatctctccagtattaccttggattataaagccaggtgagagtctctcctacagaaggaggcagaaaaggtcccagaggctttggcaagccaggaggaacagtccaagtatggttggagattacggccataggacaggggt

SEQ ID NO: 887178 - DNA, 566 bp, Homo sapiens
aaagccacttttcaaagttccactgaattgctttttcatcttgctatgcctgcattgggcaatttttggcttcttctttcaaaagtcttggtgttcaagctctgagattctttacgctgtttgatctagtctattgttgaagtttataaatatattttgtatttcactcaatgaattcctaagtgtcagtatttgaaactgtttcattaatctattatatctaaatttccaccaataccatacaatattgactactgtasttatataatacatttttaaaaactggagaatcatttctcccactgcattcttcattttcaaaattgtttcactattctaggagtttctcttgttatctttttcatatgaattttagaataatcttatttatacctaaaaataatgctgtcattttgacagagatttttcttggattttttaaaataggtataccagctaggggagaatttaagtctttattatgttgggttttccaaaatataaatagtgtgattttctttgatttatttcaccagctttttgtagtatttttcttttctgaaggt

SEQ ID NO: 887179 - DNA, 588 bp, Homo sapiens
tggaaaattcatgaaatataagatgactttgtgcctgccatttgggggatgaaatagaaatttcagagagagaattcaagcaaagagacattacaataatttatgataggagttttcatgtttagttttttatactgatggcagtggcggcccatctggaggagccactgcaaagacactggctgcaatggctaggtgcaaccatggctgtgtgctccatagagccagtgggggccaggaacaggcgggagccccagcccctaccaagttgatggggcaggagcccagtgttcctgggtgcaacagcagctgcccgactgtggctccagacctgggaatctctgcactctcrgaggcctgggaagccctcctgccccaacaggcttagaagtgcctgcttctgccccctggcctctccctgctcccagtaccctctctgctgcagagcaaagttgtggctgaggctgggtgctgttgcaatgtggccaggtatgtgtattctcagaggtgctgacacgccagccccctgctgccttggccccctctagactttgggaacccaggagcatgggagggaagcaaaggagg

SEQ ID NO: 887180 - DNA, 624 bp, Homo sapiens
ctgtgtgtcacagagagatgagtgaggaggagaaacctattctgatgcccagttcgagaggattctcatccagacttgttctcctctgaaagctctcactgactgtaccttcttagtgttgttctccaggtagaatgaggagaagagcgctgtgcacatgagtagctgaaatgcctttaaatcccatcacaatcctgcaagcttaatgtgctcagaggtggccaaagggaagaggaggaagcacagccactggagaggagagacagcacgagacaaggcaggctggcttygcatcctccttctattcatgcacagttgtcatggtctgacaattgcatcatcacatacaccgaaatgtcacaatgtccttattttctaaaattcttagtgcatagtgtgacacgaaaaaattcttctgattatgaatttatatgaaaagccttctaatggtagaacatttaatttacatctatacattcagtgattcacattttctgaaattaatataatcaagaaaaatcaggactgccctaaaaaatctgctctttgtctctgttactgattgtagagccgacctctcagatctgttgatgagatttctgcatgctttctttctacatgacc

SEQ ID NO: 887181 - DNA, 601 bp, Homo sapiens
gggagctgcaggactgcatattcaatgctatctgtgttctgttttaatattgttccttgattgcaagaaatgggatccactgaggctgtctccagaaactttctttcaggaaaagttattccttaaaataactttttagggaaaaagttatcatagggatgttctggaacagaagagggatgcagtcargaacaaatctaaggccagaaatggaatatgtctataggaaatagagttgcacctctcagcagttgactttgggacctgttctggatgcagggagttctgcggcttttaatataggggaaacatagtattaagagcacccttttggagccagacagcctgtcaaagcctggctccaccaggtactaacagtgttgttctggaaaagttatttaatgtctccatgcttctgcttccttatctgttaaaatggacaatccagtacctattacatgaagttgtaatctaggatcatttatatgatgggttaactatttatgtatgtattatacgacttgcaaggaatgaatttcactgctgactcttctctctccacctggcttcctttagtgacccagagttactgctcctccat

SEQ ID NO: 887182 - DNA, 553 bp, Homo sapiens
gatacacagtgtgagaaaaggctgctctgcctacacaagtccacagtgaggggtcagggcatgaggccagtttctttcagtgtttggggcaacaacctagatacccttatcagtgcctgaaaatgttcaagatataactttgtttgatttgagcctgcttcgaagaacctgtagctgtctgagtcacagagatcaagacattctgtggttttctgtccagacacagaaggaaagagggggtatctggggactctacacctattcctgtacccattttatgttgagggggraagatctgatcttttcaattcaagagttgtgaggaactataacagaccacggatttcagctgatgggatgggatcacttttataggagtcttgggaagggttgagttattttgcatgtctgatggacagaactcattgaggccagagggaagatggtggcatacagcccctgggatgggtcccaggcttctaatagtcacatccctcagtggtttcctcccacagtgcaccagcattgggatggcagaactggtgatgtggta

SEQ ID NO: 887183 - DNA, 630 bp, Homo sapiens
ccctggctccctttgtttaactcagtgttctccgagcttattggactgaggaccatcaggtgcccacagaccagggccagggcaatcctgctcagtttcactgagcgctgcttgctcggatcccgactcccgtgagaagtcaggatgtggttcctgctcagagggtttcccagttctgtgcaaaagttggcatgcctgcagagacacagtgaggtcccagagcaaagtagagggcatcagagcatgggctctgcaagccactgtcgggggctgagtcctggctcygctcagtagtgctactaagaaaattgcttatcctttctgtgtctcagtttcctcatctgtaaaaggggtgcaatgataatacctgtctcacaagtgtctgtgtagattgggcacatgaggcaatatgtgtaaagcacttagaacagcacccgacacacaggacatgccccaaattggtagctgttgttcttaggaactcaggtgctttcggcagctctggctagagtggagccttagacctcttgtgcattacagcaaggggagggcatctccacatgtgcttattacttctccaagtagaaactgtgagtccatggaacaatgcagttacaccttctcctttct

SEQ ID NO: 887184 - DNA, 610 bp, Homo sapiens
tgtagaagtgttcatctctgtgtgacagagggactgctgtgaaaccccagcatgtggggttaaagtgagattattatatatatttaaagggagattcattttgtgtcccatgtctggtggcaatattatttgggataataatattaatcagtattcaaaactttccrttatttaagtgtcagatgatcactgtgtgagtttaattttgttcagggaggcaagagtgaatggtaggtgaggccttcgactctgacatctgatgtttgccccatgtgacttcagcagctggtcacccctcaagcaccaggttccacctttctccaaacagggaaagccatgctgcctgcttcaccagtaagagtagacgagatgatggatacagaaccccaactgtcctatgcacacatcatccatgctcacttggaggctggtgttatttctcatgctcaggtgttgcttgtggaagtcaggcatattatttaaacattttatttgctttaatatacagtgtaaccagggtcataatttcacatgtcttggaaaatacttttcagtgcaaggaagccgtctgcattcccagcatggaaactaattttcccagtaccatgcg

SEQ ID NO: 887185 - DNA, 577 bp, Homo sapiens
tcacttcttgctttgaatttggttttcttgcagctgctccctccaggggagccagaaggcttattgtcccaaggcaggagaggctgtgtgagacctggttttgaaagctttgagaagagaagaagtgctgggattcctttatctcctccattagcatatcaaggacaaagcctagaggctcttagggatccccatggtctgctkggggaagaccaggccaccattgagagtggagtcagggaggctctgggagagcagccagccccatgggaacctagagagtcatgggagagaaaggaggaggtactagaggttggaaggccaatgaggcagaagcttgttttctgatttttcttcctgggcccaagtctggaagatagggtgttggatccatgaggatattcatggcaaggaggaggctgttgcctctggccctggagcccaccttcagaaaggtgccaggagggtcagctgaggaaccttaagttttcgctttctcctgagtggtacagaggctgaatgaactgcccaagggcctggcctgggcaagggaaggtggcactcaggccaacgggct

SEQ ID NO: 887186 - DNA, 577 bp, Homo sapiens
tcacttcttgctttgaatttggttttcttgcagctgctccctccaggggagccagaaggcttattgtcccaaggcaggagaggctgtgtgagacctggttttgaaagctttgagaagagaagaagtgctgggattcctttatctcctccattagcatatcaaggacaaagcctagaggctcttagggatccccatggtctgcttggggaagaccaggccaccattgagagtggagtcagggaggctctgggagagcagccagccccatgggaacctagagagtcatgggagagaaaggaggaggtactagaggttggaaggccaatgaggcagaagcttgttttctgatttttcttcctgggcccaagkctggaagatagggtgttggatccatgaggatattcatggcaaggaggaggctgttgcctctggccctggagcccaccttcagaaaggtgccaggagggtcagctgaggaaccttaagttttcgctttctcctgagtggtacagaggctgaatgaactgcccaagggcctggcctgggcaagggaaggtggcactcaggccaacgggct

SEQ ID NO: 887187 - DNA, 637 bp, Homo sapiens
ccatgttttcagttaatgtcaaggtgaaaaatgtcactacaatcacactacgttctatcaatgtataagaaatcatttctgttataaaatgaaggatgataaacctaaaaatcaatcagcatatgcacatctggaaatactctggagtcctgtttctgaaatattagtattaaatacgaaagaattgcttaattatttgatgctgttgctttaagtaaactttttattatttcacttcaaagtctagaatattgataatgagatgattcatagacagtgatgccagtarccttttacctttgttatatcttgaaaagtcacttggttttatggacttttacaggcactcgtttccagtaattgtgtaccatatttcagtgaaatcagatgtataatgtcacaggagaaaaagatgctccagcctaattttgccctacatcttctagattgaaggtcacaatgatgcgttttttacattaacttaatactctaagagaattacatcttgaatacatctaggatgacagaaaatgatgtaatgaatcttcagttagtggtccttatgtttgcctcataacactgtgttttcttctattatattgctctgtaattgtctatttactggtctgtgccctac

SEQ ID NO: 887188 - DNA, 616 bp, Homo sapiens
ctggcagaaggaggaaggggcctctctagggtctcctttgtaagggcattaatcccatgcatgagggttcaggctctacctctgtgatctaattaccttctaaagtctccacctcctaataccatcactttgtggtgaattttaacatacaaatctgggggagacataaacattccaaacatagcattgcccaagtcaacaggtarcaacttgagccaatagtctttccagttctgaagtttatgtacttaaacagtatgagctacaacttgggatcacctgcctaaatttttggatgtatataatacatcctaaggaatagagagagagtctgtattgactaaaattagaagaaaggtttcatggaagagataatacttgaaatacaggtcttgaagcattgacacaatttacataatgtgaacagatggaagaaaacagtgataatttcaaggtggaggcagggaacagtaagtccctaaatgtcaatggaaacttatgtaaaatgatgagttctatctagaagcagataattgagtggggccaaagctttcagttgttaaacctaccaagatgaatggacgtgctcaggatggcaacctcgagctcctgaacc

SEQ ID NO: 887189 - DNA, 575 bp, Homo sapiens
atgactttatcagcagcatgaaaacagacttatacaacctccataatgtgagtgattctcacaatcaggtgaaggccttaagaacaaagactgagttctctccaagaatatggattctcctcaaaactgcaatgcaaaaaccctgtccatgcttgcatcctgctgcccagcagaattyagattcaagatgatgatatcaacccacctgactttctagcctgctggcctaccctgcaaatttcaaacttgccagatttcacacagtcatgtgtggcaattatttatgataagcaaacaaatgtgtgtgtgtttgtgtgtgtgtttgtgtgtgtcctattagttctgtttcactggagaactataatacatggcaagaaaaagaaagaagagcatttcagaaagaaggaacaaaatacaaaatacagacctcctggctggctctggaatagctggcttgtaggatgtgctgggacacagaaaaacaaagctggagcgggagctcagaaccagtctctcatgggagtcatttcagacatataagcggagttacagcatgattcattctgtgctttgga

SEQ ID NO: 887190 - DNA, 611 bp, Homo sapiens
caatctcaataaaattccagcaagctattttgtaaatatcaaccaactgattctaaagttcatgtgaaaatgtaagagatttagaatagctaacacaataccaaagaagaacacagttggagaattcacactacttgatttcaagacttaatataaagctacagtagttaagaccttattatactggggaaagaatagacacatagaacgatggaaagaatgtagagcccagaaattgaccaacacatatgtagtcaacttatctttgacaaagaagcaaagaaaattcaatggagaaagaagagccttttcaacaaatagtctagaacaattagatgtccatgcaaaaacaaaaaaaacaaaacaaaacctggagagaaaaattacatctttcacaaaaattaactcaaattgcattatggacytaaatgtaggatgcaaatcataaaacttctgtatgaaaatatcagcaaaaatctaggtgaccttcattatagtgatgagtgtttagatacaacatcaaaagcacaatctatgaaagaaaaaaattgatgtcattaaaattaaaaacttctgctctgtgaaagactatttatttgcagaattaaaag

SEQ ID NO: 887191 - DNA, 671 bp, Homo sapiens
gctcccataaatgttgataatattctgtaagatatgtgatgtatacatttaatatttatatgtcaaatgctaggggtaagtttaccaatttttttggtaatctgtccatactcagaaaggtaattatgatagttcctcagttattctgcattctttttcaggctggtatagctgagtgtgacagctaaagattaatctgtatttattatgtttttccccgaaaatccttttgatggaagatgctctttaacaaaagatgtcatccttcccttaactaaatgtcattatgaatgatacttattatagcatgttgtaagagactgatgctcttggcacttttgtaacatctagaatgccctcctgtttctaactgttgtgattggcctttgctgtcccctgttggtaaytgctttgttacacttctgttacttctgaaagtggacagtggtgataaactaatgcaaaattacgtcagctacatattgcaaggaaactatttggtatgcattgttatcagaagagagttggttatctgcataaaaagtgagagattgcttacttgcctatgaaataaaatacatgagccttggaataaatatttttgcttaagtctttttgatttttttttctaggtcctgatgaatacgtatctgggtggtctgggtggtggg

SEQ ID NO: 887192 - DNA, 640 bp, Homo sapiens
ggtggggggaggggagagggatagcattgggagatatacctaatgctagatgacgagttagtgggtgcagcgcaccggcatggcacatgtatacatatgtaactaatctgcacattgtgcacatgtatcctaaaacttaaagtataataataataaataaaataaaataaaataaaawaataaatgctcattatcactaatcagagaaatgcaaatcaaaaccacaatgagatatcatcttacaccagttagaatggcttttgttaaacagtcagaaatataacagatgttgttaaggctctggagaaaatggaacacttgtacactgttggtggggatctaacttagttcaaccaccatggagagcagtctggaaatttctcaaagaactaagagttgaactgccattcaacccagcaattccattactgggtatatacataaagaaaaaaaattgtatcaaaaagtcatatccacttgtatgttcattgcagcaccattcacaatagcaaagacatggagttaactcaggtgtccatcaacagtgggttgcataaagaaaatgtggtacatatacaccatgggacactatgcagccataaaaaaatgaaattatgtcctttgcagcaacatggatgca

SEQ ID NO: 887193 - DNA, 452 bp, Homo sapiens
attcattatagacccaggccatgcagccagaatgaatagattataattccagctcattattgattatctataaaactgtggacaattcaaatgaatggtctggcacaataccttgtctttttttttctttttttttttttctgagatrgagtcttgctctgtcgtccaggctggagtgcggtggtgcaatcttggctccttgcaacctttgcctcccgggttcaagcaattcttctgcctcagcctccccagtagctgggattacaggcacctgccacaacacccagctaatttttgtatttttagtagagatggggtttcaccatgttggccaggctggtcttgaactcttgacatcatgatccacctgcctcggcctcccaaagtgctgggattacaggcatgagccatggcgtctggccctatccattatttttataattaaaaattgt

SEQ ID NO: 887194 - DNA, 585 bp, Homo sapiens
agtgaccattatccttggaagtgagggtaggaagtgaaaggaggcaattcacgtgtttttccttgaagctatattttaagactgtgtagaacatcttgaagtttggaaacatatttgcttttgcaggtgatggcattttctaaaatattattacaaaatatatgaaaattgcattgtagttgtcacaataaatcaaacatcttacataataatgtaataaaatctagtttaacattataattttattcaattatttcatccacattgagatatttactaagtcatgaagtttatatagatcatgagatgtaaaagatctgctattactaatttgatttaaaaatcccatgttcattataataggtagtgctgcttaaaatgtctgtgtaatgatmtacactattatctgcagcacaatgatgttttcacagctgctgtttgcctggaatcagccatgtcctttgtgaaaccttgcctcggcatgggctcttattcctaacatttgccttttaaaatctctatagagatctaacagaaaattcacaagaacagcatcttttgtgcttctctttctctgaaaatacc

SEQ ID NO: 887195 - DNA, 615 bp, Homo sapiens
gcaccccaggcagccactcctagccttggcctttggcatgagatggaggcctccttattccccatctggtccagttccttcacttacagatggcagcagtgaggccttggggtagaaggatcctccaaagtcacacagagtgcctgcctcctggtcccctcagctctgcctctgcagcccactgcctgcccagtgccatcaggatgagcagtaccggccaagcataatgacagagagaggcagatttcagggaagccctgactgtgtggagctaaggacacagtggagattctctggcactctgaggtctctgtggcaggcctggtcaggctstccaggtggtcagagggcccagtggtgccccagcacggtggtgcccaagccaaccctgtgactgacatgtacgattcactcctttgagtctttggatgccaactcagccccctgacctggaggcagccggccaaggcctctagggaagagccccccactgcagacatgacccgagtaactttctgctgatgaacaaatctgcaccccacttcagacctcggtgggcattcacaccaccccccatgccaccggctccactttccccttttattaatacattca

SEQ ID NO: 887196 - DNA, 568 bp, Homo sapiens
gccctgtttcacagggtctccagaagctccggtcagataacaaaaatgaaaacactgtttacacatgcacgcctttgtttgttgtagaaactattattattggatggactccaagatccactttactcctcaagaggctcaactgtagcataactcacaagtgagaggtgtcaggccagcaatgggaacagggtccctgttcaggaatgccttctcctgccttccatgggtccagtgggaagcagaaagagcccctctgtgcctttaaaatgacctgctggctaaataaataataaacagaaatcatcatttacttacagacactccagaactggaatgtaagttgatttccttccctctttgcctggaagattgtttgaggggaaacttttggtcttgttacacaacagtagcatgcgccatattkctgtttctttcttcatttgtcatttatgaggagggtattttggggttgccctatgggcaagaaataggcttgccttcactagaccaatttgccagttcacctaatagacactgaactacaggcaccagtgcctgcttttct

SEQ ID NO: 887197 - DNA, 669 bp, Homo sapiens
ctgtttcattcctctttatctccccattacttttcagtttgacacaaattaggtactcataaatgttctttgaatgaacaaattaacttgcttgtttcaggtcataaagtgagtcattgcctgggacagctttcctctactatgttcccagatacaacagagagttacaagtatttgaggcaaataggagtctgtgatcaaatgagatttggtcttagggagccacagtgcacgttaacataataaaggctccaagaagtmctgcaataaaaagcccatgtaactttttctaactctgcacttctgaaaactttttctgaccatggaacccctttatttcatagaacaaaagcttcagcatcttgcagaaccagtgttcctcagaacacgttcaggagcttgagttaatgaggcaaagaagaatggcagagagctcagcaaaaacaaaaggagagagagatgtttcctgggatacatgggagtgataactgcaggcactttggtagtgccagaacacaacctatcaagtgggaagggatgaacaaagaggtttgagagtgtgtgatggggctattcctgcagagcacactggcctgccatgccatggagcttaggtttaaccaactagaccctttggagtcctggctctctgcacagtgccgtagaatg

SEQ ID NO: 887198 - DNA, 651 bp, Homo sapiens
ccctaaaagagcaggtggctttgttcacagttggcagacgaaagcagaagttgcctgagtttaatccagttagcaggtggataataatattgaacatctttggtttaagtatctgttcaaatattttgtctgctttaaaaattaggtggctttttttcttgttattgagtttagagagttctttatatatttctttttactctcttagtggggtctttggaagagaagtttttaatttgaataaagtaaaatttatcaattataccttttatagaccatgcttttggtgtcatattcaagaaatctctgcctaactcaagttcacaaagattttctcccatgttgtcatcaagaagtttcatatttataggctttatatttaggtctatgatctattttgagttcatttttgtttaataaagtctttgyctttgatagtatcaataaccattggaaaatgagcctttgatattcccagggatgctgatttactcacttctatgaactttcaatgaatctgcatatgccacattctgtagctaaacagcctaatacacttggctagcaacctgaggtccagcatctaatcagaaggcacccagcaaacatcctggaaaattaaactcccatctccaatatgccgtcccaaac

SEQ ID NO: 887199 - DNA, 625 bp, Homo sapiens
cttgtcccagtacaatatggtctccacacaacagtcagcatcatctttgaaaaatctcagttagattatattactcctctgcttaaaaactctggctgctgctgaacttagaaagtcagaatcatgctctggcctacatggctcccacatgatgaggctcttgcctacctctctgaccctttcccacctcactcttctctcactcaatatgctctagtcacactggcatttttgcttttcctggagtgtggtcagctctttcccaccttttctttctttctttttttttttttttgacagaatcttgctctgttgcccagactggagtgcagtggtgcaatctcggctcactgcaacctctgcctgcygggttcaagcaattctcctgcctcagcctcccaagtagctgggactacaggcatacaccaccatgcctggctaatttttgtatctttagtagagacggggtttcaacctgttggccagtctggtcttgaactcttgacctcgtgatcctcccaccttggcctcccaaagtgctgggattgcaggcatgagccaccgctcccggctgctctttcccaccttttcatatgctgttccctccgcctggaatgcagctctt

SEQ ID NO: 887200 - DNA, 608 bp, Homo sapiens
ggattcatcccccagagactcctcatctcatgatgggactgagaatgggagagaaatgtgtagtggcaaaactatagagtggactggcctgggttatctattggtaagtgctgctctcctatgaggtctggcctgaagcagccactggttttacccattaaattacagcaataataaccccttacatttgttcagtgcttttacctttcaaagcactttcatgtattttatgtaattttatcatttaatctattacatcttctttgggtcacactgcttgtaaaaatacatttgtagagcagtggcaaagagaccaagagaagcagtaatattgtcagtatgttgaaaaaaagtctgtctatgatggggccttgacaaaacaactcaaaggaaataagtgtagtcggagtctargctgcagtacggtgaccccagaatttggagctaggcttagaatgattgttagagcgaaataactaatacaaaggcattattgtagatgtgttactgatagagacttaggaaatctcaaatgtaatcaagataatcagggtgtatctgtaggatcagaacgtacttgaagaaagttgcaatctaatcagctttac

SEQ ID NO: 887201 - DNA, 582 bp, Homo sapiens
aaggtttgaataccaaatataaatttataaaggtagccagaggggaaaagatacattatatacagggaaacaataataataagactaatatccatcagaaacaacagaagccagaagaaaagaaaaactgtaaatgtagaatttaaatcctacaaaaatattcttcaaaaatgaaggcagagaaaatgaaggcagataactaaaggacttcggcttctggccatgagggcgagattactttctctctagagacaactggaaaattaacaaattacaggaaacatctattttcagaaattggacaataaacagtacaagatactgattcytgaaagacagaggatacgaatgaggtgaaccctactttcacccaggctttctacctggaagtaatccctggactgtggtgtaggaagggggaatccaaacagagcccagcaatctcactgagtagaggagatggatattggagttcagagaggccaaggtggttagaaattgtagagatggagctaagccaaaaaaagaatactagaaatatacgtagaagtctacttgagtcttttgaagaataccagtctg

SEQ ID NO: 887202 - DNA, 605 bp, Homo sapiens
agaaaaaccgaggcatctcttgtccaccccttgagaattaatcagagaggtatagtagttgagaaggcctatcatgtgctatgaaaaaaaacatgagattctctggtattcagtgcatataacagttttcctggataaggggatgggttcaactatgaraagagagacagaggctgaccagagaagacacaaggagttgtccctagcccttctcctttcatgaacctctgtgttcaaaaatgaattttgctttggccagagactgctagtagaaaatatcaatcaggctgtgtggtcagaggctaagagagggtatcagaaagagaaaagcaatcttgaaaagtggaattactgacctataaggaatcatgtcaataagcgtctggctggtttctgtggccatgcttatcttgtttgcaatcacagtgaagccaataatctgtagggggtaaaaaaagaagggatgggggcatatgaatacctaaatatagtgcatcgcttctagaagcagagttgcccattgcctctggcaggacagaaaatgaaacaggcagcagtccctatgcatgcaagttggagagagaggcatggctagttcagcggag

SEQ ID NO: 887203 - DNA, 618 bp, Homo sapiens
aaggatgtgaatggtataaaaaataagtgagattcaaaagatatatatgtgcatatttaaaggatatatgaatattgaatgtctggtaaaatacagaaaactagagctgtatagaaaaatttaaatgtaaaaacctatctatttacaagtgaaaaaatacattccaaaatagatccaatggaaattagtatttaacttacagactatttggaatataataatagtgaaaacactatacaggmtacaaccaatactatacaaagagaaaaattaatttgaaaatgaattatttgtttaatggaagtcaataaaattaggagattggaaagagagcaactgcaacctgatgaaagaaagaaattcattaagtaaaaattaatgaattagaaaatagcaaaagaaaaacaagaaagcttaaactacatacaaatttaaagctttcgtatgagacagtagagttaaaaggcaaaagacaaacaagtaaaatacctgaagcatatatgacaaaggattaaatattctcaaaatagaattatccctattcagtttattaaaaaagctaaaacaaaaaaagcaaaacaaagcaaagaacactacctactaggaaaaaaggaaggg

SEQ ID NO: 887204 - DNA, 619 bp, Homo sapiens
ggaaataaatccataatggacatgaatgaaatcactaataattttttaaaaactgctgaaaaagacactgcttatggaaacaatcagacagaaccttaaggaaaatgcacactaattactagttaagtctgctgggaaaacacattctaaactgtaaggaaagacaatcagtagatataaacgcttgaacactgaaactttttctatgttgtgcttttacttacctcctcttaagataagcaatggtacatcagcacctactggaaactgctttagcacctctaccacttggagatgtgttaaattctgcacattttgatggtatatttccttaattatatctcctttctgaaggccttgacaccactgactatccagtatcattttcaccttctgtccagtagggctgtcagcaattgcaaacccaaaccctttagggccyttaatcaaagggatagtcactagttcaggctgggagctgcctgacgatgccatggatactctctgctcacttgcatctgatggtccattgagaccatcaccagtcaaagtgtgtcccgattttccattctgctccagaaccattgctcctggcttaaaatcctgaggattcatgcaa

SEQ ID NO: 887205 - DNA, 595 bp, Homo sapiens
cacactggcctttgatgcccttgagtatgagccttgagatttaccaagtgggactgattcgtcccaaagcatgagctgtcctgaggtaatggggcacctatcaggccatggtgggggccctgggggccacatgggggtacctatcaggccctacacattgaagatacttcaatgagggcccagtttcagacccaggcttcaaagtatggctgtggcggggtttgaatcacagccccamctgactccactgttgtcatacccacaggatcgtgtagctaaggatgtttcctctcagagaccccatcgccaagaatcagtgttggcctaggtagcagagaagcaagataagaaagagccaaatgtaccatatactttgagtgttcccttctttcaagaacaaatgtattttcatgcttcatacacatagttttagtaaaatacaatgaatgcaattattaagtatagtgaatgactcaaaataatctgaaggattctaagatcctttggttaattttcacacttcataagcttccactttgtaatatccaaggaagaaagatctaagacaaatatgaataccatgagctacccaagt

SEQ ID NO: 887206 - DNA, 595 bp, Homo sapiens
atacttatggagaaacaaaatataaaaagttaaaccaaaaaattgtataatgtgtaacgttcattgtataattgtataatggttatctctgggctataagaaaacagataatttttatttacatctttggaattttctgtcttcaagaaattattgcaatcgacctctaatatttctagaactaaaagtaacaacttaaaaaaatagttctttatatgtagacagcggtaccttgactcatttaggtaaatacytaggagtacaattgctgcatggtatggaaaaacaatgttcagcctcgtaagaatttgcaaaagtcttccaaagtcattatatcgttttgcattcatgtgagcaatgaacgagagatcttaatgctgcaaaaacgctacagcaatttatattgtcggttaagtttagccattctcataattgtatagaggtatcttgttgttttaatttacacttttaatggaaattatgttgagcatattttcatatacttattttctgtctatcttctttgatgaggtgtctgttcagatattttaccctattttaagttgggttgcttgctttcttcttgtagactttt

SEQ ID NO: 887207 - DNA, 617 bp, Homo sapiens
tattattgtaaccatatataaattttctaaaagattcccaaaggccacacaaccaaactatagacaatggagaaagtttatcttgaaagcttatctcatttttgcatttgcctctgccgtctttgacccaggagtcccaatagctgacgttgaattcatagagctcatttcaaggcctttagacaatgtttctcctcccagaatccatcagccacagttcaaaaamaaaattaattatcttttcacaaaatggattcttttcaagatgaagtctgaattttacctctggccattctttgatggagttgagaaatatgaccacaattacagatggctcaggggacaacacaactaattcacacggtgacatgaaatcagtcactctttatctcaagccccatttccacttccgtaaaggagagttttaggctgcagagtctgagagggaccatttagtgcggacattctcgacttcatttaagcatttaggttttcctattagtttgagaacaaagtgtttaataacctgggaagaaattatagcagagaagtatcacataccaaaattatagacagctactagacaacatttactgtgcatttactgtatatcagac

SEQ ID NO: 887208 - DNA, 665 bp, Homo sapiens
agacttgcaaatactatcttaacacccattattttaacctgataacaacctaacactgtttgcataaacaaacaagcaagccaaaaaaagtaattaaaactctatgcattaactttatttttccacttaacttgttgttgtttctatttatatcttattatactatgtcttgaaaagttgtcatagatattgtttttgattcattctttgtttagttttttttttttacttaggataatggtatgttacacactacagttacagtattataatattttatttttcccatgtactgttaccagtgagttttgtatcttcaggtgatctctaattgttcattaatgttattttctttctgatcaaaatacttcccttagcatttcttgtagaaaaggtctggtgttgatgaaatccttttttttaatctggtaatatatttatttctccttcatttttgaaggatatttttcaccagatatactattctaaggyaaaagggttttttgttgttgttttgttttctttagcactttaaatatgtcatgccattctcacctggcctgtaagattttcactgaaaatcctgctgccagacgtattgcagctccactgtatgttagttgcttattttctcttgctgcttttaggatccattctttatgctt

SEQ ID NO: 887209 - DNA, 615 bp, Homo sapiens
ttttcagctccaaaatgtcttcttctttgtaattatttcaatctatttattaaacttatctttccttctctgtgttatattgaatttttttgagtttcatcaaaacagctattttgaattctccatccaaaaagtcacatatctctgtttctcaaggattggtccctggtgacttagtttatttggtgatgtcatgttttcctggatggtcttgattcttgcagatgttagtctgtgtctgggcattgaagagttaagtatttattgtagtcatcactgtgtgggtttgtctgccccartccttcttaggaaggctttccagatatttgaaaggacttgtatattgtgatctaagctgtatctgctttagggggcattccaggtccattaatacagtggttcttacagactcatagaagtacaactttgattgtcttggataagatctgaagtattctctggcttacaagaccaagactcttgttttctttatttttcttcaaacaatcagagtccctctctccattctgaacaacctgaagctggaggtggagtaacacaagtacccttttggccaccagtactaggactgcatggtgtcagacctgaagccag

SEQ ID NO: 887210 - DNA, 615 bp, Homo sapiens
ttttcagctccaaaatgtcttcttctttgtaattatttcaatctatttattaaacttatctttccttctctgtgttatattgaatttttttgagtttcatcaaaacagctattttgaattctccatccaaaaagtcacatatctctgtttctcaaggattggtccctggtgacttagtttatttggtgatgtcatgttttcctggatggtcttgattcttgcagatgttagtctgtgtctgggcattgaagagttaagtatttattgtagtcatcactgtgtgggtttgtctgccccaatccttcttaggaaggctttccagatatttgaaaggacttgyatattgtgatctaagctgtatctgctttagggggcattccaggtccattaatacagtggttcttacagactcatagaagtacaactttgattgtcttggataagatctgaagtattctctggcttacaagaccaagactcttgttttctttatttttcttcaaacaatcagagtccctctctccattctgaacaacctgaagctggaggtggagtaacacaagtacccttttggccaccagtactaggactgcatggtgtcagacctgaagccag

SEQ ID NO: 887211 - DNA, 619 bp, Homo sapiens
ttatggtgtaaaataactgcacttgcctagggtagaaggaataatcaggagaaattgaaattctagaaccaaaagcagtgttgtgcgggggttacttctcccctccagcccacttcaatcatcaatcttctcacaatgtatccagtatgttcttaggagctcattaagcctccagctacattctttaaaatctagactctccttcgtcaactgtaagcatgcggaatttcagaacagaccatgggatgaagtatttgggaaaaccttaatgttataattagattatggattcagttacttctgcattagcgtatctagmgatcctgttgtttcctatctcaaacctgcttcttccccagacccacgtgtcaatgaatggcaccactgttaactcagttgctcaaccttaaaacctaagaacttactttgattcatctatttttctctattaacaaacagatggtctttattttcaaaatacattcacaatttctatcttcttacttcctacactactcttatcctagaggaagctgccatcatctcttacctggatgactgatcctgttttactctagccccacagtctattgatacttcagccagattgatctttcta

SEQ ID NO: 887212 - DNA, 600 bp, Homo sapiens
tgtttcccgcattttttttttaaaggagaatctgagctgtggcctaggtttagtgtggtggattgacgtgtgctggttgcgggtgggactccacagtgtgtcactactgagtcatttttgcctttttacatgtctcgttttctcttccagaggtctagcacctctaggagggctcaaagtgcaccaactcttatatgcacttcttgattgagcctttttaaactaattgtttttggggttccctgtagggccactgcaggttgcagactgtcaacaccccaaacactcccacttggttcccagtcagccaggggtgcctttcagttgggagtagcaaaatgccctttctctttggaactgaagaaactcagcctcgcatttatctacaaaaacagttcagttcctcaygcaaatgtgcagacaagccagtcaagattaatttgggcaggaaaggcaatggagaagactctttagaatgcacctccaaattcgaattaggatcctaagcaacagcttcctaggagaaaaaaaaaaaaaaaaagctaagactacttcctgtacactatcctcaaccacctttaactttgtagctcttctttg

SEQ ID NO: 887213 - DNA, 585 bp, Homo sapiens
aaaagatacaagtgaatttctgaaaagatataccatcttaaaagtggcagaagaaacaatttttaaaattatgattagacaagcaaccattaaaaatttaaatgttgataaaagatgctccattaaaaaaaaaaaaaaaactttaagttaaacttccactactagccatgacagaataagtgttactaaaattgctattttgccaaaacggttttaaaagtgacaaaataaatgagkcactggttttcaagcattgcatatcaggcagtactataattatcaagagaaggaaaagatacaaaatggcccaaccccacccctttacatttctggatttctttctgggagaactttctttctacaacaccaggaggtagatccaaagtgaagtaatgggaaaaaatgaccttaggaggctgctatgatctgaatatttgtatctccccgcaattcagatattgaaactaacccctaatttgatggtattaggaggaatggctttggggaggtgatttggtcatgagggtggggcccttatgaatggaattagtgtccttataaaaagagacatcagagagctccttc

SEQ ID NO: 887214 - DNA, 611 bp, Homo sapiens
accctagtaatgaatagacaaagtaattttggagcttgaaaaaaaatacttttgaaaagagttgagtacacaggagagggtatccggccgtggacttcaataaaactcagtagagattccaatcttgtcatttactggcttaatgaccttaggcaagatcttaaatccctgataaaccttattttcttcaatttaaattggaataataaaatgaagccaaccacagaggtttgttaggaaggtttaacttaacgatttatacctccaaataggtttagcaagtatgtggcatatataggagttcaataaatggtaactacaactaaaataatttgagtttatagcttataattgtcatatgatgttaaaataaaacagataactccacaacatgtgaatatgtgtacacatacrtaagtacgtatattctaaaatgcaatttaatacatgaatttacctatgcaaaaaaacctgcacatgtacccctgaacctaaaagcttttttaaaaaaaaaaaagaaaagaaatatagacatcatttaacccaataatttgaaaccctggctggacatcggaatcattgaaatggattttaaataatgtatgattaca

SEQ ID NO: 887215 - DNA, 669 bp, Homo sapiens
tcataaaatatttcagaagatagccaattttttgattttcatatgtgtatttcctacagtagtcaacaattttaaaggtgaaaaagattttaaagattttaacatgtgaaagatacttaaatcttttaaaagaacatttctaagagtagaccttagaaatcaagaaaaggtgtaggacaagtgacttatttttaaaacataccatgtgctatgtaaattttttaatgtttagtgggataaaaggaatcagttatatgagagaagccagcaactagtgaaaaaaaaagtgaatttagttgcacaataaactctcagatgcaagtctctaagaaaacccacgtactagtacattggttagaaatagcagttcctaatacatctgattaccacatattaaattttctrttctttgcaaggaaaaaacatatattgtcaattatgataacttgttcttaaattttaatttctagcttttatgagtaaatagtaagtgtacatatttataggttacatgagatattttgatacaggtgtgcaatgtgcaatacgtgataatcacatcaaggtaaatgaagtatcttgcatttatcctatgtattactaacaatccaattctactcttttagttatttcaaactgtactatcaagttatttttgactatagtcac

SEQ ID NO: 887216 - DNA, 678 bp, Homo sapiens
ttaatagtccattttaaacaatggatagattacccagacacaaaatccataaggaaacagtacacttgaataatatagaccaaatggacctacagatatatacagatcttcccatccaacaacagaagaatacacatttttttcaacacacacagaattctccaagacagattgyatgtgaggtaaaaaacccaagtgttatctaattcaataagatcaaaattcatactaattatttttttccaaccacattggtatgaaattagaaatcataggatgaatttcagaatattcacaaatatgtagaaattaaacaacatgctcctgaagaaaaatggaccacaggagaaattaaaagaaaaattttaaaatatcctgaaacaaatgattatggacatacaacctaacaaaattatggaatgcagctaaagcaatcttaagagggaattttatagcaataaacaccataagaagaatatggatcacaaataaacaacctagtctttacatttcaagtaaccagaactcaataatatgaggaaaactgaaaaattcacaaatatgtggaaattaaacaacatcttcccaaacaaccattaggtcatgcaagaaatcaaaagagaaacagaaagttaacttgtgacaattaaaaatagaaacacaacataccaaaactta

SEQ ID NO: 887217 - DNA, 600 bp, Homo sapiens
ctgcatatggctagccagttcttatagcaccatttattgaatagggagtcctttccccattgcttgtatttgtcagttttgtcaaagatcagatggttgtaggtgtgtggtcttacttctgggttctctattcttttccattggcctatgtgtctgtttttgtagcagtaccatgctgttttggttactgtagtcctgtagtgcagtttgaagtcaggtagcatgatacctgcaactttgttttttgtttstttgtttgtttgttttttaggattttcttggctatttgggctcttttttggttccacgtgaactttaaaatacctttttctaattctgtgaagaatgtcagtggtagtttaatgggaattgcattgaatctgtaaattgctttgggcagtatggccattttcacaatattaattcttcctatccatgagcatggaatatttttccatgtttatgtcatctgtgatttctttgagcagtggtttatagttctccttgaaaaggtctttcactttgcttcttagctatattcctaggtattttattccttctgtagcaatccattcattgaatgaataagacttcactcat

SEQ ID NO: 887218 - DNA, 600 bp, Homo sapiens
ctgcatatggctagccagttcttatagcaccatttattgaatagggagtcctttccccattgcttgtatttgtcagttttgtcaaagatcagatggttgtaggtgtgtggtcttacttctgggttctctattcttttccattggcctatgtgtctgtttttgtagcagtaccatgctgttttggttactgtagtcctgtagtgcagtttgaagtcaggtagcatgatacctgcaactttgttttttgtttctttgtttgtttgttttttaggattttcttggctatttgggctcttttttggttccaygtgaactttaaaatacctttttctaattctgtgaagaatgtcagtggtagtttaatgggaattgcattgaatctgtaaattgctttgggcagtatggccattttcacaatattaattcttcctatccatgagcatggaatatttttccatgtttatgtcatctgtgatttctttgagcagtggtttatagttctccttgaaaaggtctttcactttgcttcttagctatattcctaggtattttattccttctgtagcaatccattcattgaatgaataagacttcactcat

SEQ ID NO: 887219 - DNA, 572 bp, Homo sapiens
gctcttcaaatgtatctacaggacagtctgatattttaaaaagagaaaaatgtttccaggacttcttactctgtattctatccaacagctattttgattctcttcttccaggagatagggcagtcttttcctactattgtttaaactttgctcccttttggtaaacaaatccctcaaggctgggtttkttttttttttttaagacagagtctcgctctgttgccaggctggagtgcagtggcgcaatctcggcttactgcaacctccgccttctgggttcaagtgattctcctgccccagcctcccgagtagctgggactacaggcgtctgccaccacgcccggctaattttttgcagttttagtagagatcgggtttcaccaggttggccaagatggtcttgatctcttgacctcgtgatccacccgccttgccctcccaaagtgctgggattacagacgtgaagggctggggtttttgaaaacgcaattcatgcccctcccccattggtttcatttatgtaggttcttaggtaaacagttttttctttccccaaatatacaattaattta

SEQ ID NO: 887220 - DNA, 579 bp, Homo sapiens
caatttaaaaaataccaggcatgaaaggaaataggaaaatgacctacgttgaagataaaaatcaatcaacaccaactcaaaatttatgtaaatgttagaatgatcagataagaacattaaaacagctattatattaataactgaattccgtatgttcaaaagccccagggttcattcagcagttcatggctgtcatcaagagttgaggctcttttcatccttctggtctgccatacttatatattgattatcaccttcaggctattttttatgatgctaaattgactgctgcagttttaatcccagtgaattgcacaaataacatccacagcaataagaaaggcagaaaaaagcttcttytaatgcgtcttccaactttgccagaaagtaaattctttccccaaatccctaagtaaatctcctcttacatatcattgacccaaactgggtcagaagcctaaacctaagtcagtcactggaaaggagagtgggatggtgggatggctgtgaatgacttacatcaatcgccattcatgtcttgaggctttattctggtggcatgatcaagtagggattata

SEQ ID NO: 887221 - DNA, 552 bp, Homo sapiens
tcagcttcccgagtagctgggattacagggatgtgccaccacgtccggctaattttgtatttttagcagagacggagtttctccatgttggtcaggctggtctcaaactcccgacctcaggtgatttgcccacctcagcctcccaaagtgctgagattacaggcgtgagccactgtgcccagcctgatatytaaaatatttctacctaatccaaagtctcaaagattttgtctatgctttcttctaaaagttttatagttttaggttttacattaacatttataattcattttaagttatttttgtatgtgtttggtatgagataaggatcaaatttcacatatgcatacctaattgttctggcatcactttttgaaagactatcttttccactgacttgactgcctatttgtaaaaatgaatcctaaaaaatcaatggcctataaatgtgtaggtccatttctgtactctattctgctccattgatttgataggttccactgaggtatcctgatgccaattccacattattttgaatatggtagctttata

SEQ ID NO: 887222 - DNA, 561 bp, Homo sapiens
aaaggatatgaaaattcataagcaggaaaacaaccttatcttctccttatccagctctgtgatatagaaggaatatctgcaaactcttttctgtatttctaatttgctcaccaaggagcatatttttgtcaggctgggaatatgtccaggtactgaaaattatttgtattcattggaaattgtgaattctgcctaggtttcccagcattgctctgttgaatttccctttacttaaaagaacaaaaatgttctagaattgtatttcaacatttcaggatacccagaaggcaagtagccacagcactgaaaaaaaaaaaaacaaaaaagaaacctgttctctctctctgtggaaggtgccaraagaaatgtgtactatggttttattattgctttatatcttgggcagtccctggtattaggggctaggaaagatgctgggtaaattattccataagcacagtgcttcacactgagccactcaacaaagtccagtctagagtgaaaaaaaatctaaaggcaagaatctcaatgaataagcaatgtttcctgggttttttaatc

SEQ ID NO: 887223 - DNA, 618 bp, Homo sapiens
gtatatttatcacataatattctcaggaagtatgtgtctcattcagtcagtatcaaatataagagaaaatatcttcatttagagctgctgatcttagaggttaataatcattaagtagaaatatattttcataatgagtttgccgtagcatgaagttgagccacaatgcaaaaataagtggcrttgaaagtgcgctattctatatatgtacacccaattatagttgtgctggacacaccagggaactgaactgaattattgaagaaacgtcctgttttcttcttactttccattcaaaagactgcattatcacagcacagtcccctccctttttatactttgagttcaggggagtatttttaagtgtttaagtttaaaaggtctgctactaagttaaatgggatcaagtatataaagtgcttagtacaagcctgccccaccataaacctcctttaaagtggagcaatgtctctttttcatgttggaggcttcaggcattatggaagagaaaagtaaacaagagctggtgctcaatcttgtcgacaattgggaaatgagtctgtaacaaaaatagagtggaacgtgggagtgaagtgtttttgcctttgacaagtcatt

SEQ ID NO: 887224 - DNA, 652 bp, Homo sapiens
attatatacatatcctcaacacagaaaacaagttttaaattgttcccattgaagtgggtagtggggcccaaggcccatccacttagcctcactccctaaaataattcatgggcacctttggttatctcaaggttccaaggaaaattatttatctagatagtacagggcagaacactctccatgccaaggtcggagctcaactcacttgtagacagagactgaaaactttccaaaaaacataagctttcatgtcagaagtgacctttccatggatgcctggcatgttgtaggacagtgtgaagccacctggcctgggctgtagagatgacttagaacaaagaaacaaaagaaggaccagagggagaaaagggccattcactgccatccttgggccaagggctttaccaatacytttctcactgcctggttttgtactggtacatgttcctagaagaataagttttgagtaaagcttgaaaggagaaagacactccatttgttagaaggaagtagagtgggaattccagctgtgggagatgagaaagatagctaagaatggttgaagggtgctaagaaacaatggattgggatataaactagcctggaggtaatatgtatgtagatctttagaaggagaggtggattactgagc

SEQ ID NO: 887225 - DNA, 601 bp, Homo sapiens
ccaagtgttttccttttcatctagtcaaaataaggggaaacaggcatattgtgatagaaaagatttaagttagccgggcatggtggctcatgcctgtaatcccagcactttgggaggccgaggcgggcggatcacaaggtcaggagatcgagaccatcctgcctaacatggtgaaaccccgtctgtctctactaaaaatacaaaaaattagccaggtgtggtggcaggtgcctgtagtcccagctactcaggagactgaggcagcagaatggcgtgaacccaggaggcggagcttgtagtgagccgagattgcgtcactgcactccagcctgggggacagagcgagactctgtctcaaaaaaaaaaaaaaaaagatttaagttagatgtcagaaacaaaaaagctaacaagaacaggttagtcaagaaacctctttcctgaaagcatccaagtctkcctgctcatgcaggggggtggtactaggatagatgggacagaaacatctagggcatattgctaagtgatcattgcacggttgctgtgtgtgtgtgtcactatttagtttccacttagttatttgttgatacattctttaatccaa

SEQ ID NO: 887226 - DNA, 619 bp, Homo sapiens
ttctaaacatttaaaggaattattctaaaatttgatttgtattctctgcaacaataaacaaaatgagctaaatgacctatcagtaataaattactggcattcgagagggagaggtaaactatctttatttgcagatgacataattgtgtatgtagctttaaaatcctaaagaatctaaaagctgtaaaaactactgagtgaatttagcaagacagcttgatataagatcaataatcttatatccagattcatactaaggccattttaatgcataaacccggatgtgcatgaataaagaattttctctactgaattttctaagaataaaagttcatccaatttgttcattcattctattgaggtgaaattatcaaatagtggtcactacacaccaaacctagtatcaatttctagtgatacatayatgtgcaagaaagaatctctggtccctagcatttcttggaccattcaggtagccagaaacaaatagttcaaatgtcatgtgcaaggagtaggcagtgtggtgagcagctagagctgggctttggagtgggtcagaacattgttcaaatctccgctacaaagttgtctacctgatggcttaatacaattctcttga

SEQ ID NO: 887227 - DNA, 636 bp, Homo sapiens
ccagaactcttagctttagaaggaaagtaccaacaaggaattgtagaacagaagaaaaaggaaagatcggtgagggaggattaaggaaggaaagaaggaatcagcactcggagacttggatctaggaaggcaattcctccccagggtggcaggttggagtaaaggggacaatcccgccccttttatagtccaggattaacagtcatgaatggaaatgttaaatctggtagttaccttgggatagaaatgggaccaaagggtacaggacaaggaagtgagcacacaccaaggcctgaccaggtggcgcgccatctacaagacgttcaatccgacaccctgcaagggccacccttccagcttaggaggaacagctggctaatcacgtcagttctaaaacttctgccccagctcaggactggggctaytttttctcatatgtaatctgaattttttaatacttttccttttcttttttagatattaaaaaaattatctgattaaggatgagaaaaatatatttaaaaaaacagcatggaaactcataactgcaattgcatcaacctttatcatagcttcaacctttatcatgaagcctaagctaggcttcacatcttgattttaaactctgggaaaggg

SEQ ID NO: 887228 - DNA, 663 bp, Homo sapiens
gtaactaatcattaagtatttatgtacttaattatttcaataatttttgttcctattttcttgggagtatgagtgaagcttgatagttgctggattattgaaagagttgaaggagaggcaaggtgtgatcctgctatgccttgggtttggctgcttgatcttttctgttacttcaaagacccttttcttctaagaaaggaatacatatcacattggaaatggaaatgtaatcttccttttagaactggaaaaattcaacctgttctacatttatagcaaaactctgaagttttgctggaagaggaaggctggggcattggtggtcagaaggtatcaggaaggatgaaatagacagacttataaaagttacaacattctagtttctttcctaagtacagtaatatcgattgccttgaaaatcctttgcaagttgatggtagaawcaagtccttctggatctatctcccttaaacgtcagatgaaggcagctgtttctggcatgattgaaacttcttattccttcaagatttagaaattgtctccatctttcacattaattagagaagagatgacattacctttacccagatgatttttagtcctttcctagaagcctctcaacccttccataaatagcaacgtgtgtgtgtgtgtgttctgcaa

SEQ ID NO: 887229 - DNA, 539 bp, Homo sapiens
ctcatacctctgctcctccatcaaacaagagggacaactggccagggtctgtctgcatggcgctccaagtccctgggtcctggccagggtaccctcgggccctggttacaaaatagcaccacagtaaacttgacagctggctccagccttatacttggtcttgtggtggttggttgaccctctgatgtgtgccagaaagaggtcttatcgagacagggatccatccatctatcccccgtccctctagctatttattcatttatcatattttactgggcacctactatgttccagacactagtctaagctctgggaatacaggagggaagaagacagaaaatgtttyttctctcatagaacttaaattctccttgggtttagggagacagataatatatcaacaagccagcaaaatatcagaccgtgatatatgctaggctgagttaaaaaggggtgctgaggtacagggtgaacaggcagctcctacagattgagtggtacttgagaaggtgacatttaaatagataagcaggggccag

SEQ ID NO: 887230 - DNA, 529 bp, Homo sapiens
ttggctccaggcacctatggctttcttactcttcccttcatacaccttagtcctgcccatggatatcacttctctttttgctccattaaacacctatcctcccacagagaagtattaaaccacaggacatcctaagtcagatgttatgagacaaggctgaatttctcaagcccagtgacagtgccatggccccaagctcttttttttttttgagatggagtctcgctttgtcactccggctggagtgcagtggtgcagtcctggctcactgaaatctctgcctcccgggttcaagcgattctcctgcttcagcctcccaagtagctgggattacaggtgtgctcccacgcctggctartttttgtatttttagtagagacagggttttgccatgttggccaggccggtcttgaactcctgacctcaagtgatccaccgtcctcggcctcccaaagtgctgggattacaggtgtgagccactgcgcccggccctcttccccatttttaagaggtttcctctgtaagggag

SEQ ID NO: 887231 - DNA, 655 bp, Homo sapiens
caaataatgttgaagctgctagctatcgggacaactttgagtagcaaggattcatactacaattaaggtttaagaggcatcatgactttcacatatctctcttgctttttccccctgccacaaaaccaacaagtcctaaatctatgctacttcttcacctgggtcctagaataagatatgtggagcagggccacagctatcaatattaaaataaacaggaaatataygtttggggattatttgttacttcagcaaggctgactaatacaagatccatctctgagcagtctcatagaaggcattcctgaaatgagaatgcatgtggacttaattccatgtgtctttagaaatctagaatctacatttgtgaattctggctcatactacaggtaaagatagttacacttctgcaaaccgttcatagattacagtttgaacaggtttatgtgcaccaaccatcagaaccttaataaaatattggggctgacatttttcactcccatatatcccatagctgatatatttgaacatttgaaggcctcttagcacttcaaacagaaaatgcacttgggtgaatagtaatcatgaagcctaattttccaacaccatggaaagtgccttagggaaaggaggctggtgtttagttagggggaaa

SEQ ID NO: 887232 - DNA, 628 bp, Homo sapiens
agtcttctgtcttcaaatgtattctgatatctccacaaatatctgtttaagttaaatctgactaagtactaatgcccattctagagtaaaagctaaagcttatattatctgagacatcaaagatggccaatttaactttatggtaaaatatatttgattttatatcctgcatatttcataaccacagaataaatgtatgttgtattatgtatgtctgtataaatattttatataccatctatatgtcaataatttctatctataactcagacatttcctctgaactcacatattaagcaactattagacatctccatttggatatcttacaggtatttcaaatttcatttttctaaaacatactgcctattttctcaataccccaactttttcccatttrcccagttgctcaaatctgagaattgtttttgattcctcattttttgcttatcacttatatctaatccatctccaagtcctgtcaatttaactacaaacatatcttgatttcattcacttctcttcatctcaactgccattgccataatgaaatccatcatcactttttgcctaaataatcatatctgtttataattctgcctattttacctcatcaattttaatacaa

SEQ ID NO: 887233 - DNA, 613 bp, Homo sapiens
aatgcaagaagaagagctaactatcctaaatgtatatgcacccaatacaggagcacccagatccataaagcaagttcttagagaaatacaaagagacttagactcccacacaataatagtgggagactttaacatctcactgtcaatattagacagatcaatgagacagaacactaacaaggatattcaggacttgaactcagctctggaccaagcagacctaatagacatctacagaactctccattccaaatcaacagaatacacattctggctaagcaccacatcgyacttattctaaaattaaccacataactggaagtaaaacatgcctcagcaaatgcaaaagaatgtaaatcataacaaactgtctctcagaccacaatgcaatcaaattagaactcaggattaagaaactcactcaaaactgcaaaactacatggaaactgaacaactcctgaatgactactgggtaaataacaaaattaaaacagaaattaataagttacttgaaaccaatgagaacaaagacacaatgtaccagaatctctgggacgcagctaaagaagtgtttagagggaaattcataccactaaatgcccacaggagaaag

SEQ ID NO: 887234 - DNA, 614 bp, Homo sapiens
actataaagaagccaggaaatgtcacaaaaatatgtcatttttgtatgctacttactttgaactgagggtactttgggggcagtagtagccagaagaagccttgtctgtccagagacaaatcctccaataaatactcaattgtcacccattctctccccaggggttttgttaaacaggagttttactctcatcacaggagagtaaaactagaagttggcatcacactcagataaactgatgcaaactatcatattgaagcagcctcgtcatctgrggtaacacccagggttcaatatctcacagccatggagatcaaggatgtggacacacaaagggtgaagtttagagcagaaatttaatagatgaaagaaagagaatagctccctggtacagagaggggtcccagaaaaatgggttgctgattcacactttggatatagaggcttttataagaaaccaacagaggggctgggcatctcatttgtataaggtgtgcattactggtagttctgccccatcctcctagtgtgcatgcaggcccttaacttgagttattccatcttcctttgttctccttactgcaaatgtgtcaggggttggaattttccattgt

SEQ ID NO: 887235 - DNA, 641 bp, Homo sapiens
attctattgtttgttcttgtttagttgttgctttgaaaacactattttgggatgcaaagttgtcaatgtgcatgtgtatgctctctccaactaacttgtgtgttccatatagctgcttctcagtatagtcttgacygcctgtgctttatgtgttctaaatttcattttcacacgtttcttttcactgatacaataatcagaagttgtggggaagcgtaagaactaaggtttgacaaaatatagctcatgcaacaattaacacatgctgaatagtaaaatgtgataattctgcaacactgggagctaaatggtttaactttgatgcccaaatatctcgcttctaaataccctttaatatttccccatgtcccagtttctcccttatgttgatgccaacaaaaccttaataaagtgatcattgaggtattgacctcagaatgaaagaaaatatgattcttctcaaggacatctacatataagaactcttttataggagatggtaagcaatgaacttgatgtgtgagattagatggaacagggatgctgtaagtaatctggtctttgctgtcccactcttcccagcattttctttcattgttgttaaggatgtttgtgggagaagaagagaaaaaagtaagaag

SEQ ID NO: 887236 - DNA, 597 bp, Homo sapiens
ataatgtaataatatataacatattataaaacataatatattatatattaacatataatatataacatattataaaatatattatatattataacataatatataacatattataaaatataatatatattattaacatataatatataacatataaatatatattattaacatatatgttaatatgtttatataatacaatataatatatattacttattatattatacagtaatataatatattatttattatattatattatattaatatatttacattatatataatataattatatattttatatatatatatatatatatatayacacaggggggggagagagggagagacagagagagagagagagaaagagacagagttttgtcacgttgcccgggctggtcccaaactcctgggcttaagtgatcctcctcccaagtagcacgagccaccacgcctgactcatctttcgtgttgttttgtagagatggggtttcaccgtattgaccaggattataggcgtgagctaccccacccagcctatacatattaatattaaataactgtattttttggtttatagctatgcct

SEQ ID NO: 887237 - DNA, 609 bp, Homo sapiens
tacttgatctggcattttcttttatcctctgagctataggacagcataataacttgtaagcctatctcttgaaataggcaaaaagaaccaaaccaagatgtagtttcttaatcctaatttgcatagttttcatttttccaaggcattttcatggaaacattgacaaaaaaaaaggtggattttttttatttgattggataccattaagaaatgcattagggttcatcctctaacctaacagttttttttttttttttttttcctgagacagagtctcactctgttgcccagactggcgtgaggtggcacaatcttggttcactgcaacctccacctcccgagttcaagcgattctcctgccttagcctcccaagtagctgggattacaggtgcccgccamcatgcccggctaatttttgtagttttagtagagacggggtttcaccatgtgggccaggctggtctcgaactcctgacctgaggtgatcagtccgcctcagcctcacaaagtgctgggattacaggcatgaatcaccacacccagcaaacctaacacttttaattatactttacaattctgaaagactctctcaagtggattttggacac

SEQ ID NO: 887238 - DNA, 635 bp, Homo sapiens
gatggggacagtgaaagtgtggtgccttccttcataccactagagaagtccatctaccaccaaggaaaatgaggctaatctcaggaaaagcagaatcaaaacaaggaggatgagagccccaaaattattatttgggtaattgaattcactagtttaaagtccctggacttttcagttacacaagccaatatattaccttttgcaatrttcagtttaagtgagttctgacaaatacaatggtgtacaagaataatgacgtattaatgatacatggaaaaaagcaacacaaaaattttaaatatagtaacgatcccagttttgtaaaacacttattaaaaaatgcagtaggcctataatgccagcactttgggaggctgaggtgggaggatcacctgagcccaggagttcaacaccagcctggccaacatcgtgaaaccccgtctctactaaaaatacaaaaattagccgggcgtggtggtgtgtgtctgtagtcccagctactcaggaggctgaggcaggaggatcacctgagcccacgaggtggaggctacaaggagctgtgatcacgccactgcactccaccccgggtgacagagcaagaccctgtctcaaaaaaaaaaaaaaaaaaaaaaaaa

SEQ ID NO: 887239 - DNA, 597 bp, Homo sapiens
ctatgcctttggttcctcatctggaatcaaagaagaaataaaaatactttcctcatgggggagttgtgtgaattaactaatgatggagaatttccatataaatgctaagtagccttattattcttgtagcaggagactactgatgtgtgctcagaggtgctgtgtgtgtcctttgttactcagtcctctctgagtgcctctatctattggtgacctcacctagatgtcctggctctcagactaccaggacagcgttcagttctttgcagcctcaggagcaatgttgttgtaaacctyaggcctttgttaacccttcccaacttatccactgtcagaaagccaagtgtcagctacacatctggcaaggactgccactagagaacagcccactggaacaccattaacatttgcatccattcctagacatcattagtcctctgagatattgtcgaggaaatacgctggtttgttatttttctccaaatatatgatatgtgattgacatgtatatggtacatacacacagattacccacatctgacaatacctgtttgtgcatgctgggaccttagaagtcatagaaacagttgcatacac

SEQ ID NO: 887240 - DNA, 608 bp, Homo sapiens
acacatgaggatatgcatccctccttcctctgggagtgctgcttctgggagaaggaagctgcctgggatgggaaatctgtccagttctgagggtggctttcctactaccagtgtacttccagtctaactccatcattagaaaggatatgctttgatctttaccttccactcttttgttgttcttccccaaaacttcagaactcaagtgagaaagaggatgcgatttattagggtgctgtcagattcccaaatacttaaaactaaatatgccacataagacattatctcttgtggtatttgtgttacatttgtggcataaaagaagaaaactcccacctgggaacattggaatatttaataatggctgtcaggctctaacactkgagggtgtttttttcctttataaagatatattattccagatttttaaattacatgtcttggagtgcctctcaacatctgttctccacataagacatttcactctatgtgtaattttcttaaactatgctgcccagcaatgaaccccatggcctcctttaatatacaaaatgagaaagatatattaactgggaaaactaagtgtgcacatctccacattttgtgtc

SEQ ID NO: 887241 - DNA, 664 bp, Homo sapiens
attcaggagcctctgcaaatgctatagttgttaaagtacatgagaacctaaaggcattcccttctataaatgtagacatcaggctggtaatccattcagcaggaaaacaagctaacaagccgtttatgccaccagaattgtgttttctaaacttaaaatgaaggagctgagattgtagtggtggctcacattaaaagattcagaatctgcttccataaacatctttgagtgttatgcaccaggacctatgtaagtcatttgatatctattaccttactttatacaattagaagtaatttttaaaatatctgcaaggaagatggttcttcctaatgatccagtcaggatggagaacacacatgtcatagtaaacactaatatgaataaaagattagatgcaaaaatgawgatggacttcacattaatcaaatgtgtggtgaaaaatactatggaataatgacattattttggcctatttaaagtaaaaatgaaagtcatgagctaaattcctttttctcctgcttctgcattctctttcttttcccacttcctccttgctaatcattctagcctctaccaagggctatttctccatggaaagaactttgagggataaatgtcagcatcctataacagattaggttttgagatgggaaatacctca

SEQ ID NO: 887242 - DNA, 584 bp, Homo sapiens
tcaaattactcaacaatggccacacctctcctttgcagtggtgcattcatcattgaatgtatagttgggttacctggaaccatattccagtctcctacaagtcttcttttgtggtgcaaaagaaatgtaactctgaccaagtggctgacagcagcaactttctatttcctgctattgcaacatcaaaaacaaaagtctttccccaactctgttgcacaatcactattcgtggtagcagtaaaaagaaaaaagaatccctgatgattttcagattgattccccyaaatgattacattaaatgctgtgattaaaattgagggaaaaattacatttagagagagttcccttgtctgggagataaaagccataggccatagggttataaactgacagccttgaaaggaactcaggctggttgaatgtcattccataaacaaggagatggccctacacacagattgaaaacgaagtaaggactacggaaggggaaaggcacacttcttgagtctctgctttgtaccacaccagggtatttccacgtgtgttccagcctctgttctcactctgcctagccattaagccag

SEQ ID NO: 887243 - DNA, 556 bp, Homo sapiens
gaagaagaaagaaggaagaaggaagaagaaaagaaagaagaagaagaaatggtctgaattctaagcatgacctctaatggatatgaaataggctagaacaactggggctacaatgagtgtttaagtacttggggaggtgaattgtctctctggaaatagcaccagaaagtcctttcagaaggagatccttttttaaccaaactgaaaggaacatgatgggcatgggcagaggaatgagcatttcagaagacaaaacacgacacgcacataaggcaggggctgggctgggttgcactgcagggagtggacagcaggctgagcggctggattggaatggaatgctcacatgtagtcagaagaagagctaataaggatgcatccctgggaagaagaacggagataagcagggaacgttgaaygactgcccagccctcctaacccctcttaggatctgtccctgggcagggagaagtaaatgagtctgaagtgaataattcaatgtcaagtcacttgtatttcatgcctcccaggtgccacggactggccttccctaagt

SEQ ID NO: 887244 - DNA, 585 bp, Homo sapiens
acgtgcaactgggtatgaccacttatctaggttcaatggcactgacatggaaattgctttgtgcggcgaaattggacctattttccttgatttcaatttagtccatgatccaaatctgaccctgtagatgaggaccattccctaggtgatgatcgagcaatgtgatggcagaaacctgtatctacgaatgaccatgaaaaaaaccatgtcwtcccatcagcctgaactactcaccttacgactgttaaatgattataattgagttattatctgagtatgatgattataatgaccaataattccactttgtttcctatacttgtttgggaagtcttatggttacagtagcttagtctttaacttatacaacaatgaatgctgaatatttaaattataatatgcacttttctactgcagtgtagcatatgggttaacaaatactttaaatgtatttgatttgacattaatcaggaattctgacatatgaccccaaaacttggggacagggtggttaagaattcttagactggctattctatgggcataaataaacaaataggcaaagaaccactgtttgccaggaca

SEQ ID NO: 887245 - DNA, 627 bp, Homo sapiens
tgagaaggatgaatgagttgtaagagaaatgcacaatacagacaatagtataatctatttaataatgttaataacacaccctttaattgttcataaggccaacatagtcattcctgtgtgtcaccatagctccctatgaagttaaaaaacataggcagaagaggggaacttggcaatagaaacagaaataggaagagaactgatgagtaatggaggaaagaaaagcctgccatggtgaggaccatatattctgacctattctgaccatattctgacctagcttcttcatctctgtattcagcagcatttgattcacaccaaagcattcttgaatatggcctgaaattcctttctcttaaaatagctatctatatctgtatctataataccatcagaatatctctcagaatgcactgatgtaatacttcaaaaagccagtatgaatgtgtcttagtraatgtgtaatttgttttattaaatcctggcatgttttccaagtgggagaggtgtatgggaaaataggaagacttcaagcccctaaaaaaaataaaaataaaaaggaaggaatatcctcctgaggggcaggaaaatgggagaataaagcactagacttaatccctgagacaa

SEQ ID NO: 887246 - DNA, 588 bp, Homo sapiens
ttacaaattattaaaactttaaatattgaacaattatcatgccttatgtaaaaatgtgcaatctgctaaaagagatgtgtaaccatgagttatgacttagtgtgaggagtaaggaaaagtgcttaagtcttcaaaatttcctggaagttaaccagttaggattgtgagtgtactagaagaataaagaagagtaaaattaaagagtatgcaaatgatctgaagtgataataggcctttcataagaactraataattgtcaatgtaggtggcactattttttctaggaatttttgtattgtaaatgcttggagataacaatttggtgacatgtctcttacatctatggatgattcttcatactttatttgcataagaagcacattatttttaactatagtgtatgctttgggtatcactggaggataaagttcccccaaatcgcctctttgcattgttgctctgaattagtagaaaaatgagaagagagtagtgagcaaattttgtgaacaaaattttaaaagcttatgagttgatgtaacatctttggaggataactagttaggcactaaactactttcttttaatgtt

SEQ ID NO: 887247 - DNA, 650 bp, Homo sapiens
caacatggtcagtttaagctaagggtggttctctggcttgcagaaggtgtccgtcttataagtcctcacgtgaactttccttggtacacgcacagatttcccacactctctctttcttcctcttctaaggccaccgatcctatagaaaggcctcatctccagatgcagttacataagggaatcaacatgtaaatttgatgtgttaggagccgttcaatccttagcatgttccaaagaaactaggcacttgggagcatctatcacaccactacctgcaagatttacatttgttccgaggcagcgcaaaatgtggaggcagttctaaatttaaagtcattgkgtttgatacatagtttactgtacgataagtttattactagttttattttttaattttaagcaactacatctgaaacatacacacgctaacatggtatgtctatgtatctataacttaataaaataggaaaatgaaattatcctaacaccataagccataaaataaaaatatttttcagaaaaaaaaaatcattgcattaacagaccaaatcctttatgaagtcaatgttgtattccgtcaaaaatctttaaaagaaatacatttttcaataaggatatgtgttgccattgagagcacatagtctcttcag

SEQ ID NO: 887248 - DNA, 642 bp, Homo sapiens
tgtaaatactcagcccataatcattaaatgttaaaaatcctcataggtatgctatagagtgaaaacattttttaattatattaaaattggctaaaaatctcagaatatagagacaaaaccgaagagcagtagcagtcgaagtaaggcaatgggaaagtgtaactacatatattttctcatcttttaagagaggtagaggacaaccagcagattcatttgcttctgaaatacagcaattgaaaattaagtgtaaaatataagcttaatttttaaaaggagacaaaattatatttaagacttagactttatcctctccagactttcagaggggtacaaaatgaaagaaggcatggagtgaaaaaaagaggaaagaartataaaaaagtgaataaaaataaaatgaagaaaataagataaaaaaaacaaatgttggccgggcgcggtggctcacgcctgtaatcccagcattttgggaggcccaggcgggagaatcacgaggtcaggagattgagaccagcccggctaacacagtgaaaccccatctctactaaaaatacaaaaaattagccgggcgtggtggcgggtgcctgtagtcccagctactgaggaggctgaggcaggagaatggcatgaacccgggag

SEQ ID NO: 887249 - DNA, 642 bp, Homo sapiens
tgtaaatactcagcccataatcattaaatgttaaaaatcctcataggtatgctatagagtgaaaacattttttaattatattaaaattggctaaaaatctcagaatatagagacaaaaccgaagagcagtagcagtcgaagtaaggcaatgggaaagtgtaactacatatattttctcatcttttaagagaggtagaggacaaccagcagattcatttgcttctgaaatacagcaattgaaaattaagtgtaaaatataagcttaatttttaaaaggagacaaaattatatttaagacttagactttatcctctccagactttcagaggggtacaaaatgaaagaaggcatggagtgaaaaaaagaggaaagaaatataaaaaagtgaataaaaataaaatgaagaaaataagataaaaaaaacaaatgttggccgggcgcggtggctcacgcctgtaatcccagcattttgggaggccmaggcgggagaatcacgaggtcaggagattgagaccagcccggctaacacagtgaaaccccatctctactaaaaatacaaaaaattagccgggcgtggtggcgggtgcctgtagtcccagctactgaggaggctgaggcaggagaatggcatgaacccgggag

SEQ ID NO: 887250 - DNA, 609 bp, Homo sapiens
tccatcactgtggaaagttctgctgaacaagactgacacagacctcagagagtgcttaacctagaagaagtgtgatcttgatgaatgtgggtgaattgggtggggagaaattctgttcggataaagtgtaaatatgagtatttcgtagtgagcctaaagttgatttttttcaattcttccaaatactaattccatgaatatataaaattgacttcaatgcaaaaatgacaaccaacagtagcattgtattttagatggtgtctagattttggttttaaacagacccatggttgaaatccatgtcttctgttttaagctgggtgaaactttagagcaggttattgactttttcatttgaaaagtaggaatagtagsacttatctgtcagggtcgttttataagatggaaacagaagacctgaagcacttatttaacaagtatatttaagatatggtagcaaatgtaaagatacttttgacatggagtagtctcagattccctttagtatgtttgattgattttaatgatcagtgttgaataatttgtgttatttctccactgcaacttgattatactgaacgtgattatatgcacttatcatctttacac

SEQ ID NO: 887251 - DNA, 574 bp, Homo sapiens
gctcttctggttatccagaggggaatctctcttagccaggttggaggtttgtaaagcctgccattgctataacatagggtttactacaaaatgattgttttggaaatgtggcaaatctttttcatatcaaataccatatagatttaaaggctttaatatttttatatagtgtaactcttaacaatttggtgccaaaatagtgataaaaatatacagctaatctattcattatgtttggcatgcatttcattttaaaaacacctgcattaaatttttgtttttcactagatattatttcagattcactcttgaaaaytgtcatttttttcctaatgctaactcagaaaatagaaagtgaaagacaagattatgggatcaacaggcaaatgctgccttcttattagctgtatatcttatgaactttggcatgtatcactcatttttattcatctgtaaaatggaaataattgtagctatgtacctatgcaaatggcagttgtgaagatcaatataagactttaagaagtatccatcatctaataagcactactgtatgcttgcaggtgttagtgtc

SEQ ID NO: 887252 - DNA, 583 bp, Homo sapiens
atccgaatgcttatttgcacaaatctatgcatagaggattgtcagaattctctgtgaatttcttgagtctccctcaaaataaccttcacagaagaaaaagtatcttttttagtaaatgcctctactaaaattagcagamccaaaaaaaaaaaaaaagcaaaaaaaaaaaaaaaaaacaaaacaaggaggaaattgactttggggagtaaatatagtaagataaaaaagggaaagataaggtcctgtaaacttactttaaccttaataaacaccttaaatatatagctttgacatctttatgactacagtttcattacaaactttcatcatagtaacttaagtctatagaagcaaagatgaatatttatctgtggaattcaagcaacatctggtcatttgagcagaaagatccattattttttcttcaatagcattttttctcccagtcagttttactttccaaaacgatttgtggtgagggaaaaaagggagttgaaaagtaagtctctaacaaaagatattctttcaacatttaaaaaatggacagaaaaggatgaggcagaaagggcacttttgaatagtt

SEQ ID NO: 887253 - DNA, 593 bp, Homo sapiens
gttggattaaagaatgtatcaacaaataactaagtggaaactaaatagtgacacacacacacagcaaccgtgcaatgatcacttagcaatatgccctagatgtttctgtcccatctatcctagtaccacccccctgcatgagcaggmagacttggatgctttcaggaaagaggtttcttgactaacctgttcttgttagcttttttgtttctgacatctaacttaaatctttttttttttttttttgagacagagtctcgctctgtcccccaggctggagtgcagtgacgcaatctcggctcactacaagctccgcctcctgggttcacgccattctgctgcctcagtctcctgagtagctgggactacaggcacctgccaccacacctggctaattttttgtatttttagtagagacagacggggtttcaccatgttaggcaggatggtctcgatctcctgaccttgtgatccgcccgcctcggcctcccaaagtgctgggattacaggcatgagccaccatgcccggctaacttaaatcttttctatcacaatatgcctgtttccccttattttgactagatgaaaaggaa

SEQ ID NO: 887254 - DNA, 588 bp, Homo sapiens
atagaatcaaattactctctgtaggtccagcagacaaatttgagttcaaaacccagatttgcatttttataattatttactttagtaaattacttacaatttactaaaattataaataattatagtaaaacaaaaaaattaacaatgagccagcctcccagtgtcgctcaggagacctcacggctaaataagtaatcactgctatcccttcctctccagcagtctccatcaacttgttctgcattcagagactgttcttgggccttcccatacgcagctcacatttgaaactcctgcccctggtgccttaatgcatctgactggcagccacacagcccctccatgtggctcagtttcagtgggtaggtagggaaatgccgatttgtttgcattgtkccccacaggctgattacagtaaaggctgtcacacagagctcttgcatacctaacaggagacttggtgacagtgaaaccaagaatgaccaatgactgtgtgtaaaatgaatcaaggtgaggtgtattgaaagcaaagaggtcaattcaaaggcttagaaataatccagacagtaatcaaggaagaaagcagcc

SEQ ID NO: 887255 - DNA, 567 bp, Homo sapiens
aaaccatatcattgacctgctggcaccatcaaatatttctgcatgatgaaatttcagctcagttttaagtgtctatgcctacaatcatcatgggactctttctaactatacactgtacatcacatacaacacctgcatccttctctgccacacagatctgctgagatttgcattatggctgaattagccgaaatttacatgccaaaggggcatcgatatttttcatctgctgctttctacgtgtaggacaaggcttatattactggtcctacactttcctagaaaccagaaacatcggtattatgttactatttatagtaatagcaacwacatttataggttgtgtcctaccatgaggacaagtatctttttgaggggcaacagtaattacaaatctattgtcagctgttccatacattggcaccagcctggtacaataaacttaggaggcttttcagttgacaaagccacctcacaccattcttcaccttccacttcatcttacctttcattatcatggacctagtagccatctaccctctatttcttccagagacaggatccaac

SEQ ID NO: 887256 - DNA, 658 bp, Homo sapiens
tcctcctagacctccaggtctgtgaatgggagagtctgcagcaaaggtctctgacatgccctggagatagtttccccattgtcttggggattaacattaggctcctcattacttgtgcaaatatctgaagctagcttgaatttctcctcagaaaatgagattttgttttctttcaaactgtcaggctgaaaactttccaaattttgatgccatttcccttttaaaactgaatgcctttaacagcacccaaatcaccttttgaatgttttgctgcttagaaatttcttctaccagataccctawatcatctctctcaagctcaacattccacaaatctgtagggcaggggcaaaatgccgccagtctctttactaaaacataacaagagtcacctttgctccagttcccaacaagttcctcatctccatctgagaccacctcagcctggacatcattgtccatatcactatcaggattttggtcaaagccattcaacaagtctctaagttccaaactttcccatattttcctgtcttcttctgagccctccaaactgttccaacttctgcctgttgcccagttccaaagttgcttccacattttcaggtatcttttcagcagcgcccctctactggtaccaatgtccagtattagccca

SEQ ID NO: 887257 - DNA, 620 bp, Homo sapiens
gattatgaagttttatctattttgattgctttgtctgaaggagagccatgaccaaatgatatagagtggatactgctgtcaatcatccaagggcataaaaggaagagaaggggatgaaccaacactgaatgctattcttttagagtagttgtattgggttgtctacgtattgggtaggtcagccatgcaagcaaatatatgaaggcttaggatcaaaacctgagctgttaataaaaaatgcatctatttgaggggagaaaaaaaggggatagaaggaaggtaggggctctcaggactgagaaggggatggtttggctagaacctagaggagacctcttgtgaatgcacacagacttcagattctagaagcaatgatatacagtatccaatatcaatttttttcctttctgctttgtgaccatcttctattactctaaagctttcaggaagatacaccatagcctaagtctaaytgtaagaaggaaagatgcagtggccagacttggccaaaacgagtgtgataagagtagcaacagccagtagaagcaatgtgtagatagcagaaaatgccttaaagaattttggacctgcatcatttgtatagggattctgtgaaattt

SEQ ID NO: 887258 - DNA, 696 bp, Homo sapiens
cctggcactcaactgtgaggtgaaaacctgcttgcaggacccctctttttgctgagggttgtccttttgcttaataaattttattactcactctctgatgtccacatgcctaattcttcctggtcttgagacaaaaaacctggatctagctgacytcaggaggagaaaaaacctacatcacaactgactttggaattgggtaataggcagaggttggaacagtttggagggctcagaagatgagaaaatgtgggaaagtttgggccttcctagagacttggagggctcagaagacaggaagatatggaaatgtttggaacttcctagggacttgttgaatggccttgaccaaaatgctgatagagatatggataatgaagtccaggctgaggtggtctcaggtggagatggggaatttcttgggaactggagtgaaggtcactcttcctatgcaaagagactgatggcattttgctcctgccctagaaatctgtggaacttggaacttgagagagatgatttagggtgttttgcagaagaaatttctaagtgacaaagcattcaagaggaagcagagtataaaagtctggaaaatttgcagcctgatgatgcaatagaaaataaaataccattttctagggagaaattcaagccagctgcagaaatttgtgtaagtaataaggagctgaatgttaa

SEQ ID NO: 887259 - DNA, 626 bp, Homo sapiens
gtggatggtaattcttgacatttttatgtctataatttctcctaacattatctaatgcaagcctcttgctgtacagatatgaaaactgaagacatgtgaggtttcctcaatataacacaaccacacatcaagagagccatacctaaattctggagttacaggttccccacacaatgctcccttatggttattgcaaactatgggcatcaagcaactgaagataagaaactcacgaggtcaggagatcgagaccagcctggtcaacatggtgaaacsccgtccctactaaaaatacaaaaaaaattagccgggcttggtggcattcgcctgtagtctcagctactcaggaggctgaggcaggagaatcacttgaacctgagaggtggagcttgcagtgatcagagatcacaccaatgcactcaagcctgggggacagagcaagactctgtctcaaaaaaaaaaaaaaaaaaaaaaaaaggaagaaagaaactttgtagctagaattcaggactaaggcattcatagggtagacagtgtaaaagagagccgggtgggggtatttgagggagtgtaaaaatgatcagagaggtgcagaaatggcagataaactgagaatgaggtacagg

SEQ ID NO: 887260 - DNA, 595 bp, Homo sapiens
aaatgtaagatgagacaatgtcagggagttatgaacaaatatgcctctttctctaaatagcccagtttttagtggtatctatttttgtgtagccatgcactgaaaatatcacttgagtgatataatttcattgagtgagtgcttttctgtatttttaaaacccaaagctcttttaggggtgtgggatagatagaggagaaaagtctcttatcttttgtctctttctcttttgtaattaagttgcattaaaatctagtctttggtcttaccacgttgtttcagaagcacatgagcgtgtacacacagacacacacagygctacatgtttgacattgagtattatgggctaggattctataatgtactattgaagtagaaaaattaaagaattgattgtccttatgaaatagaaaaaataataaaaagtttagctgtaataggcattggtgaaccccttgaagtaaaagttagaaaagaatattaactgcttttctgtagaaactgtaagacaccttatctgtttcccacatatattgtaaggtctctaagtttctgtttttcttcttgctgtgcagctgcaaggtcacaaaataga

SEQ ID NO: 887261 - DNA, 595 bp, Homo sapiens
aaatgtaagatgagacaatgtcagggagttatgaacaaatatgcctctttctctaaatagcccagtttttagtggtatctatttttgtgtagccatgcactgaaaatatcacttgagtgatataatttcattgagtgagtgcttttctgtatttttaaaacccaaagctcttttaggggtgtgggatagatagaggagaaaagtctcttatcttttgtctctttctcttttgtaattaagttgcattaaaatctagtctttggtcttaccacgttgtttcagaagcacatgagcgtgtacacacagacacacacagcgctacatgtttgacattgagtattatgggctaggattctataatgtactaytgaagtagaaaaattaaagaattgattgtccttatgaaatagaaaaaataataaaaagtttagctgtaataggcattggtgaaccccttgaagtaaaagttagaaaagaatattaactgcttttctgtagaaactgtaagacaccttatctgtttcccacatatattgtaaggtctctaagtttctgtttttcttcttgctgtgcagctgcaaggtcacaaaataga

SEQ ID NO: 887262 - DNA, 565 bp, Homo sapiens
acagttctggtgctttccctgcaatgggtagatcacttaagaaaatatcacggttcctttacccttcattttggtttacttgaaaatagtgaggcaatataaaagttaatgtaacttccacgattactttagcactcagcaaatccagatcaccttgtattttartaagagattatatatgttattactttgaaagctttcacaaattgctgtaaacatttaagaaatggattctccatggtataacacagtatctgtcaccactaagcagtgggcacatattttttttttgcttgccctgtagccaccgtttcactgttgtgaaaaggtgttgattagattttatttatgctatatatttaggatatttgacagttagctcaaggaatagagaatctgaataccaccaaacaacctgaaactcagcaaacaccctactctctactgcctgaattatagagcctggaaacatgtgcgttcctatatgaactccatttctcaagggttttcatatttttctgttgtcaaagagctctgtgctggaaaatccccactcctgtgtgag

SEQ ID NO: 887263 - DNA, 627 bp, Homo sapiens
aatcctttctaataatagattatttgatggcttaaagcacaatatttcctagaaggtgagaagtagcccaccatacggagaacagcaaaggatgttttgggcagatacctacataagaagacactcttgggcagagaagaatctagtatttgrcaaatggcagaggtcgatgtgtctgataaaatgttgaatgatcaggaaattgaaatctgatattagagacaggattggccacagaaacaaatttagttagaattctaagtctgataggaaattttaaaatggagaggtgtgacagggctttacctataaggagattcagttggctggtctgtggaagtggactgcagagcagcaggaaggagtatacaaaggctggtttggaggttattgtcattcaggtcggagatgatggcatcctggctgctcattaaggtagccctgtacatagaggaacatagagagagagagaattaaggagagaattaaggtcaattttgaagaaaagggatttgctaattgaataaatgtggttgatgaaggaaagaaatcccacactgaagtcaatgcacctgggtgaatgtattaattataccacctcatctcatgacccatcaaatctttagt

SEQ ID NO: 887264 - DNA, 725 bp, Homo sapiens
tattagaatcttttactgtgcagaacctctttagttgaattagatcccatttgtcaattttggcttttgttgccattgcttttgatgttttagtcatgaagtcttggggatataaccatcaatcccaagaaatacaaactaccatggaagaatactataaatacctctacacaaataaactagaaaatctagaaaaaatggataaattcctggacacacacccctcccaagactaaaccaggaagaagtcaaatccctgaattgatcaataacaagttctgaaattaaggcagtaattaacagcctaccaaccaaaaaaaaaaaagtgcaggaccagacagattcacagccgaattctaccagaggtacaaggaggagctggtaccattccttctgaaagtattccaaactatcggaaaagagggactcctccctaactcattttatgaggccagcatcatcctgataccaaaacctggcagagacacaacgwaaaaagaaaacttcaggccaatatccctggtgaaaatcaatgtgaaatccttaataaaatactggcataccgaatccagcagcatattaaaaagcttatccaccatgatcagtttggctcattcatccctgggatgcaaggctggttcaacatacgcaaatcaataaatgtaatccaccacataaacagaaccaatgacaaaaaccatgtgattatctcaatagatgcagaa

SEQ ID NO: 887265 - DNA, 563 bp, Homo sapiens
cccattgtctcagcccaaaatctccttaaactacaagcaacttcagcaaagtctcaggatataaaatcaatgtgcaaaaattacaagcatttctatacaccaataatagacagaaagccaaatcatgagtgaactcccattcacaattgctacaaagagaataaaatacctaggaatccaacttacaagggatgtgaagggcctcttcaaagagaactacaaaccacygctcaaggaaataagagaggacacaaacaaatgaaaaaacattccatgctcatggataggaagaatcaacactgtggaaatactgcccaaagtaatttatagactcaatgctatccccatcaagctaccattgactttcttcacagaattagaaaaaactactttaaatttcatatggaacaaaaaaagagccaatatagccaagacaatactaagcaaaaataacaatgctgaaggcatcatgcttcctgacttcaaactataaaacaaggctacagtaaccaaaacagtatggtactggtaccaaaacagatatattgaccaatgagacagaa

SEQ ID NO: 887266 - DNA, 563 bp, Homo sapiens
cccattgtctcagcccaaaatctccttaaactacaagcaacttcagcaaagtctcaggatataaaatcaatgtgcaaaaattacaagcatttctatacaccaataatagacagaaagccaaatcatgagtgaactcccattcacaattgctacaaagagaataaaatacctaggaatccaacttacaagggatgtgaagggcctcttcaaagagaactacaaaccaccgctcaaggaaataagagaggacacaaacaaatgaaaaaacattccatgctcatggataggaagaatcaacactgtggaaatactgcccaaagtaatttayagactcaatgctatccccatcaagctaccattgactttcttcacagaattagaaaaaactactttaaatttcatatggaacaaaaaaagagccaatatagccaagacaatactaagcaaaaataacaatgctgaaggcatcatgcttcctgacttcaaactataaaacaaggctacagtaaccaaaacagtatggtactggtaccaaaacagatatattgaccaatgagacagaa

SEQ ID NO: 887267 - DNA, 618 bp, Homo sapiens
ctgccttacaagagctcctgaaggaagcactaaacatggaaaggaacaattggaacaagccactgcaaaaaacatgccaaattgtaaagaccatcgatgctaggaaaaaactgcatcaatttacgggcaaaataaccagctaacatcataacgacaggttcaaattcactcataacaatattaaccttaaatggaaatgggctaaatgccccaattaaaagacacagactggcaaattggataaagagtcaagacccatcagtgtgctgtattcagaagacccatcttacatgcakaggcacaaataggcttaaaatatagggatggaggaagatctaccaagcaaatggaaaacaaaaaaagcagggtttgcagtcctagtctctgataaaacagactttaaaccaacaaagatcaaaagagacaaagaaggccattacataatggtaaagggatcacttcaacaagaagagctaactatcctaaatatatatgcacccaatacaggagcacccagattcataaaacaagtccatggagacctacaaagagacttagactcccacacagtgataatgggagactttaacaccccactgtcaatattagacagatcaa

SEQ ID NO: 887268 - DNA, 697 bp, Homo sapiens
ggtgtctgtgtctgggaaaatggatggccgtgtctgagatggttttcactgctgaaatgaaagcttcatttgtaagccaatcctttcttactccccctcccttcagatgccattgtctccctcattcctttctgctgtcatctatggggaggttgaggttgacactttatcactctcacatgccagatagaattccagcacccacttgacctggcaccagggagaagtgcctgcctgagccagtcctgatctaagaggggccactgcaggccttcatggcatgcccctttctgcttggaccatcatgggaactttagacaccttgctttgctccagacatggatgaattttctttttttaaaaatttccagaagttattgggacacaggtggtatttggttaygtgagtgagttctttagtggtgatttgtgagattttggtgcacccgttaccccagcagtatccacagcaccatatttgtagtcttctgtctcttgcccccccccatcctttcccccaagtccccaaagtccattctgtcattcttatgcctttgcgtcctcatagcttagctcccacataccagtgagaacatacaatgtttggttttccattcctgagttacttcacttagaataatagtctctaatctcatagacatggatgaattttcttgattcagtcacaagatcattt

SEQ ID NO: 887269 - DNA, 640 bp, Homo sapiens
tgggggcaggagatgaaaatgatgacaggttttgttttttctctacactagaaatatgggtaaggatggaaatttagagagaccctggactgggtgaatatgccagagccaaggaaacttttgcaaggcaaatggcattgctattggaggtatcctgattttaaaagttgtttgcaagggtgatttatttgcaaaaaggtacttcaggaaaggtttttaaaaagtctttgctgttgtaggccaccctaacagtgtaaaatttcctaggattaggtatgatttccagacttactgtttagttattaaaagactcactggtctttttaagagggtcaatggaattaaaaaaaatatgggtaaggcctttttacactctatttacttcaaacagaccagatatgccaagaaaatgttcacragtctgtatcttacaagacagacagatttgagctggctggacctgtaatgtttatcattttgctgtttttatgttgctgctcctcatggtgggctcctatcatacttttttttagagtagtaacacaaagctatttttcatttgtaaacttcaattaaatctgagagattcaaaagtataatgatatttctttttacagaattgtactgtgagtcctagtcc

SEQ ID NO: 887270 - DNA, 633 bp, Homo sapiens
gtgactttttggtagaacaatttgggtatatacacaggaatgggatttctaggtcaaatggtcactgttttagctctttgagaaatttccagggtgctttccatagtggctgaactaatttacattctcaccaacagtgtwtaagtgttctcgtttcttcacagcctcaccaatgtctgttattttttgaatttttaataacagccattctgactagtgtgagatggtatcttactgtggttttgatttgcatttctctgatgattaacaatgttaaggattttttcatacgtttgttggccacttttatgtcttttttgagaagtgtctgtcctttgctcactttttaatggggttatttgtttttgtcctgttgatttatttaagtttcttgtagattatggatattagacctttgctggatacatagtttacgaatgttttctcccgttctgtaggttgtttactctgttttgagttccatttgctgtgcagaagctctttggtttaatttgttcccatccaccagtttttgtttttcttgtaattgcttttgaggatttggtcataaattatttgccacaactgatgttgagaagggcatttcctaggttttcttctaggacttttata

SEQ ID NO: 887271 - DNA, 604 bp, Homo sapiens
accacacccaaccccaaatgctaacactttttaaagagtttgtttattgctttttcccccccattatgaatgcaattgctgccttctaacaacatggattgctgggccagacacctagtgagtactctggatcaaaaaaggaccaagtctccatgttcccagacaccaagagtcctttgcctgataccttcactttttgactgaaagctcattattttcattcattcattcagtccgtttttcaacaaataattactttgcagaatgcttttattctcattttagagttaaaagtagcatcagcaggtaaaaatgacacaaaattttagctctatagaaataagaacttcccagaattcagaggtrtcaaaaaaatcaaatggtcatattcagacacaaccaaatagagggttattctgcaaaccaccaatctgacccttcaaaaagatcaatgtcagccaggcacggtggctcacgcctgcaatcccagcactttgggaggccaaggcaggcggatcacaaggtcaggagatggagaccatcctggctaacatggtgaaaccccgtctctactaaaaatacaaaaaattagcggggtgtggtg

SEQ ID NO: 887272 - DNA, 632 bp, Homo sapiens
ggccaaaactcagtttttaaggcttctctggggtctccttggctaaaagggggtggattcagtcagttggagggtttaggattttatttgtatttctcaggtgtaaaactcacaagatgtttatttagcacttgaccttaatagtggcaaggcagtccagtcctcctggaacaccatactcatcagcatctctttgagactggcctaccctctgaacaggaatgcacagaagctgcccgctgggactgcaggtgctctgttagccaggtctcctggccatggcactgtgctttaaggccaaytcttgggacagaaaggtgaaacttctttctgtaaacccatttggtaaaccctttgaccttgaacattaagcatcaaaacactcaaagcacagactttgaaattacacagacctctgctaaattccagactacttcatctgtgttgtctgatcttgagctaattggttggttaatttttccaagactcaatgtccttgtctataatagggagataatatcttccacagagagcacagctgaagagttgttaagtgctcttattactacaattgaagcaagaaagtaaagaagtttggtgcatacactctgaacccaaatgcctggctttca

SEQ ID NO: 887273 - DNA, 576 bp, Homo sapiens
tgtcctttgtagggacaaggatgaaactggaaaccatcattctcagcaaactatcgcaaggacaaaaaaccaaacactgcatgttctcactcatagatgggaattgaacaatgagaacacatggacacaggaaagggaatatcacacactgggacctgttttgrggtgggggcaggggggagggatagcattaggagatatacctaatgctaaatgactagttaatgggtgcagcacaccaacatgacacatgtatacatatgtaacaaacctgcacattgtgcacatgtaccctaaaacttaaagtataataataaaaaaaacaaacaaaaaaatgggcaaaatatctaacagataccttactaaagaagacatccacattgcaagtaagcatatgaaaagacactccccatcacatgtcatcagggaaatggaaattaaaacaatgagatactgttaatggaaaggggtcccaatccagaccccaagagagagttcttggctctcgcacaagaaagaattcagggcgagtccatagagtaaagtgaaagcaagtttattaagaaagtaaaagaa

SEQ ID NO: 887274 - DNA, 626 bp, Homo sapiens
tcagaatgcttcagattaggtccacattttttcaaaaatcatttttaggacttttaaattatttaagaagtgcattgtgtgatttgaagtatgtgctgcaatttaactatctatgaggatgaatactattctcttaggagaacagctttcttcagttcactgagtgggagagactaaacactttgaaattttcaatcttttgttaagagtttgcaaacatgtgaaacaaatgcacattttacaagagtagagagctgcagcaagagtgtgggattggggagasagcatggctggttgcttagagcaggccccccaaaccactatccctgtgatgaggtcacatgggcaggacaggccctcggcattgctcctcacaaatgcagttttgccagtgttgagcacaagattccgtgtgtgtgtgtgtgtgtgtgtgtgcgcgtgtgcctgcatgtacctattaacatctcatagaattagttttccatgaaaatcagcttgggagattctggcctaggtaactaataatggtaattgtgatcagaacgttctttttcttggataataccaaaattaccatgaggttttcagaatctccctcctctggttttcatgaacatcattatctt

SEQ ID NO: 887275 - DNA, 626 bp, Homo sapiens
tcagaatgcttcagattaggtccacattttttcaaaaatcatttttaggacttttaaattatttaagaagtgcattgtgtgatttgaagtatgtgctgcaatttaactatctatgaggatgaatactattctcttaggagaacagctttcttcagttcactgagtgggagagactaaacactttgaaattttcaatcttttgttaagagtttgcaaacatgtgaaacaaatgcacattttacaagagtagagagctgcagcaagagtgtgggattggggagagagcatggctggttgcttagagcaggccccccaaaccactatccctgtgatgaggtcacatgggcaggacaggccctcggcattgctcctcacaaatgcagttttgcsagtgttgagcacaagattccgtgtgtgtgtgtgtgtgtgtgtgtgcgcgtgtgcctgcatgtacctattaacatctcatagaattagttttccatgaaaatcagcttgggagattctggcctaggtaactaataatggtaattgtgatcagaacgttctttttcttggataataccaaaattaccatgaggttttcagaatctccctcctctggttttcatgaacatcattatctt

SEQ ID NO: 887276 - DNA, 626 bp, Homo sapiens
tcagaatgcttcagattaggtccacattttttcaaaaatcatttttaggacttttaaattatttaagaagtgcattgtgtgatttgaagtatgtgctgcaatttaactatctatgaggatgaatactattctcttaggagaacagctttcttcagttcactgagtgggagagactaaacactttgaaattttcaatcttttgttaagagtttgcaaacatgtgaaacaaatgcacattttacaagagtagagagctgcagcaagagtgtgggattggggagagagcatggctggttgcttagagcaggccccccaaaccactatccctgtgatgaggtcacatgggcaggacaggccctcggcattgctcctcacaaatgcagttttgccagtgttgagcacaagattccgtgtgtgtgtgtgtgtgtgtgtgtgcgygtgtgcctgcatgtacctattaacatctcatagaattagttttccatgaaaatcagcttgggagattctggcctaggtaactaataatggtaattgtgatcagaacgttctttttcttggataataccaaaattaccatgaggttttcagaatctccctcctctggttttcatgaacatcattatctt

SEQ ID NO: 887277 - DNA, 575 bp, Homo sapiens
gtaagtgtcctatagagttgtaccaatttttatcttttatgccatattttgactgtaccttttctaaatttagatgtgtttagatgcacaaatacttcccgttgtgttacaattgcctgtggtattcaggacagtaacctgctgtacaggtttgtagcctaggagctataggctgtaccatctagcaaaggtgtgaagtaggctatactatctagatttgtgtaaatacactccatgatgttcacacaatgacaaaattgactaatgatgcatttcccagaaagaatcctcattgttaagtgatgggtgactatatacattatacaaataaaacataatacatatgtattatatatattgcatataatatgtataattataatgtgatatggattatagaatgcaaatatatttattartattatataacacatagaatatatatatatatatacatgtgttctcagtaacagtttgttacctatttattgtttctaatgtatgttttattctcccttaaatagatgctaaggtctttgagggtagaaaaaaaatcttctatttcttaacactta

SEQ ID NO: 887278 - DNA, 629 bp, Homo sapiens
tcacttataaataagactcacttatttatttttcttagtccatatagttagaggtttcttaatttcgtttttcttttcattgaatcatttttttgtttccttgtttttctctgtttttcttttctccattttgtttatttttgctctgatctttcttatttacttcctctgctagctttgtgataacacttgttgttctttctctactttgcaaagttgtaaagttaggttgctgatttggctcttcttgttttkttttttttttaatacaagcatttatagctataaattccccccttaacattgctcttgctgtgtcacagattttttgcatggtgtgttatttttattcatctctaagtattttctgattttcttattatttcttctttgatcccttggtagtttgagtgtgtcatttaatttccacagtttttgacttttcaggtttaacttatattatcaatttctaaattcatcctatatggtcagagaagatactgtgtatgatgtttatctttttaaatctattgagatttaatttgtggcttaacatatgatctattttgggaaaatgtcccatgtgcacttgagaagaagatgtatgctgttcttgtttggtaaagtgt

SEQ ID NO: 887279 - DNA, 611 bp, Homo sapiens
atcaataatgcatccatctaaatataattttagtaagagctagtgtcactttattatttgacagtgcctttatacaacccatcgaataagcatcatgggagatgcatcgtttgatgtttttttggggcccaactgaaaaatcccaaagtcaatttaagcttaaaagtacttaaattagaatttgattttggggaagtttgttaaagatgttaaaaaaacttaaaacatttaattaaaatataatcagatgtcattgtgagataattatttaatcagagtgattattaaaagacttcaaaagcaaatataaaaagttacatagttcagagggaaaaaacttagacctgtrctagagatgacctagtttttctaagtagtaaaaaactaataaagacagcaccaagcacaagaacttatcttaaaatataaaatatctgtttcttaggctgattacttgaaaggtaagtgaaaagcctcctacagtatgactgcctttcctatgggaagcccatttggataacctagaagttgaacctcatggaaaggtacttgaatccaattagatactgcgagagtatgtgtccaagattatgagtgtacactttattaaa

SEQ ID NO: 887280 - DNA, 539 bp, Homo sapiens
gcttcctcccagctgctttcatgggctggcattgagtgtttgtggcttttccaggagcacggtgcaagttgttggtagtgttggtggatctaccattccggggtctggaggatggtcccttttctcacagctccactaggcaatgccccagtggggactcacccaacatttcccttctgcactgccctagcagaggttctccgtggggctcccacccctgcagcaaacttctgcctagacatccaggtgtttccatacatcctctgaaattgaggtggaggttcccaaacctcaattcttgacttctgtgcaccctcaggttcaacaccatgtggaaactgccaaggctyggggcttgcaccctctgaagtcatggcctaagctatgccttggacccttttagccatggctagagcagctgggacacagggcaccaagtccataagctgcacacagcaggggtgccctgggcccagcccatgaaaccattttttactcctagacctctgggcttgtgatagaaggggctgctgtgaaga

SEQ ID NO: 887281 - DNA, 633 bp, Homo sapiens
tgtgaatgttgtagtggctagagaagtgggcatggattcagtacgtagaggccccaatgtcctctctgccactaaagtcactgtgacaggatataaatcattacctctctgagctggtttttttagtcagttgaaatttaaagtggacctcgacggctcttaatctccctgcaaattctaacatgaatatttttatattgacaatatttttttcttaaggcaggaaagccactccttgggaatagagtatattatatggcatttaaaaaaagaatgaaagaatgtgcctatgcctaggtaaaatttcaagcaaataatgcctttccaagtagcaaagtaataacaaaatagcctgtctttggaaatacattttcacaagatstttttggtttattttgtggatttttaataaatacctttttaagaaaacatactggtaaaggaattggagaaaagctaatgtcctttcaggacatgttatttgtcaaaattatgattgagacttgacagtttcctaacattttctcttttagcttcttttagagagttttatttgctagtttattttaggtttattctcctagattgttcatcccagagaggaaaaaatgaaaaggaatagataactatcta

SEQ ID NO: 887282 - DNA, 659 bp, Homo sapiens
attttcatttatctgtcatttttattaaaggacttcatagtgatgtatgtttcctgaagtttaggtgtaaattaaaatgagtctatgtgtgtaaaagtgtatgattcatcttgtagatggcttattgcccactgttggttatgaactattaaaaagaaagtgaaaaattgggaaacgttggtgcaagcttgactttggcacactttacctcgcttccttttatctgtcttctcttttgcttatgggggtgttttctgyttcaccacagaacacttcagttggtgatactggaatagtgaatttgcctgctaggtggaaatttaaaacttgctgtcattatgctttgcttcactgcggaagagcttcacagtttttccccaccaactttttcagtatatgaccgccaaggttgtattgtgagacattctcttcagaataaaatttagcctctgaatctgggggaggtgagcactatgttgtttagccaatttactgaattttcttgtttttcttttcctgatatctggagccctcaaaccaaaacattagccagcaggcatttcccagagaacaggaattcaaaaaggagttctccgtgatgtagtgtgtgctctttgcaattcgtaggacttttataatcaatattttccttcctcttt

SEQ ID NO: 887283 - DNA, 614 bp, Homo sapiens
catgaagctaggctcattcattagggagacgtaaataaagtcatactatttatacatgctgtctgattcgcttcaaatatgttttcaatagttttctatctacattgtgctgaaaacatatatgctgaaataatatctttatgcacagaaaatagaaaaaggggaagataattgcgcagttgttcctttaagccaattaaattccaccagagggagatacctctttgtgctcccagatgcttgccctgtgtgttcattcatcaacatagagctcttagttttgccatttcatatgacatcaatggggaaactgcaagtaatttaactattaatatagctgccatagcatttcaagtacagacaacacattattattaygtatacactaaatcaatcaatatagatctattatggagcatgtatggacagaacgttgcacagacactggggaaaatacaaaagaggatcttaaagcctactgtgtccactaggaacctgtgcatactctgcattcataccaaaaccccatcttggctcttaagactcttagggaaattagagcctaaacttgagatttgaatacttggttctacctgtcctttctctccaacata

SEQ ID NO: 887284 - DNA, 634 bp, Homo sapiens
ggatttcagtgaaagcaatgctatttattatactgatgtttaagaagagacaatggcctagaaatcagggcctggaaaagtaaataataaagttcaagaatagcatactcatgtatgaggcagtttttgagtctgagatgacatattaggtaaataaaatttgcatgagttttctttgttaattcaagttgctggtggctggccagcaagtaagtagaagtgttaggcagaggacaagctagttcaggaagtttctgtggcaggtgagtttgtagtggactgaatgtttgtgttcccccccacaaattcataggttgaaatcctaactcccaatgtgatggcactaggatgtggggcctctgggagatgactagstcatgaggatggactcctcatgaatgaatataatgcccttattataaaaggggccccagagagctctcttgctttctttccaccatgggaggacataggaggaggatgtgatctatgaactaggaagccctccccagacactggatctgcagatgccttgatctggacttcttagcctccaggatggagaaatggatgttgttgtttaacctatctactgtgtagtattttgtcataccaacccaaatgaagtaagaca

SEQ ID NO: 887285 - DNA, 673 bp, Homo sapiens
aaaatctttagagcacattttcttgaagttctttagaaaattattcactattattgtttaccctgtaaattggtcttggaatgctagtatacaattttttgccatccagtcttttttcctggaagctttgaagatttttgcctttgaaaagtaacagttttattattatagttctcagcattgattgttcagagttaattttccagagtatctggtgagccctttcaatgtgtatattcagactttgttgtatttctgaagtgttgttttgcactatagttttaaatattagttctgtttcattgttttgttttttatcaaagattccaaaatagcgtgaatattatttttctatgcaggtgttccatattcatatttattttttgactttttaaatctcttccctgttttatcttgattattttcctgtttcttcaatgtttcttactaaattttcayttgagtcttgtctcccttgagcacaaactaattcacttttatttagctgagttaaatttgtcttcttccatttctttcctaagttatctttttttcctaaaatttccattctgctattaaatcaattttttcgtataccttataggtttaaaatatttatttgatttctgttataattatatttgttttctaagataattttcttttcattaat

SEQ ID NO: 887286 - DNA, 478 bp, Homo sapiens
cgttttgtgctctctcctgtcactatgtaccttgctttctctttgccttccgccatgattgtaaccttcctgagtcctctccagccatgaactatgagtcaattaaaacttctttttttttataagttacccagtctcaggtagttcttcatagcaatgtgaaaatggactaatacagaaaactggtaccaggaaagtgtggcactgctacaaagatacctgaaaatgtggaagtgactttggamctgggtaacgggtagaggttgggagagtttggagggctcagaagaagacgggaagatatgggaaagtttggaacttcctagagacttcttgaatagttttgatcaaaatgttgatagtgatatggacaataaagtcccggctgaggtagtctcagatagagatgaggaacttattgtgaactgtagtaaaggtcactctttctatgctttagcaaagagactggtgacatttt

SEQ ID NO: 887287 - DNA, 478 bp, Homo sapiens
cgttttgtgctctctcctgtcactatgtaccttgctttctctttgccttccgccatgattgtaaccttcctgagtcctctccagccatgaactatgagtcaattaaaacttctttttttttataagttacccagtctcaggtagttcttcatagcaatgtgaaaatggactaatacagaaaactggtaccaggaaagtgtggcactgctacaaagatacctgaaaatgtggaagtgactttggacctgggtaacgggyagaggttgggagagtttggagggctcagaagaagacgggaagatatgggaaagtttggaacttcctagagacttcttgaatagttttgatcaaaatgttgatagtgatatggacaataaagtcccggctgaggtagtctcagatagagatgaggaacttattgtgaactgtagtaaaggtcactctttctatgctttagcaaagagactggtgacatttt

SEQ ID NO: 887288 - DNA, 449 bp, Homo sapiens
ttgaacttgagagagataagttagggcatctggcagaagaaatttgtaagcagaaaggcattcaagatttgacttggtggtttctttttcttttccttttttttttttttttttttttgagatggagtctcgctctgtcacccagactggagtgcagtgttgtgattttggctcactgcaacctctacctcccaggttcaagcgattctccygcctcagcctctcaagcagctgggattacaggcatgcaccaccacgccctgacctggcagtttctaaaagtgtacagtcacatgcattcacaaacagatggtttgaaattggaatttatgtttaaaaggaaagaagacattaaaagtttggaaaatttgcaacttgaccatgtggttaaaaaaataaaaacccattttctggggagaaattcaggctggctgcataaatttgcataa

SEQ ID NO: 887289 - DNA, 626 bp, Homo sapiens
acttgagtaatacacatcaaagtgttaattatagttttctttgagttgtggaattatacatggtttaaattgcttccttttgcttttctgtattttccaaaatttttataatgtccacacacatttcataatttaaaaacccccataaaacaataaatactattcgtttaaaggactaactccttagcaacttttaaaagtctatgcatggcaatcaagttaacattttatgctacctggggaaagcacattagctagtttgcgtagagttgagctgtacccatctgcttaagttagtacccaatatagtctaccatgcaacaagtggatgagatggaatggatgcattttgatgaacaaggcaagaataggtgagagatgccttccttccttayatgttggccaagccttacaaggcacttcaatggaaggaaatgggtagataagggactgtaccacgccctgggacactagggatcatttgtatgtatcctgcttatcctagacaggtcctgtgctctgtattgctctcctacagccattaaaaagctattgggggaaatcatctcatcacaataagaagagtcaagtacaattcaatcatatagaaaatggttttggaagat

SEQ ID NO: 887290 - DNA, 524 bp, Homo sapiens
agggctttaaggtgtacgcaagaagcaaatggctgaagcaagagcacctggaaattttatttctagcctgtttttgcctctcaaaaaaagtcggtgagtaacaaaaaagggaaagggggaaaaaaaccagtattggattcattgatatgctaggcagcacccaatattcaattccatttcaaaagcgttttccccctacagcagtgatggattccacmagtcttggagtaagttaagggactgaagagtgcttgttggtacagtgagctattttgagtgctttttgaaaactgaaattactggagcaaaatctgtaaaggctcaatcatatacttgttatacaaggggaaggattcatgtaaatccagaggtatgtggctcaagaagtggacaaagttatagggagtcttgtctctgtgccaacactgtcttgaatgctcagccttgttactcaaagtgtggttctcagaccagcagcatcagcatcacctgggtgcttgttggaaatgcagagtcccagactc

SEQ ID NO: 887291 - DNA, 684 bp, Homo sapiens
aatttacatagtttttttatttttctaaaatggagttagctttataatttttgtccagtctcaaaacacatgcttattgtaaaatattttaggatatatatatatgaataaaaaacccctgttcttttcagaatattgtgtaaacccacatgtctttttaatgagattaaaaatgtagacgtattgattatgacatttcccaagctctgtgcagcaaatatgcctttatttcttttatcacaaactttatttttattccaggtccattcttcctaatgatgaaacctaaggagttacttctagatagattcagctttttgaagtgagtttttagtcaattcaccccctcgcttctcctcagtgyaacattttagtttcgggtgatgtgttgttatgctgtgtttaggcaatagcgggaaggggcatatggccaacatcctatggcatctgctgaggtgtaactcatccgttttatctttaattgctggtctctgcattgctgcatctgctgatatgctggagtctgcccgggccatgagttatgtccatatagctcactttatgtttccttactcctaattagaaggctctacctgtcctgttttgtaccccttttggatatacaagagaaattagggttctttcaagtatcgtcaggctctgcaactactgtcattaccagtt

SEQ ID NO: 887292 - DNA, 601 bp, Homo sapiens
aaaagaatgagtgctaagtggctggagggggtgctgcagaccaagcagaatgcaggtgcaagagaacagaggtgtggaagcacatggtcctcccttgtgatggactggagctggcactggagcaataggctggagaccctccatccgtgctaaggagtttcaaatctattcagaaagtgctggagagcctccagagacttttaagccaatttagaaaacttctcacaatggcagaataggatggaggttaggtgggtgttggggagaagagtatagagacatttagaagttatctagggatagcttctaaaaagatagggtgtagtcgtgggaataaagaagaggtgatggatttggtagtatggaaatagccttaagaaaacccaagacttaaatcagatgtgccatgagatgagaagagaagaagaggaaagactactacaycagcagggacggggtgatagtcttaggggtggccccagagacaagggcagaggccctgtgggtagattcattgtagggagagtggcatcaggggacaaatgggccttttctcttctcacctgcagctccattccttaccatgaagagcctctcctgc

SEQ ID NO: 887293 - DNA, 644 bp, Homo sapiens
cataagagaatttttttctgttcagacaggcaaaaattcacataaataaaacaattaagttaggtttattcctgtaactagaagatattattacaagctctttaaaatgccccagcaaatgtcaggaaacagaagttccccaattactctctcacatgcttattgtcaggcatgaaatcttctaagcatctttaggtgtctcttcttcctcatagtcatatttagtacagtcctatgctctgtttgctccctctgtaagtaattactgtcagaatctctagaaagtaactaggtaaggatgaaatctttttgktctttttggcccaggcttgactgaagttctctagagcaatgattctcacatttcacctgcatcagaatcacctagaggccttcctaaagctcaggttgctggctgggccctgtcccccagaatttctgattcaggaggctttcaaggaggcccaataatgtgcacttctaatgctgatggtgctggttgggatccacaatttgagaaccactgtcctgtatcaatgaattgcctatctggtgggtcatcagaatcactggcagctctaaaaaattgtattcttgggctaacctcttgagaatctgaggtcagtgggtctagagagacattc

SEQ ID NO: 887294 - DNA, 545 bp, Homo sapiens
gcttactgcaacctctgcctcccaggttcgagcaactctcatgcctcagcttcctaagtagctgggattacaggactgtgcgaccatgcctggctaatttttctatttttagtagacatagggtttcaccatgttggccaggctggtcttgaactcctggcctcaagtgatccactcacctcggcctcccaaagtgctgggattrcaggtgtgagccattgtgcccggtcaggaaatgaggagttcttaaaggaccctgggaatgttgctagtgggcccatgtccagatatcttctcggcactggcaagaacagtgcctgagtgggtccttgtctacagaaatcatcactaaggatgaaatctcttaaaagggtgatccagatacaaacattatattaaatatttaatttctatatagagttggaggacatagactgtttcctagggaaactgaagggaggtataccaatgttgtatattaatctagatcacaaacatcttacactcaagtttaagtaaaaatccaaattaacagccacaaacag

SEQ ID NO: 887295 - DNA, 632 bp, Homo sapiens
aacggtagtgatttttacacattaattttgtgttctgtgactttgatgaagttgtttatcagcttaagaagcttttgggctaagtctgtggggttttctagatatagaagcatgtcatctgcaaatagagaaaattttacttgctctttaccaatttacatgccctttatttcttcctcttgcctgattaccctggtcaggacattgaatactatgttgagtactagtggtgagagagggcatccttgtcatgtcccgattttcaaggggaatgcttccagcatttgtccattcggtatgatgttggctatgtgatttgcatagatggttcttattattttgaggtatgttccttcagtaactaatttattgataatttttaacagaaacagatgttgaattttatatgaagcctgttttgtatctattgagataatcatgtggtttttgtctttagttaattttatgtattgaatyacatttaataatttgtgtatgttgatccaactttgcatcccagggataaagtctacttgatcttgatggataagctttttgatgtgcttctagatttggtttgccagtattttttgaggataattgcattaatgctcatcaagaatgttggcctg

SEQ ID NO: 887296 - DNA, 657 bp, Homo sapiens
ttttgagttctgtggcattaccaattctaagctttgacaactaggatttcttgacattttgctatttcattgtgaggcaggtccacaaacaaaattataattttcccatataataatttttataatgaaaacaaaacatgcacattaacaacatggagggaaaacaaaaaaatcatttatgttaactttaatcttatttcttagtgaattctgaatggtaggacagtgggcatgagatgtttcctctatcaacctcccattcccactatcctaatactctcaatgaagtattacttggtcaaaacaatttgtgatttgaaataagatatatrtgaactataaaataacaattttctgtcaaattgtcttttcaaatatatcttgtcacttgctagagactgattatttttcaaaattccagaactcttatcaccttccattcacatttgagtttaatacttttttcatctccaggataaaataaaattaaagacatacaagaaaaaataatagtagaaaccaggtaacatatctactattcaataattatcaagcttgtttgacagacaatgttgaacttacatctaaatatttgctgaatatttgtcatctatatattgttaactatttttcatttctattctaagaagagattta

SEQ ID NO: 887297 - DNA, 455 bp, Homo sapiens
atccagctaattttttgtattttttttgtagagatggggtttttctatgttggccaggctggtctccaactcctgagctcaagggatccacccacctcagcgtcccaaagtgctgagattacaggcataagccaccatgcccagtcaagatcttttacatctctattctatttaaacttctaggtacagtcccctatgtaatttattttgttccactttagacatgaacaaatrtgtatttcaatataaaattcattacaactaatgcctaaacctaggtaatgccaattggtgtagccttagagggttggcctaagaccaatttcaattcaatttaattagtatttttttctcccagttcttcaccaatatgccaaccagtgaaagttatggagaaacaaagtccatttcaatataagggcaaacttccagagcaatcagcaatgtttaaaatg

SEQ ID NO: 887298 - DNA, 631 bp, Homo sapiens
ataagctgactgaaagtgtcttaaagtctgtaattgcttatcaagaaagaatgtttgtaagactggccctctgtccaatcagttgcaggggtctggaatgtaaatcagagttaagagaggtctgaaaatttgactgatagctactattagggagtttaaccaargtgtgttttttttcttgtgtcctgaaccctcaacccatagatacctttgtttccttaattttagagtccatcttgtctaatataagggatcaaattagatagtaaactattttgtactgttttgaggaacctccatgctgtttactgtcaaggctgtaccaaattacattcccaccaacagtgtgtaagggaatttttttttctccatatccaaactaacactgttatattttgttgttgttttttaaatagccatcctgacaggtgagacataatatctcattgtggtttttattgcatttcctggatgattcgtgatattgagcaccttttcatatgtctgttggctatctgtatgtttcatttaaataaatgctcattaaattccattgcccaccttttgatcaggttattagttattttgctatttaattgtaggggtttcttatatattttggatattaacc

SEQ ID NO: 887299 - DNA, 636 bp, Homo sapiens
ttttttaagtgttggttctattaaattgctgagttagttttttgtcacaaaaaagtacaaagtaaaatgtgaaactcagccccataccccaattttattcctcaaaataaaggttaacagtatggagggtatccttctaggcttatttctatgtgtgtataaatgcattttacaaatatcatttttaaagaaactacataaatatacatgagtagacatttctttccatctacattaggtatgtattttattataaaaatgggagttctwtacaactcttctcgaaagtactccctctgccctaacgtgtgttttgttcttcaccccatttcctcaacctccatattcagtgccactgaaaccaaagaacccttctgaaaaaatgatgattctaactgaaggacagggatagggaagatacagagaagccatagcaggcatataccatttatagtacggtgagtgtgcgtgtgtgtgtatatatatgtgtgtgtaaaatttatgtgtcctgatttatgtaggaagtagaaatgggatcattgtggctaaggacatgccataatttccaatgtatctttcctcaaaagagctcaagaaacttctgtaagatattttgctgtgaattatttctacaaa

SEQ ID NO: 887300 - DNA, 589 bp, Homo sapiens
catggccaatataaaagagcagaatattcatcgattcctatgcattgaaagccacagatggatgacaaggctggaggcctcaggcccaaaccaccctctccctgtaacatttaggaagccgtatgacaatcacagagttgctttgtgagcaagaagtaaagcaagagagcgaatgaaaagaaaccctagctgactctgttgataccatgtggcatgtccccaggcctcacttctgaattctttgyccctatggtgggcagtttcaggtaccccgtggaatgcttcccactttaaatgcctgctcctctctgtttccttgctggagtgcgtccttccctagcagtatgagcttgcttagctacaagtcagaacaattctgaagagccaaagagttgttactgctggccttgtgatgggagtccatggaaaaatgccccagtctctctgtcctgctgaagctcaattctaagatacattttatatggtttctcagaaggtgcccagccaagtcgggacctcagttgtccacaccgattacctatttattattgtacccttcattggcttttctccctgctagggctgccag

SEQ ID NO: 887301 - DNA, 556 bp, Homo sapiens
atctgatcacaacatgaaaatgtttacagtttctcatatgagactaactagcaaaatcagctcagttgcaacagatatcataggaataaattaagtaattgaaatgcatcctttatgttatcttaagtgtctataccaaaatccaccaacaaagaatgttttagtggtaataaatgttataactgttagttattgaaggtttgtttttccccagaaaaaaaaagaaaggtcttttttaaatttgcaattttatgatggttttctataacttcgggtggtcttgatcaagttgcttttcctcattggacctcaatttccatatctataaagcaaagaaaatggtccagttgatctctgacattccttctagcactaagaacytgattccaacacattcccatttgccagtacagtaacatagtacaaagtaaatgacaagcatagctaagatattgaaataatactaatgttttatctccttgtgacttgtccattatctgttagtgagcacatgacattctgtgtgacagagagctactaattgctactttacatg

SEQ ID NO: 887302 - DNA, 628 bp, Homo sapiens
tcctatttttactaggaaagatattcaggtcttaacacactatcagagctaaatttaaatgtttaacaggatggttgtatacggccattcctactgcttctgatgctacacttatttatatttactgcacatgagtcctaagtctacatgaaaactgatgttcaacatcaaaatgtacacccttaaagaaggtaaaagtgtaggatcttgcaaatgctagaagcagctactgcctgtaagtgaatcttacacatctcatctaaattcctaagcctgctcatttggttagacaccatgtaatcaagttcctttggcaggggttgagkgataaagctgaagatttttgctagccccgtagagaaatggggagaaatttggcaaggcatctttgacgtggctcaggaattagaaatattggaaatacagactaagactggaaattgggtttactaagatacttatctcacaaaacaaactctgttgtttattaaaaaaataaaactaacttttgttccctctttaggtgtcatgtatacataatcaaatctaaaagtatttctattagggaaaaaactgggccaattactgctaaattagctaagtatgtgaaaataaaatttatactaca

SEQ ID NO: 887303 - DNA, 625 bp, Homo sapiens
atggcctgtaaatggtagctgctattttttttttttttttactaattcatctgctaatttaaggaaataaattgcagtggtcgtgggaccagtgacccaaactacttaaatctctaatacattaattgatcacagtaataaacccgaatttgttaaaaaacaaaacaaaaggttgttatgctccaggtactttgctaactgtggsggagaactgtttgatttggcagtggtggctcaagctatcagtatagcattcccccaaatacagattataaataaggaccacctgaagcgcaatatgggcccccccccacccccgctcccaccccggaacaaccaaaaccatatccaggggagatgcgtaggaatctttaatcaccccaggtgattttttttctgattaccaactttgagaaacactgaagggacctcttctccattctatatgtggctaatataaaccctaaacatcatttctatgtattcgttagaccgttgtttactagaaaatttcagaagtcctttccgacttagtaattttgttattttgagttgaactgaaattcacttggagcggtcagttgaaaatgttttttgtttgtgctctgaaaaggttcccagtgtt

SEQ ID NO: 887304 - DNA, 667 bp, Homo sapiens
cagaaattctgagctctcaccaaattcctaagacccgtattgtttctggccataaaggccaaacctcctttgggcaatgggtggctttttctgttcctatctaccagggtccttcagatttttttcttcccaggcagactctatctaaaaccccattgcagtcctctgccacaagcatccagaactcaaaggaatagtgcctcatacactatggaaatttctcaagacccttgagtgattacagtagtccaagaagtgctcaccctacagtgatcttcactattcagagaaattaaaaactccgtcctccttacccttgaggaggattttgaggtgagaggactggggasgggcacacaggctgaggggtttcccctgggggaaggaggagatgcagggcaagaagagaagaagtcctggcaccctgcacttgagggcctggcacacagccatccagggaaactgccatttccctgtttctgttcattgctccatggcccctggcatcatggaaatttccagcacttgtggaaattctccaggaatgtgaaactgcaaaagttctatctatgctgagccaagggacactttctagctatctgaagaatttgctaattaaatgactaatgtcaactagattcccagggaataatttatatacatatga

SEQ ID NO: 887305 - DNA, 625 bp, Homo sapiens
atcttgaagaagagggagtctgccttagactctccccagtgttccaagacaaggcttctttgtccatttcaggacatgcttacagcatcctcacccacacgaaatgccgactgtcctctcgctgccggctctctgccctgacctccccacagagctgaacagagttgtattttaatcagccctcctccctaggtaatatatgttacttctgggctttttctcctttcagtcctctgtcaaaacagtacaaccgtatatccaagctctgctctccccttaaaatttatttcatagtattcattttattcaataacaactttattgatattaattcacatacaatgccattcacccatttaaagtgtacaattcaatagtttttagtawattcacagaattatgcaatcatcaccacaaccaatttagaacattttcatcatcccaaaaagaaactccatacccattagcagtcatccccaaccctcaggcctaggcaaccactactctactttctgcctctattgattttgcctctcatggacatttcataggactggaatcatacaacatgcagtcttttatggttggcttctttcacttagtgtaatgttttcaaggttcattc

SEQ ID NO: 887306 - DNA, 648 bp, Homo sapiens
aaacaagtcacaaaagaccacatattagattattccatttatataagacattgagaataggcaaagctatagagatggaaagtggattagtggttgccaagggcttgagggatggggagggattaggagtgactgctggtggatagttcattgctttktgaagtgatgaagatattctaaaattaattagattctgggggttgtcacacaatcctgtcaatatattaatatcattgaattattatatactttaaatggatgagtggtatagcatgtgaattttgcctcaataaagctgtctagtgaaacacagtatagacaaagtatttgaataggaattttcccaaagaaagtatgcaaaaaaagccaacaagcacataaaaagaggttaaacattggtcactaaagaaatgcaaatcagtcctgttgtagtggctcatgactgtaatcccacactttgggaggcagaggcgggtggatcacttgaggccaggagttcaagaccagcctggccaatgtgttgaaaccccatctctactaaaaatacaaaattagccaggtgtggtggcgggtgtctgtaatcccagctactcgagaagctgaggcaggagaatcgcttgaactcgggaggcggaggttgctgtgagc

SEQ ID NO: 887307 - DNA, 648 bp, Homo sapiens
aaacaagtcacaaaagaccacatattagattattccatttatataagacattgagaataggcaaagctatagagatggaaagtggattagtggttgccaagggcttgagggatggggagggattaggagtgactgctggtggatagttcattgctttttgaagtgatgaagatattctaaaattaattagattctgggggttgtcacacaatcctgtcaatatattaatatcattgaattattatatactttaaatggatgagtggtatagcatgtgaattttgcctcaataaagctgtctagtgaaacacagtatagacaaagtatttgaataggaattttcccaaagaaagtatgcaaaaaaagccaamaagcacataaaaagaggttaaacattggtcactaaagaaatgcaaatcagtcctgttgtagtggctcatgactgtaatcccacactttgggaggcagaggcgggtggatcacttgaggccaggagttcaagaccagcctggccaatgtgttgaaaccccatctctactaaaaatacaaaattagccaggtgtggtggcgggtgtctgtaatcccagctactcgagaagctgaggcaggagaatcgcttgaactcgggaggcggaggttgctgtgagc

SEQ ID NO: 887308 - DNA, 590 bp, Homo sapiens
atagaatcaaattactctctgtaggtccagcagacaaatttgagttcaaaacccagatttgcatttttataattatttactttagtaaattacttacaatttactaaaattataaataattatagtaaaacaaaaaaattaacaatgagccagcctcccagtgtcgctcaggagacctcacggctaaataagtaatcactgctatcccttcctctccagcagtctccatcaacttgttctgcattcagagactgttcttgggccttcccatacgcagctcacatttgaaactcctgcccctggtgccttaatgcatctgactggcagccacacagcccctccatgtggctcagtttcagtgggtaggtagggaaatgccgatttgtttgcattgtkccccacaggctgattacagtaaaggctgtcacacagagctcttgcatacctaacaggagacttggtgacagtgaaaccaagaatgaccaatgactgtgtgtaaaatgaatcaaggtgaggtgtattgaaagcaaagaggtcaattcaaaggcttagaaataatccagacagtaatcaaggaagaaagcagccat

SEQ ID NO: 887309 - DNA, 565 bp, Homo sapiens
accatatcattgacctgctggcaccatcaaatatttctgcatgatgaaatttcagctcagttttaagtgtctatgcctacaatcatcatgggactctttctaactatacactgtacatcacatacaacacctgcatccttctctgccacacagatctgctgagatttgcattatggctgaattagccgaaatttacatgccaaaggggcatcgatatttttcatctgctgctttctacgtgtaggacaaggcttatattactggtcctacactttcctagaaaccagaaacatcggtattatgttactatttatagtaatagcaacwacatttataggttgtgtcctaccatgaggacaagtatctttttgaggggcaacagtaattacaaatctattgtcagctgttccatacattggcaccagcctggtacaataaacttaggaggcttttcagttgacaaagccacctcacaccattcttcaccttccacttcatcttacctttcattatcatggacctagtagccatctaccctctatttcttccagagacaggatccaac

SEQ ID NO: 887310 - DNA, 646 bp, Homo sapiens
aatcaatgcttccaagaaaacaatgtgtataagaaatgactaaagacccttgggaaaagtgaggagcccatgtctagagaaggtgtctggggctaagcaagccttctgcttccatcgctggggatagagcatctcctgccccagtggttcctgaaggcacctgatcccactgtggcccttagtgagatattctcagtcaatagaggtccacttctgacaggcacaggctcccgagttatgactccctggatttacttccctactgagtaagtaagtttgaaatattatctgactatatagatatatatttaccatcaatactttttaatatttgccatgtcttttacctgtttcttcgcttaagatttttccttctcattccctcctgcctgttttttcttcaaaatgttttgttttgtattacaggcttgacttctccctttagctctttctagagtttaagcatggttttctgaagctccgttgcaaatttctctgttaaytgtggttgccagactaagacttctggttagtggcctttgctaactctctatcagaagcttgtgcatttcctaacatgttggtaattttttactgttatcatatcttcagcagtgattgttctttacaagagcccacactgtgc

SEQ ID NO: 887311 - DNA, 650 bp, Homo sapiens
ccttagaattataataattattattttatttcctccttcccagagtctgtgcccctcccccagatcctggctgagtcatcatccattacaccaggctggtgcaacatcaccatggagtgaagggttccagggaccacagatgacctgaacgtgacctgagagagccagggcctccccaggagctggagcagatagggacactaggaccagcctccaacccatggattctggctgtgagcctgcccccgagccagttcaatgccagcctcacttgtgtggtcagcaactaygtggaccagaaaactgccaccaaaaaccttggggaagtatgttgggctcaaaaatgtgccaagcaaggtgaatatactcagcttagaagacacttcttttcctggagactgggggaaggggagttgtgctgaccatctcatgccaaccttgccacctctcgacaataaatgccagctgggaagacccaccaatagtaaaaatttgcatatgccccaggaaactacccggggaaggaatggaatcaggggttttaggaagagaaaagagcagctatactaggcacttacctctgctttgctctgaatcctacttgaacagccactgagtgtgtgaggagtcatatttgtagcaagtgattt

SEQ ID NO: 887312 - DNA, 637 bp, Homo sapiens
tgacagaacaattcaataggatgaaattagaaatcaataatgttaagaagtttgggaaaatcacaaatctgtgaaaattttaaaaggtactcttcaacaaccaatgtgtcaaagaagaaatcacagtggaattagaaaacmcttttaagattttttaaaaaaccttgaaaatacaacataccttataccataaacaaaaattaattcaaaatgtatcaaagactagattgtaagagctaaaactaaaaaactctaagaagaacatagctgaaaactttcatgaatgaaattatttgtttattaggcagtagtttcttagatatgatgtctaaaacgcaaacaaccaaactaaaaacagataaattggacttcaacaaaactaaaaacttatatgcggcaaagaacattatcaagaaagtgaacgatgacccaggaaatggaacaaaatatttgcaaatcatataccttataagagtctactatccagaaaatataaagagctcttatacctaaatgataagaacataaataactcaatattttttaatgagcaaataatttgaatagacatatctcaaatgaggtgaaaaaatatttcacatcattagctattaaagaaatgaaaatcaaagtcaca

SEQ ID NO: 887313 - DNA, 680 bp, Homo sapiens
gagcacacagtaagaaggcagccatctgcaagccagagagacctcaccagaacccaaccatgctggctccctgatcttggatgtccaacccccagtattgtgaaaaaataaatttctgttgtttaacctattcagtctatggtgttctgtcatggcagcctgagcagactaagacaccaacctaccttatcactcatgacaaatgacagaacctcccatttttcagagaaaaatgaacagtagaaagtaatgtcytcaagttcctaccagcacacttcccactgacccgcctttatattcatctgtcctaactctctcctgtccccacacaaagcaatgtgctcctgttatctaaagtgagtgccttctcctgtggttcaagtcccttttcctcccactgtttcaggaacactgatctctgatgcagctcccctttctctggtgtgttccatggaccctgctcactcctttgctacagcccttaaacattctcaggactctcccctctcagcatccccttaacctcaccctgcaactatctcctgtttcttcatcttccatgtcacagctagacttctacacttgctccaagacactgaatcctcggacttcctccaccagcaagtacccctgagaactccaccaggtgaccaggaacctcccagcatttggcactgttg

SEQ ID NO: 887314 - DNA, 579 bp, Homo sapiens
tgttggttctagaaggtttatctatgtagataaaacatgttatctacagataacaataggattttctccactttccaatctgtataactttgtctctttttcttgccttactgcacttaatagaacttgaagtacaattttaaatagaagtggtgagatggggtatttttattgtctcattcatttctactcctatctttactatttcctttcttctacgttatctgggtttttacttttacttttctctctattcagaatgtgcaaatttaaatttctaatgagacatatcttcttatctaatgtaagcctttaatcctaccaatttccctttaagcactttttcagcttcatcccactaattttatacattatattttcatttkcgtttagttcagctatgttgtaacttcctttcagactccctctttgacccattgaatgcttagagatatcttatataatttctaagtgtttggagatgtttctgttatctttctgttagaaagttgtagtctaattccattacaatcagagaatatggcttacattatatttgtcacatttgttttatgaccc

SEQ ID NO: 887315 - DNA, 608 bp, Homo sapiens
acccacctcaatgaattgctttgatgattaaattagtgtctgtatatatatcaatatttacaaattacatccaacaaatatacaaacaccagaacttagttaaagacactgtagtgtcattaaaacaaacatctattttattatttttatcattatcatcataattatattcagaaacatgaaaatcagctttagtagattgttggggataaaaacagagttggaatgaagaaaatgtgcatatgagatatgagataaagaagtagagatgataaatgttggtcacttattccagaagactgaccacagaaaagtggagaaacagactgtgaggaacttcaaatgcaaatagggttgtttttctattgtctcatggtttttctaacatggagagggttaaacacatgcaaatggtgtttgcaagaagccagtggaggtaagaacgttttttmtaggacagaggcaggtgtgcacaggatcaagagactgaagagaatcccccacagtcaggccagggaggctcttccatggtctcagggcacagtactgagtgaggagctggtgcaggtaagggtgtggttcagctggtggcaagacaagggaattct

SEQ ID NO: 887316 - DNA, 623 bp, Homo sapiens
ctgcagacttctggagctttcgatctgttttcctcctgtctctctggtactgtcctacaaattctagctgcttcagtaaaacagaactgttggtctctgtcacttcaagtcagcaaggcctcaagccagaagccaggctctttctaaactcccaagtccatgcacagcttagtggtaaactggtgcaatatctgaaaaccactgwtttgtccttttttctcattgtttaaaatgggaagataaatccagtccctgttagtccgttttggccacaataagctgaattgtttcttgaagttctacttcacttctttaatcctattcagaccccatttcaagacccactaacaaattgagatcttttgttagaaaaatacctctctaggtaactgcaacctatggtccactttggctttctgaggtgggagctctatatcccagtatcagggaaatcacttcaaaatcacttcagaagttcaagaggaatttctgagatctccttcaccaggctgggggctataacctgctactctcacctcagaaagctaaagcagagacacattggacataaactgatccatctttctaaagacatcgcttcaaccaatcttcttatttttttc

SEQ ID NO: 887317 - DNA, 664 bp, Homo sapiens
gcttgatggggagagcactgaatctataaattactttgggcagtatggccattttcacgattttgattctttctatctatgagcatggaatgtttttccatttgtttgtgtcctctcttatttccttgagcagtggtttgtagttctccttgaagaggtccttcacatcccttgtaagttgtattcctaggtattttattctcttagtagcaattatgaatgggagttcacgcattatttggctctctgcttgtctattattggtgtataggaatgcttgtcatttttgcacattgattttgtatcctgagactttgcagaagttgcttatcagcttaagaagattttgggctgagatgatgaggttttctaaatatacaatcatgttatctgcaaacagagacaatttgacttcctctcttcctattcaaatactctttatttctttctcttgcctgattgccctgggccagccacttccaatactatgttgaataggagtggtgagagagggcatacttgtctcrtgccagttttctaaggaaatgtctattcagctcttttgcccactttttttgttaggttatttgatttttttttcctattgagttgttttagcttatgcattctagttattagtcccttctcagatgtgtagtttgca

SEQ ID NO: 887318 - DNA, 620 bp, Homo sapiens
caacaatggagctgccaatcaaaagtggcattacatgaaaaatataaaagcacttgtggcctttcatagcactgccttggataaggaaattacatcagcaaattatgctggtgtctgtacatcatctgtgattaaagaagaaaacattgatcaaccagtaagtggttccttcctctcaaagataaaagaaaaatagggtaaaagagagtaatttaataaaatgagaaaatttttttccctagaaaactttatgttcmtacaagttgaatgctgatttttgagtgaaatcacttagactctgattctggtaggaaagaatgaaggaaaattgtgagagaaaaagaattaggtagtttatattaatctaatgtacttaaaatttttataattgaaattttcatacatattctaaagtagagagactagggaaataagtctttatttatccatcattcatatttaactattatctaggttttgccatgtttgccaaccccagacattatattacttcacctccgtatgaatcacatacttccaaaaattttggacattttctgacatactcatcatgccattctcacagctaacaagattaacaataattctttggccatcta

SEQ ID NO: 887319 - DNA, 425 bp, Homo sapiens
acacatatatgcacagatatagaaaaaagactagaatgattttattaggtggccatattatgggagacatttatttttctttcttgcatgttttcctatgtgttctatattttttacggtaagtccagatttttttaataaggaaaagttgtatgatagggaagctgatattcctctgagagaagtactaatagaatgtgataaatgtaaaattagcagtgaaggcaggaatctcagctgagaaaagtggagcacagtacccacctagggtggcagacaaggctctacagaggaatcaatcaggaactctgatggaacttgagaaatggagaagattcaacaccttaagcagaaaaatsgttagcaaggattagggacacccatgtaaatataggtgttggaattcataaagcgtattaaatagg

SEQ ID NO: 887320 - DNA, 703 bp, Homo sapiens; identical to SEQ ID NO: 870081

SEQ ID NO: 887321 - DNA, 767 bp, Homo sapiens
ttcctgcagtttttagtttgtgggtattcctacattttttattggttctcagaaccttgcttatatgtgctaggtaaacccttctggagtgcaccttctgcttcccgccaggactctaactggcatgtagcatacttgtggggcttatggtccccacttcccaggactcaccagcaatgcctagggactagggaatatccacaagaagccaccacccattaaaaggggccaaagtctycattagccatatggagacccccgtttcttgcatgtattcctttataactattttaaaaatatttttgttgccttatttttctcttgggcataaagcttgaggtgttcaaaaaagcaagatgggcattctgtgaaattactttctttacaaaattatctaaagggtaacggcaaaagaattttatcaaacaatcttattgcctcctcaggcagcccattttctcattaatttagggttctggttgaaagcagggacccggacttcctggatctgaatctgagtcctgctacatttatcagttctgcattcttgggcaactggctttgcctccttttgcctcagtatcctatgataaatgggaataataatattctccccctcagtgggttgttgtgaacattcagtgaactaagacatgaaaagtggcttagatctgtgtctggctcctagcaagtgcaatccaaattaggattttagggaatggagtaggaactctactataagccaggtccaatcagtggctgaagtg

SEQ ID NO: 887322 - DNA, 767 bp, Homo sapiens
ttcctgcagtttttagtttgtgggtattcctacattttttattggttctcagaaccttgcttatatgtgctaggtaaacccttctggagtgcaccttctgcttcccgccaggactctaactggcatgtagcatacttgtggggcttatggtccccacttcccaggactcaccagcaatgcctagggactagggaatatccacaagaagccaccacccattaaaaggggccaaagtcttcattagccatatggagacccccgtttcttgcatgtattcctttataactattttaaaaatatttttgttgccttatttttctcttgggcataaagcttgaggtgttcaaaaaagcaagatgggcattctgtgaaattactttctttacaaaattatctaaagggtaacggcaaaagaattttatcaaacaatcttattgcctcctcaggcagcccattttctcattaatttagggttctggttgaaagcagggacccggacttcctggatctgaatctgagtcctgctacatttatcagttctgcattcttgggcaacyggctttgcctccttttgcctcagtatcctatgataaatgggaataataatattctccccctcagtgggttgttgtgaacattcagtgaactaagacatgaaaagtggcttagatctgtgtctggctcctagcaagtgcaatccaaattaggattttagggaatggagtaggaactctactataagccaggtccaatcagtggctgaagtg

SEQ ID NO: 887323 - DNA, 560 bp, Homo sapiens
aatgactatgtaaattctagagaaggctatttacaagttaatatttattcccctttctatcatttattgcccctcaatagaattattcttctcccacctctcataactggtcttaccaggatacaagctcccattctttctttaacctcaagataaaatataagtttctgtaacctattggaagaggggtcttcattctaaaggcattttagaatgccttcattctaaaggcatttatttaatgcccctactaaaggcattaaataaatttgtatttcttttctcctattaatcaatcttcctcacrtcagtgatttttcagtgaatctttaggggccaaaagcctatggctcctacaaccacaaaaggtagcacagtgaaatgatcatttaggatatgtctccttagcatggtctcctgggggctttcttcagcccctctgggctcttctctggacaatagctggtcctggaagacagaaggcccttcagataactatatactacaatagaagcttggggtttatctgtagaggtcttttactatgattcttgaataat

SEQ ID NO: 887324 - DNA, 573 bp, Homo sapiens
tgctggtgagcttatatgatcttttggaggttttaaagaaccttgttttgtcatatttctggttccttctcatttgggtagactatgtcagagagaagatctggaactcaagggctgctgttcagattttttttatctcatggggtgctctcttsatgtgatgttctcctccccaccctaggaatggggcttcctgagagccaaactgtagtgattagttttgctcttctgggtctcaccacccagtggagctaccaggctccaggttggtactggggagtttctacaaagagtcctgtgacatgatccgtcttcagatcttgtgaccctggataccagcacctgctccagtggaggtagcagaggagtgatgtggactctgtgagggtctttggttgtatttttgtttactgtgctagttttgtattagttggcctccagccagaaggtgatactttcaagagcacatcagctgcagtcttatagggaggatgcaaacttgccctagggacacctggttaagtatccaggattctcatgtggcgggcagggtagggccatagagctcccaag

SEQ ID NO: 887325 - DNA, 682 bp, Homo sapiens
cttttacattaggtatatctcttaatgttatccctcccccttcctcccacccccaacaggccctggtgtgtgatgttccccttcctgtgtccaagtgttctcattgtttaattcccacctatgagttagaacatgcagtgtttggttttttgtccttgtgatagtttgctgagaatgatgatttccagcttaatccatgtccctacaaaggacatgaactcatccttttttatggctgcatagtattccatggtgtatatgtgccacattttcttaattcagtctatcattgatggacatttgggttggttccaagtctttgctattgtaaatagtgccgcaataaacatacatgtgcatgtgtctttatagcagcatgatttataatcctttgggtacatacccagtatgtggtattggaaccactctctccttcactcatggcagtgatctgaagtaacaggtgtacattggacaactgtgaagtaaattttaggcttatakttcctgggaggattcagattcactcaacttctgccctcagggacaaggcacaaggtcctaagccagtgaaatactattttctaaatagctctagattggggcctgagtggcagacatgtggaatgattttcatttgcagatgttgctcagcagtttaagcaacctccatcagtcttgc

SEQ ID NO: 887326 - DNA, 650 bp, Homo sapiens
acacacataggctcaagataaagggatggaggaaaatttaccaagcaaatggaaagcaaagcaaaacaaaacaaaacaaagatacacaacaaaaacaaaaacagaaacaggggttgcaatcctagtctctgacaaaacagactttaagccaacaaagaccaaaaaaggcaaagaagggaattatataatggtaaagggatcaatgcaacaagaagagctaactatcctaaatatatatgcacccaatacaggagcacccagattcataaaacaagttcttagagacctacaaagagacttagactcctacacaataatagttggaaactttaaygccccaatgtcagtattagacagatcaatgagacagaaaattaacaaggatattcaggactagaactcaactctggatcaagtggacttaatagacatctacagaactctccaccccaaatcaacagaatatgtattcttagagccacatggcacttattctaaaatcaaccacataattggaagtaaaacactcctcagcaaatgcaaaagaacagaaatcataacaaacagtctcttaggccatagtgcaatcaaattagaactcaggattaaaaaactcactcaaaaccacacagctacatggaaggtgaaca

SEQ ID NO: 887327 - DNA, 508 bp, Homo sapiens
gtcttcattctgcctcttccctctccccagagtgagtggttggttcatctctcttttttttttcttgcatttttttttttttttttttggagacagagtctcactctatcactcaggctggagtgcagtggtgccatcacagctcatgcaacctccgcctcctgggttcaaggtattctctcacctcagcctcctgagtagctgggactacaggtgtgcaccmccattcccagctaatttttgtatttttagtagagacggggttttgccatgttggccaagctggtctcaaactcctggtctcaagtgatctgcctgccttggcctctcaaagtgttgggattacaggtgtgggccaccatacctagctggttggttcatctcttaagaatgaccaagttgaatgattcttcctagtgtgtgtagctgttccttgatgggggctcaggaacaacaggaatgactctttctgggttgacaaagccagacaatcctgtgccttcagtaa

SEQ ID NO: 887328 - DNA, 536 bp, Homo sapiens
gggactacccatgatgccatcactgggctaattacaaattttttcatagagatggggtctcactatactgaccaggctaatctcaaacttctgggctcaagcaatcctcccgtgtcaaactcccaagttgctgggattacagatgtgagctactgtgcctggtctggagacatttttgatcatcataactgagaggatgttactgaaatctaatggatagaggccaggcatgctgctaaaccccctacaatgcacagaacagtccccygtaacaataataatctggttccaaaagtcagtgatgccacagttgagaaactctgctctagacaatagaggttaagatcttggtatcagggtttatagatctaagtgcatgttcttcccctgctagatcttgaagactcggcttcctcatctgaaaacaaagaacatattggtatccatctcacaaggttgttaaaagggctttgtgaggtaatagaggtggaggtaagatgcttagcacagtacctagtagagagtaagtgcccata

SEQ ID NO: 887329 - DNA, 536 bp, Homo sapiens
gggactacccatgatgccatcactgggctaattacaaattttttcatagagatggggtctcactatactgaccaggctaatctcaaacttctgggctcaagcaatcctcccgtgtcaaactcccaagttgctgggattacagatgtgagctactgtgcctggtctggagacatttttgatcatcataactgagaggatgttactgaaatctaatggatagaggccaggcatgctgctaaaccccctacaatgcacagaacagtcccccgtaacaataataatctggttccaaaagtcagtgatgccacagttgagaaactctgctctagacaatagaggttaagatcttggtatcagggtttatagatctaagtgcatgytcttcccctgctagatcttgaagactcggcttcctcatctgaaaacaaagaacatattggtatccatctcacaaggttgttaaaagggctttgtgaggtaatagaggtggaggtaagatgcttagcacagtacctagtagagagtaagtgcccata

SEQ ID NO: 887330 - DNA, 597 bp, Homo sapiens
tcatcattgatatagaaagtatagagtcagactagtttgaatattggctctagcacttgttaattgcataaactgggacattgtcttatgttgggctctttctaaagtagactcggagaaaaagttttgaaggcaagtcatttacttgggaagtgattctaagaaacactggtggctggatgtggtggctcatgcctgcaatcccagcrctttgggaggctgaggtgggcggattacaaggtcaggagtttgagaccagcctgaccaacatggtgaaaccccgtctctactaaaaatacaaaaattagccgggactggttgcacgcacctataatcccagctacttgggaggctgaggcaggagaatcgcttgaacctgggaggtggaggttgcagtgagccgagattgcaccattgcactccagcctgggtgacagagtgagactctgtccaaaaaaaaaaaaaaaaaaaagaagcactggtatgggggtgtgtggaagtgagacaggaagggaaggaagcctatagagatgtgttaatgagccattcactcctgtggcaactggggctcactcctgttggggaactctgggaggc

SEQ ID NO: 887331 - DNA, 671 bp, Homo sapiens
caaaactttaaaaatacacaaaacataaataatcacaaccagtgatgaactattccatacacaacatccgtaaaggcatgcttgagttaggggagagatcttaattgggaccaaaataacaaccacaaaaaccagtcatggtagaaaaggaaataatgcagctatatcaataacaacaataacattttccatttgtatagtcctttctacattactgaaccctctgtatatgagtctcagcatagtgagggcagaccctccatccaggttttctggggcatagcctaagtcattcttttacctacaggatctaacgtaataattcccataragagaagacggcttcttctcagctcattgttgaagcttcactatttagatttatattcagccaatatttactaagtgctattatggactaaattgtgtacccctcccctggcaacaaattcatatgttgaagccccaactcctgatatgtatttggaggaagagacaccaaggatgcacacatagagaaaaggccatgtgaggatacagcaagaaggtggccatctgcaagccaaggagagagaccttaggtgcaatcgatctgccagcatcttgatcttggacttccagatccaagcatttctcagaactatcaaaaatacatttccgttaagtcatcc

SEQ ID NO: 887332 - DNA, 634 bp, Homo sapiens
cagttgattattgggtgcacacaggtttaaaaaggctaaatattgaactactccaaaaagaatcttaggaaagtcatttccctattcgagaaacctttgaagactaaaatatgttctttaacctctgaaagtgagagagtctaaagctgatgtgaacctaggctgtgcacgtgaatctcctggagagttttagaaaacctcatgcctgtatccactaccctatagattctgatttcagtggcctggcctgggtatttggatttttaaagactctccaggagagtctcatgcacagtcaagttggaaattttgaaaccttgatactcaaagtatggtcgatctgtaggccagcagcatcagcatccctgagtacttgttaaaaatacggaatttcaccccrgattcacggaatcaatctgtgttttaacaagatccccaggtgattcaatggtgcagccaaggttgagaccatctagaacctagaaaataatctgagaagctgtccttatgaaagacaccacgccgtcttccttatttccatttaaaggtggtttttgcctctccttccccatatctagttaggtatcaagttctgttgattttcctttcaaatcaaatctccctgtgtctcaca

SEQ ID NO: 887333 - DNA, 634 bp, Homo sapiens
cagttgattattgggtgcacacaggtttaaaaaggctaaatattgaactactccaaaaagaatcttaggaaagtcatttccctattcgagaaacctttgaagactaaaatatgttctttaacctctgaaagtgagagagtctaaagctgatgtgaacctaggctgtgcacgtgaatctcctggagagttttagaaaacctcatgcctgtatccactaccctatagattctgatttcagtggcctggcctgggtatttggatttttaaagactctccaggagagtctcatgcacagtcaagttggaaattttgaaaccttgatactcaaagtatggtcgatctgtaggccagcagcatcagcatccctgagtacttgttaaaaatacggaatttcaccccagattcacggaatcaatctstgttttaacaagatccccaggtgattcaatggtgcagccaaggttgagaccatctagaacctagaaaataatctgagaagctgtccttatgaaagacaccacgccgtcttccttatttccatttaaaggtggtttttgcctctccttccccatatctagttaggtatcaagttctgttgattttcctttcaaatcaaatctccctgtgtctcaca

SEQ ID NO: 887334 - DNA, 632 bp, Homo sapiens
ctaaaatcataccaaactcactctcagaccacagtacaacacaaatagaaatcaataccaagaaaatcactcaaaaccatacaagtaaataaaaattaaacaacctgctcctgaatgacttttgggtaagcaataaaattaaggtagaaatcaagaaattctttgaaattaataagaataacaatgatacaacataccagaatctctgggacacagataaagaatgttatgaggaaagttcatagtgctaaaggcccacatcaaaaagttagaaaggtctcaatttaacaacctaatgtcacatctagaggaaccagaaaaataagagcaaaccaactgaaagctagtgaaagaaaagaartaaccaaaatcaaggcttaactgaaggaaactgagatgtcaaaaaccatacaaaagatcaacaaatccaggatatgaatcttttaaagaataaataagattgacaggctgctagctagactaataaagaataaaagaggctgggcatggtggctcatgcatgtaatcccagcactttgggaggccgaggtgggtggatcacaagatcaggagttcaagaccagtctagccaatatggtgaaaccccatctctactaaaaatacaaaaatta

SEQ ID NO: 887335 - DNA, 632 bp, Homo sapiens
ctaaaatcataccaaactcactctcagaccacagtacaacacaaatagaaatcaataccaagaaaatcactcaaaaccatacaagtaaataaaaattaaacaacctgctcctgaatgacttttgggtaagcaataaaattaaggtagaaatcaagaaattctttgaaattaataagaataacaatgatacaacataccagaatctctgggacacagataaagaatgttatgaggaaagttcatagtgctaaaggcccacatcaaaaagttagaaaggtctcaatttaacaacctaatgtcacatctagaggaaccagaaaaataagagcaaaccaactgaaagctagtgaaagaaaagaaataaycaaaatcaaggcttaactgaaggaaactgagatgtcaaaaaccatacaaaagatcaacaaatccaggatatgaatcttttaaagaataaataagattgacaggctgctagctagactaataaagaataaaagaggctgggcatggtggctcatgcatgtaatcccagcactttgggaggccgaggtgggtggatcacaagatcaggagttcaagaccagtctagccaatatggtgaaaccccatctctactaaaaatacaaaaatta

SEQ ID NO: 887336 - DNA, 534 bp, Homo sapiens
taacaaacctttacgtgcacctctgaacctaaaataaaagttaggaaaaaaataaatatttatctatcaaaatacgtataaaaccttcatggggaaaaacgtaagactttagtgaaatatataccaaaaaatctaaataaaaggaatgattatagcatgttcatagataggatgttgaaattgcaactactctgtaactccagcaattttatttccaggcatataccttagaagaattatcagaaatgaacactgagagatgatttagaatattcattgtagaactgtatataaaggaaaaataaaaatcaagtagcttaactgtcaatcaatagaagaaatgtrtgtatgtgtgtatatatacatatatatgtgccacatatatataacagtatttaaataaaatgggaaaatataccacaatcaaaacatatgcacaaatatgtgtgaatttaaaacaacgttgattcagaaatgaagattgggaagaaatatacagagtatgatgctgtgtaaaattttaaaacaaagaaa

SEQ ID NO: 887337 - DNA, 657 bp, Homo sapiens
gaattcagccaaatccttaatcaaagggtttatagatattatgcatgttacagtctacaacagaaaagttactttttccaaaggttttatccacttttggggtcatacttgggcattttcagccacgtttgacttacagaaaagagaactacaccaattgtcacaatattctggtacttggagagagctttaaactacattctggatcaaatggaccaaatagagatttgcagaacatttcatccaacaactgcagaatacccattcttttcaattgcacatggagcattcaccaggatagattatgtgttgagccacgaaacaactcctaacaaatttaagaagatcaaaatcatatcgagtatctttttttaccacaacggtataaaactagaaatcagtaacaggaggaacttcagaaaatttacaaatacatgaaattacaacagcatgcycccaaacaatcactgggtcaatgaaaagtttaaagggaaaatttaaaaaatttttgagacaaatgaaactggagacacaacatactaaaacctatggaatataacaaaagcagttgtaagaggggggcttctagcaattaacatctatattataaaagaatgatttcaaataagcaaactaacactgcacctcaggaaatta

SEQ ID NO: 887338 - DNA, 559 bp, Homo sapiens
ccagatgtacagccttctagattcagttatcaccaattaagctcaaaatgtaagaaattgaatctggttttctcagaacttgcttctgcttcccgaaagccaagtaagtgattaaacaaacagttcagttaattgaggagtttgagaaactctgtttctgttctgttccatgtatggaaattcctctcttgccctcttgtagctttacattttcatcaaaataacatcaaaaaggatactataaattaaaatttccaaacttttagctttttttgcttgtttacctgaagctccagtccttcccaattagaactttrtaacagtgggcactgcccctggacacattttcagatgtagtcttggtattcagaggactttggcaagaaagtggctgccagtgactattaagaggcataaccactttgcttggcacgatgggttataatgtgtctctggggtgctaggatagcctatcttgagtgggcgattaaagagtatgtgtcagtatttgtagaagggttgttcctaaagaactagagtgcatgccacatgggcacgt

SEQ ID NO: 887339 - DNA, 596 bp, Homo sapiens
ctgtggcatgtagcattttcctccgtactgacaagaaagcagacaagacactgctaattttttaaaatcacatgatacagtgacatatacagtaacagttatgctgtatctaggcttgaattatttttcaacattatttgacagctactagtttcttatctggctgctttctctaagttgttgggtttttttatttttatttttttattttattaatattatactttaagttttagggtacaagtacacaatgtgcaggtttgttacgtatgtatacatgtgtcatgttggtktgctgcacccagttgttggttttttttgtttgtttgttttaaacttacatctttgtgtcaacctggacttcctggactctgatctgaggctaaaatgatagttttatttttctcatttcctctggggacatggccttttaaatgtggcccccagccatgcagaaaagccacaaaagggtcatcagggcccattcttctcccagccctcccatttcttctgtacgttttccttttgatgtttactgttataatctccatctcaaaatctaccatggtttttgtggtgttccaggttgtcccgga

SEQ ID NO: 887340 - DNA, 684 bp, Homo sapiens
acaataaaatcttattttgtttgtgagaagcctaaagattatgctgaatcttagatcttgttaaacttacattcaataggtgtagcattttcgagggggcatgcagaagccttctgagaatgggggtactctgtttcttgatctacatgctggctataggagggtgttcatttgtgaaaagtcagtaagctgcacacttgtaagatatgcattttttctatatgtaaattatactgtagtaaaaattcaaaacataaaagagaaatcactagggtgaccatttaagtaatagacttaagtaacaggacttactgttatatacagggtatataaataggatatacaacttcaaaaccaggagaggaaataagtgaattagagaaacacacaccagatccaaaagaaaattaaaaagttaaaaggtcaagtaaaataaaaaaagaaaaaatgaaaagggccaaattttaaaaatacataaaagtgtatccaaatatatctgcagtcataatcaatatagatttgttaaatgacacaaatttacrgtctggatcttttcaaatgtgaagaaaatggtataataaatacttaaaacaaatgatgagataccataagaataccaactaaagaagagttagtgcaggtattaatagtaagcaaaatagactttctagacaaagcattaga

SEQ ID NO: 887341 - DNA, 676 bp, Homo sapiens
tcgcctcccaccatagggcggtttttctcctatctcagaattgaacaaatgtacaatcgggttttataccaagacattcagttcccggggcaggcaggagacagtggctttcctctatctcaactgcaagaggctttcctcttttactaatccacctcagcacagactctttacgggtgttgggctgggggacagtcaggtctttctcatcccacgaggccatatttcagactrtcacatagggagaaaccttgggcaatacccagctttcaagggcagaggtccctgtggctttccgcagtgcattgtgcccctggtttgttgagactagagactggtgatgacttttaccaagtatactgcttgtaaacatttttttaacaaggcacgtcctacacagccttagatcccttaaaccttaatttcatacagcacatgtttttatgagctccaggttgggtcaaagtggctggggcaaagtggttggggcaaagctacaaattaacaacatctcagcaaagcaattgtttaaagtacaggtctttttcaaaatggagtctcttatgtctttcctttctacatagccacagtaacagtctgatctctctttcttttccctatacttttacactgttggagggagtgcaaattaattcaaccattgtggaaggcagtg

SEQ ID NO: 887342 - DNA, 473 bp, Homo sapiens
ttgtctgaagcccagaaagttacccgcagcagctgcaaaagccacaagatcaggaaagtgaaaggaacatgaaacagaaaggacctgaatgggaaaaattagaaggcatgctgattctcacattttcaacatgtagcttttgtatgggtcgggggattttaagattctgtggattacagggcttaggtgatctagaatggaagtagagaaaataattttcttgtgttggaaggcagcaataaatcatcattttattgatrttgaaaaaaaccagagcttattgacaggatttaggtattattgaaatgcaagattaagggaaaaggtagtaaaagttgactctgagctgttttgttggagcaactaggtgggcggaatattatgtgtatggatgcaatattatgtaggtaataaatattacaataaataccatgtgaaaaataacactgaattaaaaagaggaaacttcttta

SEQ ID NO: 887343 - DNA, 590 bp, Homo sapiens
tcactggcttttagtttctcagtttttgaggtgaaggggttagccctgagtttctctgatatgctgtgattgtatgaaatgatggtgtggaaatcgtatgtgagcagttgtttgaaaatccagaggagagaaaggcttcctgcaagagagagcactggagttgggctttgaaagattttgaaggatttccacaggcagaagtgatatttccttactttttatttaatacagtgtttaacatatttcataatttaaaaggaaattctgtcattccccacaacagtgttaagtactatctgttcaaagtaccaacatatctttcttcagctctgaattacgcattccgtttctaaggagctcaaaacayaaagcccatgaaaaggtgctttaaggtttggaagcctggatgatgctccctatctcttcctccccactccccaaaccggaactgtctgggtcacagagaacatcctcagaggaaatcctgttttcccacttcctggtcagaggctgaactccaggaaaaggatggatttggggagagctctgtgtcctgcctcttcatgggaggtctggggccacaaaggggt

SEQ ID NO: 887344 - DNA, 555 bp, Homo sapiens
gccttcctgatagaactatgctcagaggtcttttattatgtatcttgctcctaccctttccagtcctattgctcaatggcctcagtaaacctggtgcctaatcctctgatgatgcagcatctttctgttttattttaaattctggttacatctgtacttttcctgctttttttctggccagtctcacagctgcctcttatctgccgtgaatgctgacaatcatgcttacctagatayttgcttttctgactggtggctatttaatgtcctctgctgatctgacttgaacttactaaccctgagaatgattgacttccaaacacacacacaggaagttgaagaggtttctggggaacttcgtcatttaatcttacatgacttggattcttgactctttctctattccttttttttttttttaaataggctttccaaatatcttgaataaatacctgccagggctgatagtaactaccaaactttatcctaaatgtacataacatgacaagcgcttatgtggatgggtatattattcctaaatttgctttatacatt

SEQ ID NO: 887345 - DNA, 652 bp, Homo sapiens
gttagaggaagaaaagagcttatgactgcatggtgaaattaaaaatgatgacattggagctggacctcagagtacgtgtaggctttcaatgtttgggaatggtgaaaaaatacatcagtgcagagagaatggcataagctctttacccatattatgtcatttaatctttaaaattatacattaactaatcattaacttattaacttatgaattaacatattcactaacttgccaaaggtcatccaattaagaaatgacaaaagcaacatttggtcttagtttttaaaattaactttgatargaaaaattaaaaggaaaagcaaaaacaattaaaacaagagaagctggattgcatcatatctcaccaagaagatttaacattctgaattttccttcataggaatattgatatcttattgaagtgaagtgctgaaaattatgcttcagaaagattaatattggtgaaggatccattaaaaatggatttaagaacatgtactgtgcttcccaatgagacccctggaaagatacagaaggcacacctgggagagaacaataaaaaggcaaagcctttaggggagctgtgttttggggtgcaggactcagccaacctatgacaacctcagagtgaacttgagaaataaacatccag

SEQ ID NO: 887346 - DNA, 654 bp, Homo sapiens
aaggacatgattttgttcattttatggctgcatagtattccatggtgtataggtaccacattttctttatccagtctatcattgatgggaatttaggttgattgcatgtctttgctattgtgaatagtgctgccatgaacatatatgggcatttatctttatgctagaatgatttctattcctttggatatatacccggtaatgggattgctgggtccaatggtagttttgtctttaggtctatgaygaattccagtggctgaactaatttgactctctccaacagtgtacaaatcttcctttttctccacaacctcactctcatctattattttttgactttttaataaaagccattctgactagtatgaaatggcctcacattgtggttttgatttgcatttctccaatgatcagtgatgttgtgctttttctcacatgtttgttggccatatatttatcttcttttaaaaagtgtgttcatatctcttacccactttttaatggggttgtttgtttttttcttataaatatgtttaagtttcttacagatcctggatattagaccgttgttggatgaatagtttgtaaaaattttatcccattttgttggttgtctgtttactatgttgatagtttctttcactgtgcaga

SEQ ID NO: 887347 - DNA, 654 bp, Homo sapiens
aaggacatgattttgttcattttatggctgcatagtattccatggtgtataggtaccacattttctttatccagtctatcattgatgggaatttaggttgattgcatgtctttgctattgtgaatagtgctgccatgaacatatatgggcatttatctttatgctagaatgatttctattcctttggatatatacccggtaatgggattgctgggtccaatggtagttttgtctttaggtctatgacgaattccartggctgaactaatttgactctctccaacagtgtacaaatcttcctttttctccacaacctcactctcatctattattttttgactttttaataaaagccattctgactagtatgaaatggcctcacattgtggttttgatttgcatttctccaatgatcagtgatgttgtgctttttctcacatgtttgttggccatatatttatcttcttttaaaaagtgtgttcatatctcttacccactttttaatggggttgtttgtttttttcttataaatatgtttaagtttcttacagatcctggatattagaccgttgttggatgaatagtttgtaaaaattttatcccattttgttggttgtctgtttactatgttgatagtttctttcactgtgcaga

SEQ ID NO: 887348 - DNA, 654 bp, Homo sapiens
aaggacatgattttgttcattttatggctgcatagtattccatggtgtataggtaccacattttctttatccagtctatcattgatgggaatttaggttgattgcatgtctttgctattgtgaatagtgctgccatgaacatatatgggcatttatctttatgctagaatgatttctattcctttggatatatacccggtaatgggattgctgggtccaatggtagttttgtctttaggtctatgacgaattccagtggctgaactaatttgactctctccaacagtgtacaaatcttcctttttctccacaacctcactmtcatctattattttttgactttttaataaaagccattctgactagtatgaaatggcctcacattgtggttttgatttgcatttctccaatgatcagtgatgttgtgctttttctcacatgtttgttggccatatatttatcttcttttaaaaagtgtgttcatatctcttacccactttttaatggggttgtttgtttttttcttataaatatgtttaagtttcttacagatcctggatattagaccgttgttggatgaatagtttgtaaaaattttatcccattttgttggttgtctgtttactatgttgatagtttctttcactgtgcaga

SEQ ID NO: 887349 - DNA, 672 bp, Homo sapiens
tgaacatgttcactttaaaatgcctgttagacagcagtacatgtaggtggtctggagttgaggaaggaagtctggcagagctagacactgggaagtttaacttcgagaatgatgagatcccttaactaggatgtatcctagtgagtgggtgtagagagaagggcccacctggggtgcttsagtgtttataggtggatgagttgcagtgagaaaaggagactgagaacaagtggtcagagggacaccaggtgagtgaggcccactttaatcaacagcttgcttagtgccctgcacacgcatatcttaacactttcatgggaatgattttgtatattatttttcccacataagaacttattaagggtacagattatcagggaatctccacctcttggtgcagtacctgacatagtaggaactcagatatttgtttgaatgaatgacctaggaggtcacaataataataataatttttttttacaagagggagggcagggcatttggtgagtagataagtgtggcagagtgatgttacctatttaccatgtgaaaatggaagcaaggtaattactggtgataattattattttcagatggggtctccctctgttgccccacatggaatgcagtggcacaataacgtttcactgcagccttgacgtgggctcaagt

SEQ ID NO: 887350 - DNA, 672 bp, Homo sapiens
tgaacatgttcactttaaaatgcctgttagacagcagtacatgtaggtggtctggagttgaggaaggaagtctggcagagctagacactgggaagtttaacttcgagaatgatgagatcccttaactaggatgtatcctagtgagtgggtgtagagagaagggcccacctggggtgcttcagtgtttataggtggatgagttgcagtgagaaaaggagactgagaacaagtggtcagagggacaccaggtgagtgaggcccactttaatcaacagcttgcttagtgccctgcacacgcatatcttaacactttcatgggaatgattttgtatrttatttttcccacataagaacttattaagggtacagattatcagggaatctccacctcttggtgcagtacctgacatagtaggaactcagatatttgtttgaatgaatgacctaggaggtcacaataataataataatttttttttacaagagggagggcagggcatttggtgagtagataagtgtggcagagtgatgttacctatttaccatgtgaaaatggaagcaaggtaattactggtgataattattattttcagatggggtctccctctgttgccccacatggaatgcagtggcacaataacgtttcactgcagccttgacgtgggctcaagt

SEQ ID NO: 887351 - DNA, 672 bp, Homo sapiens
tgaacatgttcactttaaaatgcctgttagacagcagtacatgtaggtggtctggagttgaggaaggaagtctggcagagctagacactgggaagtttaacttcgagaatgatgagatcccttaactaggatgtatcctagtgagtgggtgtagagagaagggcccacctggggtgcttcagtgtttataggtggatgagttgcagtgagaaaaggagactgagaacaagtggtcagagggacaccaggtgagtgaggcccactttaatcaacagcttgcttagtgccctgcacacgcatatcttaacactttcatgggaatgattttgtatattatttttcccacataagaacttattaagggtacagattatcagggaatctccacctcttggtgcagtacctgacatagtaggaactcagatatttgtttgaatgaatgacctaggaggtcacaataataataataatttttttttacaagagggarggcagggcatttggtgagtagataagtgtggcagagtgatgttacctatttaccatgtgaaaatggaagcaaggtaattactggtgataattattattttcagatggggtctccctctgttgccccacatggaatgcagtggcacaataacgtttcactgcagccttgacgtgggctcaagt

SEQ ID NO: 887352 - DNA, 645 bp, Homo sapiens
atgtgtctctgcacgtgagatgggtttcctgaatacagcacactgatgggtcttgactctttatccaatttgccagtctgtgtcctttaattggagcatttagcccatttacagttaaggttaatattgttatttgtgaatttgatcctgtcatgatattagctggtcgttttgctcgttagttgatgcagttccttcctagcctcgatggtctttacaatttggcatgtttttgcagtgactggtactggttgttcctttccatgtttagtgcttccttcaggagctcttttarggcaggcctggtggtgacaaaatctctcagcatttgtttatctgtaaagtattttatttctccttcacttatgatgcttagtttggctggatatgaaattctgggttgaaaattcttttctttaagaatgttgaatattggcccccactgtcttctggcttgtagagtttctgccgagatcaactgtttgtctcatgggcttccctttgtgggtaacccgacctttctctctggctgttcttgacattttttccttcatttcaactttggtggatctgacaattatgtgtcttggagttgctcttctcatttagtatctttgtgacgttctctgtatttcctgaatttga

SEQ ID NO: 887353 - DNA, 615 bp, Homo sapiens
cgacattactgtaaataatttcaacattttatagacttaggtttaccaatctttttctttgtacttctaaatttcatgtcatgtctagaaaggattttgtcattcaaggttataggcagagttcacttatttttttcccaaatatatttgtgacactattatctatatttaaatatttgatcaataattttaacattttatatacttagatttaccaatcttttcctttgtacttctaagttttgtgtcatgtctaggaaggattttgtcattcaagataatagacagagttcacttaatttttttttccaaatgcatttatgacactrtttatatttaaatatttgatccatctataatttttttggtacgacaagtaataaagggacaaagattaattttgtccaaaagactagccatttgctccagctccatttttccctcactgatctgaaatgacactttattatatattaacaaataaatttttgtttttcttgtgaggtgatacatggaagtatttaaaagagaccagcacgtccttttccaaataccactgtacatatatttcgcctactccccaagtgagtcctttgcaatttttcccaaatatag

SEQ ID NO: 887354 - DNA, 531 bp, Homo sapiens
ttacctaagaggaccctatgaatgaatgttcctactcaggaactaggtcatgttctaagtctcttttgcccagttgtacatacgctatgctctggagtgattctgccatattgtcgggttctattctgggcgcctgttggacactgttctccatacaaaaattcaggacatttttctaaagccgaagcatctcctttttttttttttttttttttttttttggagacagagttttgcttttttgtccagtctggagtgcagtggcatgatctcagctcactgcaacctctgcccccgagggttcaagtgattctcccaccttagcctcccaaatagctgggaatataggcgctcgccaccacgcctggataatttttgtatttttagtagaratggggttttgccatgttggccaggctggtctcaaacccctgacctcaggtgatccacctacttcagcctcccagagtgctaggattacaggcatgagccaccatgcccagccaagcatatctacttctaaaagagcta

SEQ ID NO: 887355 - DNA, 571 bp, Homo sapiens
caggtgctggattgtctggaacattgtaaactctgggatttcctctccatgaaaacctggatggaaccctccccaaaagtaaggcaattgaattggggaaattgcatctgcatctggaaaaactctgttagccactgtgctggtggctgtgtgaccctgtytatgttggatcagagctgaggccttggcgtggtctctgtaagaggagtgaagaccacgccagagcccatgaagtttagagttccatgaatgtataatttaaggtaatatgtacttataaaggggggaaccagactttcagtttcatgtgacaaatccctcatatatcttaagaaacttagaaaaacaattcacatcccaggttattattattctcttttatattctttcagattggggctaatgaggatattacactttgtgtgtgtgtgtgtgtgtgtgtgtgattctcacacctaaatacctagtttctgatctttgtatgacagtctgtagtttaattaagcaattgttaatcataagtattcagtgttaatcataagtattcagttaatcataagtagtaatttat

SEQ ID NO: 887356 - DNA, 539 bp, Homo sapiens
gtgtggataattgaaagctgatgtgaaggctttggatttgagaagcacatttcctctgaaaagcccagagtatcacaaatacattaccacctttctcctcataacttttctgtcataagccattcatataaagtacctacgaatgttcccattaaacagatagagatatkaggactgaaggagttacctgatttggccaaggtcacacattgaatctgtgccaaagtgggctgagaactctggtttcttaattcccaccgtatgaaaacatgctgttccatgtaaaggggttattttctagctttgatgtctttacaatcaactggggtttctatttttcagcccacactctgaaacactggaaatactgagtttgaaatggtactgcaatttatcaccgtgcattgtcgtcagtctctttcttttacaggacaaaagggaatgggttgaaattgcagcaggggaaatactctgggttcggatgtggaagggaaggggagggaggcagtgtgagccagtgaagccaataacaccagagg

SEQ ID NO: 887357 - DNA, 546 bp, Homo sapiens
acattcagcatcataatgatctagggggggcttgttaaaatgcagattctggatctaaagaatcataattgggtttgggtttgaaaatcaggcattctagttggaggagagtgacagcaaacaatttaaaaacttgtgactaaaagactattaattcattgattcattcacctattcagtttttttttttgacaaacatggaacttatatctagaggaagacaaaaactctaaataattacaagttattaagtactacaaataaatgcctggggctgcaaagatacatggtgctaagggattacrtgtctgagggaggctagtatctaaggaggtctaatacaagggtaacttttacagtaagtcatattcaagttgtgaactgttgggtgaggaagccaagtggagagggtagaggtgggagtggacaaagaaacagttgatgaaacactatttcaggaagacgaaatagtgtgttcaaggtccagaggataaagagaacatggcaatgtttgaagatatcagaatggctgctgaggatagagag

SEQ ID NO: 887358 - DNA, 625 bp, Homo sapiens
ttaaggccaattttgcaaaaggccaacaagaatgtctcattgatatttttttgtttcctatacaatatttttattatagatgtggaaatgcaggcattttccacaactttcctcctagtcttgagttctctaaaaatttcctcaaatgatgtttctaaacagcaaagtatcccatcattagaatttttcagatttagaacctatgtaaaatggtaagacatttcattggcttgcaaaagtctctgatgtccgcattcttacttaatcgcatagagctgtgttctataattggagtattttatctagtgttttctctttgaggatttattgcattgaaaaaatttggtgatattgaaagaaatccaaagaacagaaacagagataattaaaggaatgaaaagtggaaactgtgagggaagattaaagacagctgtgatcatttagtttggaaagaggtaaaaatgatcttcagttataggaaagmtttaatatggaaaagaacagttagtctccattgatacaaacgatggattaagataatacgaactgaaacttgcagaaagacgaatagagagcaggctgttatagacaaccctgaagtcatttgaagtgaactgagtcctta

SEQ ID NO: 887359 - DNA, 650 bp, Homo sapiens
atgcatatacaattgtattaagaataatgataaaatgagaatctctcttgctcttataaaagcaccatgactagtttttacatatgaattcaaaatgattcggttgattcttaacatttcataacaccaacctgttctacacattcattttagcatatattacttttagtacgtgattgggagttttactggaaatgtttctgtcttccagtctctaacagctttaagcttatattctaatttcagtaatgaagtgagatacctattcctacctcaaaaacttccctttcacaaagactaaatttcmtcaaagattgagccttaaagaagcaacaagaaagtgcataaaaaatgcaaagctgattctttgcataatattaataggccctttgaagaaactgtagagtgaaaaagggatggtggtattatatcttgctaaagctgctccaaatcaaattatttctaaaattatacttaaaaactaaatttgatactgactttatgatacctatatcaaatattattttatcttgttttctcttgaaagtaaggagaaattgaaataatttgaatatccctcttctttgttatataatcatcatttttgaaagttttttcaggtttgtgcaatagagtagagcaagcaatat

SEQ ID NO: 887360 - DNA, 629 bp, Homo sapiens
taaatcagaactgaggaaaaagatctatggaaatattttcatgacaaaagataatgatattaaaaaaacaataatcatggaacataagcaatcaacactttaattgtgaagaaaagagcactttagaactcaaatatttggccatttatattttaaaaatcaatagaacacttgaaaaataaaccaaaataaatctctcaggaaatgtagccaaactaggtgaaaataggagataaaagattttaaaattagaaggtcatttaggcgatccaacatctcacttacaagatttttataataatcaaatataataaagagattttcacacaaataatacaaaaaagaattacagatttgaaaargactctccaatatgatgggcccaatccttatgtgctgtatattataagttctaaaataacatgatacattatgtggaaactttagagccactgaatattaaaaatgcccatagggaaaagcaggaataaaattaaaaacaaaactaaatgtgactggaatagcatttgtttttcaactaactgctagaagtcaaactttttttcacttttaaacttctaaagaaaaattattctcaatctagaattttatacctaactgtcataaga

SEQ ID NO: 887361 - DNA, 628 bp, Homo sapiens
agatcatataatactgttagtcaactaataaatatggcacaattgaaggtgtgtttctaagtcaagatagatacaaagttaggaaaagatatgtagtcattggaagatatccagaatacatcaatctattttctgcactagcctagctcagatgacagtatttaaagacagaaattctttgataggccaataagatggaggaaatgtaccagataaaataaatgagagaatgcaagtgtgacacaagttaataacttcacatataaagatgaatttaatggctgtggcaggtagctactaagtattaagtagtttcaaacaaattaaagattcrcttgacctagccatgaagatatatggactatgtgaagggcaatctgtagtcactaatcttaattctaaacatgtcaggaagaagttatctcataatgtgaaaaaacatacaatttactttctggtaatatattatgttcacatatttccaagtattttcaaagatagatagatagatagacagatagatagatagatagatagatagatagatagacagacagacagacagacagacagacagggtttggctctgtgtccccacccaaatctcagtttgaattctacttcctta

SEQ ID NO: 887362 - DNA, 628 bp, Homo sapiens
agatcatataatactgttagtcaactaataaatatggcacaattgaaggtgtgtttctaagtcaagatagatacaaagttaggaaaagatatgtagtcattggaagatatccagaatacatcaatctattttctgcactagcctagctcagatgacagtatttaaagacagaaattctttgataggccaataagatggaggaaatgtaccagataaaataaatgagagaatgcaagtgtgacacaagttaataacttcacatataaagatgaatttaatggctgtggcaggtagctactaagtattaagtagtttcaaacaaattaaagattcacttgacctagccatgaagawatatggactatgtgaagggcaatctgtagtcactaatcttaattctaaacatgtcaggaagaagttatctcataatgtgaaaaaacatacaatttactttctggtaatatattatgttcacatatttccaagtattttcaaagatagatagatagatagacagatagatagatagatagatagatagatagatagacagacagacagacagacagacagacagggtttggctctgtgtccccacccaaatctcagtttgaattctacttcctta

SEQ ID NO: 887363 - DNA, 643 bp, Homo sapiens
gggactttagaagtcatgtgctcaactccttcctaatgcagaaattcctcctccacgttcccaatacacagccagctgaccctagcttgtccactgccacttactccacagccatcccgttctgttcttgggtggcttcctgatgaagcgggaatcactttccctgcaacttcccttattgctctgggatccctctgaggccacccagtgcgtttgctctctctgctccaggacacccctcagaaagtcaagtagggaggatatggccttacacttactctgctccaggctaagcagccctagtttcttcattgtggtgtgtggttttcactgggattctgggagtgagtgaagacagaggtttgcatgaaatctgctgcattttaccaaaaatcaagactgtcttctgtatcyttacagagaggtccaggccagctcaggctgacccccaaatgctgtgagggtagtaaaacattggcaggctgtggggtggggactggctgcgtgcatgtgtgtgtgtgtctgtgtgtgtgtgtgtgtgtgtgacagagagagagagaaaaccagaaatggtgtgagaccccaaaccttcattttccataataggaagtcaagaataatcatctaaaatagaaaaactggc

SEQ ID NO: 887364 - DNA, 680 bp, Homo sapiens
agaaaaccaaacagcacatgctctcactcataagtgggagttgaacaatgagaacacatggacacaggaaggggaacatcacacaccagggcctgtcagggggtgggggccaggggagggatagcattaggagaaataatgatgacaggttgataggtgcagcaaaccaccatagcccrtgtatacctatgtaacaaacctgcatgttctacacatgtatcccagaacttaaagtaaaataaaaaaatacattccataaataaaaattattttgtcaggggatgtataataaaaatttaaataatgtctcaaactaatttttaagtatttttttgaattgccacaagaataatgttagttcctttattgtgctgggtaaataaagagactgtcaggctatggaagccaccacccttcagcaccagcaaggagacaaggcctctgcggcacctatgattagagctctgtgctggggattcaacttctaaagccttgcagtccgtgttgggggtccctgagcaaggacagatgggcagtcctttgagcacttcaggtggaaaagctctgctcaagtagtgatggtgctgaggaactgagccagggagagcccttcccagaaaactaaactggagaccagaaggataacaaaggtcagttagaattgggggaatgacccaaag

SEQ ID NO: 887365 - DNA, 721 bp, Homo sapiens
tcttaacttcagggcctcagataatgaatacttggatagaaaggagcctctgaggtatagttggttgatttttagaatgactatatagagtaatcatgcttcattttgatacctagtggcaacacataggatctgatttgcatatcttgagtatgcgggtttccaggtgaaacttttgcttacttatatgacatataggtttgtgtgtgtgtgtgtgtgtgtgtgtgtgtgcttcaacctcacactacttgaagatcagcacatttatggacatcatagttgagctcagtgtcttttaggccaccctaaaaatggtggtacaaaggaaatgttctcaagaagcactagaatcctaggwccctatacctggaggggatatggaggtgccatttagaacagttcctgttccctcacacatgtaggagatcatgctgtatcatggtctcccacacctctgtcctccatacagagatctctctggggaaatagtgtaacaagaactatgactgtgattttctttcggtagcattcttttttctacgtagtacagcttaacaagtttctatggagagactttgagaattttatactgttgcagtttccaaaagaattaccataaggctgtgttacacatctggatctgaactatggctgcccagttaagtagatatcatgctagccaataagtgttccaaggattctgtgtctccaaggacaaaga

SEQ ID NO: 887366 - DNA, 665 bp, Homo sapiens
ctggagaagaaaataagtggtaaattttctgttttcacctttaagtaaaatgatcctgacataaatggtagtaaggagaattaagattaatcagaattgaattgggattcactttttactaccacttctatcacaatgattccactaaaacagtaatttttatttgatctatgaagccttggaatctaatccttcatagagttctgggaattattataaaccattgcaaacacaaaaagttcagagaatgakataaataacacccatgtactgactatattttgaaatatctaaatagtttgctgcagtttcattttttaattttaaatagaatattacggaattggtagaagcatccttcacaattcactctaccctttctcctgggcaggctcctggctctttacaacagctccctaattatttctcaaatagatatcaggattttcaaaataccacttaaagctttctgttggttatttgcacccatcatttgtatttcagcacagccaaccttggtttcctgttggttgttctttcccaaactaatcatcaccttctctggggagatgggaaagtcttacccaactccattacacatgcaacagaactgttcctaggaaacaccgaggcctttcttggtccgagatttgccgagcacagat

SEQ ID NO: 887367 - DNA, 598 bp, Homo sapiens
gggaaagggatggatatatgtttatggagacttagattttctcttctataaaaacaatgctgtgggcctggtgcggtggctcatgcctgtaatctcagcgctttgggaggccgaggtgggtggatcacctgaggtcaggagtttgagaccagcctggccaacatggtgaaaccccgtctctactacaaatacaaaaattagccgggcgtrgtggcaggtgcccgtaatcccagctactcaggaggccgaggcaggagaatcgcttgaacccaggaggcggatgttgcagtgagctgagattgtgccattgcactccagcctgggcaacagagtgagacttcatctccaaaaaacaaaacaaaacaaaacaaaacaaaaaaacaaagctgtgcaaccacttgggaaactacttgccaatatctttaaagctgaccaagtgtataccctatgatccagcaattcctttcctaggttgctttccaactgttggagctcagaaaacaatacccctaaatgtaggcctcagaagaagcctcagaagcaaacgtttttccctgcccacccacttctcagttgcattctccctgaccagtgttgg

SEQ ID NO: 887368 - DNA, 598 bp, Homo sapiens
gggaaagggatggatatatgtttatggagacttagattttctcttctataaaaacaatgctgtgggcctggtgcggtggctcatgcctgtaatctcagcgctttgggaggccgaggtgggtggatcacctgaggtcaggagtttgagaccagcctggccaacatggtgaaaccccgtctctactacaaatacaaaaattagccgggcgtggtggcaggtgcccgtaatcccagctactcaggaggcygaggcaggagaatcgcttgaacccaggaggcggatgttgcagtgagctgagattgtgccattgcactccagcctgggcaacagagtgagacttcatctccaaaaaacaaaacaaaacaaaacaaaacaaaaaaacaaagctgtgcaaccacttgggaaactacttgccaatatctttaaagctgaccaagtgtataccctatgatccagcaattcctttcctaggttgctttccaactgttggagctcagaaaacaatacccctaaatgtaggcctcagaagaagcctcagaagcaaacgtttttccctgcccacccacttctcagttgcattctccctgaccagtgttgg

SEQ ID NO: 887369 - DNA, 623 bp, Homo sapiens
tctaccaagctccagcattaaagacgtgaatgagtttaaattattctagcctatagcacttctttatgtattgtgacaatgctacacagtagcctaaaggagaatcgctattcctgagttgataatagaccgaactgtggcttctatccactgggttatatctacagactcacagacatataaacatttttgccacagagacttaactaaacaaacagtatgtgtggatattcacaaaagcttaactccttttcaaaagcagttaaaataaagaggagaaggaatctttgttaacaccttgttgaatatgaccattttattttagatttcagtcttgtataaaactattccaggagcaaaaatatttccttaattagaaaaattcactctactgggtattttctgtttcccctctataccattctccaccctgctctggcctctggcccctgggagggaaagctttatagattatatcatwtgggctcctggctctctggtttacaatgggtttgaacagtaagagagatcagcaggagatgggtagatggaagagaaatgagagggaagtatttcttctcctggctccttcattatatggtcatggcaatattggctgcatt

SEQ ID NO: 887370 - DNA, 672 bp, Homo sapiens
ccggttgactcagtacatagggattagcttcccagcgaggcagaacaggatgtagaagtatagaggggtggagcatgggatggaaagataaatagagaatgtccaatacaacatacaagaccaaaagcaaatgcaatttctttacttatttttttcctacaaacatatttctgcatcctttcacataactcgtcatcagttttgattagcattctaaggaattttatggcacaagaattgtgaataaaatataaaaaaatgtgttcatgcaggtaataaaactagtattacccaaaaattaaccccatcaaatttcactgtgtgtattcaaaacacccaaaacactttgtcwtggattctccttgtaagaatgatgatgatgatgatgattgcaacaattatttattaactgcttactatgttatgagtgttttaaatgtatgctttcatttaaccttgtatccactttagaaggaaggcattattaccttattttataggtacttatataaagagggagtaacaggttaagagagattacatgatttgagacagttcatatggctcaaatagcagcctttaggcaacatgacccaccccttcaaacttaacagttagaaatacagactgggcccaaagcaactagaaagaaggaggtggtaccaagagaga

SEQ ID NO: 887371 - DNA, 612 bp, Homo sapiens
tcaagaaaatggtttagaataatttagacttgtctaaaaaagaaaggaactaccaagctaaaaagaattcatatcactgctgatggaataaagtagcatactctttctggaatgaaatgtggctctgcatattatgggaccgtaatggacataactttggacacacaatgtttctagaaatgttgcctaaaacataatcyggaatatattcaaagttaggcacaaaaattcacaacatcaaaatcatgatgagatgccacttcacacccagtatgattatcagaaaataaaacaaaacaaaaaataataagtgttgttgaggaagtgaagaaattggaaccctcatgcatttcatggagtgagaatgtgattgtgtagccactatggagaacaatatgaaggcttctcaaaaaaattaaacagaaataccatatggtccagcaattctacttctagataaagaccccaaagaattgaaagcagagatttgaagagatatttgtacatcaaagttcatagcagcaatattcatgatagtcaaaaagtagaatcaacacaaatgtctatcaacagacaaatggataaacaaaattactatctgcatatattaag

SEQ ID NO: 887372 - DNA, 594 bp, Homo sapiens
accagaaagatattatcagaccccaccacttacccaaaattagcctttcggtcaggggtttccttagtattgtcccttcatggttaccaaaaagatgttaccggaaaggggtccccgatccagaccctgagagagggttcttagatctcgtgcaagaaagaatttgagccaactccatagagtaaagtgaaagtacgtttcttaagacagtaaaggaataaaagaatggctactccacaggcatagcagccccaagggttgcgggctgcccatttttttcttgrtgatatgctagacaaggggtggattattcatgcctccccttttttgaccatatgggataacttcctgatgctgccatggcatttgtaaactgtcatggcactggtgggagtgtagcagcgaggatgaccagaggtcactctcatcaccatcctggttttggtgggttttggccagcttctttactgtaacctggtttatcagcaaggtctttatgacctgtatcttgtgctgaccttctattttatcccagctgagaatgcctaacactctgggaatgcagcccagtaggtctcagccttattttaccca

SEQ ID NO: 887373 - DNA, 620 bp, Homo sapiens
tgagccctgcgtcctggaacggtgccaggactcctgacagagcctggcaggtcggtgggtggcggggagctgggtgttctctttgcagaagaacaccatttgggagaaagctcccttcttttcctggggcaccgtagcccgccttccttcccctatcattttttacgcagatcgcactcatgatgatgaacttgcagctcagcttcctgccgcctgcttgacccgggagcaccagcaggctaccgggcctcgccctcggctccctcctcctctcgaaaccctggggcttcggggcaccggtgggggtccgagtgggcagggactgcrggaggggcgtgcaggggcgcggggtcccgccggggagcgcgcacggagcggcgcctcggccgccctgcttcctggagctgtgctcctttgaccccagtggcagtccctgtcactgcaccgctcgctctccctccggctcgccgcgccctcgctccctctcctcgccccctcgctcgctctctccccagatcgaggctgctcgggtcctttctccccccgcctccctctagcgccgcgccccctggcccccagccccagcctgcggcgggacctccggggtcgaaggttctggc

SEQ ID NO: 887374 - DNA, 634 bp, Homo sapiens
tcagagctctgtattgaaggttacatgtcactgactgctgtggtttgaatatatccctcaaagttcatgtgttggaaacttaatcaccaatgcaacagtgttgggaggtggggtataaacagaggtgactaggtcctcagggcttttccctcatgaataaactaattccattatcagagtgagtttctgataaaatgatgagttctgccctcttctcttcctctctttccatgtgatgccttctggcatggtatgtaacaaggagaccctcatcaaatgcaaaccctcaatcttggacttcccagcctctagaactataagaaatgagtttcttttcctagttacctaatccatagtattmttttatggcaatacaaaatggactaagacactgatctgtcaagtaataaagagacactttgagttctgacttcattttttataaatgtctctttggggagcagaagactagacatccactattctttacccagtgaaaagaaaaactttttcttttggtaagagcactttccttttgaaaaactctattctgactttaatcatgcagtttgagtgagattgtcaatcacactctatagggtgggcaagtggcccaagataagccaatcagagc

SEQ ID NO: 887375 - DNA, 650 bp, Homo sapiens
tcctcctagacctccaggtctgtgaatgggagagtctgcagcaaaggtctctgacatgccctggagatagtttccccattgtcttggggattaacattaggctcctcattacttgtgcaaatatctgaagctagcttgaatttctcctcagaaaatgagattttgttttctttcaaactgtcaggctgaaaactttccaaattttgatgccatttcccttttaaaactgaatgcctttaacagcacccaaatcaccttttgaatgttttgctgcttagaaatttcttctaccagataccctawatcatctctctcaagctcaacattccacaaatctgtagggcaggggcaaaatgccgccagtctctttactaaaacataacaagagtcacctttgctccagttcccaacaagttcctcatctccatctgagaccacctcagcctggacatcattgtccatatcactatcaggattttggtcaaagccattcaacaagtctctaagttccaaactttcccatattttcctgtcttcttctgagccctccaaactgttccaacttctgcctgttgcccagttccaaagttgcttccacattttcaggtatcttttcagcagcgcccctctactggtaccaatgtccagta

SEQ ID NO: 887376 - DNA, 612 bp, Homo sapiens
gattatgaagttttatctattttgattgctttgtctgaaggagagccatgaccaaatgatatagagtggatactgctgtcaatcatccaagggcataaaaggaagagaaggggatgaaccaacactgaatgctattcttttagagtagttgtattgggttgtctacgtattgggtaggtcagccatgcaagcaaatatatgaaggcttaggatcaaaacctgagctgttaataaaaaatgcatctatttgaggggagaaaaaaaggggatagaaggaaggtaggggctctcaggactgagaaggggatggtttggctagaacctagaggagacctcttgtgaatgcacacagacttcagattctagaagcaatgatatacagtatccaatatcaatttttttcctttctgctttgtgaccatcttctattactctaaagctttcaggaagatacaccatagcctaagtctaaytgtaagaaggaaagatgcagtggccagacttggccaaaacgagtgtgataagagtagcaacagccagtagaagcaatgtgtagatagcagaaaatgccttaaagaattttggacctgcatcatttgtatagggattctg

SEQ ID NO: 887377 - DNA, 654 bp, Homo sapiens
cccacccagacttactgagtctgtcattgagcatcatcttgctgcctggggtcattaacagttcagctttagctatattttctagtccagttatccattctggggtagctgggcacatttctggattctagtatgtaaggcatctcatattgagtgggatggagagggtgcagagaagtatcactgggttgtgtgaaggtaggaactggagctggaaagccactgggattgtgacttttattacaccaatagcccagtgagaagacatacaggtatatcaatgtagacatgctgagagcacccagtcaktgaactcttgcctattgtactgtacatgtgaagtgtgatggaaacctggtactgtggccatcaatcatatagctgctagtaactgaaggtggaaggccttaatacatgtgttgcctgcaataagtgtctttagcacaaacttaatctcccctgcagttctggcatatgtgtggaaaaggagtttggtggttgtgggggcacaaatctctctcctaggacagaggaggaggagtacagacgttcatcagacaatcaaggcaagactcaaggagtgaataggaaaaaagtacttaaggaagttttacaagctgtgtttgttaaatatttgtgaatcagggtcttttg

SEQ ID NO: 887378 - DNA, 649 bp, Homo sapiens
aatccacagacacttgacaccagcccttgaaagcagccaggagggaggctgtaccctccaaagccacaggggtggagctacatgaggccatgggagcccacttcttacatcagcatgacctggatgtgagatctggagccaaaagagatcrttttggagctttaagatttgatggatttcagacttgcatggagcctgtagtctcttcgttttggccaatttctcccatttggaatgagtgtatttatcaaatgcctgtaccctcattgtatctaggaagtaactaacttgcttttgatttataggctgataggcagaagggacttgccttgtctcagatgagactttggactgtggacttctgagttaatgctgaaatgagttaaaactttggggggcggttggcaaggtatgattggttttgaaatgtgaaaacatgagatttgggaggggccaggggtagaatgatatggtttggctctgtccccacccaaatctcatcttgaattatagttcccataattcccatgtgttatgggagggactcagtgggagttaattaaatcgtgggggcagttttcctcatactattctcatggtagtgaataagtctcaggagatctgatggtttgataaggggaaacccctt

SEQ ID NO: 887379 - DNA, 654 bp, Homo sapiens
ttttgctgtttcaccctcatttcttacatcatcccatttcttgaaaggcaggccctgggaagagaatatctaaaattctaacaaaacctagaaattaggctcggttctctctgattgaaaggtgataatactgcctgcttcaagtaagacacacacagagagagagagctggggatatgatttcctaaaggcaaacccagctaatgcttgatgaagctcagtccccaatcatcttaggatgctaccgtgggttacaggctgtagttttcacagtcgccttgcttcccagttttgcagttcccagctgattgtcayagcccacttggggcttacccacaatatccagcctcttaagacccagttgctgggcatgattctaactgctgaggtgggcatgtaccagctcatgagaaccaactgttaaatattcaggaaatcatgagctagttgttaaacacagccattattattcattaaattatataaagttagttataattaaatacattgtattataaataaagagcatgattcatcatgcttattattttacttattattttactacattttactacattactaccttattattttagtacattttcctgttttctatgattatttattgtctcttacctctatagagtggaa

SEQ ID NO: 887380 - DNA, 624 bp, Homo sapiens
ttctccacatcctctccagcacctgttgtttcctgactttttaatgattgaaaattggcatctttaatacaactcatgttcatttccacagagtttaacacttaatcgtccttgtggtgcttcaggtgtttgaatattgtctcctttatgagatgggcctctggtggcccatctgtcaaacaattcctgtttgaccaccttctccaacaacttcttgttgggaggatcaaaagaaccaatgtctctgatggtgctttaaaaattaaatgttagcttgagtgtccagtgatgggaaattgattcaataatgacataactgtgcaaggggacactatctcatcattaaatgaagttgtagcagaatatttatgtggcaagatgtttaagacattgctaaatggaaaaagtgaattccaarcagtatacacattatgattctgtttttgagaacacaaacacatattcatccttgtatttggaaaagtgcttatcaaaatatcagcagtgataccacctgggtggcaaggttattgatgaggtaaatgttatcctattttttgagctataacttctaaattttctgcaataaacatctatcacttttacaacaagaaaaataaataa

SEQ ID NO: 887381 - DNA, 618 bp, Homo sapiens
tctgtctatccatcctatctaatctatcatctatctatctgtctatctatctatctatctatctcatctgtcatctatccatcctatctaatctattatctatctatctatctatctatctatctatctatctatctatcaatcatctccatcaatgttaacaacagattcatgaccaacaaacatggcttcctgttcatcttctccctgaaactttgtggttttatctttgcayctgcctctatgctcttgcttctgaaggaattttgagcccagttatagcttaacttccttcattggctatacatcaatgtagacatggggctcaatccttttatatcagtttccaacactctaccactcatacaaggtttttggatgcagactttactgaaggttcttagtagtttagggggtccatgctacagcagcactatggcagattcactttattcctattcaactgccacttctccttttttgttagttacagaaccccaattttgtctgtgatggccacaggcttagttaaaaatagtcactcctgcagactttcttgtagctaggagtgtgacatgattttgtctaacagggtaagcctttgctttcctaatacag

SEQ ID NO: 887382 - DNA, 525 bp, Homo sapiens
attaaacatttatgaaaactctctaacagcaaaactggatcttccttaagtgggcagctttctcaatccagcagtagttcatttctcattccacacatgatggtcagaaggtaggttttgttgtcctttcttcccactccacgacttgtaaagaaaatgaaacacgattccctctgcatctgtgacacttcatccatttgcttaaactatcacttcctacccctcaccctgccatgtctgaccttgctcaggcaccaggcttgctctgtttrctttatgccttgcccatcctcccttctcaccaacactacccctaatttttcccaaggtatcagccttctcctttcttgtttaccttttgatccaactcagcttcctgacacttccttaaactttcttctctgactccttattttgctcttttgagaggtagatttactatgaagctaagattacttaagcttcagggtccttcatttaaataaaccccttccaaagccctgcatgtaattttctgcttcgcta

SEQ ID NO: 887383 - DNA, 667 bp, Homo sapiens
cagagtgatgattgagcttaaatatgaaggatgagaaataatttagtggatgttgtgatattccacccagtttctcccttcagagcccatgcacccatctcccacttgctgatggctggcagctgtgtccttcagtggaaattgccctcagcctctgggaactatgttgctcaaggtaacagctcctcctgcttgcagggggcaccctgtggccaacagtgaacaacaatgaaagtgaaaatgctaaggccccacctcatacctatttgaggcaacgttgaaggatcttcccatttccagatcttctcttaagtttttctgaaatctcagtggcaactgcattgtaggtcagaattttcctctgcccaatacctctgcttttacttcctggcagctgtacctcctgagatcacttctcaatatatttcagcacatgattctccgcctcacaggtgaagkcaggtaatggtatcagtcctaggaagcagaatctaaaatggaatttgggagatggatcacttgccagctatatggcactaggaccctatcagtggtggtgggtggtgtttgaattgctcctggcatgttgcactgatgcgactgttaaaattttcacctgtagtgaactgtgaccagatacctgtggaaggagatacattgacagatg

SEQ ID NO: 887384 - DNA, 667 bp, Homo sapiens
cagagtgatgattgagcttaaatatgaaggatgagaaataatttagtggatgttgtgatattccacccagtttctcccttcagagcccatgcacccatctcccacttgctgatggctggcagctgtgtccttcagtggaaattgccctcagcctctgggaactatgttgctcaaggtaacagctcctcctgcttgcagggggcaccctgtggccaacagtgaacaacaatgaaagtgaaaatgctaaggccccacctcatacctatttgaggcaacgttgaaggatcttcccatttccagatcttctcttaagtttttctgaaatctcagtggcaactgcattgtaggtcagaattttcctctgcccaatacctctgcttttacttcctggcagctgtacctcctgagatcacttctcaatatatttcagcacatgattctccgcctcacaggtgaaggcaggyaatggtatcagtcctaggaagcagaatctaaaatggaatttgggagatggatcacttgccagctatatggcactaggaccctatcagtggtggtgggtggtgtttgaattgctcctggcatgttgcactgatgcgactgttaaaattttcacctgtagtgaactgtgaccagatacctgtggaaggagatacattgacagatg

SEQ ID NO: 887385 - DNA, 634 bp, Homo sapiens
tggtgttaccagttgagggtgtccaggttcttggcattttgaacaaataattggataaaacacacaaataaagcacgggaagaatgaagcaataaaagcagaggtttattgaaaatgaaagcacactccacagggtgggagtgggccccagcaagcaggtcaagggcgctggttacagaattttctggagtttcagttccctctagaggtttcccatkggttacttggtgtatgctctatgtaaataaagaggatgaagtcaagttacaaagtcatttactcagtatgtaccctatgtaaatggagaggatgttactgggtgtgtgtcgcctatgtaaatgaagaggatgaagtgaagttacaaagccattcacattcgtgttattgctgaagtgtttccatttaatttagttctaggaagtcctcaggttcccagtctccaggccctattctcctacctcaggggcaccatgcttgtacagcctgcagaaacatgagccaattaaacctcttttctttataaattaaaaacaaacaaaaagagtcttttatagagagcaactcagaaaattgtggtaaaaagataacattcattttgtattcaaatgccaaataccaaatgtcaaatgcttcc

SEQ ID NO: 887386 - DNA, 634 bp, Homo sapiens
tggtgttaccagttgagggtgtccaggttcttggcattttgaacaaataattggataaaacacacaaataaagcacgggaagaatgaagcaataaaagcagaggtttattgaaaatgaaagcacactccacagggtgggagtgggccccagcaagcaggtcaagggcgctggttacagaattttctggagtttcagttccctctagaggtttcccatgggttacttggtgtatgctctatgtaaataaagaggatgaagtcaagttacaaagtcatttactcagtatgyaccctatgtaaatggagaggatgttactgggtgtgtgtcgcctatgtaaatgaagaggatgaagtgaagttacaaagccattcacattcgtgttattgctgaagtgtttccatttaatttagttctaggaagtcctcaggttcccagtctccaggccctattctcctacctcaggggcaccatgcttgtacagcctgcagaaacatgagccaattaaacctcttttctttataaattaaaaacaaacaaaaagagtcttttatagagagcaactcagaaaattgtggtaaaaagataacattcattttgtattcaaatgccaaataccaaatgtcaaatgcttcc

SEQ ID NO: 887387 - DNA, 634 bp, Homo sapiens
tggtgttaccagttgagggtgtccaggttcttggcattttgaacaaataattggataaaacacacaaataaagcacgggaagaatgaagcaataaaagcagaggtttattgaaaatgaaagcacactccacagggtgggagtgggccccagcaagcaggtcaagggcgctggttacagaattttctggagtttcagttccctctagaggtttcccatgggttacttggtgtatgctctatgtaaataaagaggatgaagtcaagttacaaagtcatttactcagtatgtaccctatgtaaatggagaggatgttactgggtgtgtgtcgcctatrtaaatgaagaggatgaagtgaagttacaaagccattcacattcgtgttattgctgaagtgtttccatttaatttagttctaggaagtcctcaggttcccagtctccaggccctattctcctacctcaggggcaccatgcttgtacagcctgcagaaacatgagccaattaaacctcttttctttataaattaaaaacaaacaaaaagagtcttttatagagagcaactcagaaaattgtggtaaaaagataacattcattttgtattcaaatgccaaataccaaatgtcaaatgcttcc

SEQ ID NO: 887388 - DNA, 627 bp, Homo sapiens
tttatcaaaggccttttctgcgtctattgagatcatcatgtggttttggtcattggttctttttatgtgatagtttatgtttattgatttgtgtatgatgagccagccttgcatcctagggatgaagctgacttgattgcggtggataagctgcaatcggattctgtttgctgctggattcggtttgccagtattttattgaggattttcacattgatgctcatcagggatattggcctgaaattttctttttctgttgtgtctctgccaggttttkgtgtcaggatgatgctggcttcatgaaatgagttagggaggagtccctctttttctattgtttggaataatttcaggaggaattgtgccaggtcctcttcatacctccggtagaatttggcggtgaatccatctggtcctgggctttttttggttgttaggcaactaattactgcctcaatttcagagcttgttattggtctactcttgggctaataccagaatctacaaggaacttaaacaaatttacatgaaaaatgcaaacaaccccatcaaaaagtgggtgaaggatataaacagacacttctcagaagaagacatttatgcaggcaacaaacatatgaaaaaaag

SEQ ID NO: 887389 - DNA, 627 bp, Homo sapiens
tttatcaaaggccttttctgcgtctattgagatcatcatgtggttttggtcattggttctttttatgtgatagtttatgtttattgatttgtgtatgatgagccagccttgcatcctagggatgaagctgacttgattgcggtggataagctgcaatcggattctgtttgctgctggattcggtttgccagtattttattgaggattttcacattgatgctcatcagggatattggcctgaaattttctttttctgttgtgtctctgccaggtttttgtgtcaggatgatgctggcttcatgaaatgagttagggaggagtccctctttttctattgtttggaataatttcaggaggaattgtgccaggtcctcttcatacctccggtagaatttggcggtgaatccatctggtcctgggctttttttggttgttaggcaactaattactgcctcratttcagagcttgttattggtctactcttgggctaataccagaatctacaaggaacttaaacaaatttacatgaaaaatgcaaacaaccccatcaaaaagtgggtgaaggatataaacagacacttctcagaagaagacatttatgcaggcaacaaacatatgaaaaaaag

SEQ ID NO: 887390 - DNA, 603 bp, Homo sapiens
cagtcttttgcctttttgtccttagggtgtatcctgttagtgattataaatacccaatttgttttaaagttgcttagtactagtactggtcttctctgtgcgtatatatcatcatcaacatacatagttaggtttatgtgtttcattttcttagattttattaagaatttttaagaattaaaaaaattcatacaatttcttaattatgtaaaatattcttataatttaaaaatcaaaacaagatatatttaaggaagtttggtgccttcactattttcttgctcctaattcttycttcacttatataggtatctattttttacatgtttatttcctttttaaaaaatattaagcatatatacaattacatttagtatttttaagataaacgggaccatactatatccataattttccacctttattttttaactgaaaaataattcctaccctcaatccctagaagtacacagagatgttcctcattcatttttatagctacatagtaaggcattgagtgtcagtgtaatgtaattcaaacagcttcttactgatgtacatttaagttgctctatcagataattcccacaatgaaaagccaat

SEQ ID NO: 887391 - DNA, 603 bp, Homo sapiens
cagtcttttgcctttttgtccttagggtgtatcctgttagtgattataaatacccaatttgttttaaagttgcttagtactagtactggtcttctctgtgcgtatatatcatcatcaacatacatagttaggtttatgtgtttcattttcttagattttattaagaatttttaagaattaaaaaaattcatacaatttcttaattatgtaaaatattcttataatttaaaaatcaaaacaagatatatttaaggaagtttggtgccttcactattttcttgctcctaattctttcttcacttatataggtatctattttttacatgtttatttcctttttaaaaaatattaagcatatatacaattacatttagtatttttaagataaaygggaccatactatatccataattttccacctttattttttaactgaaaaataattcctaccctcaatccctagaagtacacagagatgttcctcattcatttttatagctacatagtaaggcattgagtgtcagtgtaatgtaattcaaacagcttcttactgatgtacatttaagttgctctatcagataattcccacaatgaaaagccaat

SEQ ID NO: 887392 - DNA, 637 bp, Homo sapiens
acactccatagttatctccagtgacacagtgcatggccacagcttgcaggcattccacaactccaggagacaccactgacaagcagtgcttaccacatgctttacaccttaatgcatttctttttcaatccttgacatccttgggatttcagcaatgcacttaaaataatactgctatgtttattcagttaaaaggcagttcatatcaaaaatataaaggtgtctaatttrccttatgacctgaagtgatattgttttgttcatttgctttttcagttgacaaatttcatgaacagctttctgtgaaataaatctccttctattactttatctttaattgtggtatataaatacattacacagatagtctaatgccacactaatctcatatgtggttaatattttgtttataaccataattttatatctatttataattatttatgaatcatttataattataattattagaataaattgccagattacctgatagaaacttaaacattatacattctgaccaactatgtgagagattttcccttaccttcacctatgcttaccatatgattgacactaattttcaatcttcaatttttatcaatgttaggctcatgctaaaaaagtcattgtatag

SEQ ID NO: 887393 - DNA, 626 bp, Homo sapiens
tttaacaccttttcttagctggaagctagtttaggaaccagtttgagaagcttgtaaatggaaactacagggagtggtcttttcctaacgaattcaaactaagtgacttcctaatgttacatgggtttttgtcattttctggtagactttcttcctcgatgaatttgagccctgctatcttgtaggatggtaaactatgaaagagtatgtaaaataattattttcacagccttttgaaagccttccagccctgggtagtgttctgagtatataagtgttgccctgaagcactgtcagaagtccagcagccttgargcctgggagcacactgggacatgcaaagtccccatccccaggatagcagagtctgtaggagctgggtacttcatccttccatctcaggcctggaggcctgagacttaactttttaattaactattaatatctattttagaataattttagatttatagaaaaattgcaaagatagtacagagttcccatatactccacaccaagttatcccaattattaacatcttttgttagtatgttacatttgttacaattagtggtccaatattgattagttattattattattaaataaagtccacagcttatcca

SEQ ID NO: 887394 - DNA, 626 bp, Homo sapiens
tttaacaccttttcttagctggaagctagtttaggaaccagtttgagaagcttgtaaatggaaactacagggagtggtcttttcctaacgaattcaaactaagtgacttcctaatgttacatgggtttttgtcattttctggtagactttcttcctcgatgaatttgagccctgctatcttgtaggatggtaaactatgaaagagtatgtaaaataattattttcacagccttttgaaagccttccagccctgggtagtgttctgagtatataagtgttgccctgaagcactgtcagaagtccagcagccttgaggcctgggagcacactgggacatgcaaagtccccatccccaggatagcagagtctgtargagctgggtacttcatccttccatctcaggcctggaggcctgagacttaactttttaattaactattaatatctattttagaataattttagatttatagaaaaattgcaaagatagtacagagttcccatatactccacaccaagttatcccaattattaacatcttttgttagtatgttacatttgttacaattagtggtccaatattgattagttattattattattaaataaagtccacagcttatcca

SEQ ID NO: 887395 - DNA, 626 bp, Homo sapiens
tttaacaccttttcttagctggaagctagtttaggaaccagtttgagaagcttgtaaatggaaactacagggagtggtcttttcctaacgaattcaaactaagtgacttcctaatgttacatgggtttttgtcattttctggtagactttcttcctcgatgaatttgagccctgctatcttgtaggatggtaaactatgaaagagtatgtaaaataattattttcacagccttttgaaagccttccagccctgggtagtgttctgagtatataagtgttgccctgaagcactgtcagaagtccagcagccttgaggcctgggagcacactgggacatgcaaagtccccatccccaggatagcagagtctgtaggagctgggtacttcatccttccatctcargcctggaggcctgagacttaactttttaattaactattaatatctattttagaataattttagatttatagaaaaattgcaaagatagtacagagttcccatatactccacaccaagttatcccaattattaacatcttttgttagtatgttacatttgttacaattagtggtccaatattgattagttattattattattaaataaagtccacagcttatcca

SEQ ID NO: 887396 - DNA, 693 bp, Homo sapiens
aagcaataaaatgttgtagatgaatagggcacagggagggtatagacagggaagtgatcaagcctatctaatggggtcaggcagaaggcagtcagaaaaagctttatagagtttaaggttgaaactgcctttgcaaaaattataactgagaaaattatgactgtgaaagagatctgacataaccaactccatcttgcttctaacctccaacctgtctttgttcgttccttggcataggccaaactaactttgtttatagttaaacttagtttatagttaaactttgaaacaaagatgataacagcccttttccaaaacaaacccccttcttggctagrgactagactgccttgcaggagtaacaaattatccacaagattagaaattatggtttaggagtcaggcagcctgaaaccacaaggttctgaacctccacaattgctcctatggataatgtcgttattgtaaaacctaagattgatgctcaagatatttttcagaccctgcacttgatgaatcagctggcaccacccagatagataaactggctcatctagtccagtggccccacccaggaactgacttagcacaaaaggacagcttcaactccctatgatttcatctctgatccaaccaatcagcactcccctcttcctgacctgctacccaccaaattaaccttaaagacctcaa

SEQ ID NO: 887397 - DNA, 693 bp, Homo sapiens
aagcaataaaatgttgtagatgaatagggcacagggagggtatagacagggaagtgatcaagcctatctaatggggtcaggcagaaggcagtcagaaaaagctttatagagtttaaggttgaaactgcctttgcaaaaattataactgagaaaattatgactgtgaaagagatctgacataaccaactccatcttgcttctaacctccaacctgtctttgttcgttccttggcataggccaaactaactttgtttatagttaaacttagtttatagttaaactttgaaacaaagatgataacagcccttttccaaaacaaacccccttcttggctagggactagactgccttgcaggagtaacaaattatccacaagattagaaattatggtttaggagtcaggcagcctgaaaccacaaggttctgaacctccacaattgctcctatggataatgtcgttattgtaaaacctaagattgatgctcaagatatttttcagaccctgcacttgatkaatcagctggcaccacccagatagataaactggctcatctagtccagtggccccacccaggaactgacttagcacaaaaggacagcttcaactccctatgatttcatctctgatccaaccaatcagcactcccctcttcctgacctgctacccaccaaattaaccttaaagacctcaa

SEQ ID NO: 887398 - DNA, 697 bp, Homo sapiens
actgaatcttgataaaaatcttaagaaagaaaccaatagctaattatagtctgtttggtttcccttcttcattaccccctgtggaaatttaatataggcctgctgtctctagcacggggctccatagtcacccaactgctagatgaggctttctaaccaggagtggaagtgaaggtcagctgtacacacaggctaacattaccaagaatacagccaatggattgtagcttggtggtagatcacagagtaccttttaaagaaagtaggtccaggccaggtgtggtggctgacgcctgtaatctcagaaatttcggaggccaaggtgggtggatcacgaggtcaagagatcaagaccatcctggccaacatggtgaaaccctgtctctattcaaaatacaaaaattagctgtgtgtggtggtgtgtgcctgcaatccaagctactcgggagactgaggcaggagaatggcttgaacccggaggtggarattgcagtgagccgagatcgtgccactgcacaccagcctggcaacacagtgagactctgtctaaaaaaaaaaaaaaaaagtaggtccagttaactgcagggcttttattttgtggtggggcatacaaattgggacaatactgttactagaaaagagtccccatccagattccaagagaaggttattggatcttacacaagaaagctttcag

SEQ ID NO: 887399 - DNA, 604 bp, Homo sapiens
tggcacccagctggggctccatggggacatttccttaatttctggtggtggcaatccttagatttccatgctctcagattgttaggtgggcctctttgcactgtgatacttattttgtgaaatcatttcctgtggttggagctgggaaggtgtaggtaggtttgccttcagtttctgcagctgtttttcttcagattccacaagatttggcttggatggttcctagtttgtggtcagggttgtggccatttcctttgtttctctgaagatggacactgactatctgtcttgcattctttcctgcttgcaatgagttttgagggccaratgaaatgtctattcactgctatctttaagtgcaacagctgatcacaccaaatgtgcacgcggtttcaaggagtctaaggatgcctataattccaaacagcttagaaatttcaagatgatggattgccttgtttgctcagccacctaataatgttttattattagaaacttcttttctctgtctaaataaccttgccttgcctgagccccccaatgcctctgtctccatgaagaaactgttttctaatttaatcttacaaaacatcaagaaaactta

SEQ ID NO: 887400 - DNA, 585 bp, Homo sapiens
gggttttagtaagaaaaatctaaatggtgacaatcaaaacagttaagtatttttaataatttttcctttttagttcttactaatgagaacatctgaataaggacttagtgattgcctctgaaatgaacaggaaaaaacaagaatttcatgtttwttactttggtgaaggcaagaattactagtaaatatggtcttggatgtggctgaagttcatgctactgtggagaagagagaaatgacacagtatttgctcaatgttttgaatcatgctgctagaaacaaacactgcattttgaaaatgtatatgcatccattatattagttttggaaactgtgatatttatgccagttagttaatagagaaagctcactttactttcttctttttccacagcccagaaccaatatatgtacaattacctaccttcctgttccactcatgcaaactaacagaatatgaagcaaggaatcagtgactctctctattcataaggagtttcctaattctgtgtaaataaatttcaaatatttcagtcatgcttgtcatttgtacaaagttttaaaattctggaactcatctgagct

SEQ ID NO: 887401 - DNA, 585 bp, Homo sapiens
gggttttagtaagaaaaatctaaatggtgacaatcaaaacagttaagtatttttaataatttttcctttttagttcttactaatgagaacatctgaataaggacttagtgattgcctctgaaatgaacaggaaaaaacaagaatttcatgtttattactttggtgaaggcaagaattactagtaaatatggtcttggatgtggctgaagttcatgctactgtggagaagagagaaatgacacagtatttgctcaatgttttgartcatgctgctagaaacaaacactgcattttgaaaatgtatatgcatccattatattagttttggaaactgtgatatttatgccagttagttaatagagaaagctcactttactttcttctttttccacagcccagaaccaatatatgtacaattacctaccttcctgttccactcatgcaaactaacagaatatgaagcaaggaatcagtgactctctctattcataaggagtttcctaattctgtgtaaataaatttcaaatatttcagtcatgcttgtcatttgtacaaagttttaaaattctggaactcatctgagct

SEQ ID NO: 887402 - DNA, 585 bp, Homo sapiens
gggttttagtaagaaaaatctaaatggtgacaatcaaaacagttaagtatttttaataatttttcctttttagttcttactaatgagaacatctgaataaggacttagtgattgcctctgaaatgaacaggaaaaaacaagaatttcatgtttattactttggtgaaggcaagaattactagtaaatatggtcttggatgtggctgaagttcatgctactgtggagaagagagaaatgacacagtatttgctcaatgttttgaatcatgctgctagaaacaaacactgcattttgaaaatgtatatgcawccattatattagttttggaaactgtgatatttatgccagttagttaatagagaaagctcactttactttcttctttttccacagcccagaaccaatatatgtacaattacctaccttcctgttccactcatgcaaactaacagaatatgaagcaaggaatcagtgactctctctattcataaggagtttcctaattctgtgtaaataaatttcaaatatttcagtcatgcttgtcatttgtacaaagttttaaaattctggaactcatctgagct

SEQ ID NO: 887403 - DNA, 639 bp, Homo sapiens
agccactctgtttttgacctgagatcatctacttaattcacaaggaaaaattcatattttatcacagcgtatttcattaacaatatgtggatcttcctctacaagcagaggtcatctgaccatctggactttaatgtttttgcgattttygtgggatactgagataatgattaagtagtacttcagttgaaaaaacatttgttatgtaccttctataggccagacactgtatcagatactgagtatataaagaaaatggatgatagattcctactttcaagagataatgaatgaatgttcattacttatgaaaatattttttatccagctcatgtcaaactagtagaaataacaatataaaatctgtcattgtttcactctccactctagagtgatgatatggtttggctgtgtccgcacccaaatctcatcttgaattcccacgtgttgtgggagggatccaatgggaggtaatgggatcattggagcatgactttcccgggctgttctcatgatagtgaataagtctcacgagatctgatggttatataaaaacaggagtttccccacgcaaactctcttctcttgtctgcctgccaccatgtgagatgtgcctttcaccttcctccatggttttga

SEQ ID NO: 887404 - DNA, 639 bp, Homo sapiens
agccactctgtttttgacctgagatcatctacttaattcacaaggaaaaattcatattttatcacagcgtatttcattaacaatatgtggatcttcctctacaagcagaggtcatctgaccatctggactttaatgtttttgcgattttcgtgggatactgagataatgattaagtagtacttcagttgaaaaaacatttgttatgtaccttctataggccagacactgtatcagatactgagtatataaagaaaatggatgatagattcctactttcaagagataatgaatgaatgttcattacttatgaaaatattttttatccagctcatgtcaaactagtagaaataacaatataaaatctgtcattgtttcactctccactctagagtgatgatatggtttggctgtgtccgcacccaaatctcatcttgaattcccacgtgttgtgggagggatccaatgggaggtaatgggatcattggagcatgactttccygggctgttctcatgatagtgaataagtctcacgagatctgatggttatataaaaacaggagtttccccacgcaaactctcttctcttgtctgcctgccaccatgtgagatgtgcctttcaccttcctccatggttttga

SEQ ID NO: 887405 - DNA, 569 bp, Homo sapiens
tagacccagtaatgggatgcctgggtcaaatggtatttctagttctagttccttgaggaattgccacacagtcttccacaatggttgaactagtttagagttgagggtgggaactttcaaggacaactcaatcgtttttggcttgagcaactggaaggagttgccatgcaatgaaatggaaaaggctraagatggggcagtttagggggaggagaaatataaaaattcagcttgggcatgcctcttagatacctcacagttcagtgtttctcccagactgtcctggcttatagactttgatagctccaattgcctgatttgtttgtaaaagctccaaagcccctaccccaggttgacccagccctctgtttcctcacctaatggtggctttgaaacctctattttgaagaagcttaaagaaaggaatctggaaggagaccaggcaactcttcttgctgcctttgcataaaaagcacatagttttcacttggattgtgtgttacaaaacaataaaaagagtaattttgtaaaagatgcttttatttacacactacgtaagattgacaaaa

SEQ ID NO: 887406 - DNA, 614 bp, Homo sapiens
ttggatgtggtcagggcttttgcttttccggtgattacaaattccaaccttctctacctcagccctcatggttatgatcattgctcaaagtagctggttgacaaatccatatgcatatcatttgaccaggcccttgcttttaaaattaagtgtttccaaaactcatgcgaactgtgacctccaatgtgcccgtgtcaggaggtggggcctagtgggaggtgttttggtcaccagggaatatcttttatgaataacttggtggtgttctcttgatagtgagtgagttttcactccaataagacttcattagttctcatggaaatgaattagttcccaggagcatgggttgtaataatgccaggacattcctttagttttatctctttgcatgastccacttcccctttgactttccctgagatggtttgacctaccacgcggccctcatcagaagctgagcaaatgccggcaccatgcttcttgtactttccagcctgcagaaccttgagctaaataaacatcttttaaaaataataataataaaaaaaaggtgtttgaacaactttaaggaaagatgaaacccaaggtcagtctatacttctccagagctatgt

SEQ ID NO: 887407 - DNA, 579 bp, Homo sapiens
tgtccacaataactcatttcctagcctctggcaactagggggcattgaagatcattttagcagggactggaagagaggcttctcagacttatgtgatccaatgggtcagatttgcccggcctggggattagctgagactgcacctactcataaccactcacttggtggattcagaagagaaaacagaaataaatcctatgggtcagggagactggctgactatatcataaaagcccmtgcaaggcaagaggttcttgaaacttggagttaactgggatctgtcctacttccctgaagaagttctaagcaattggctttggaactccaaggacttaacaaataaatcactgggagaccaaagccatcttggttagtgttctgaaaacaaagttaggtcaaggttcacacgtcagtgttaaacatcaagggctaaggctaagctagagtttcctggaggttccttgcaagcttttgggaacctcagagaagatacagctcactttctgatgattaccttaagcagcaagaaaggccaacttttaacactcttgggcctgagagcaaaattttagtagctgc

SEQ ID NO: 887408 - DNA, 624 bp, Homo sapiens
ctcttgtctgcagctgatccgggcgcaatggttttggcattcactgagtggaaaattggcttagctttaatttttcagtcagaattgtataagctgagtcaattgagatgtctgtggtgttggcttttgtttgtgctgttaattgccaatcctcttcaattagggcatggacaagataaattctcttctcacaaatctacctggatggtctgctgctgcaggcttcatcttcaatatcatctcatcccttcccaaaacaagttatttatttgtaaactattgatttctttgggccattgtccccctaaaccttttgkaacacatcaatgattttacaattcttctacccatgctttaccatacatttgatgtttgttcttgcttcagttttagcagaattcatgttgctctacttggggctcttttcaaactaatttcttattcttcttagtgcctcagagtagatccttttcatacatgtcctaagttaatgtgagtttattttggctcaacaactttgaaatccatgcatagtgttttgaaaacatgcattttccatgaactttttgaaaacttgtataaaatatatgagtgtacacttacatgtatgcatatacatacata

SEQ ID NO: 887409 - DNA, 499 bp, Homo sapiens
tagttttgaaaacaaagttaacagaatattatctaacagcaataatgggtctgaaatgttccatgcaaggaaacataaaatgttaattgcttacgagataacgagacaagagtgtttccctacaatcttgtaactctagaaagatgagcattcttagtctgtgactaattccattgtttattaattccattgttttttaacagtgtaarttggtcaagagcagtggctcacacctgtaatcccagcactttgggaggccaaggtgggaggatcatgaggtcaggagttcaagaccagtctgaccaacagggtgaaaccccgtctctactaaaaatacaaaaaaattagctgggcatggtgacgtgtgcctgtaatcccagctactcaggaggctgaggcaggagaatcgcttgaacttgggaggcaaaggttgcagtgaaccaagattgcgccactgcactccagcctgggggagagagcaagactctgtctcaaaaaa

SEQ ID NO: 887410 - DNA, 513 bp, Homo sapiens
ttcttctagtacattcattatgtataccttagtatgcttaatgccccaccatatttctctgacactgccatttttcatcatttttcctctctgtttttcagaatactgatctctaacaatctatcttcaagttcactgattgattctcatgacagckcaaatctattaaactttctagttcttttttttttcattttggttgttatatttttcacctttaatatttcaactaaatcctttttaattatttccatttttgatatattttatctggtgaaatactatcaacatacattccttcaaaattttaactttttttttctttagctttgtgggcatagttataatagcttctttgaaaatattttctgataagttgccatgtttctatccctcaaagtctatttcttttgcatggctttttccctatgtatcagtctcattttcctgtttattgaaacatttttttggttgaaataaggacattttagagaacacagtttatctagaatt

SEQ ID NO: 887411 - DNA, 654 bp, Homo sapiens
gaaaagggatggggaacctaggggatgagcgtctctgatgactgtctgttggtgctgcccagcaagcaaaagctcctgggctctgtgccatctgagggactgtcgctgcctgctccctaaggagatctccctaccagctcacacatccatggatgacatgaggtatcctgcagctaggatctcagagttccatggcaagagggaaccatcccccagttccctcttcatccctttcccagaagccatttggggccaggaactagatctagtgtttgggaatgcgtggaggattaccagtttcctctctcttcaacctcagcttcaacatcacctctctatacattctcagccttttatttccaaaaaactgtccaaattatggtggtttacaagatgattcagtctcacttggtgcaagcagcactttctggctgcatctagttggccatcgtgcccttttatacrcaggcatacctcagaaatattgtgggtttggttccagaccattgcaatgaaacaaatatcaaaataaagctagtcacttttttaaattttgctttcccagggtgtataaaagttacttttacactataccatagtctattaaatgtgcaatagcattatgtctaagaaaacaatgtatatactttaatt

SEQ ID NO: 887412 - DNA, 602 bp, Homo sapiens
taagagcatgtgttgaggggaaactgacatatttgacaataattagtattaccaagaaactttaaaagttagaaaaagaacttaatctttggctacctaaaagtaatactaattataggcttcatgcaaattaagtccaattatcatgcaacacaataatatgtctatcattataatatgtcaagttaactttcttgtaaattttccataacaattttgaactttttttttggacattaatattaatttatttttttattattattatactttaagttttaggatacatgtgcacaatgtgcaggtttgttacatatgcatacatgtgccatgttggtgtgctacacccattagctcgtcatttagcattaggtatatctcctgaygctatccctccccactgctcccaccccacaacactccccggtgtgtgatgttccccttcctgtgtccatgtgttctcattgttcaattcccacctatgagtgagaacatgcggtgtttggttttttgtccttgcgatagtttgctgagaattatggtttccagcttcatccatgtccctacaaaagacatgaactcatcattttttatggctgcat

SEQ ID NO: 887413 - DNA, 625 bp, Homo sapiens
cgggcgcccctcccccagcctcgctgccgccttgcagtttgatctcagactgctgtgctagcaatgagtgagaatccatgggcataggaccctctgagccatgtgcgggatataatctcctggtgtgccattttttaagcccatcggagaagcgcagtattggggtgggagtgacccgattttccaggtgccgtctgtcacccatttctttgactaggaaagggaactccctgaccccttgcgcttcctgagtgaggcaatgcctygccctgcttcggctcgcgcacggtgcgctgcacccactgtcctgtgcccactgtctggcactccatagtgagatgaacctggtacctcagatggaaatgcagaaatcacccgtcttctgcatcgctcacgctgggagctgtagaccggagctgttcctgttcggccatcttggctgcttccacaagaattctactttttaaggtataaggataacattgaggaatgaaaacagctttggatttttgttagtttatgtgtcctcattttttccagtgactcaacacctgggcttgctcattgtctctattgtctaaaataaatgcattctgataagcgtcacttctctttgattgtgaat

SEQ ID NO: 887414 - DNA, 625 bp, Homo sapiens
cgggcgcccctcccccagcctcgctgccgccttgcagtttgatctcagactgctgtgctagcaatgagtgagaatccatgggcataggaccctctgagccatgtgcgggatataatctcctggtgtgccattttttaagcccatcggagaagcgcagtattggggtgggagtgacccgattttccaggtgccgtctgtcacccatttctttgactaggaaagggaactccctgaccccttgcgcttcctgagtgaggcaatgcctcgccctgcttcggctcgcgcacggtgcrctgcacccactgtcctgtgcccactgtctggcactccatagtgagatgaacctggtacctcagatggaaatgcagaaatcacccgtcttctgcatcgctcacgctgggagctgtagaccggagctgttcctgttcggccatcttggctgcttccacaagaattctactttttaaggtataaggataacattgaggaatgaaaacagctttggatttttgttagtttatgtgtcctcattttttccagtgactcaacacctgggcttgctcattgtctctattgtctaaaataaatgcattctgataagcgtcacttctctttgattgtgaat

SEQ ID NO: 887415 - DNA, 569 bp, Homo sapiens
aggaaaatggattctcccttagagcccccaaaggagtactacactattgacactttgatttgaggacttctgacctccagaaatgttaagtaataaatgtgtattttaagacattaagtttgtgataatgttttaatagcagtaatggaactaatgtataagaatttttacttatttatgtaggctactcttgtactatgctgaatagtacatayagtaataaccatatggtaatatctaaaactcataactgtgattttctaataattgggtggccaacagtgttgtccctcattaagccaaagcaattatccggtgctgacaagccagtcaaaatcattcaaattcatgtatgtgattgattgaaatggaagcactgaggatcattgaagaagtaccatggaaacagcatttgccattccaagatatttagatgctttcatgactactcatcaatgaagtaatgaaaattttgggaacagatgatcataattttgagtacggttcaaagaattttaaagtaatgacaaatgtctatgcttactatagggagatttgccagaaagaga

SEQ ID NO: 887416 - DNA, 651 bp, Homo sapiens
atgctttgctgtttagaaatttcttcctccagatacccaaaatcatctttcccaagttcaaagttccataaatctctagggcaggagcaaaatgccactagtctctttgctaaaacataacgagtcacctttgcttcagttcccaataagttcctcatctgcatctgagaccacctcagcctagactttattatccatatcggtatmagcattttgggcaaagccattcaacaagtctctaggaagttccacacttgcccacatttttctgtcttcttctgagccctccaaactgttccaacccctgcctgttaccaagttcaaaagtcgcttctacattttcatgtatcttttcagcaacgcttcactcgactggtaccagtttactgtatttgtccattttcatgctgctgataaagacatacctgagactgggcaatttacaaaagaggtttaattggactgacagtttcacgtggctgggagagcctcacaatcatggtggaaggcaagaaggagcaagtcccatcttacatgaatggcagcaggcaaagagagaatgaggaagaagcaaaagtggaaacctctgataaacccatcagatcttgtgagatttattcagtttcacgagaagagcatggaaaagaccaa

SEQ ID NO: 887417 - DNA, 651 bp, Homo sapiens
atgctttgctgtttagaaatttcttcctccagatacccaaaatcatctttcccaagttcaaagttccataaatctctagggcaggagcaaaatgccactagtctctttgctaaaacataacgagtcacctttgcttcagttcccaataagttcctcatctgcatctgagaccacctcagcctagactttattatccatatcggtatcagcattttgggcaaagccattcaacaagtctctaggaagttccacacttgsccacatttttctgtcttcttctgagccctccaaactgttccaacccctgcctgttaccaagttcaaaagtcgcttctacattttcatgtatcttttcagcaacgcttcactcgactggtaccagtttactgtatttgtccattttcatgctgctgataaagacatacctgagactgggcaatttacaaaagaggtttaattggactgacagtttcacgtggctgggagagcctcacaatcatggtggaaggcaagaaggagcaagtcccatcttacatgaatggcagcaggcaaagagagaatgaggaagaagcaaaagtggaaacctctgataaacccatcagatcttgtgagatttattcagtttcacgagaagagcatggaaaagaccaa

SEQ ID NO: 887418 - DNA, 598 bp, Homo sapiens
tactccacatactgcctggggctcattaggggcttcctgtctgatgcttctttctcagcccttcacagatattgggatacaagaaatgctgctaatactctcttttgcattccataagagcgaaaaataacttttgtttgygtttcttttcacaaaaatataaacataggagtttaaaaacaaaaatctgcctcttgtctacgttcaggtagaaagcatcttattctagtagatatttctatatttttattcctctcctgttattcttttcagggattacttgatatttctactcactaataagctctagactcactttgtggtcttaaaattctactctcctgctggagagagaaccggtttatagctcagtgtcagactggcccagttggctgcatctccaagaagtagagaagaaacctgaaaataagactgagcctaaggaacaaaagccacccagaatctcagagctcctgggagaagactagagctcttcaaccatgtcatgaacccacacctaaaaaaggagcttaactacttccttttttagtaaaacataaataagagagattcacttaggaaatagaacctgacttta

SEQ ID NO: 887419 - DNA, 655 bp, Homo sapiens
acttggagaagtggggatgggagtcataaaaatggggagagagatttacattttctttgtgttcaacttttcttcttactgcaagcatgtatttgttaaaaaattaaaattcagttaataaaaggccccccttttataaaaggagggctttaaaacctcagggagttgttagcactgagtaattaataatggaaatgtagcccttagttctaattcctccaacattgatgaccaatgagaaatttctaaaatggtctcaaggggtcagatgtgggctttactatttactagtcatgtggccttggggaagccccttctggacttttctgtcaatgaagaggttggaccagacttgggatatgcaaaggagatgttgcatctgctgccttggctaagggtgtggaagaatagtgaagaagcagaggaattcagatatctctgcttcaagagtggattcagcctttcctagtctayatatatggagcatccatgtaagtcacagtcaatacgagggtcctgaggttaaaatatactgaaaaatcttatatcctgtggatatcatgaatgcacatctgacattggttaccattgagtgcttatgatgtgtcaagcactgaaccagcaactttatatgcagccttttatgaattcttag

SEQ ID NO: 887420 - DNA, 586 bp, Homo sapiens
aggccaaaagctatacaacactgatgatgacagaaaaaaaaaatcaaaatcactaaagggacatactatgattacagcctgaaagacacaacatggtaaaaaattcaattcttttcaaattgacttacagatttaatttctgtcataatgggaccagagttggttccttccagtggattcatggtctcactgacttcaagaatggagctgcggaccttcacrgtgaatcttatagctcttaaagatggcacagacccaaagagtgagcagcagcaagatttattgtgaagagtgaaagaacaaagcttccattgcgtggaaggggacccaagtgggttgccgctgctgattggggtggccagcttttatttccttattcatccccacccatgtcctgctgattcgtccattttacagagtgctgattggtccattttacagagtgctgattggtccattttacaaacctcttgtaatcagaaaagttctccaagtccccactcgacccaggaagtccagctggcttcacctctcaataatccaagcataattttagtacatgtagataagatggttacaaaattta

SEQ ID NO: 887421 - DNA, 586 bp, Homo sapiens
aggccaaaagctatacaacactgatgatgacagaaaaaaaaaatcaaaatcactaaagggacatactatgattacagcctgaaagacacaacatggtaaaaaattcaattcttttcaaattgacttacagatttaatttctgtcataatgggaccagagttggttccttccagtggattcatggtctcactgacttcaagaatggagctgcggaccttcacagtgaatcttatagctcttaaagatggcacagacccaaagagtgagcagcagcaagatttattgtgaagagtgaaagaacaaagcttccattgcrtggaaggggacccaagtgggttgccgctgctgattggggtggccagcttttatttccttattcatccccacccatgtcctgctgattcgtccattttacagagtgctgattggtccattttacagagtgctgattggtccattttacaaacctcttgtaatcagaaaagttctccaagtccccactcgacccaggaagtccagctggcttcacctctcaataatccaagcataattttagtacatgtagataagatggttacaaaattta

SEQ ID NO: 887422 - DNA, 486 bp, Homo sapiens
tgctgttacttgcttttactttatttgctgtaataacaatgtcttcacattttcccttttttcttttttttttttttttttacagagtctccctttgtcacccaggctggagtgcaatggcacgatctcagctaaccataatctctgcctcctgggttcaagtgattctcctgcctcagcctcccgagtagctgggattayaggcatgtgccaccatgcctggctaattgttttatttttagtagagacagggtttcaccatgttgaccaggctggtcttgaactcctgacctcaggtgatctgcctgcctccatctcccacagtgctgtggttacaggtgtgaaccactgtgcctggcatattttccttctttttgagtcacatcatgtgtctctttttatgttgctgccttaatttgtccatcctttgtatgtgtggttgtggtaatggtcatttgatggattccatcaaatgcttaagatggt

SEQ ID NO: 887423 - DNA, 486 bp, Homo sapiens
tgctgttacttgcttttactttatttgctgtaataacaatgtcttcacattttcccttttttcttttttttttttttttttacagagtctccctttgtcacccaggctggagtgcaatggcacgatctcagctaaccataatctctgcctcctgggttcaagtgattctcctgcctcagcctcccgagtagctgggattataggcatgtgccaccatgcctggctaattgttttatttttagtagagacagggtttcaccatgttgaccaggctggtcttgaactcctgacctcaggtgatctgcctgcctccatctcccacagtgctgtgrttacaggtgtgaaccactgtgcctggcatattttccttctttttgagtcacatcatgtgtctctttttatgttgctgccttaatttgtccatcctttgtatgtgtggttgtggtaatggtcatttgatggattccatcaaatgcttaagatggt

SEQ ID NO: 887424 - DNA, 577 bp, Homo sapiens
atactaaacgtgctttaaaaatgaaaaagataaacacgtatttccaatgcatatatttccactacagaggctccaaaaccatatctgcagtatctagttcacaaggacccagtaattgcagaataaataaatgacttygcatccacttcttaactctggcaacttattagtttccttaaacataaaataatttagaatctcaagtctcagaacagataaagtattaatacaagttaggagacagtatctttacttttttttcacattattttactgaaatacaagtttggcatcaataaatcatcatatatttcgtaaagcctaactctcagtctgaaaaactagttaaaagttctttgaaaatattttggttatatcaatccataaaaatgattgcagacttactttcccaagcagatgacttaacatactcttgaacaatgctctttacataagcatttaaagatgtcttgtgaagtccaatggagctacacgtaggggatggcttaaaatagctttcattaacacgtagccagtcacacagctggaaaagaaaacagttattactttattttaa

SEQ ID NO: 887425 - DNA, 634 bp, Homo sapiens
tgtgtttgtgtcccttagatatattgaagtcctaaaccccgctgcctcaattagtgaccttatttggagacagggtagttgtacatgtaagcagttaagatgaggtcatactggacaatctcttaattcaatatgactggtgtccatataagaagaggagaagacacagaggaaagacagccatgtgaagacacatagacacacacaggggacagcatcatgtgacaatgtaggcagagatgggagttatgtatctgcaagctaaagagtgccaaggatttctggtaataagcagaaactgggggatggggtgtgtgggttagggtggcggggcaggcagagagagagaatggccttgccagcaccctgatttcagacttctagccttcagaactgtgacagaaaaaaaattctttttaagccacccagcttgtggtactttgttacgatgaccctagaaaacttaatacagcatcscagggccaacctcagttttaacctccctatgaaattgacagttttttctaaccagtggctcttggtctctcaactcagcaagcacaggtagagaatgggacacgaagacccctcccttcccccccatctataccctattaaagggagaaatgggatt

SEQ ID NO: 887426 - DNA, 584 bp, Homo sapiens
agccttagcatagataatggggtagagagaagctaaatgcatgactttgaaactaagtttgtttgtttataataagggaattatggtttctctgaattaaatgaaggttctaattttaaatgaaggacctctaatacccagaggtccacataatagccaacatatttgtctatattttggaaattcttaggactgttcctcatagacagaatataacttcatttcttacttaggtaataaagaccaggacatctattccaagtgccctcatcttttccccttgctccygtataattccagcatcacctactatattgtgtttcccagactgacttccagctctttatttctgatgttcttctttcatctttttcatcttcaagtttcatattatttctatttcagacactctagtgactgcttctctagctagagtcatatcatcctgtcctctttctataataccttgtgatgcctttaagcaagataactttgtttctcacttgactgtcaaatcacttacaatctgacttctccctacccacagccccagaatactttctcctaggtagccagtgctgtcc

SEQ ID NO: 887427 - DNA, 621 bp, Homo sapiens
tatttgtcttgatttgtaagtgattaaaacatttatccttgacttatgaaattatgacattaaatggtggttttacattctttccagacaatccaggattcttagagcactttaactcctgacatagatgcaattataccattttccttgtctttctctagatctttcaaaactcacacctaatgctctagagatatgtgtccattgtgcttccttccttccccgcacctcccatggcattaaaatgtttcattctccttgatgaattacatgcccagttgattyttaagcactgctcacagtatgcaaacttgaaactccaggctggggtgtccaatcttttggcttctctgggccacatcggaagacaaattgtcttgggccacacataaaatacactaacactaaaaaatagctgctgagctaaaaaaaaaaaaaaaaaaaaaaaaaaaatcacaaacaaatctcatagtgttttaagaatgttcacgaatttgtgttgggctgcattcaaagccttcctgggcagcatgcggcccaccagtgcgggttgaacaagcttgctgtaggcaatccaattcaatccttctccaattaaagaaaaaaaaaaaaaatggaagc

SEQ ID NO: 887428 - DNA, 621 bp, Homo sapiens
tatttgtcttgatttgtaagtgattaaaacatttatccttgacttatgaaattatgacattaaatggtggttttacattctttccagacaatccaggattcttagagcactttaactcctgacatagatgcaattataccattttccttgtctttctctagatctttcaaaactcacacctaatgctctagagatatgtgtccattgtgcttccttccttccccgcacctcccatggcattaaaatgtttcattctccttgatgaattacatgcccagttgattcttaagcactgctcacagtatgcaaacttgaaactccaggctggggtgtccaatcttttggcttytctgggccacatcggaagacaaattgtcttgggccacacataaaatacactaacactaaaaaatagctgctgagctaaaaaaaaaaaaaaaaaaaaaaaaaaaatcacaaacaaatctcatagtgttttaagaatgttcacgaatttgtgttgggctgcattcaaagccttcctgggcagcatgcggcccaccagtgcgggttgaacaagcttgctgtaggcaatccaattcaatccttctccaattaaagaaaaaaaaaaaaaatggaagc

SEQ ID NO: 887429 - DNA, 621 bp, Homo sapiens
tatttgtcttgatttgtaagtgattaaaacatttatccttgacttatgaaattatgacattaaatggtggttttacattctttccagacaatccaggattcttagagcactttaactcctgacatagatgcaattataccattttccttgtctttctctagatctttcaaaactcacacctaatgctctagagatatgtgtccattgtgcttccttccttccccgcacctcccatggcattaaaatgtttcattctccttgatgaattacatgcccagttgattcttaagcactgctcacagtatgcaaacttgaaactccaggctggggtgtccaatcttttggcttctytgggccacatcggaagacaaattgtcttgggccacacataaaatacactaacactaaaaaatagctgctgagctaaaaaaaaaaaaaaaaaaaaaaaaaaaatcacaaacaaatctcatagtgttttaagaatgttcacgaatttgtgttgggctgcattcaaagccttcctgggcagcatgcggcccaccagtgcgggttgaacaagcttgctgtaggcaatccaattcaatccttctccaattaaagaaaaaaaaaaaaaatggaagc

SEQ ID NO: 887430 - DNA, 621 bp, Homo sapiens
tatttgtcttgatttgtaagtgattaaaacatttatccttgacttatgaaattatgacattaaatggtggttttacattctttccagacaatccaggattcttagagcactttaactcctgacatagatgcaattataccattttccttgtctttctctagatctttcaaaactcacacctaatgctctagagatatgtgtccattgtgcttccttccttccccgcacctcccatggcattaaaatgtttcattctccttgatgaattacatgcccagttgattcttaagcactgctcacagtatgcaaacttgaaactccaggctggggtgtccaatcttttggcttctctgggccacatcggaagacaaattgtyttgggccacacataaaatacactaacactaaaaaatagctgctgagctaaaaaaaaaaaaaaaaaaaaaaaaaaaatcacaaacaaatctcatagtgttttaagaatgttcacgaatttgtgttgggctgcattcaaagccttcctgggcagcatgcggcccaccagtgcgggttgaacaagcttgctgtaggcaatccaattcaatccttctccaattaaagaaaaaaaaaaaaaatggaagc

SEQ ID NO: 887431 - DNA, 563 bp, Homo sapiens
tccacaaacagcttgtaccatgtgcctggaaaaccacaggcactcaatgccaacccgttaaggagtggcccaaggccatgggagcccacctcttgcatcagcatgccccagatgtaagacatggagtcaaaggagatcattttgtagctttaagatttaatgactcccccactggatttcagacttgcatggggcctstagccccttggtttgggccaattccttccatttggaatgagtgtatttacccaatgcctgtacccccattctatctagaaaataactaccttgcttttgattttactggctcaaaagtggaaggaacttgccttgtctcagatgagactttggactgtggacttttgagttaatgttgaaatgagttaagactttggaggactgttgggaaggcatgactggttttgaaatgtgaaaagacatgtgatttgggaggagccatcggtggaagaatatggtttggctgtgtccccacccaaaactcaccttgaattataatacttgttaataataatattgtcaataatatacttgtcaatgataac

SEQ ID NO: 887432 - DNA, 667 bp, Homo sapiens
tgaggcttagcaaagacaaatcttgtttcagttaatacaaagccaagtgggaattcaaccttgaaacatgctgtgttttgtcaactgttctacagagtcagtggggagcaaataaattacagaaagagcacagaaagggaagaaagatgcagaagaatcttcctggcctgctgacaaacctaaatctgaccctgacccctggcagatcatctgggtgaagatacagtatctccgtctgtttccaacccaagtaggacagtgcagtgatcctgtcatttacataatcttctctgtccccawagcaacccctctgcctgtggaattcatttacagcctgctctctatgcaataaagtttcaggaacttacagacttcaatagctgtatttcagtttagacaagtaaggcgtgtgaaaggaagaggagctggaaggaaggatagaaaagcaaacctttgtgaatcatttataataagacctgagagcccttgtttgctttcacagttgagtggtcctttctggaataccaaggacactgcgatggagcatctccttggtggaaggggaggtatctcccacatcagggagtgtgctcctccttcttcctccccacctcacctgggctaggaatgggagagaagcgagtcagcctccatgcagtttcaagca

SEQ ID NO: 887433 - DNA, 632 bp, Homo sapiens
caagtgttgtgggagggacccagtgggagataattccatcatgggggtggtttcccccataccgttcttctggtagtgaacaagtctcacaagagctgatggttttatgaagggtttctacatttgcatcttcctcattttctcttgccgccgccacataagaagtgcctttcacctctcatcatgattctgtggcctccccagccatgtggaactgtaagtccaattaaacctctttttcttcccagtctagggtatatttttatcagcarcatgaaaacagactaatacagtaaattggaaccagcagagtggggcgttgctgaaaagatactcgaaaatgtgtaagtgactttggaactgggtaacaggcagaagttggaacagttgggagggctcagacgaagacagaaaaatgcgggacaatttggaacttcctggagacttgttgaatggctttgacaaaaatactgataatgatatggacagtgaaatccaggctgaggtggtctcagatggagatgaggaacttgttgggaactggagcaaaggtgacctttgttatgttttagcaaagagactggtggcattttgctcctgcctgagagatttctggaactttgaacttgaga

SEQ ID NO: 887434 - DNA, 632 bp, Homo sapiens
caagtgttgtgggagggacccagtgggagataattccatcatgggggtggtttcccccataccgttcttctggtagtgaacaagtctcacaagagctgatggttttatgaagggtttctacatttgcatcttcctcattttctcttgccgccgccacataagaagtgcctttcacctctcatcatgattctgtggcctccccagccatgtggaactgtaagtccaattaaacctctttttcttcccagtctagggtatatttttatcagcaacatgaaaacagactaatacagtaaattggaaccagcagagtggggcgttgctgaaaagatactcgaaaatgtgtaagtgactttggaactgggtaacaggcagaagttggaacagttgggagggctcagacgaagacagaaaaatgcgggacartttggaacttcctggagacttgttgaatggctttgacaaaaatactgataatgatatggacagtgaaatccaggctgaggtggtctcagatggagatgaggaacttgttgggaactggagcaaaggtgacctttgttatgttttagcaaagagactggtggcattttgctcctgcctgagagatttctggaactttgaacttgaga

SEQ ID NO: 887435 - DNA, 667 bp, Homo sapiens
acaggatataactgtacagtaattatgtgaaaatgtggttaatctcattgtctgtcagagaaacacaaattagagcaataagattccactatatatacccagtagaatgataagtaaacaaatgaaatatgaccaaggaagagaagcaactagaatttctgtattaagttgtagatataccttagtacaaccackcagaaaattgtcgatatttatcaaaactgattgtatgtatacactttgatgtaccaattccactctttccaacaaaagaaatacatatgttatcaaaaaaaaattgtgaggatgttcatagcagtaatattcttgcttcaaaagacaaaatctctgtcaatagttaattaaactgccatatatccacaaaaggaaattttatacagccatacaaaatacaataacctattgtacttattgtattgctacacacaaaaacatgggtgaatctaccttccctaatattgaaaggaagcagccaggtacagagaaagatagtctgcaagatttcacccatataaagttcaaccatgcaaagcggagggcgagagtagttggaattgtactgtcttttggggaggtatgtcacgtttgacacagggcatgggagacatctatgatcctgctaatgctctatttcttcatctgcatg

SEQ ID NO: 887436 - DNA, 662 bp, Homo sapiens
actgggtaagcatgttttcaatctcatttttgaattatgaattgctgtgtatagaaatacagattgtttctgtgccttgatcatgggtattgccatcctcttgaactatattcttagttcaaataagatwtttttgtaaattccttagaattttctatacacaagattatgtcatctgaacatagagatagttttacttcttcatttccagtttggatactattcatttatttatttatttatttatttattttcttgctaggttgctcaagctaaaaccgcaatacaatgttgaactgagctggtgacagcagacactcttgcctttgtcctcatcttatggggtaactgatcagtcaccattgagtatgacgttagccctgttttgtttttgttttgtttcttttttttattttttggtacttgccccttatcaggttgagaaaatttcctgccattcttagtttatttacttttttctcataaaagggtgttgggctttgtcaaatgctttttctgcatatattgagataatcatgtgattttgttctttattctattaacatgatataccatattttctgatttttgaatgctcagccttgctttcttgtcataaatctcacaaagacatattgtgaagtcctttttatatgtggctc

SEQ ID NO: 887437 - DNA, 617 bp, Homo sapiens
tatgtaaagattttatcattatttgcctcagattaaattatatacatgtaaaaagtaggtgagtgctcagctttcttactttgggagattaaatttatgtcccacttaacaaattgtttttcccacagatttttttcataaatctattccaaattcaagaaacataaaataacagcaatatactatagtactgatgacractttcatttgctcagttatagcatgggtttctggtttactgttctctgctctattcttgcatctggttttatctagttttatcttcttgctgcctagattattggcatatctgctttagttgaaacctttcactgcattataactctttgcgttttgcatgtgataaaagtatttttattcaagtagcaaatctttactgaggatctattatgggcccagcactgtgtctcatattgccaacaggccatgaataaggtactaggttgctggtcgactttgcatgaccaatgtggtaaaagttgcctgagagagtcctcatgcactgtgctgagatgaccagtgctgagtctagaccagaagtgcattcattgcctccgttcctaagattgtcaactgccatgcctggacatctgttt

SEQ ID NO: 887438 - DNA, 634 bp, Homo sapiens
aaatgtctgtgcacaatcatggtgccatctgttggtgaagagtagaaatggtgggcttttgctctgaaaaggaactttgttcatctgtatcaacggtttgaaagtttgtaaatagcaaagcaccaatatctattaagtattaatatatagcagcataattactcctcatgtatcctacaactatgtacctgcaatggactgtaattcacctcgtgatcccmagaggccttgcagatttgtgtgtgtgtgtgtgtgtgtgtgtgtgtgtgtgtgtgtgtgtgaatgtgtgcatgtgcatataccctgtgggatacagaaagtgaaaagaagttagcagtctgtgcccttgtaactcttcttgcagacctagcattgcaggaatttgttcatctggctttttggatgaggtcccaccttttctgcattgccattgaacatgacttctcatcacatagcagaaaaagcatggcatttgaaacaagaaactcttggtaatagccttatttctgccattcactgactatttgatctgaagcaagctaccaaatttctgtggtctttggttttctcatataagaatcaggatgataacaactgcaacacagcaagatagttgtgataaaatgtatgtcag

SEQ ID NO: 887439 - DNA, 634 bp, Homo sapiens
taaaggtacaggtaattgacgttagtaggttcctgtaaataacattgattgcaaaacctaagtaatacactattatcatgttttcattcttgcaaaatgttttgttttcctgaaattatcatggttttcctttctatatactgagacttaattttttttctgctttggattatttagctatcaatggatttttgtaaatgctgaagaatatcagatggtctatcattttattattgtttatatttctctaaagacccccctgtagtgcccattctccacatacagtctaaaccatttgctttctgggctgctatatagtgttatgctgtattatcctaggctgattgcagaactagatggaaaagtgggttggagcaagacagttaagrggttggtttgccacaaagagtttggattcctttaagtcactggagaaccataagaagtgataagatgaaagtagtgtttgacagtgtcattgtaccagagtaactgtgggtcaaggaggctgtgtctatcctgaatttcatggtttcaggctgcttttacctacacactgttcttccttagaactgccatacatacatttaagctatacaagcaataatatagagtaactaagcaaaggctgatc

SEQ ID NO: 887440 - DNA, 699 bp, Homo sapiens
gatgctgataaatgaattgtctcaatcagctatgatctcactatgaatatcggagcccacaggggctacaaggaaggaaagcatttgatctggtggttccatttggacagtaaatccctccctgcacagttagtcgatgtggtattgcaaaggacgaaagaatattccttgagtaaaagttccagggtgacagttaagggctgggacatagaaaatatatgaggcttcttagaggtatccatcacttgagtagtttgttgactcctacagaggttgtataacactgctagaatttaagattgataaatctatcatagcgcctatatcaatttaaaaattatcaaatttatttttaatagataaatttcttcttaggaattcaaagacaaaatgggaaattggttgcttgatttttcctcctctgagcaccttcactgagtacttgtttcattgtttagtttatttgctaatgcagggtaattattttccctaggtcttttctgtttattgtatctaaaagtatctttaccaagagaccctctcccasggtttaataaccagagtgggaacatgtagatcagggttgtccaatcttttggcctccctggatcacattggaagaattgtcttgggccacacataaaatacactaacattaacaatagctgatgagttaaaaaataaaaataaaaataaatc

SEQ ID NO: 887441 - DNA, 617 bp, Homo sapiens
caaaatcgcaacaaggagtgtggaaaggaagtctctcttagaattagactctcatgaacaaaaagcaaggcaagacagaaaaaaacaaatagaatttgaggagtaactcaggacaagatgtatccaaggaatgccagtctgagaagaaaacttttgaatacctcagttcctggggtagcttggtgtgttcgttttgcattgttatttgctttgttataaaggactgcttgaggctgagaaatttatayagaaaagaggttgatttggctcatggttctgcaagctgtacaagaagcgtagcatcagcatcggctgctggcgaggcctcaggaagcttgcaattttggcaaaaggcaaagggggagccagagtattacatagcaagagagggagcaaaagagaaacgagggagtgctgtgctcctttaaacaaccagattttttgtgtgaactcattactactcattaccatgggaatgacatcaagctattcatgagggatccacttccatgacccaaatacctcccacaaggccctacctccaacattggaggtcacgtttcaacatgagatctggaggggacagacatccagacgataacatttggagaataaac

SEQ ID NO: 887442 - DNA, 617 bp, Homo sapiens
caaaatcgcaacaaggagtgtggaaaggaagtctctcttagaattagactctcatgaacaaaaagcaaggcaagacagaaaaaaacaaatagaatttgaggagtaactcaggacaagatgtatccaaggaatgccagtctgagaagaaaacttttgaatacctcagttcctggggtagcttggtgtgttcgttttgcattgttatttgctttgttataaaggactgcttgaggctgagaaatttatatagaaaagaggttgatttggctcatggttctgcaagctgtacaagaagcgtagcatcagcatcggctgctggcgaggcctcaggaagcttgcaattttggcaaaaggcaaagggggagccagagtattacatagcaagagagggagcaaaagagaaacgagggagtgctgtgctcctttaaacaaccagattttttgtgtgaactsattactactcattaccatgggaatgacatcaagctattcatgagggatccacttccatgacccaaatacctcccacaaggccctacctccaacattggaggtcacgtttcaacatgagatctggaggggacagacatccagacgataacatttggagaataaac

SEQ ID NO: 887443 - DNA, 593 bp, Homo sapiens
atcagtgtgatacatcttattaacagaatgagggatccaaaccatatgatcatttcaattgattctgaaaaagcatttaataacattcaacatcttttcatgataaaagaaaacctcgaaaaactggatatagaagggacataccacaacataacaaaagccatgtatgacagacccacaagtagtatctgatatgttttggatctgtgtccctgyccaaatctcatgttaaattgtaatccccaatgttagaagtgaggactggtgggaggcaattggatcatgggatgggtttcccactttggtgctgttctcgtgatagagttatcacaggatctggttgtttaaaagtgtggggcatttacccccaccttccttctgctctggctatgtgaagatgctgctccagctttgccttacaccatgaataaaagctacctgaggcctccacaactatgcttcctgtacagcctgcagagccatgagccaattaaatttctttgctttataaattacccagtcacaggtatttttatggcaatgtgataatggactaatacagcatcatactgaatggggaaaaactgaaagcc

SEQ ID NO: 887444 - DNA, 611 bp, Homo sapiens
ctaaaaatacaaaaagtagctgggcgtggtggtgcacacctgttctctcagctactcaggaggctgaggcaggagaatcacttgaacccgggaggcagagattgcagtgggccaagatcacaccactgcactccagcctgggcaacagagtgagactctgtctcaaaaaaaaaaaaaaaaaaaaaaaatggaagaagatatacatccaaatgcaaacagagattgtcattcagtggtgggaktataagtgcactctcttttattctttatatatatcagtattttagaatttttcctctaagaattatatattaattgtgatttttttatttaagagagaaaaaagtatctaggcttggcactcacagatgcacattctgccagcaatatgctgtaacattagaagggaaattagatgaagacccagaaagactctggaggactaaagataaaagatatgctttcacataggcttttatttatgaataaaataaaatatgaattttatttattttatttttattttattcataaaataaaatatgaataattagaatgatattgtttagaattgttccagtaatatacacttgttcaagcataaaggtaat

SEQ ID NO: 887445 - DNA, 570 bp, Homo sapiens
cttgaagtgccttgacattttgtcaaaaataaattaatgcttatatgtgtgggcaaaatggtacatgatacatttaaataatttgtctgtaaatctcagtgggatacctgaataaaagagtgggccaaccattaaaaatgataattacatgattacaaatctcttattttcattaaatatagtttgctttaaattatttctttatgactattccaaaacaaatagaaaaattttctttgattctaaaaaccacatgactggtaacatccatattatgaaaacaaatcatcctatatgttactgagtgtatgggttttttggtgaacacaagtcttgttccagatatttgaatttgataatgttcacagattctagaattttctttgaatgcaaatacacttggaagtgacacatatacagaraaaaccaaaccctcaattttcctaaaaaaatccagacctatagcattgctaaaataatcataatttaactttttatattaggagtaccaaagtaagccaatatttaattctgtgacagaggagtatgaaaaagaaaacccagtggcta

SEQ ID NO: 887446 - DNA, 589 bp, Homo sapiens
gtattaaacattctattaaccagacataatacaattctacttggagcaagatacagtcattctttatgtccacttctgactatccattatgttggtcatcatatccatggtcctcctgcagcattgctccactcatcagcaatgtctggccagtttctttgttgctccccttacatacatacctacaccgtctcactagtaaatactgatttttgcattaagctgccttttctcaagtggagtcttctcaggttctgtrgtcaactgttgttctgtctatcccccatgggcaccccactgctaatctttttcttcttttccttggccagtctccacaattcactggcagcagcactcatgcttctttttcactgctttttgtcttttccaaggctgcatgtccatcgcaatcattctagggagcttaaaaaaaatgaataagcacaatccctggagattgattttgggatatctgggatgagctcttggcaatctgtgttttctaaaaactcctcagcagattttgaagttcgaatgatccctcttatgaaaggtgcagtgtgataatcacatacctttaactagaatc

SEQ ID NO: 887447 - DNA, 589 bp, Homo sapiens
gtattaaacattctattaaccagacataatacaattctacttggagcaagatacagtcattctttatgtccacttctgactatccattatgttggtcatcatatccatggtcctcctgcagcattgctccactcatcagcaatgtctggccagtttctttgttgctccccttacatacatacctacaccgtctcactagtaaatactgatttttgcattaagctgccttttctcaagtggagtcttctcaggttctgtagtcaactgttgttctgtctatcccccatgggcaccccactgctaatctttttcttcttttccttggccagtctccacaattcaytggcagcagcactcatgcttctttttcactgctttttgtcttttccaaggctgcatgtccatcgcaatcattctagggagcttaaaaaaaatgaataagcacaatccctggagattgattttgggatatctgggatgagctcttggcaatctgtgttttctaaaaactcctcagcagattttgaagttcgaatgatccctcttatgaaaggtgcagtgtgataatcacatacctttaactagaatc

SEQ ID NO: 887448 - DNA, 674 bp, Homo sapiens
  misc_feature 607: n = A,T,C or G
agagtggatctgacagtggcagatgggatggtgtatgcttctaaatacaagatttgtcacagttttacatgtaattgtgcaggcttccttttaagggtcctctacgacttcattagcaacaaagaattactctattaagctttataaataacatagccttaataattaaatcttgttccttctcagggccccaagtggactcactccttcagttcttaggtgttaggagctgcagtaaatgatattttccttatatttccttagggactttctgacttgtaataagtcctcatcattcaccccctcattgaagctgggactgaaataagtggtgycatatcctctcagacacaagagagcattttaaacaaattgatgaacagtcatcatttaaggaaaatattaaaagtacctgagacattttcatgggccataagttccctctgctacatacgaaccaagtgctatgaccaggtgaatcctaccctgcaaagatgtaggagtgagagaaatgaaaccccttttcttattcagactcagctttaaaaactccaagagcaaacaaaagctgttcatccattcttgcccaggaagaacctctccatgnataacattcggctattgtgtgcgttggtgcatattaggggcagaatgagtccatctgaatcagtggt

SEQ ID NO: 887449 - DNA, 649 bp, Homo sapiens
aaatttttaaatgtcagctgtatgttgtaagggaagagaaattacagctggaagaaaggatttaaaagcaattacttttaataattgaaatacagattctcagcctcaggtcttagtctctaacggtttaaagaataaaatgctttccaagacaatgcacattcttcagtgtctaattatgtaagaagaacaaattttcactacctgaggttaagtctggtgagtgcaaaaccaactaccccaagcctagtgctagatcaatattcaggtaataaaacaaccayttatcattatttttgactttactgttacatcagtgtgattgcattggtccttttagagctgtaaagatgtagtttcatattcaggtataaaaacatagaacagatttttttcccattcaacctaatacatctattaggtgaggtagctcttctctattaattatcattgctatggaggatccaatttaagtttcttgatttgttaatgctaatgaaatcattagagttctagaaattcaaaatagaaagcattttcttgtggtagaataaatgaagatctttttaaatggtggatattttcttaacaatactgcaagaatgtctcaacatttggtatctctcttcaaattgtccatgtatgtatt

SEQ ID NO: 887450 - DNA, 532 bp, Homo sapiens
gaggtcaaagctggagctgaaggttgggatctgccctcacagagttctcatcagtgttctttcttcctttaacacccttggagtagaacagtaaagaattacattaaggccgggcactgtggctcatgcctataatcccagaactttgggaggccgaggtgagtggatcacctgaggacaggagttcgagaccagcctggccaatgtggtgaaaccccatctttactaaaaatacaaaaattagccaggcatggtggcggatgcctgtaatcccagctactcgggaggcagaggcaggagaatcgcttgaacccaggaggtgaaagttgccgtgagccgagattgtaccattgcactccagcctgggtgacagagcaagactcygtctcaaaacaaaaaaaaaaaaaaaaaaaaaagaattacattaaatactctaaataactgttaagaatattgttgtgaatgaaaaattcagtttagtggttaagagcatggagcttggaatcaggtagatcttagatctaacctggaa

SEQ ID NO: 887451 - DNA, 645 bp, Homo sapiens
atatcaccaccgatcccacagaaatacaaactaccatcagagaataccataaaaacctctatgcaaataaactagaaaatctagaagaaatggataaattcctggacacatacaccctcccaaggctaaaccaggaagaagttgaatccctgaatagaccaataacaggctctaaaattgaggcaataattaatagcctaccaaccaaaaaaagtccaggaccagatgcattcacagctgaattctaccagaggtacaaagaggagctggtaccattccttctgaaattattccaatcaatagaaaaagagggaatcctccctaactcatgttatgaggccagcatcatcctgataccaaagcctggcagagatacaacaaaaaaagagaattttagaccaatatccctgatgaacatcgatgcaaaawtcctcaataaaatactggcaaaccgaatccagcagcacatcaaaaagcttatccaccatgatcaagttggcttcatccctgggatgcaaggctggttcaacatacacaaataaataaatgtaatccatgatataaacagaaccaaagacaaaaactacatgattatcttaatagatgcagaaaaggccttcgacaaaattcaacagcccttcatgc

SEQ ID NO: 887452 - DNA, 556 bp, Homo sapiens
cgcgatctcggctcactgcaacctccgcctcctggtttcaagcaattctcctgcctcagcctcccaatagctgggattacaggcataagcctatagaagtacgtaaagataaggtagtattatcaaatatgtgacccagagaaaagtgactgttgtaaaatgtgtcttctggctttctaactagaagggaagcctctttgcaggcagcccccgtctgaaagtgtgtctgtatttacagtgctgtcaacttggtggatgctcagtaaacatttgttaaatatggactragaaagatgagctagatatttgaagattaaactgttgaacttggaatgaatagtttcttttcaaatgtttcatgatgaagtaggaagccaaatcatgttagatggactgtttctaagggaagaatcaggtaaaccagctgcctattccatggataaatcaggattacctaagctcttcatgcactgcaacaagacatctaggctgtagctctgtcactaatcagtttctgactttaagtaggtcacatgaacctaaacttcctcatttg

SEQ ID NO: 887453 - DNA, 591 bp, Homo sapiens
ttagcccattgtgctaatctgtcacaggttttttggggatcttgattcactattccaaaatatgcactgccttctttaatgtcaaatttggaaaaccttattttcctctagtttaagatggtaatacaaattaaaatattgtatagaaaatgtccaaggaaggtcagagctgtaaaggctgaatctcaacrctctcctccaggttgataatctatagatcatcagtttcttcagttctttttttttttttttttttttttttgagatggcgtcttcctctgtcacccagtctggagtgcaatggcacaatcttggctcactgcaacctccacctcctgggttcaagcaattctcctgcctcagcctcccgagtagctggggttacagatgcgcgccaccatgcctggctaattttttgtggtttttttagtagagacggggtttcaccatgctggccaggctgatctcgaactcctgatctcatgatctgcccgcctaggcctcccaaagtgctgggattacaggcgtgagccaccgcgcccagcccatcagttcctttagagcatatttgtgcagcagttgtgaaatctc

SEQ ID NO: 887454 - DNA, 591 bp, Homo sapiens
ttagcccattgtgctaatctgtcacaggttttttggggatcttgattcactattccaaaatatgcactgccttctttaatgtcaaatttggaaaaccttattttcctctagtttaagatggtaatacaaattaaaatattgtatagaaaatgtccaaggaaggtcagagctgtaaaggctgaatctcaacgctctcctccaggttgataatctatagatcatcagtttcttcagttctttttttttttttttttttttttttgagatggcgtcttcctctgtcacccagtctggagtgcaatggcacaatcttggctcactgcaacctccacctcctgggttcaagcaattctcctgcctcagcctcccgagtagctggggtwacagatgcgcgccaccatgcctggctaattttttgtggtttttttagtagagacggggtttcaccatgctggccaggctgatctcgaactcctgatctcatgatctgcccgcctaggcctcccaaagtgctgggattacaggcgtgagccaccgcgcccagcccatcagttcctttagagcatatttgtgcagcagttgtgaaatctc

SEQ ID NO: 887455 - DNA, 537 bp, Homo sapiens
tacaaggagattaatgctgttttcatgcctgctaacacaacatccattctgcagcccatggatcaaggagtaattttgagtttaagtcttattatttaagaaatacattttgtaaggctgtagctgccatagagagtgattcctctgatcaatctggacaaaataaatccaaacccttctgcaaagggctcaccattctagatgccattaaaaatattcgtgattcatgagagaaggtcaaaatatcaacatgaacaggagtttggaagaagttgattacaaccctcatcaatgacttggaggaagtaactgcagatgtggtgaaaatagcraaagacttagaatcagaagtggagcctgaagatgtgactgagttgctgctagctcatgataaaagttgaatggatgaggagttgcttcttatagatgagcaaagaaagtggttttttgagatggaatctactcctggtgaagatgctgtgaacaatgttgaaatgacaacaaaggatttcaaatgttatataaacttagtcgata

SEQ ID NO: 887456 - DNA, 588 bp, Homo sapiens
gctggccagaacagaatgtggctcagaaaaaggaaaagcttggggtcctggctgcctcttacttcacagcaggattaatgaggtatggtttccaaggagatgcctcagtaatccctgaggaagcttgctggccctgggaaggcaaacaaacatttaaatgacattatggcaaagtcaaacagattggacaggagtggggaagcagtgataggaagggagtgraaccaagcaccctcatgttctccaatatatggatttaggaagtaagatactaattccttaaccatctcttgtgtgctaggcccttatcaaggatgatcacacttgattctacaatatccctgaaaccatggtatgaatcccattgtgcatatgaggaaactgaggctcaaagatgatagtgagaaagggccatgggactttcagactcagatactggaaactgggaatgagacatgatatgtggtcccagcaatgtccgcaaagcaaagaactggccaacagtgcctgactgggtgaagatttgaaggtgcatcaatgtatgtattactttcattgttagcctatgccttcctggactcctgacaa

SEQ ID NO: 887457 - DNA, 600 bp, Homo sapiens
ctcccaggccttttatgcttgatgtttttttcagggcccttcccattgtcatttcacaatctcattgaaatgtcagcttatgcactaaatgcgtgtaagttgggaatgcccaattttgtctaagaaaaaaggcctccccctcccccaaataagcacattctttcatttcctggggctcacccgaatgtctcacacaggctgtaaaacaactaccaccacctggctgggtgctgaggtgggcagattacctgaggtcaggatttcaagaccaacctggccaayatggtgaaaccccatctctactaaaaatacaaaaatctagccgggtgtagtggtgggctattgtagtcccagctattcgggaggctgaggcaggggaactgaacctgggaggctgaggttgcagtgacccgtgatcctgccactgcactccagcctgggtgccagggtgagactttctcaaaggaaaaaagaaggctgggcgtggtggttcatgcctgtaatcccaccactttgggaggccgaggcgggtggatcacacggtcaggagtttgagaccagcctgaccaacatagtgaaacccccatctctactaaaaat

SEQ ID NO: 887458 - DNA, 600 bp, Homo sapiens
ctcccaggccttttatgcttgatgtttttttcagggcccttcccattgtcatttcacaatctcattgaaatgtcagcttatgcactaaatgcgtgtaagttgggaatgcccaattttgtctaagaaaaaaggcctccccctcccccaaataagcacattctttcatttcctggggctcacccgaatgtctcacacaggctgtaaaacaactaccaccacctggctgggtgctgaggtgggcagattacctgaggtcaggatttcaagaccaacctggccaatatggtgaaaccccatctctactaaaaatacaaaaatctagccgggtgtagtggtgggctattgtagtcccagctattcgggaggctgaggcaggggaactgaacctgggaggctgaggttgcagtgacccgtgatcctgccactgcactccagcctgggtgccagggtgagactktctcaaaggaaaaaagaaggctgggcgtggtggttcatgcctgtaatcccaccactttgggaggccgaggcgggtggatcacacggtcaggagtttgagaccagcctgaccaacatagtgaaacccccatctctactaaaaat

SEQ ID NO: 887459 - DNA, 642 bp, Homo sapiens
tgtgcagaatgtgcaggtttgttacataggtatccatgtgccatggtggtttgttgcacctctcaacccgtcatctaggttttaagcccacacgcattaggtatttgtcctattggtctccctccccttgccccccacccctgaagtccccaggttttatcgaatcaagttcccattgcctcagcrtggacttcaaggctattcataacctggtcctgacttaactttttggcctcatctcttccccatcacacactctgtgctcaaaccatccagaccattcagaccattcacctttacctaagaaaacacagactttgaaaaccctatacctttgcttatgtcactgtcctttttttttagacagggtctcactccgtcacccaggctggagtgcagtggtgccatacacagctcactgcagccttgaactcctgagctcaagcaatcctcctgcctcagccacccgaatagctgggaccacaagcatgtgccaccacacctggctaatttttaaatttgtttttgtaaagatggggtctcgccatgttgcccaggctggtcttgaactcctaggctcaagcgatctacccacctcggccttccaaagtgctgggattacaggcatgagccactgtaccc

SEQ ID NO: 887460 - DNA, 632 bp, Homo sapiens
agctgttcctattcggccatcctggaacctcaacccttttaatgatttaattttaatttacttgtttctaatttgtgttcaaattagcaccataaggaaagttcttctgtgtgcttcctggctccctgaggtaattgcagtgaaactggctcttgttgaattggcaactatcaggtaatactgaagaagccaagatggggggagagaaaccagatactgattacatcagctagttccaactacatttatttttttcaagaataatgagagtctgcagcacttgagtcacaacttccttccttctctcccagccagctcattgtgatgggatctctgggtgggtgtggccaagaagacactaaatccccagttaaagctgctaccacccmcaggagaagtaggccactggcacctttcatcccccgagtttcatattatagaggctaacttccaagtgaatactacagaaagagtgggactcccttctgccacacagccccacttgtagggtggatattctatcccaggtgtatcagactgagaattccagggcccaattgctgtcacccagctttctcttaaggtggaggttccacactgggagagacaagccaagaagcccagaggctacc

SEQ ID NO: 887461 - DNA, 610 bp, Homo sapiens
atgcctggctaattttttgtatttttagtagagatggggtttcaccatgttagccaggatggtcttgatctcctgacctcgtgatctgcccatctcggcctcccaaagtgctaggattacaggtgtcagccaccgcacccrgccaatatttcaacattcttaaagaaaagaattttcaacacagaatttcatatccagccagactaagcttcgtaagagagggagaaataaaatcctttacagacaagcaaatgctgagagattttgtcaccactaggcctgtcttacaagaggtcctgaaggaagcactaaatatggaaaggaaaaccagtaccagccactgcaaaaacacaccaaaatataaagaccaatgacactgtgaagaaactgcatcaactaatgtgcaaaataaacagccagtatcattatgacaggatcaaattcacatataacaatattaatcttaaatgtaaatgagcaaaatgccccaattaaaagacacagtctggcaaattggataaagagtcaaaacccatcagtgtgctgtattcaggagaccatctcatgtgcaaagacccacataggctcaaaataaaggaatggaggaata

SEQ ID NO: 887462 - DNA, 600 bp, Homo sapiens
agttgagatttgggtggtgacacagcaaaaccatatcatcatgttatgtatatataatgtaataattagagaaacaactagaaaaggtgatataaaaggatgcaccccaaataatttaataaatgaaaatgaaattcacagtatttttaaataacaggaagacaaggaaattaaaacaaagaaacaaaaaaaaggaaaaaaatccaacttcagccccataaggaacctagaagttaccattttcattcttacaatagaaaawctaagcaaactgaaaatcagttacttttcttggactcatgagaggattgaggtgacagggaaaactgccacctggaaatctggagagacaagaaaatctgagagagaaccatagctaaaatctgctcagtagaaagtgggtccctgaggaagcacagacgctgtacttagtagaaaaagactttaagtcaactgtcttaaatatactagaaaaactaaagaaaactgtcaacaatgagctaaataaatccagaagaaccatgtatgaaaaaataaaaatcagtaaagaaaagaaatagatattataaaaaggaaccaaacagaattctggagctgaaa

SEQ ID NO: 887463 - DNA, 566 bp, Homo sapiens
tgtgtttgtgggggtgttaccaggggagattaacatttgagtcagtggactgggagtggaagacccaccctcagtgtgggtgggcaccatccaattggcagccagcacaactaaaaaagcagacaggaaaaggtggaataagctggcttgctgagtcttccagctttcatctttcttccaygctggatgcctcctgtcctagaatgtcagactccaggttctttggccttggactcttggacctacatcagtggtttgccaggagctctctggtcttcagccacagactgaaagctgcactgtcggcttccctacttttgaggctttgggacttggatggagccactcctggcttccttgcccctcagcttgcagatggcctatcgtgggactccttcactttgtgatcatgtgagtcaattctccttaataaacacgcttttcattcggctccaatgagtggaggaacaccagggttcttcgtcttgagtcggattagataaaacgacacggacacacgtggagtggttttaaggagcagagattttaataggcaagaaggaaag

SEQ ID NO: 887464 - DNA, 583 bp, Homo sapiens
ctgtaataagtattttgagagcacacatttttattggttggttaaagatacatcacccctatggagaattgaaatatgatttggtaagtttccgaacaaaaagtatgcattatctgatttgtcagaatttgcttaaaaagtataaaatyacttcctattggctttgttataatagatttgctcttgatcattttaaaatagattcctctggttgttaggtactacataattcaagaaaaaaattttatgattgatgcaataacttttcaacactgtcatactacattgttactccttcacattactgatttctaattgctttgaaaaatgtattatgcttatgagtatagtatatagttatttaccacataaaagcttagaaatatgctttggctaaatcatgaattgcatattacaagtaacagtggacattgttgctttggatttctacacatatgctatttgcaattgtttacatatgttagaatcccttgcatttaaatagttcattatgtaaatatgtagaaaatacttggatatttattttcatggaaacttctacttaatcactgaattaagatga

SEQ ID NO: 887465 - DNA, 602 bp, Homo sapiens
ggtaattcgtgctcaagtggcccaaaggcctattgcagatacggctggagagcagaggaacagtctaggtaccatatgcactccctgggctgagtccacacggccagtcctggtggcagtgaatgtgggacctggccctcataagaaggcatagtacgctggactcagtgtctcatgcctgtaatcccaatattttgggcagccaaagcaggtggatgacttgagctcaggagtttgagaccagcctggcaacatgacgagaccctgtctctactaaaaaaaaaaaaaaaaaaaaaaaaaaaaaaaaaaaaaagagggggcacggkggtgtgcctatagtcccagctattcaggaggctgaggtggaaggacacttgagcctggtggggccaaggttgcagtgagccaagatcctgtctccaaaaaaaaaaaaaaaaaatatcagtagaatggaaagctcaagatgagtcactttcatttattttaccaacaaaattccattgttagacgcatggggagagaaaaggccagtgtcatgggaacacaaaatagagttcacatttctaagtctttctaaggtacaaggtggatttttacaacag

SEQ ID NO: 887466 - DNA, 612 bp, Homo sapiens
aaaaagatacatattcacaaacatacatatattgtacatatttacatatatgtatatgagtgtgtatgcacaaaaacacacatatacatatgggagtttcacagaaaaaggaactaaaaaggtcttttagtcacatggaaagatgttcaacttcattcataataagaaataaaaattagaacttaactaaaagaacttaatttgtttaacctatgagattagcaaagttagatagagtttgataatagtgtgttatcctatgtacacagaggtactttcctagaaaagtaagtgaaaaaattgtccaaccaccatactaawcaccctgatttgatcatcagacattatatgtactacagcatcactatgtaccctataaacatgtacagttattatgtgtcaatcaaaacattaaaaatgtttttaaaatttttaaagcacggattacttatgctattatcttacattagtttgggctacttttaagcttcatagaaatggaatcttgcagttcctacactcttgtcaccagcttcttttacttatcacattgactgtgatttatccgtgtcactttatataatgggttttgttcttttcattccatgatgt

SEQ ID NO: 887467 - DNA, 598 bp, Homo sapiens
ccaaattgtttcataaatcgagtaaaatagtttcataacccaatgattgctacttggtttatgtaagtcagaaggaatgtttctaatgttacactgggagggtattttttccttatctttctcagtctcatcaacacttgaataaagatgtagaaagttttgtaatgagtttggagatgacatagtattggtgtagcgggtgatgtagtgaatatattagatgawggaatcaggactcacacaatttttaataagctagaaaatggataagtataataaaattatattagtggattaagatattgcaattgagtattctcaaatgtgaaacattattttgtgataacgttttagaggtattaattcacaataaaccaggttagttaacatgatgcatggctgataaaaaagcagatgtgatttggggttagattaataaagtagtaactagaccaaagaaagtgataattatgtttaaatgataataaaccgacaatagcatctaaacattatgctttttctaaaaaaaaattcaacttttattttagacacaaggagtatgtatgtaggtttgttccatgggtatattccatccagg

SEQ ID NO: 887468 - DNA, 627 bp, Homo sapiens
gtctactgacttctgttatcccctgctccaagattttccctttatcccaattactttattctttttaaagaacatatgtcaggttgtaaattagatgaaattagataatgaaaactatataaagagcttctttgtgtttgagcgtttgggggtcctcttatctagtccagtgggataactagttttttgaattttctttttacagatatgactgtcttgagcacatacgtgcttgcttgctgtggacttkggagagagctggcttctcttgggcatgcttcatattctgctttgatggcccttcctctcaaaagcttgtcccgttgtgactttctccatgagcttagcagcatctctggagggctcctcagcactgcctcttgttgcatcaaggtttgcatcccattgttgtgtaatgtctttttacttgtctgcacatctaccaaacagcaaaagttatattcttaggtttaattctgtgcctcctatataataggcactcattcactacatgatgagtgtttctttagagtttatcaaaaggtacctttggctgtatgaaagtgttattatcctatttgtaatattatttctcattttttttatgtcttatcatagttggactcc

SEQ ID NO: 887469 - DNA, 571 bp, Homo sapiens
tcccacaggaccaggcctcatgtagtttcctaccggatcttaaaaagacacaaccacattttctgttctttgtaacatacatacaagccaattgttgctatgcaggagtaagcatccttagcggtgtttttttcctgttggatgacatggtctttgcttttgaaataaccctgtcttcagttagtctccttagagcctggctttgtcaataaggacatcttgacttagttctttggaatacttataataaaycccagttacccataactgataatagttttccaaaacagctagtttttgctcctggttctgtgaccttaggtatcggtagaaatgactgaccttgcatgttcctagaagaggtcaccaggtctgcccttttctggtaagccattagagatgccaaatctctattagaacccatgtatttcatttttctgtcaagttttataattggagaatactcattgaaaactaaaggttgtaaatggaaagtcttgcttaatactgtagaagacagacaaagcagtgaattgggaacttagagtttgtgatttcagttccagatttc

SEQ ID NO: 887470 - DNA, 571 bp, Homo sapiens
tcccacaggaccaggcctcatgtagtttcctaccggatcttaaaaagacacaaccacattttctgttctttgtaacatacatacaagccaattgttgctatgcaggagtaagcatccttagcggtgtttttttcctgttggatgacatggtctttgcttttgaaataaccctgtcttcagttagtctccttagagcctggctttgtcaataaggacatcttgacttagttctttggaatacttataataaaccccagttacccataactgataatagttttccaaaacagctagtttttgctcctggttctgtgaccttaggtatcrgtagaaatgactgaccttgcatgttcctagaagaggtcaccaggtctgcccttttctggtaagccattagagatgccaaatctctattagaacccatgtatttcatttttctgtcaagttttataattggagaatactcattgaaaactaaaggttgtaaatggaaagtcttgcttaatactgtagaagacagacaaagcagtgaattgggaacttagagtttgtgatttcagttccagatttc

SEQ ID NO: 887471 - DNA, 592 bp, Homo sapiens
tagtttttgctcctggttctgtgaccttaggtatcggtagaaatgactgaccttgcatgttcctagaagaggtcaccaggtctgcccttttctggtaagccattagagatgccaaatctctattagaacccatgtatttcatttttctgtcaagttttataattggagaatactcattgaaaactaaaggttgtaaatggaaagtcttgcttaatactgtagaagacagacaaagcagygaattgggaacttagagtttgtgatttcagttccagatttctggctaagtggctagccaggggaccctgagcaatcaaaatgagataagtttcctcattacactagagagtgaaattagatagcgccttttcaattctcttcttctaatctagtctgtgtaagaaatcccgtcttctctgtatcctgatcaccataactttccaccgaagatcttgacggaaagagaactttaataggaagtgtaagtttgttttggtaagtaaaatccttaccattgacaagttgaaccatgacaagtgttgaaactttcaggaagctgttgatggatttcccatgaacaaatttagatttt

SEQ ID NO: 887472 - DNA, 592 bp, Homo sapiens
tagtttttgctcctggttctgtgaccttaggtatcggtagaaatgactgaccttgcatgttcctagaagaggtcaccaggtctgcccttttctggtaagccattagagatgccaaatctctattagaacccatgtatttcatttttctgtcaagttttataattggagaatactcattgaaaactaaaggttgtaaatggaaagtcttgcttaatactgtagaagacagacaaagcagtgaattgggaacttagagtttgtgatttcagttccagatttctggctaagtggctagccaggggaccctgagcaatcaaaatgagataagtttcctcattacactagagagtgaaattagatagcgccttttcaattctcttcttctaayctagtctgtgtaagaaatcccgtcttctctgtatcctgatcaccataactttccaccgaagatcttgacggaaagagaactttaataggaagtgtaagtttgttttggtaagtaaaatccttaccattgacaagttgaaccatgacaagtgttgaaactttcaggaagctgttgatggatttcccatgaacaaatttagatttt

SEQ ID NO: 887473 - DNA, 685 bp, Homo sapiens
acccatagaaggatgatggtttctcagattggcacaggcccacaggaacatttgggtttagggtgtgttatcactcagtctattcaagttgcacatagagaggcatagccaagaaagtagaactgtggaggaaagctgtgtatatgaggggccatatgtgatccaatgctcagcatagggttagagttgaagaactattcaaaaagtaaggagcaattaaaagccatggtcacccmtcctgcgatgttgtaaatctttcattgttaatcagctagccttatagagtattatttcactctcttaatttttgtagttaaggcttttacaaaggcagtgtactctcatgagccatggggtgtgttctgactcctctgctaagtgaggaaagaacaatgggaaggctgcctgcccattagcatactaggtcctttttttgatgacctcctcactccagtttcagatttatctttttttgtttcttttttgtcactgctttgacagatattcagtctctcttggtgctcctgagacctggccttacctctcaggtgcctgctgcttgttctctctttcactcctcaccattcttccacccttaaagctcactctccattttctctcaaattgtgatatgcaaagtgacttgcaaggcttgagcatctctctctgtctctgtaatatctga

SEQ ID NO: 887474 - DNA, 598 bp, Homo sapiens
tgtgtgtggcttctgcctgacattcatggcccatctgagatgctgaactcttcagtcttgaagagaattatttggctatgtacatttagaaaatatctacatagttaaaagatagcagacacgtattgagtgtttaccaggttgaatactatctgaattattcggcacagcttccatatgaggcaaatactactttccccattttacaactaaagaagctgaaagaaaggttcaaacttgcctagaaatcaccaggcacaataaagttgttttacttagccagattgttttactccaaagyctatgccttaaacatctatgctactcaaatcagaaaatgatcttgtgtaactttcctctgttggtatagaatatttttctccttattatatggattacattaagacacttgcaacaaaaattcttagccctcattattttagttcactctagggtcacttctcattcaattcttcatatgtccatctctgggcatttctatgtctgaaaagttttcaagaaggtgacctatgctgtcaggaaacctccccctgctctttcttttcatttttggaagcaattatacctttcactcaag

SEQ ID NO: 887475 - DNA, 633 bp, Homo sapiens
gagaacatattagcatatgtaatttaagcttgctgttggccttgccaaggtggaatgctggttgtgatacaggttgagtctcccttatcttcagtgcttgggactgaccagaagtattttaaacttgggttttggtttttgtttttgtattttggaatatttacataaacacaatgaagtatcttcaggataggggataggacccaagtctaaacacgaaattcatttacgttttatatacactttatacaggtagcctgaaggtaattttatacatgattttaaataatttggagcatgaaacaaagtttcgaatgcatttgactgcaccmtgccacatgcagtcagatgtggaatttttcacttatggtgttatattggtgctcaaaaagttttggattttggagcatttcagatttcagatttttagattgggaggttcaacttggatatacctttatttggctgaaattctaagaagaggataaatgaattttgttttgttgtttttgtttttggagttccttttctgttttaatttttaatttcattttcttaatttacctaatgaaccaatccctatgattacagtgagaaaagaaaacttggctctcactgaatcttctaaaaact

SEQ ID NO: 887476 - DNA, 649 bp, Homo sapiens
actgtttacattgggcttcagtttgcttacctaggaatttaaagcactggagccgccccagcctaatgacttcccccacccccaatttttttaacagtacacacacagagtgaatgccgtgtaaatattggaattacactgccacaagccaaggaactataccagaaactaggagagaggcctggaataggtccttccctagtgcctttaaaaggaatatgtccctgctcacactctgatttcaagaattgtagcctccagaacagtgagatgatatgtttctgttgtttaagccactctatttgtggtacttttgtatagcagctctaggaaactaatatatccatatctaaggattttctcaagtatgatcttggggagtaaataatcaacatgaactgcttaaacaatgacttatatattcttatgagtaacttgttgacccaaatgcttcagaaaattccattttgaattacacagaagatccgaggaaargaaaattttttcactacctgctgaaagtagttgcagctagagaaggaaacagatacaaggaagctaaaaccaacaggaagaaaggaatatgaacccaaacaactcatgcaagaggacaattaattgactgaattttataaaatgaaaaagtggt

SEQ ID NO: 887477 - DNA, 598 bp, Homo sapiens
ttttatggctgcatagtattccatggtatgtatgtgccacattttctttatccagtctatcattgatgggcatttgggttggttccaagtctgtgtattgtgaacagtgctgcaataaacatatgtgtgcatgtatctttatggtagaatgatttataatcctttgggtatatacccagtaatgggattgctgggwcaaatggtatttctggttctagatccttgaggaatggccacactgtcttccacagtggttgaactaatttacactctcaccaacagtctaaaagccttcctacttctccacatcctctccagcatctgttgtttcctaacattttaatgattgccattctaactggtgtgagatggtatctcactgtggttttgatttgcatttctctaatgagcagtgagggtgagcttttttcatttttgttggctgcagaaatgttttcttttcagaagggtctgttgacatccttagctcactttttgatggggttgtttgtttttttcttgtaaatttgtttaagtatttttagtctggatattagcccattgtcagatggatagattgcaaaaattttctcccatc

SEQ ID NO: 887478 - DNA, 578 bp, Homo sapiens
gtataacaccatcccttttattttatttttttagaaagatatataatacataattccctggctattagatatcgtggccagtcaaccagaaaaacacatgagtttaacccaccatctttgaccaaaaaccttttgtattaattattaattcaatgttgttacttctcccttttaacatatttttgattattggctttctgctttccatagcatgttgacattctatgttggtatttttctaatttttttttttttttttttttttgagacagtcttactytatcaccaggctggagtgcagtggtgcgatcttggctcactgcaacctctgcctctcaggttcaagcaattcccctgcctcagcctcccgagtagccgggactacaggcgcacaccaccatgcctggctaattttttgtatttttagtagagatggggtttcactgttttagctaggatggtcttgatctcctgaccttgtgatccgcccgccttggcctcccaaagttctgggattacaggtgtgagccaccacgcccagactctaatttcttttgctgaaaacttaattaatttct

SEQ ID NO: 887479 - DNA, 578 bp, Homo sapiens
gtataacaccatcccttttattttatttttttagaaagatatataatacataattccctggctattagatatcgtggccagtcaaccagaaaaacacatgagtttaacccaccatctttgaccaaaaaccttttgtattaattattaattcaatgttgttacttctcccttttaacatatttttgattattggctttctgctttccatagcatgttgacattctatgttggtatttttctaatttttttttttttttttttttttgagacagtcttactttatcaccaggctggagtgcagtggtgcgatcttggctcactgcaacctctgcctctcaggttcaagcaattcccctgcctcagcctcccgagtagccgggactacaggcgcacaccmccatgcctggctaattttttgtatttttagtagagatggggtttcactgttttagctaggatggtcttgatctcctgaccttgtgatccgcccgccttggcctcccaaagttctgggattacaggtgtgagccaccacgcccagactctaatttcttttgctgaaaacttaattaatttct

SEQ ID NO: 887480 - DNA, 605 bp, Homo sapiens
ggttaatttttttatgataaaataaaaaacaagccaacacaaaatgtgcataagccatctgcttggtaatttagatggcattatttttctctaccattaatatcatgcttcatcctcacatccataattttaatggagtttctcgttacacaggaatacaaccacaattttaaataatagtgtggaaatgcaatttagattatgatttacattttgctagtcaccttgttgaaactctgattttctccttatttcaccactaagtttttatgggttagtttcttctagattcttcttcatttaactcttaatgggggtttgaagaagctttaattattagcttttgttgttgcttagggaactaactgaaaggtatgctggacatggaagacarcctttttatggccagctcaaactttgtaaatggatattactcacaatttagtagctgagaatagactcatgggaaaagaattccaaagtttatgaaacagtcaaattggcatttaagtgaccctgtacataccattgcttatctgcattgctttaagctcatttagttagcaagattatgtattaaaacaaatagtcacagcagacaacaa

SEQ ID NO: 887481 - DNA, 581 bp, Homo sapiens
tgaagttgggtaatgtgatccctccagatttgttctttttgcttagtcttgctttggccatgtaggctattttttggttccatttgaattttaggattgtttttttctagttatgtgaagaatgatgatggcattttgatgggaattgcactgaatttgtagattgcttttggcagtatgctcattttcacaatattgattctacccatccatgagcatggaatgtgtttccatttgtgtcatctgtgctttctttcagcagtgtttgtagtgttccttgtaragatctttcacatcattttggttaggtatatttctaagtattttatttatttatttattgcagctattggaaaaggggttgagttcttgatttgattctcagcttggttgctgttgttgtatagcagtgctactgattgtgtacattgattttgtatcctgaaactttactgaattcatttatcagatctaggtgctttttggatgagtctttggggttttctaggtatatatatgatcatatcatcagtgaacagtgacagtctgacttcctctttactgatttggatgtcctttat

SEQ ID NO: 887482 - DNA, 639 bp, Homo sapiens
  misc_feature 179: n = A,T,C or G
ccatcatctaggctgtaagccctgcatgaattcgctatttgtcctaatgctctccctcaccttgcccacaaccccccgaagggccctggtgtatggtgttcccctccctgtgtccatgtggtctcattgttcaaatcccatttatgagtgataacatgcagtgtttgatttcctggttncctgtgttagtctgatgagaatgatggcttccagcttcattcctttttatggctgcatagtattccatggtgtacatgtgcaacattttctttatccagwctatcattgatgggcatttgggttggttccaagtctttgctattgtaaatagtgctgcaataaacatacatgtgcatgtgtctttatagtagaatgatttataatcctttgggtatatacccagtaatgggattgctaggtcaaatactatttctggttctagatccttgaggaatcgccacactgtcttccacaatggttgaactaatctacactccccaaaacaatgtaaaagcgttcctatttctccacaggctctccagcatgtgttgtttcctgactttttaataattgccattctaactggcgtgaggtggtatctcattgtggttttgatttgcacttctctaatgaccagtg

SEQ ID NO: 887483 - DNA, 639 bp, Homo sapiens
  misc_feature 179: n = A,T,C or G
ccatcatctaggctgtaagccctgcatgaattcgctatttgtcctaatgctctccctcaccttgcccacaaccccccgaagggccctggtgtatggtgttcccctccctgtgtccatgtggtctcattgttcaaatcccatttatgagtgataacatgcagtgtttgatttcctggttncctgtgttagtctgatgagaatgatggcttccagcttcattcctttttatggctgcatagtattccatggtgtacatgtgcaacattttctttatccagtctatcattgatgggcatttgggttggttccaagtctttgctattgtaaatagtgctgcaataaacatacatgtgcatgtgtctttatagtagaatkatttataatcctttgggtatatacccagtaatgggattgctaggtcaaatactatttctggttctagatccttgaggaatcgccacactgtcttccacaatggttgaactaatctacactccccaaaacaatgtaaaagcgttcctatttctccacaggctctccagcatgtgttgtttcctgactttttaataattgccattctaactggcgtgaggtggtatctcattgtggttttgatttgcacttctctaatgaccagtg

SEQ ID NO: 887484 - DNA, 549 bp, Homo sapiens
gtattgatggacaataataatcatattttactgtaccagccataaaaaaagacagtcagtagcccagccagggtgatgagtcaccattgatgaaaattggagttgctggcttggaaaagaggaggtagttgttttcaagtagcaaagcgatgtcataaatagggagctaaccttgttctgcgtacctcaaaaactagatcaatgaaaaaagraagggtaaagctggttttaggttaacattggaaagctgacacaaagaactgcccaaaaattaacagggtttctcattgggccagtgagcactttattactgaagacagacaagcagaaggtgagtaaggaaccctcaaaaatattaagttacttaatattaattaactcccactgtggggcataaggttgaactataaaatctttatttcgtcttccaacattatgattctatcactaattagtaatcaagaaccagactactggtttcaaattccagctctgtcatttacaagctgtgtaactaccagcaagttacttaacacctcttcatcagtt

SEQ ID NO: 887485 - DNA, 517 bp, Homo sapiens
ccaggataaactccctattttaaaggcagccgatttagcagtctaattccacctgcaaccttaattctctttttaccacattaactaacacatttacgggttccagggattgagtcacagacatttttgcaaggacgtttttctgcttaccacaggacttaaatttatttgttgtgttttttctttgtgtttctttgcctcaaaatagtaatagaacaagcaaagcgaagtgatctcttaaggcaggttccccaaacagrttagcattcaaaggtcagctctcgctcttgctccttgctggtcttaggcaagttactaacctctctccaaacctcagctcatcatctgtaaaatggggataatacaatcctcttacagaaattgtgaaggagatgggatgatgtttgtaaagcttcaccgtaacacctagcatgtagtaagtgctcaatgaaagttaaagtttttaaaaagttagagtaaatgtggtggggtgggagtgatgagagagaagagacag

SEQ ID NO: 887486 - DNA, 579 bp, Homo sapiens
ttcctggtggctttgtttacaatgtgaggggaaaaatgtctactcaagcctcagtaatggtggacacccctcctcccaccaagcttgagtgtcccaggtcaactttagactgctgtgctggcagcgagaatttcaagccagtggatcttagcttgctgggctccgtgggggtgggacctgctgagctagaccacttggctctctggcttcascccctttccaggggagtgaattgttctttctcgttagtgttccaggcaccattggggtatgaaaaaaaaaaaaacaacagcaaattacagctagctcaatgtctgcccaaatggccacccagttttgtgcttgaaacccagggccctggtggtgtaggcacccaagggaatctcctggtttgcaggtttcgaagaccatgggaaaagcatagtatctgggccagaatgcaccattcctcaaggcactgtctctcatggcttcccttggctaggcgagggagttccttgacctcttgtgcttcttggatgaggtgatgccccaccctgcttcagctcgccttctgtgggctgcacctgctgtctaacc

SEQ ID NO: 887487 - DNA, 643 bp, Homo sapiens
gctgcacctgctgtctaaccagtcccaatgagatgagccaggtaccttggctggaaatgcagaaatcacacaccttctgtgttgatcttgctgggagctgcagactggagctgttcctattcggccatcttgccaaccccatctcctttaacatttttgtagcgtaggttctgctggtgatagcctctcagtttttttgtctatgttaaaaaaagtctttattctctttgtatttttgaaaaatattttcactagatttagagttctagtctgacagatttttctttcagatctttgaagatgccattcgtttgtcttctgatttgtatgatctctgacaaaaagtctgcttaattaattatctatttatttattttagagaagagggtcttgctatgtagcccaggctgaaatgccattgactattcacaggtgcaatactactgctgatcagcatgggattttgayctgctcatttccaacctgggccagttcgttcctccttaggcaacctagtagtctcccattgccagaaggtcaccatactgatgctgaacttagtgcagaaacctgatgggcatagtgcacaacagcccagaactcctggactcaagcaatctcctgcctcatatttgggactaca

SEQ ID NO: 887488 - DNA, 597 bp, Homo sapiens
tatagttggtgaatttgactccagcagtatgttttgaggttttgccctgtacaaactttttctcaatctttgaatgaagaaagctttaataaaaatagttacaaaatgtacagataaaatgaagtcaagaaggatagtcaacatgttagatgagagaaattagatattaaggatcagaagacttcractcgactattgggatgaaattaacaaactagtgtttaaaggagataaatattatattttacatttgagtccaaactttaaaatgtacaagcataagcacacacaaacaaatactttttggtttcagactgaggcacaccagacttgattacagattttgataaaaagtaggtggaaattattccagaaaacagtttggaagtgtctttcaaaattaaacatgcaactaccatataacccagtaattgcacatctgagcatttgtcctagaaaaatgaagacttctgttcacacagacacccacacacaaatttttatggcagttctattactcaaagccgaaaactggaaacaagctgtcattcaataggtgaatggttaaacaaactgtgctatatccattaggtggat

SEQ ID NO: 887489 - DNA, 622 bp, Homo sapiens
gacttataatgaagatgcctttgtaaccattactacaccgtgtcctgacatttataatgaagtctagagccagaaatagattcttcaggagcatgagatgtgtctaaatgctagattaagtctattcttcttgaatgtgcctctgcctaggaggagtctgggggcttccatgttggtgggattcagtgggcttctggaattgcctttggtttactcatgagctctcttgatgatgcagcagtggacaagctgagaccacagacacgtgtgctttctttcacaggcaactcagraaaaaaataattaccccaatttctaagcaaggcagaatgctaacctttcactgttttattctcccttgaaattatattgattttgtctttcactttgtgattaagagagaattttgttagcagctgagatgtgctgctcttatatttatcattgttattgaatccaccttgaaatccttgggtagatagtcagaatgttttggaaaattaattaaaagaagacttaaaagtttttacagcttgaagaaaccaagaagggtcaccagggggatcgtaggcccttccatattcagtagaaaactctttagacattttcagagacagagaat

SEQ ID NO: 887490 - DNA, 615 bp, Homo sapiens; identical to SEQ ID NO: 862508

SEQ ID NO: 887491 - DNA, 479 bp, Homo sapiens
tttagagcctctacatttttactgattttatttttgtctgcatgttctactagtttcagggactgtgtcaaaatatcctactttttttgattagttttatttatttcatttctagtttcatcaatttgcatttgtgtatttttttttggtttcaccaatttcttctttatatattttgaagctatgttattggatgcatatgatttagaattggtagacgtgatatcttcatggtgatctgagcacttcattatattatgatmctcctcatttcttgtggtgtttcttgctttaaagttgactttgattgtaacataactacaaggcactcttcaaaacagtatgtagttcttttaacttttaatctaatctgattattttaatcttttaactgaaatatttaacccaatacagatatattcagatttatatctgccatctaatatttcctttgtatttgactcagctgttctgttgtt

SEQ ID NO: 887492 - DNA, 765 bp, Homo sapiens
tagtcacaggcaaagatttcataacgaaaacaccaaaagcaattgcaataaaagcaaaaattgacaaatgggatcgaattaaactaaagagcatctgaacagcaaaataaactattatcagaggtgaacagacaacttacaggattggggaaaattttgcaatctatccatctgacaaaggtctaatattcagagtctacaaggaacttaaacaaatttataagaaaaacaaacaaacaaccccattaaaaagtgggcaaagtacatgaacagacacttctsaaaagaagatatacgtgcagtcaacaaacgtatgaaaaaaaagcccaacaacactgatcattagaaaaatccaagtcaaaaccacaatgagatactatctcacaccagtcagaatggcaattattaaaaaatcaaaaaataacagatgctggtgaggtgtggagaaaaaggaacacttttacactgttggtgggagtgtaaattagttcaatcattgtggaagacagtgtggtgattcctcaaagatctagaggcagaaatacctctagataggatttgacctattacataggtaacaggatttgacccagcaatacaatcactgggtatttacccaaaagaatagaaatcattctattataaatatatatgacacatatattcattgcagccctattcacaatagcaaagacatagaatcaacccaaatgtccattaataatagactggataaagaaaatgtggtacatacataccatggaa

SEQ ID NO: 887493 - DNA, 626 bp, Homo sapiens
gtttgacttctcttctacctaccaaaatcccaactcaggtttactttctctaaatgttaactcctctcagatttcaaaataagttataaatagaaaactgtgccaggagaatttattaaaagtcatttatatgcaaatgtctttgctttagccccacacttgcccaacatacagcttcctgaccatgtacttgaacccatccatctttccaggcagagcttgcctctcagctcctgtaccagagccactctggtgactccagggacagggatttttaagtagaatttttagctctttyaattgccccatccaaaaggaccctaaatcagtgcagtggcagtaaacggcattaaaacaggctctataggattaatcagaggagggttgaaagagggttttgaagaaaggagacaaaggaatgaaaagaagagagaagtagatgacaatggaaaggaattagaagaaaaggaaattaaatattaaaaagtaaatacgagcaaaagaccattaaatgtattaaatgtatttgtgtataacatacttttatattttattgtattccttgtgattttttattagaatagagaaaaactatatccctgaggttctgaaaatggaacaaatat

SEQ ID NO: 887494 - DNA, 627 bp, Homo sapiens
ataccaagttgtttccagcagcatcatttatactagtgaaaataagaaacatcctaaatattcaacagcaaccgactggttatataattatgattagtccataaggcagtggttcctaacctttttggcaccagggacyagttttgtggaagacaatttttccatggaaggggtggggagtggcagggtagggtgtggggatagtttggggatgaaactgttctacctcagatcatcaggcattagttagattctcataaggagaacacaacctagatccctgcataacagctcagaatagggttcctgctgctaaaagaatctaatgctgctgatgatctgataggaggcagagctcagacagtaatgctcgctagcccttggcttacttcctgcctaacaggccatggacaggtaccagtctgtggcccgggggttgtggacccctgccatagaggacactgtggtctatgttaactataataattctacccaccaactaccatcccaggccaatgattggattgcaaatggtcatgactgaattctgaacataagaggaaaagttttctgagcagttttggggaaagttatctctcccctaagcaagagacacaagaagaaacc

SEQ ID NO: 887495 - DNA, 627 bp, Homo sapiens
ataccaagttgtttccagcagcatcatttatactagtgaaaataagaaacatcctaaatattcaacagcaaccgactggttatataattatgattagtccataaggcagtggttcctaacctttttggcaccagggactrgttttgtggaagacaatttttccatggaaggggtggggagtggcagggtagggtgtggggatagtttggggatgaaactgttctacctcagatcatcaggcattagttagattctcataaggagaacacaacctagatccctgcataacagctcagaatagggttcctgctgctaaaagaatctaatgctgctgatgatctgataggaggcagagctcagacagtaatgctcgctagcccttggcttacttcctgcctaacaggccatggacaggtaccagtctgtggcccgggggttgtggacccctgccatagaggacactgtggtctatgttaactataataattctacccaccaactaccatcccaggccaatgattggattgcaaatggtcatgactgaattctgaacataagaggaaaagttttctgagcagttttggggaaagttatctctcccctaagcaagagacacaagaagaaacc

SEQ ID NO: 887496 - DNA, 627 bp, Homo sapiens
ataccaagttgtttccagcagcatcatttatactagtgaaaataagaaacatcctaaatattcaacagcaaccgactggttatataattatgattagtccataaggcagtggttcctaacctttttggcaccagggactagttttgtggaagacaatttttccatggaaggggtggggagtggcagggtagggtgtggggatagtttggggatgaaactgttctacctcagatcatcaggcattagttagattctcataaggagaacacaacctagatccctgcataacagctcagaatagggttcctgctgctaaaagaatctaatgctgctgatgatctgataggaggcagagctcagacagtaatgctcgctagcccttggcttacttcctgcctaacaggccatggacaggtaccagtctgtggcccgggggttgtggacccctgccatagaggacactgtggtctatgttaacyataataattctacccaccaactaccatcccaggccaatgattggattgcaaatggtcatgactgaattctgaacataagaggaaaagttttctgagcagttttggggaaagttatctctcccctaagcaagagacacaagaagaaacc

SEQ ID NO: 887497 - DNA, 657 bp, Homo sapiens
ctaattgaaagaattattttcttaacattcagtgtcatctgcaaagacttttgtgaagagcataattgtttcaaccagctgctaggagctgtttttattaattttttaaaaaatcaaacgccaaagcaggggatatttgtaatatttcccctctacattcttttaggggaataaacgaaaaacaacagcccacagctctatgaggctaagacctttgaagaccaaagatttgggttccataaacagtgacatcaaaaatgtgtccttttcctctctatttttattctcaccccacgataggcyatcttgtgtacagcattgctggggagacacctgctgggatcagtgaagcccagagtaggtccacggagagtccatgcactctcactgcctgataaagttcatcccaaatttccactgcatatgctcctttaaagtagagaagatgctttaggtttcatgatttctgttatttgagtggctgccaaatcaatctctaaggcactgaccctaataatgaaaaaatatccttatggagtcaaatctctaatgtgtaagacttcccaaattttcccaaaggcaacctgtaaatcactctgaacctaaatgtcactgcagtgtcatactcctttcttttaatgatttgccttccccttt

SEQ ID NO: 887498 - DNA, 604 bp, Homo sapiens
atctctgctcttttgtaaggcttctttcatgcgtaagcttaaatttaatagtttttcacaatgtatttaatggaagctatatcataagaagtggtgtagaaaaaagagtggtcctgtttcaaagaagaaagaaggtaacattcattgttattttgaaatggctaaagttgaaaatgtttttwattgatctatttgctagttagaattttaattgtgataattgtagatttacatcagctgaagaaacaatgtagctttacctggtctcccctagtgataacatttagcaaaactgtagtacaatatcataactaggattgatattgatgtaatctaccaatcttactcagatttccatagttttacctgtactcatttgcgtgtgtgtgtgtgtgtgtgtgtatactcagttgtgtgcagttttatcacatatataggtttgtatatctaccactacagtaaagatgctgaactgttacagcatggatccctcctattgtttttttgtagctgtacccagtttcttctcaccagtctcctatccttatcccttggaaactacttattgggtctccatttctaataaacttcatatatgtaaata

SEQ ID NO: 887499 - DNA, 604 bp, Homo sapiens
atctctgctcttttgtaaggcttctttcatgcgtaagcttaaatttaatagtttttcacaatgtatttaatggaagctatatcataagaagtggtgtagaaaaaagagtggtcctgtttcaaagaagaaagaaggtaacattcattgttattttgaaatggctaaagttgaaaatgttttttattgatctatttgctagttagaattttaattgtgataattgtagatttacatcagctgaagaaacaatgtagctttacctggtctcccctagtgataacatttagcaaaactgtagtacaatatcataactaggattgatattgatgtaatctaccaatcttactcagatttccatagttttacctgtactcatttgcgtgtgtgtgtgtgtgtgtgtgtataytcagttgtgtgcagttttatcacatatataggtttgtatatctaccactacagtaaagatgctgaactgttacagcatggatccctcctattgtttttttgtagctgtacccagtttcttctcaccagtctcctatccttatcccttggaaactacttattgggtctccatttctaataaacttcatatatgtaaata

SEQ ID NO: 887500 - DNA, 606 bp, Homo sapiens
ttacagaaggagtgacataccctattctctctgattgtgctctaggtttaacacagctgttatttcctgctagacagatttcctatttcttaatagcacattgtgcctttctttctagaatttttaccttataatacgagattgcaaacaataatataaaggyattaaatttattttctttgtatgcatttggaaagaaatgtcaaattatttcagactataattacatagaatagatggcatataacagaaaaaaaaagtaagaaggaaactcaggagtcacttgaagccaagagagtttgagggatgcataaaatacgtctggttcacttgacttctaaaaacttcttgggatataataggcactcagtaaaaactttttgagttgaatagatacgttttaaaaaattcagcatttttaactagacctttgagtaagttaaacttcacaaaaatgtaacatgtgtattccatgtctctgagagcatcttggcacacccttgtatttcctcaaatgcacatcccacattgagagacacagacacaaatatgaaatcagaaatatgttaagccacaagttttttcatcacagcattcattatataa

SEQ ID NO: 887501 - DNA, 606 bp, Homo sapiens
ttacagaaggagtgacataccctattctctctgattgtgctctaggtttaacacagctgttatttcctgctagacagatttcctatttcttaatagcacattgtgcctttctttctagaatttttaccttataatacgagattgcaaacaataatataaaggcattaaatttattttctttgtatgcatttggaaagaaatgtcaaattatttcagactataattacatagaatagatggcatataacagaaaaaaaaagtaagaaggaaactcaggagtcacttgaagccaagagagtttgagggatgcataaaataygtctggttcacttgacttctaaaaacttcttgggatataataggcactcagtaaaaactttttgagttgaatagatacgttttaaaaaattcagcatttttaactagacctttgagtaagttaaacttcacaaaaatgtaacatgtgtattccatgtctctgagagcatcttggcacacccttgtatttcctcaaatgcacatcccacattgagagacacagacacaaatatgaaatcagaaatatgttaagccacaagttttttcatcacagcattcattatataa

SEQ ID NO: 887502 - DNA, 577 bp, Homo sapiens
agtataggttgtgtgtgtgtgctggagggaaggacagacaaaatgaagccaggattatgtagggcccaggtaaagactttaactatgacttcgagttatatagtttttataaaacattttgaactaataatattttcagagaatctctctggcttctggacaatgaattccagggaggcaaagtccctcttcaggtaggagactattwtaataaactaagagagagctgatgacagcctgggctagggtagtagcagtagagaagatgaagagtgatcagattctggatatactttatgggtagagacaacagaacttgttagatagattggaattggggattgacagaaagataagaatcaagaagaactcaatctaagcaactgaaagttaggagttgccatccctctgagatggaataaagtatagacaggcaagtttttatgggtaaagtagcagttagattttaggcctaagtcagacgtcttagccatcaatgtggagatgttgagaatgagaagcaggcagttgtatatgtgaaggtctgaaattcaggggagggatttgagccagagac

SEQ ID NO: 887503 - DNA, 686 bp, Homo sapiens
tctacagaactctccattcaaaaacaacagaatatacattcatcttggagctacatggcacttactctaaaatcgatcacataattggaagtaaaacactcctctgcaaatgcaaaataactaaaatcttgatagtctctcagaccacagtacaatcaaattagaactcaaaattaagaaactcactcaaaaccacacaactacatagaaatgtaacatcctgcttctgaatgactactgggtaaaaaatgaaattaaggcagaagtcaagaagttatttraaactaatgagaacaaagagacaatgtcccagaatctctgggatacagctaaaacagcattgaggaaatgtatagcactaaatatccacatcagaaatatctcaagtcaacatcctaacatcacagtttaaagaactagagaaccaagaacaaacaaaccccaaagctagcagaaggcaagaaataagtaagatcagagcaaaactaaaggagattgagacaggaaaaacccttcaaaaaatcaacaaatccaggaactgtttttttgaaaaaaattaacaaaatagacttttagctacactaataagaaaagagagaagatcaaatagacacaataaaaaatgataaaggggatatgaacactgagtttacagaaatacaaacaaccatcagagaatactataa

SEQ ID NO: 887504 - DNA, 686 bp, Homo sapiens
tctacagaactctccattcaaaaacaacagaatatacattcatcttggagctacatggcacttactctaaaatcgatcacataattggaagtaaaacactcctctgcaaatgcaaaataactaaaatcttgatagtctctcagaccacagtacaatcaaattagaactcaaaattaagaaactcactcaaaaccacacaactacatagaaatgtaacatcctgcttctgaatgactactgggtaaaaaatgaaattaaggcagaagtcaagaagttatttgaaactaatgagaacaaagagacaatgtcccagaatctctgggatacagctaaaacagcattgaggaaatgtatagcactaaatatccacatsagaaatatctcaagtcaacatcctaacatcacagtttaaagaactagagaaccaagaacaaacaaaccccaaagctagcagaaggcaagaaataagtaagatcagagcaaaactaaaggagattgagacaggaaaaacccttcaaaaaatcaacaaatccaggaactgtttttttgaaaaaaattaacaaaatagacttttagctacactaataagaaaagagagaagatcaaatagacacaataaaaaatgataaaggggatatgaacactgagtttacagaaatacaaacaaccatcagagaatactataa

SEQ ID NO: 887505 - DNA, 686 bp, Homo sapiens
tctacagaactctccattcaaaaacaacagaatatacattcatcttggagctacatggcacttactctaaaatcgatcacataattggaagtaaaacactcctctgcaaatgcaaaataactaaaatcttgatagtctctcagaccacagtacaatcaaattagaactcaaaattaagaaactcactcaaaaccacacaactacatagaaatgtaacatcctgcttctgaatgactactgggtaaaaaatgaaattaaggcagaagtcaagaagttatttgaaactaatgagaacaaagagacaatgtcccagaatctctgggatacagctaaaacagcattgaggaaatgtatagcactaaatatccacatcagaaatatctcaagtcaacwtcctaacatcacagtttaaagaactagagaaccaagaacaaacaaaccccaaagctagcagaaggcaagaaataagtaagatcagagcaaaactaaaggagattgagacaggaaaaacccttcaaaaaatcaacaaatccaggaactgtttttttgaaaaaaattaacaaaatagacttttagctacactaataagaaaagagagaagatcaaatagacacaataaaaaatgataaaggggatatgaacactgagtttacagaaatacaaacaaccatcagagaatactataa

SEQ ID NO: 887506 - DNA, 686 bp, Homo sapiens
tctacagaactctccattcaaaaacaacagaatatacattcatcttggagctacatggcacttactctaaaatcgatcacataattggaagtaaaacactcctctgcaaatgcaaaataactaaaatcttgatagtctctcagaccacagtacaatcaaattagaactcaaaattaagaaactcactcaaaaccacacaactacatagaaatgtaacatcctgcttctgaatgactactgggtaaaaaatgaaattaaggcagaagtcaagaagttatttgaaactaatgagaacaaagagacaatgtcccagaatctctgggatacagctaaaacagcattgaggaaatgtatagcactaaatatccacatcagaaatatctcaagtcaacatcctaacatcacagtttaaagaactagagaaccaagaacaaacaaaccccaamgctagcagaaggcaagaaataagtaagatcagagcaaaactaaaggagattgagacaggaaaaacccttcaaaaaatcaacaaatccaggaactgtttttttgaaaaaaattaacaaaatagacttttagctacactaataagaaaagagagaagatcaaatagacacaataaaaaatgataaaggggatatgaacactgagtttacagaaatacaaacaaccatcagagaatactataa

SEQ ID NO: 887507 - DNA, 545 bp, Homo sapiens
ctgtgagcattttcattgaaaagaggcacatgacaaggatgctctttcttaccactcctattcaacatattattggaagttctggccagaacaattaagcaagagaaagaaacaaatggtattcaaataggaagagaggaagccaaattgtctctgcagatgacatgatcctttatctagaaaaccccattgtctcaaccccattgtcagcaaaatctcaggataaaaaatcaatgtgygaaaatcacaaggattcctgcacactaacaacagacaagcagagagccaaatcatgaaagaactccaattccacaattgttacagagaataaaatacctaggaatacagctaagaagggaagtgatagaaagaaccaatatgattaaaatggccatactacccaaagtaatttatagattcaatgctattccccttatactaacattgacatttttcacagaattagaataatctgttttaaaattcatatggacaaaaaagagtctgtagagccaagataatattaagcaaaaatagcaaagctg

SEQ ID NO: 887508 - DNA, 588 bp, Homo sapiens
gtatactgaatttaagagccccatcctacatgcaatgacacccataggctcaaaatgaatggatggaaaaaaaatctaccatgcgaaaggagaacataaaaaagcagaggtggcaatcctaatttcagacaaaacasactttgaaccaacaaaactcaacaaacacaaggaaggtcattacataatggtaaaaggttgaattaaacaaaaagacctaattatcctaaatatacatgcacccaacacaggagcacatagatttgtaaaacaagttcttagagacctacaaagagacttagatttctacaaaataatagtggaagacttcaacaccctactaacagtattagacagatcattaaggaagaaaattaatgaagatattcagaacttgaactcaatacttgatcaaatggacctaatagacttctacagaacgctctatccaaaaatgacaaaatatactttcttctcattaccacatgacacatactgtaaaatggaacacacaatcagacataaaccaatcttcagcaaatttaaaaaaaaaacactgaaatcatacaaacgacactctcagacaacagt

SEQ ID NO: 887509 - DNA, 582 bp, Homo sapiens
tacccaaaggattataaatcatgctgctatacagacacatgcacatgtatgtttattgcagcactattcacaatagcaaagacttggaaccaacccaaatgtccaacaatgatagactggattaagaaaatttggcacatagacaccatggaatactatgcagccataaaaaaggatgagttcatgtcctttgtagggacatggatgaaattggaaatcatcattctcagtaaactattgcaagaacaaaaaaccaaacaccgcatattctcactcataggtgggaactgaacaatgagaacacatggacacaggaaggggaacatcacactctggggactgttgtggggtggggggaggggggagggatagcattaggagatatacctaatgctaaatgacaagttaatgggtgcagcacaccagcatggtacatrtatacatatgtaactaacctgcacattgtgcacatgtaccctaacacttaaagtataataaaaaaaaaaatctcagaaactagagtcagaagaatagccaaaaaaaaaaaaaaaaaaattcagtcatcactatctttaatggatg

SEQ ID NO: 887510 - DNA, 650 bp, Homo sapiens
gtattcatgtcctgaaagtttatgcaagtaaaattagcataatgacatttaagttatttcatgtttatgtgcatgcatttactggacattgctattttttacaaccttacattttaaatttctacttttcatccaagaactctctcaaaatgtttgacttaccttcttttgtttttacatttttctgttcttcaattttttcattcatccaacatatacttaaatatctaagttttaaggtaactatatgtgccggtatatttgcctataaatcatcatgcacatagaaaacacttttagaagcttcctctttcataccaaattcaaaccatawggtctaaaggaagtacttagaggttgtggtatacacacatttattttactgaaaactgaaaataacgcagacaaaaggatgaaacttattgggaattggtatgatatataagatatctttcactcagaaaaaaagtaagaatataccatactaagttcattttcttcaaaaatttggatcctttcattttctagggctgcatatcctttttcctaaagaggaactccacattttataagttgcagttcccataaagactagatctgtccctagttttgatgaactatacctgggaaaccagaggtatggcaatcct

SEQ ID NO: 887511 - DNA, 650 bp, Homo sapiens
gtattcatgtcctgaaagtttatgcaagtaaaattagcataatgacatttaagttatttcatgtttatgtgcatgcatttactggacattgctattttttacaaccttacattttaaatttctacttttcatccaagaactctctcaaaatgtttgacttaccttcttttgtttttacatttttctgttcttcaattttttcattcatccaacatatacttaaatatctaagttttaaggtaactatatgtgccggtatatttgcctataaatcatcatgcacatagaaaacacttttagaagcttcctctttcataccaaattcaaaccataaggtctaaaggaagtacttagaggttgtggtatacacacatttattttactgaaaactgaaaataacgcagacaaaaggatgaaacttattgggaattggtatgatayataagatatctttcactcagaaaaaaagtaagaatataccatactaagttcattttcttcaaaaatttggatcctttcattttctagggctgcatatcctttttcctaaagaggaactccacattttataagttgcagttcccataaagactagatctgtccctagttttgatgaactatacctgggaaaccagaggtatggcaatcct

SEQ ID NO: 887512 - DNA, 649 bp, Homo sapiens
ctggtatcaagtgatattttctgatttaataaccacataataagcacattttacgtgcctcagaatttacctgctacagctttggtaggttccaataggcaagtgtggggttcttgccttggaatttacattttgccacaacacygatcacgatatgaagcttaccctatgcacccagtaaatagatagttgtggctctgttgctagttgagtttgtcaccttgaggaaatatattgagctcttgcacattttttggattagatcttctctaaattttcatgtagctcttaaagtccatggtcaaacttgagttagataatcagaaaatttccctgcatgctgaatatgtttccttaaggattgttcataagatcaaacattaagtatccagtaatagaagattggttaaataaattacggcatattattatgatggaataacatgttatttttagtgactgtaaatctattagtacctattaaccatcattcattgttgaatacaaaaacagcttgtattctctgtgttacatatattatatatttaaaaacagttaatcatacatagtattacctcattgatattacatatttatggaaggatattaaccacaattaatttctggaagaaaaaatttcaggtaaatt

SEQ ID NO: 887513 - DNA, 643 bp, Homo sapiens
ggttttcctgtttctttgggttaatttccttatgaagtcttctgtggcatgtaaaacatatgaaacaaatctctgtgtttcccttttgctagtctatcttttgttatagagacctcagccataagcctaacaagggatgaggaaaaccaacttttcatcccttacattcaccctaacaagtagatcttggtggcattctagatccccagaaattaccattcgctcagggacacactaagagctctggctggatgtttccttcktaccggtacactgttatcctgggtgtcggtcacagctttcacagagtctttactagaagttaccaaatacctccctctcttctgtcctgggtttgtaaattgattgaggtcagagtgaagtgaggagttgtgacttcaataaggtttcttcaaccaggctgctcttgggctggcctgaacttttctcattgtacaaatttggtagaagaaagacaatggtgctatgcacttatgtgaccctagggatccatgggaatgcagtcataggtggggaagtgctaggctgtgtcctgttatggttattacacacactgtgcctctgccagctaaatgccaaatgttggtctccagcagcctgggatcctgccatcccctctgaa

SEQ ID NO: 887514 - DNA, 582 bp, Homo sapiens
gggagttatgactttcctctcctgtttgcttttcaatgcccatactatggacagcacgcaagatggaatacatttgcgaagtcatttggaaagcctccagcaaggggggaagcttttcctattttcttccttgttccatcctctgcctgaatcccctttgctctgaataaatcatcttgtctcttcctcttctgtttccagccccaccttctgggtttcctcacttgatggcatgctagattggcataagaaaccttggcakgttccctgccatactgccttcttattttgacaacctctgagtcaaggtcaaaagaaacacccagctataatctaagggattattttaagaagtgaagacacagtgcaaatcccagaaagtaggtcagatctctccccagctaatggacttccaatggcctcctgcaatactgagaagaaaaggcaaactctttgcacacctgggtctctgcctaccgctgcagcatcatctgacatcaagctcaacagctccagccacacacaggggatataaagaaatagaaagctctcacccaggtctgccacaggtgggactgggtt

SEQ ID NO: 887515 - DNA, 603 bp, Homo sapiens
ggatactgggttgcatttgagtccctggggtactgtgttcattgtccagtctccaaagtccattcctgacctgcacagagcagaggtgacctggagcaattgccccagtttgtacatctggaggttagttataaaaagtaaccacatgcaccatgaaaatagaggcaggggtgcaggcacggtggctcacgcctgtaatcctakcattttgggaggctgaggcaggaagatcacttgaggtcagcagtttgagaccagcttggccaatatggtgaaactccgtctctactaaaaatacaaaaattagtcaggcatggtggtgcatgcctgtagtctcagctacttgggaggctgaggcaggagaatcacttgaacctcgaaggtggaggttgcagtgagccgagatcgtgccacttcactctagccttggagacagagctagactccatctcataaaaagaaagaaaacaaatagagagggtaaaaagtgaatgtatttgtttcactaccagttcacctattgggaggatggctaaatgtttatgtctggatgtgcaaggaagaagccgagcagttctcaacatcccaaggccatcattttcc

SEQ ID NO: 887516 - DNA, 656 bp, Homo sapiens
aaactaatttataagccattacttttattcatgaaagaaaatttcagcccattatgtgaaaaaaataaatttatatttagttctctcttctcacgtaaatggaaatgaaacattttatgtttaaaatggttaacctcatgcctcccaaatgagatatagcttttcactaccttttaagtcatatgttggcctataggaagtaaaatgcaggaagaatttatcaccattgtatgtggtaatttaaatgaacaacaaatcaaaagcaaagaaaaaagaatcagggtcctttggaggaagagggcaggaattatgtgatgttctacttgatccagaaaaatgtattctgcccggaatacttctccctacttctttcaaaggagggtgctatcctctaggcttctgttagtgtctctgtggatattaattttctgggaaaattttctttgttcccacctttccccagggttcttaaattattataaataattaaaataatggcagaattctgtttcytagtgagcttatacagtcaaattaatgatctgtaattgtttcactccaataacaagaggcattcatgtagattatataacttcgtctttggtgttaaaaacaaagaagataattattatctctggaatatggaacatgaaatc

SEQ ID NO: 887517 - DNA, 570 bp, Homo sapiens
ttggccggctcctctacttcccttacttgatgcatcttggtgagtttatatttttcgaaaaagagtaaatggcctcttatttgcagaagcattgaagactgcttgctctagaattctgacactagaactagtacaatgccactcccttytccattgtgttacattatgtgctccgcagatgaggtgcggcagccccattttttgaacttctgttttctgttagccgagacctgtggcaataccttcctcttttcaatctagctggttgtcaacagcagtaaccacaagtctttcctgtcccagaaataagtcttgccacactctcaacccccgacagggtgtgaacatgacatgctgtactgcaaggggctccactgcctccaccccgctacagccacagacccacagggttcaagtgttgattgaattctcaaagagcgacttaaaaaggataggtgcataagaacaagataaacaatctggctctaatataaacaaggattacattacaccaaaattgttgagagaagattttgtactcagtattttattcagcagaacattttttat

SEQ ID NO: 887518 - DNA, 662 bp, Homo sapiens
tgaagtcccaatgaattgaagacttaaaaggaatggaaaaggtttgaaatgactgctttgggaaattgaatggaaagagtggtaaaactgttgaagagcagggagaggccggtcacacttagatcatgtccatctggagtgggccctgatggttgtggactgtttatccctgagtgaggaaagatacagagtcatagagaacccagagttggagatgttcaagaaggcatcgtagaaggccaggaagggtagcagatatgctaggaagttctctcggaggtctgaagtaaggaagccggcaatgctgaaagacagctcctggtccaggaggtggaggaggaggagttgaagggttggcagttgatgttcaatgggagaagttggcagatatggaaastgtgttcaagcgagaccatacttggaacctagaatcagtagataaattatgtgctttggatcatcgctctcgtaatgtgttagttaatcaaagttacaatcccaaatcatagcactctgagaaagcgtgttctataatgaacactttacatttttctaaacttaaatggttaggtactgtcattctgattttatggaagtgaaaaccgagtgatagattaaaatcacttggcatttgagattagaaggtaggaacagcacctcag

SEQ ID NO: 887519 - DNA, 619 bp, Homo sapiens
tttattgtgtgggttcagattatttttctctatcatagtcatttacatttcaggtcctgcatagttaatatgcatgtttttaataatgatatgtctgtgatttgttaacctagatgaagatgtactgttactggctgggtattggcacccttaagaatacacaatatgttttctgcagtctaaacttacttactaccatttccccacaaaagacctttatttttaagattgtgaccaggccttttttccctgtgttgttatgttccgaacatggggaaaactgtcctttatttcccctgaaagcactgtgcttcagagtcgcaacccaccagaacaccatcagctgctgagcttgtatggacccagattatctmtactgctattcttctctgtcttaaatgtcgattacattatgattatctttctccttaattttttctctttttttgtgaccttaacacaattatgtagaagtcatcaagcaattgacatattctatcacctgtttggacgttgttatttcttatatataaactgcagttcctaatgcaggttgatatatattcaatgactattaattagaagaagcttatttcatatatgtatataattttaagta

SEQ ID NO: 887520 - DNA, 696 bp, Homo sapiens
ccagaaaccatttatgtagccttcaccaattatcaactcatggccaatcttatttcagtcacagcctcacctattctctttctccaccattaaattattttgaaataaatacccaaaagcatatcatttaatctgggaatatttcaagttatagctctaaaagataaggactattttaaaaacataatcatggtgtatttcaaagatggaacaatttgaacatcaagaagaagaattgtggtgggttgaacaacatcaagtatctactaataatgggaatttaaaaaaaagaccctcatgacttgcctttaragattgttaggacactagcttagctcatcactctcaaaattgttaaaaggaaagaaatcaaggatttgtcctgcctgtcccatacattgtattttggaatagtcaaatagttgataaggtaaagctcttctttatagaatgccagcaaataaatatagaaggaatgctctagaaaagcataattctttagcccctaatgaaatagtggatttagccagtcgttatcatggaatgctaaaaccttcaggtcaaaagttgataatgaaatgtataatggatcgcttgacgaatcatacctgaagtcattaatgaatcttagtaccaccaaaaatgagatatttaaacattatgtgcctatacatgttacagtaaaaatgcacatat

SEQ ID NO: 887521 - DNA, 567 bp, Homo sapiens
ggtaatcccagtgtagcgaatgaaccagatacaggaaaaattaactacctggatcgaatgctcaaagaatcaaagacctagttgtcatctttgtcatagaattaatctatttactctgggttcctgaaactagtaaaagaaccctaacaaatagcagcaaacgaattttagtgaaagagaacaatgaaacatttaatagaagaccaacttctaagaactacttaataaaaatgccttttaatattgaggtgatttctgctcargtccaccccacaaagaggacctggactgagttgagctgtgttgcaactctttctcgcttgtcaaagttgtagctcctcctcgtgttgctaaatcacagcagatggcttccttttacacccaacgccgtcagtggaatgtaaatgcgtctcctcacaacactgaaaatactgaggctgtgtgtttaatctgtgctgtacaagccgaatgaccctgaaaagaacatgagcactgagcacgtttggagaattggcatcaatccttggaaacaggatttgggaggatttttcaggcctagtgactaat

SEQ ID NO: 887522 - DNA, 595 bp, Homo sapiens
aacttttatcttcttctcacgagcctctgcagacaaagaaacatagttttaaacttctgaaatgccccattcagctgatctgagcttaatctgaaaaatgggaatcacacctctattgcacaggcacattatgataacattattggaaaatgcttaactacaagtaagcacacaatacatagcatctattgttactattcagataagatgaagtgttagtaggacaaatgacaagcagcagtaacgtttaaatggtttccacactcctacctcctactttatctgccagacaaaccaaataggtaactactttcctcctatcctccttcccatctgtcttataatgtgtttgtaaaataagcargttttgtgcagagaaagataattttttcatgtcattcccataactctgaattgcctcatgatggtggtcccatccaactaaagaatttaattcattcatctgtaataaaacaaacggtacataccagttgtatgtcctcagtgaaattgtcagaaataaatcaaaaggtctcaggtctctcagacctccaaacaactaatgatagagattttttttagttatacattgtag

SEQ ID NO: 887523 - DNA, 705 bp, Homo sapiens
ttgtacaggttctgaattctctggtctgatgtttttcatcagctttggaaaatattatcagccattgtttctcaattactacttcttaccaattttttctcccttttctccttctgcagctccagttacgtgtgtgttagatttttgcactatgatctttgcatcagtatggatatttttttctaattaatcttccagcccacaaattctctctgcagctgtgtctcatgttctattaaagtcaccttaattttaattattgtatttaaaaatttctagagtgtctattctttttcttactcttttcacttctcttaggagattttaattttttttcatttaatttctggcatattaatgacaattaattcaagatatgttttctaacttcaacattcggatctcccataggtctgttctgtgttggtttttrtcccttagtttgtggtcagtttctttcttttctcccttagtagacattaatttcagggcacgtatggtaactttctaggttttatataacaaaataccacagtcttggtggcttaaacaacagaaatttattttctcacagttctggaagctagacattcaagatcaagtaggtttgatttctcctgaggcctctctccttgcctggcagatggctgccttcttattgtgtccttccatggcgtttcctctgtatgtgcatccctgatgttt

SEQ ID NO: 887524 - DNA, 619 bp, Homo sapiens
gtgctaaaaaatgttgattacttctgaaagtccaagcatgctgatgacaaaataaagtttactttactgatgaaaacagggaatcttaagagttgtcaaagtgtacaatattcctcgagaaccgttattaaatatctaatgaatgattagcagaaawaaagactttcattttatgctctcatttaatgggatctagtcattgtcattttgtttattacagggcatgagatcaagactgagtgtaaagcagaggtggcttgctgttctgatgatcaaggctgtgcttcacgacttgtgtggagctaatgaggtggtttaaacgagctacttcaacagaatcatcatatttaattaatttattttattttaattcattaattgtaatgaattcttttcactattgcttgagagagaatgacataaaacaattgtttttttaaaaattattattatactttaagttttagggtacatgtgcacaacgtgcaggtttgttacatatgtatgcatgtgccatgttggtgtgctgcacccattaactcgtcatttagcattaggtatatctcctaatgctatccctcccctctcccccgaccccacaacagtccccggtgtgtga

SEQ ID NO: 887525 - DNA, 627 bp, Homo sapiens
tgggagctctgggtctgggataggaaagtggttgttgtctcactttggagcaagggatcctttgtaccctatcctcttcactgactaattagggaatttgagctgccctggggaaaagaggttctttctggatgagggcaatttccctgagggatttggctgagacttggtacctcagtcctgaaacaagaagcagaacaacatacacctcagagtggtgcacagtattgaggctcaatggtggaaatgtgttgggatactgtgaggaatgagaagacaattcttatgtgggtgtgtgtctctgtcagaaaaaggtttcataggagaggtgatatttgaactaccttgcaagatggcagtatattcttcaggtagaatagagacatagtattccacccagagggagattcacaagcaaagcctggcacttkcaaaaaaaaaatgtatgtcattcagagtgactaggagtgtagggtccaagatgaggggaaggagaacaggatagtgaggtgataataaggaatgaagctgaaaaaacagcagggtctagattatggagggccaaataggcccagcagtttgcattttattctaatagcaaggcaagcctttgaataaaggagggtc

SEQ ID NO: 887526 - DNA, 599 bp, Homo sapiens
gcatttttactcccttccagtgcccactgtgaactattgctacaggggaatttagatgtgtaattgccattaacaatatgacagaaatagcaactgtgtaactaattccccacattgtatgtatcttctgctcacactacatagaacatttttcctcatgattctgaaagtaagtaagcagcacaccacccccttgaaaagtggagcaaattcagaaattcttgtgattgtgttgggtcaagtcttggtcattatgtgtgctgtgtgccgtgtgctgcrtgctgtgtgctggagtcattatctttacgtacacgcaggatactaatgctgacatctaattatcgttataaaactgattaactctcaataaggtcagcataaagcagagaaatacatctttatgcaatctattaggtcatttgtttaataaattaaaatacttaaggaaggaaaatcagtctggcattttcttcagtcaattctctttggcagatgactgaattgcagagaaattcaaagagtggaggcaacactacattaaaagctccataatcaaaacagagagcataaaaacacttgagcattgtctaatggacaat

SEQ ID NO: 887527 - DNA, 535 bp, Homo sapiens
gtttctgctgcattttgttcagctatgccctgtctccagaagtggagtctacagaggcaggcaggccttcttgcgctgtggtgggctccacccagttttagcttccctgcccacagctttgtttacctactcaagtctyagcaatggcggacaccctcccccacaccaccccgagcctcactgctgccctgcagttggatctcaggctgctgtgctagcagtgaccgaggcttcatgggcatgggaccctccgagccagatgcaggatataatctcctggtgtgccgtttgctaaggccattggaaaagcgcagtattagggtgggagtgtcctgattttccaggtgctgtctgtcacagctttgcttggctagggaagggaattccctgaccccttgcgcttcccaggtgaggcaatgccccaccctgctctgtggactgcaccaactgtctgataagccccagtgagatgaaccctgtacctcagttggaaatgcagaaatcacccatcttctgcctcactcaccctgggagc

SEQ ID NO: 887528 - DNA, 632 bp, Homo sapiens
aaattaaccaataaaattaacccaatagttcattgttcttttaaatagacacagtcccaaaaaagtctaattaaaacgtatctaggccaggtgtggtggctcaccctgtaaccccagtactttgagaggcagaggcagaagaatcacccaagagttcaagaccagcctgggcaagattgtgagatactctagctacaaaaaaaaaaaaaaaaaaaaaaaatttaaacattagccaggtttggtggtgcacttctgtggtcctagctgctcaagaggctgaggcagaagaatcccttgagcctggaggatacagtgagctggactgatatagtgagctgkactgatatagtgagctgtgagtggccattgcactcctgcacaccagcctgggtgagagagcaagaacctgtctctaaggaaaataaaaaatgtatctaatatgttttctaattttggtaaatggaataactcttacattgccattcttattttacatgtgttcaagaaggaataaaaagtatggctgcattgcaattcaacacaagccagtcaacttggttaactttagctaacattttatagctctatttccttatttcataagagtaaggtcataaactagctttataatc

SEQ ID NO: 887529 - DNA, 606 bp, Homo sapiens
gccaaggcagttagcaagcacagatggcctaggaatgcccccacaccagctcctaaaaactcaggctttctttgagaagagttgagttcatgaagactattcttgtctctatcccttattgcagtagcctttactaatcttccttgactgttttgttccatgcaattttgctttgacaacacacaaatcacgaaatttattatttgtttatgtatgtatgtatgtatgtatgtacgtattttctggggaaatggaacctcagagaaggcaaayggcttgtctacttgttccagttcgttgggcattggtgacagatctttaattatgtgtacttttccccctccattctgttctcaagactggaggcaaagtgtcctgacaatgaagtctcttcactattcaatggaaacagagaaagacagtgtaactcaaggagtttatgttaaaatctgaactatatatactacatagcatatgtattcaaatcaagagacaataaaatgaccaacacaatttctttaattttctttttactgatgactactttatgcatcttaatgtgcatttgcttttttctgtgttcctagtcatgctttattacctgga

SEQ ID NO: 887530 - DNA, 585 bp, Homo sapiens
ggttgtctaaaagtgcgtggcacctccccaccacctctccctcctgccaccgcttgaagatgtgcccgcttcccccttaccttctgccatgattgtaagtttcctgaggcctccgcagaagcagaagccaatataacccacagaaccatgagccaattaaacctcttttctttataaactacccagttgcaggtatttctttatagcagtgtgtgaacaaactaatacargaaattcatactagagaagtggggcattgctataaagatacctgaaaatgtggaagccactttggaactgggtaacgggcaaaggttggaacagttgggaaggctcagaagaagacaggaaaatgacagaaagtttggaacttcctagagacttgttaaattgttgtgaccaagatgctgatagtgatatggacaatgaattccaggctgaggcagtctccgatggagatgaggaacttattgagaactggagtaaaggtcactcttgctatccttcaacaaagagaatggcagaattgtgccgctgctctagggatctgtagaactttgaatttgagagagatgatttaaggta

SEQ ID NO: 887531 - DNA, 646 bp, Homo sapiens
cagacaagtaaatgatgactgtatttgtcaccactagaccggcccttcaagaaatgctcaagggagtcctaaacttggaagcaaaaggatgacattcaccatcatggaaacatacaaaagtataaaactcactggtaaagcaatcacacaaaggaggaagtgaaagtaatcaaatagcaccactacagaatttcaccaaaccacaatgacaaacagagaraatgaaagaaacaaataatttataaaacaactagaaaacaattagcaatatgacaggaacaaaacctcacatatcaacattaaccttaaaggtaaatggattaaatgtctatggcagaataacaatccactgtatggatagaccatatcttgcttacttgttctgctgacagacagttaggtgtttccacctttttgctattatgactaataccactatgaatatcatgtacgagtttttgtgtggacatatgtttccatttctcttgggtatgtactaggagtggaattgctgggtcatatggtaactctgtatttaactttttgaagaactaccagactgtttttcacagtggctgcaccatttaccaatggcaatgtatgagggttggttacttttattttgtaaaaaaaccggaaggaagaa

SEQ ID NO: 887532 - DNA, 563 bp, Homo sapiens
gggctccttgttacttgtgcaaatttctgtagcccgctttaatttctcctcagaaaatgagattttcttttctattacattgtcaggctctgaattttctgaacttttatgctctccttcccttataaaactgaatgcctttaacagcacccaagtcacatcttgaatgatttgctgcttagaaatttcttccaccaggcaacctacagaataggagaaaatttttgcaatctacccatctgacaaaggtctaatatccagaatytacaaggaactcacacagttacgaaaaaaaaaaaaaaaacccacaaataaccccatcaaaaagggggcaaatgatatgaacagacacttctcagaagaagacatttatgtggccaacaaacatacacaaaaaaccctcaacatcactgatcattagagaaatacaaattgaaaccacaatgagataccatctcatgccagtcagaatgatgattattaaaaagtcaagaaacaatagatgctgtaggctgtgaacaaataggaatgctttgacactgttggtgggaatgtaaattagt

SEQ ID NO: 887533 - DNA, 563 bp, Homo sapiens
gggctccttgttacttgtgcaaatttctgtagcccgctttaatttctcctcagaaaatgagattttcttttctattacattgtcaggctctgaattttctgaacttttatgctctccttcccttataaaactgaatgcctttaacagcacccaagtcacatcttgaatgatttgctgcttagaaatttcttccaccaggcaacctacagaataggagaaaatttttgcaatctacccatctgacaaaggtctaatatccagaatctacaaggaactcacacagttacgaaaaaaaaaaaaaaaacccacaaataaccccatcaaaaagggggcaaatgatatgaacagacacttctcagaagaagacatttatgtggccaacaaacatacamaaaaaaccctcaacatcactgatcattagagaaatacaaattgaaaccacaatgagataccatctcatgccagtcagaatgatgattattaaaaagtcaagaaacaatagatgctgtaggctgtgaacaaataggaatgctttgacactgttggtgggaatgtaaattagt

SEQ ID NO: 887534 - DNA, 639 bp, Homo sapiens
atcttttctttttatgtatcaacacagctaaaagatcatgattgaaaaagaaaatattatccctataaggatgttttaagactaatgttttacaaatccagaatccacataagtttcagattaaaataaacataaaagattaactcagagtwtctcattatgtaacttcttatctcaatttataacatttgaatattctgagtcctactttgcacttgatttgacaatgtgaatctcaatgttccaaacattttcttcatgacacaggccattatggagaaaaaactcccatactgctatctcatatcacagtaatgtttttatctgcagtgtgctaatagagtctcctgggatttacatcaatagtaatcaccaaatgtgatgttagaggaaggttgatgttttgatagtcttttattggctcttgcgaatttagaacaatcatcaacatcattattatacagaatgtggctaaaaatgggaaaagggaaaagtgggttaatttcattttaatttaaggctttgggccctaaatgccaatgtaagaatttattagtaatagttatatcaaaagctttttaacataattacaagcaaattatatgcatgtggccagtaaaatcagaggttagtttcatt

SEQ ID NO: 887535 - DNA, 639 bp, Homo sapiens
atcttttctttttatgtatcaacacagctaaaagatcatgattgaaaaagaaaatattatccctataaggatgttttaagactaatgttttacaaatccagaatccacataagtttcagattaaaataaacataaaagattaactcagagtttctcattatgtaacttcttatctcaatttataacatttgaatattctgagtcctwctttgcacttgatttgacaatgtgaatctcaatgttccaaacattttcttcatgacacaggccattatggagaaaaaactcccatactgctatctcatatcacagtaatgtttttatctgcagtgtgctaatagagtctcctgggatttacatcaatagtaatcaccaaatgtgatgttagaggaaggttgatgttttgatagtcttttattggctcttgcgaatttagaacaatcatcaacatcattattatacagaatgtggctaaaaatgggaaaagggaaaagtgggttaatttcattttaatttaaggctttgggccctaaatgccaatgtaagaatttattagtaatagttatatcaaaagctttttaacataattacaagcaaattatatgcatgtggccagtaaaatcagaggttagtttcatt

SEQ ID NO: 887536 - DNA, 639 bp, Homo sapiens
atcttttctttttatgtatcaacacagctaaaagatcatgattgaaaaagaaaatattatccctataaggatgttttaagactaatgttttacaaatccagaatccacataagtttcagattaaaataaacataaaagattaactcagagtttctcattatgtaacttcttatctcaatttataacatttgaatattctgagtcctactttgcacttgatttgacaatgtgaatctcaatgttccaaacattttcttcatgacacaggccattatggagaaaaaactcccatactgctrtctcatatcacagtaatgtttttatctgcagtgtgctaatagagtctcctgggatttacatcaatagtaatcaccaaatgtgatgttagaggaaggttgatgttttgatagtcttttattggctcttgcgaatttagaacaatcatcaacatcattattatacagaatgtggctaaaaatgggaaaagggaaaagtgggttaatttcattttaatttaaggctttgggccctaaatgccaatgtaagaatttattagtaatagttatatcaaaagctttttaacataattacaagcaaattatatgcatgtggccagtaaaatcagaggttagtttcatt

SEQ ID NO: 887537 - DNA, 615 bp, Homo sapiens
tgaaatgaagtcagaaataaataagttctttgaaaccaaagagaacgaggacacaatgtaccagaatctctgggtcacagttatagagtaaaatttatagccctaaatgcccacaggagaaagtgagaaagatctaaaatcgacaccctaatatcacaattaaaagaactagagaagcaagaaaaaacaaatccaaaagctagcagaagacaagaaataactaagatcagagcagaactgaaggagatagaaacacgaaagacccttcaaaacatcgataaatccagtagctggttttttgaaaagattaacaaaatagatagactgctagtgagattagtaaggaagaaaaragagaagaatcaaatagatacaataaaaatgataaaggggatatcgccactgatcccacacaaatacaaactaccattagcaaatactacaaacacctctacgcaaatcaactagatagtctagaagaaatgtataaattcctggacacattcaccctcccaagactaaaccaggaagaagtcaaatccctgaatataccaataacaagttctgaaattgaggcagtaattaatagcctaccaacaaaaaaaagcccaggat

SEQ ID NO: 887538 - DNA, 615 bp, Homo sapiens
tgaaatgaagtcagaaataaataagttctttgaaaccaaagagaacgaggacacaatgtaccagaatctctgggtcacagttatagagtaaaatttatagccctaaatgcccacaggagaaagtgagaaagatctaaaatcgacaccctaatatcacaattaaaagaactagagaagcaagaaaaaacaaatccaaaagctagcagaagacaagaaataactaagatcagagcagaactgaaggagatagaaacacgaaagacccttcaaaacatcgataaatccagtagctggttttttgaaaagattaacaaaatagatagactgctagtgagattagtaaggaagaaaagagagaagaatcaaatagatacaataaaaatgataaaggggatatcgccactsatcccacacaaatacaaactaccattagcaaatactacaaacacctctacgcaaatcaactagatagtctagaagaaatgtataaattcctggacacattcaccctcccaagactaaaccaggaagaagtcaaatccctgaatataccaataacaagttctgaaattgaggcagtaattaatagcctaccaacaaaaaaaagcccaggat

SEQ ID NO: 887539 - DNA, 561 bp, Homo sapiens
ttctcaccagcagtgtagatgtgttatctattcaccatatccatgccaacatctatttttattacttttacttttttgattctggccattcttgcaagagtaatgtggtattgcactgtgattttgatttgcatttccctgatcattagtgatgttgttgtctattcatgtccttagcccgctttttgatgggattttttttcttgctaatctgtttgagttcctagtagattctggttattagtcctttgtcagatgtatagattgtgaatatttcctcccatgctgtgggttgtctgtttactctcctgagttttccttttgttstgtggaagctctttagtttaattaagtcccagcaatttatcatttttttttgtcatttgcttttggttcttggtcataaagtctttgcctaagccaatgtctggaagggtttttccaatgttatcttctagaatttttatactttcaggccttagatttaagtccctgatccatcttgagttgattttcatatatggtgagagattagaatctagttttattctcctacatgtg

SEQ ID NO: 887540 - DNA, 567 bp, Homo sapiens
ggattggggccatattttcagcctccttaaacaaaacaattatgtgctgggaattttttatccagttaaactaatcttcataaatgaaggaaatgtacagtgtttttcagacaaacaaatgctgagagaatttgtcactaccaagccagcactaagataactgctaaaaggagctctaaatcttgaaacaaatcctggaagcatattgaaacagaacatctttatagcataaatctctcaggacctgtaaaacaaaaatacaaccatccccctgcaaaaacaaacaaataaaccaaaccaaaccaaaacaaaaacaaaacaggcattcaggcaacaaatagcacaatgaatgaaataktacctcacatctaaatactaacattgactttaaatggtttaaatgctccacttaaaaagtacagaattgcacaatggataagaatttaccaaccaagtatctgctgccttcaagggactcacctaacacataaggactcacataaacttaggtgtagggatggagaaagacattccatgcaaatggacaccaaaagcaagcaggagtag

SEQ ID NO: 887541 - DNA, 567 bp, Homo sapiens
ggattggggccatattttcagcctccttaaacaaaacaattatgtgctgggaattttttatccagttaaactaatcttcataaatgaaggaaatgtacagtgtttttcagacaaacaaatgctgagagaatttgtcactaccaagccagcactaagataactgctaaaaggagctctaaatcttgaaacaaatcctggaagcatattgaaacagaacatctttatagcataaatctctcaggacctgtaaaacaaaaatacaaccatccccctgcaaaaacaaacaaataaaccaaaccaaaccaaaacaaaaacaaaacaggcattcaggcaacaaatagcacaatgaatgaaatagtacctcacatctaaatactaacattgactktaaatggtttaaatgctccacttaaaaagtacagaattgcacaatggataagaatttaccaaccaagtatctgctgccttcaagggactcacctaacacataaggactcacataaacttaggtgtagggatggagaaagacattccatgcaaatggacaccaaaagcaagcaggagtag

SEQ ID NO: 887542 - DNA, 607 bp, Homo sapiens
agtgcttagtgcatagcagatgtgctttaaatatttgttaagtatgttattccattatatggatgccatatattatttaattaatattatgtttgttttctgttatagacaatactgcaatgaaaatcagtggtcatatatcctgtgcccatttgtgaatatagctgtaagatatattttgaaaagtgtaattactaggtcaaatcatatgcatttaatattttgataagtcttcccaaattgtgcaccataaagtttttattaatgttgacaggcaataaaaatgcataagaaatatatttctttcaaatattgcctaacaaaatttatcattatacctccaaaagtttattttcatttttaaaattatgagtgataatgaacatacttttacgtttatagcaattttttagtttgtagttattgctactaactgcttatttatgccttttcctgttttcttwttaagttttatgtttctatcttattgatcttttgaaagtctttcaatgtttactactcaaaaaagtgttatttttaaatgttgtttattgactctgtgcttgtacctttaacactgtcaatggaaaagaattaaactctctaa

SEQ ID NO: 887543 - DNA, 607 bp, Homo sapiens
agtgcttagtgcatagcagatgtgctttaaatatttgttaagtatgttattccattatatggatgccatatattatttaattaatattatgtttgttttctgttatagacaatactgcaatgaaaatcagtggtcatatatcctgtgcccatttgtgaatatagctgtaagatatattttgaaaagtgtaattactaggtcaaatcatatgcatttaatattttgataagtcttcccaaattgtgcaccataaagtttttattaatgttgacaggcaataaaaatgcataagaaatatatttctttcaaatattgcctaacaaaatttatcattatacctccaaaagtttattttcatttttaaaattatgagtgataatgaacatacttttacgtttatagcaattttttagtttgtagttattgctactaactgcttatttatgccttttcctgttttctttttragttttatgtttctatcttattgatcttttgaaagtctttcaatgtttactactcaaaaaagtgttatttttaaatgttgtttattgactctgtgcttgtacctttaacactgtcaatggaaaagaattaaactctctaa

SEQ ID NO: 887544 - DNA, 651 bp, Homo sapiens
gattttggtgctttctcaaccttcctgtataaaaataaaaaattctattaccattggtctaggaaagcctagttttgttagaggctctatttattgtaggaaggtctgtgatggtctatcaagtgctggaccattctgaaagcctctagacagcatccccagaagaggccatcttattgatttctaggagttatttatatattttaaaaatcaactttttgactgtcatatgtgttgcaaatatttttcccattttgacatttatgttttgacttggtttatgatatggtttgtatgtattactttatttttatttttacgtagtcaactacaatgtattgtttaatgtcttctgggtttctattttgtatttrgctgaggcaattcttttccacctctagaatttctaagaaaacctatcctatgctttctcctagcactgaaactatttattttaagatgtatctttgacttatttaaggaattatgtgttaaataatacatctctcttttatctgaaaagtcaacttatcagctttaatttctggatgtatttggataaatagctggtctctctttcataatctattggtctatctattaatgtgtctattccaatatattctaataccttagctttattagatgctt

SEQ ID NO: 887545 - DNA, 624 bp, Homo sapiens
aataagagagaaggatcaaatgggaaagtaggatcttctttcctgtttatttcttagggggtgggggcggagcaaacaagataactatagggggagaagttaggagattttggaaaactgcctttattttattttttcctcttgccctgcgcctcctagcatctttatgcttgcctctgggcttttctgctccggcttgactgggtcccgcaaagtccacttcctttttttttaatttttttttcccccaaagagaagcacctgcaagtgtaatgggtgttacggaacactcgtccaggccaggatgagaaaccctctgactgttggctaggaagaaaagaaaagcgggaaatacttaaaaaccatttatgaagtgtacctgtgaattgaaaaayagggtctcattttaagacagcttgatttgagggtgaggggcttgactcagttgcattttaaaaaacaaaacccaaccaaataaaaaggaatacgcatacaggcactaaggtctcttccaaaccccaccccagggctggctcttggggctgggatgctgctggggaccggtcttcccagctcttggcctggccggtttgcacgcagtgcagttgctgtgtgtgtgttgcg

SEQ ID NO: 887546 - DNA, 618 bp, Homo sapiens
tatcctttgctcatttttccattgagttgtttgtttcttcttctcactgatttttaatgactgtatgtattctggatgctaatattgtgtaggttatatgcattgcaaatattttactccaatacctggcttacatttaactttattttagaatcacttttctcaaaagcttttaatttttagttatgtttcaagtggagaaatgtgargctcatggttgcatagtaataatattttagtaccaaatgatgtcaccgtgcttgctactctaaagcagtacagcaagattgaaaagaacactcgtctgaacccaagatttcacaggtcttctatatctgcttctaatagttactggcaaaagccagtataaaaaataatttgttgatgttggttacttaattacctgattaaactgacacacagtgatgaacagttagtcacctaaccccaagtcatacacctttttagtgccaaagctgtcagaatctcacaccatttcccaaagtttgctgtgtggaaccctagtccttgaaaagcattctgtggtcagtttcattttacattttttctcctcttaaaatttcagagtttacagtgtgatattaaaagttctgttaa

SEQ ID NO: 887547 - DNA, 611 bp, Homo sapiens
agatgttgctgcgagaaagatgagatttcgggagctgtcatcaggattgcgacttctggttgcagtcgatatttttccaaatgccaaccacacaaggatttaaaagaaggtgcaaagaagcatgtggcgtgctcctcatgaagcaagagcgggctaagtggctcgcttaagcatcacgccccccagccaatcacgagcctgggcaccccggccttttctctgcaaggcyttggccacatgccctcctatacaattgtgaggagattggatgaaacacgatggtatttaaagcgctcttccatggcgctcttgcagttgtaagatttcccaagaggcagttgccaagattatgttctttcccactgacttttaatttgtaaattgtaatgggctcccctttagatatggcgatatagtttgcattccacaaggtggccagagaagagatgatcccatgtaaatcttcagagtacgctctctgccatgatgaaaggtgcaggaaaacacaaagtgatcaaattctcttatggtcgggcatgatgcttgcagaaactctggtcttaaaagagatctgttatcaactatgttcttaacagaacttgaaaaagaat

SEQ ID NO: 887548 - DNA, 590 bp, Homo sapiens
tacaaattaaatttgttggctaaggagacacgattggaagaaagttattagaaggaacattaccgagctctacacagaaaggtgagagagtttaataatccagaggcataatacaattcattccttggagttttatcttaaatacagaataatgctggaaaaatgatggtaatgaaaatagacttgcccagcaaagataacaatgataagattcgcaagaccgttgatttgtaaaaacatgaataaacacttaaggtggtggaagttatcggatctttcttcaagtaatatgagtattctgcttttgagatggattgctaagcagctcatggattaaccctgcttaataatgctaaccaataatagttgccaggtattagcatgtactatgtgccaaacgctgtgctaaacgctttaagtttgrtgttatgagaataaccaccctatgaggtaaccatttttcttaataatctctttttctttttttttttgagacaaggtcttgctctgccaccttgttatcatgcagtggcacaatcacagctcaatgcagcctctgccccctgggttcaatagatctcagcgtcctg

SEQ ID NO: 887549 - DNA, 592 bp, Homo sapiens
tagctgagggattatcacgtctaatccttaattttacaaatggggaaactgaggcacagtctttgtacaagctacttctctctcccttagtgagcttgtcaattctcttctatgaattgcttttagctaaaggattagcaagtaaaactatttttttttttttttttttttgctgkggctccagatggggtccaaagaggagtttcacagtctcttctgtctcttctctgggttttatggagacttactttaatttacccttatgtgttagcctcttacgaaactgcgtctaccttaaaagggcacaggaaagggtgaaaagtatttttaaaaggctaaataaccacatagaagtcatgtaagttgacgcatgagccggcgaatggaatgatgatgtggccttggaggcctgatgggtcctcccgttggcatggtcccttctgctactggcgctcctgtgcctgcaatccaaacatctggggcctggccaaggggataccgggggctcgaggaacatgaggagctaagaggtgacctggggtcccggacaggcaggcaatgaggatgtgtggagttgagtacacgtcagggt

SEQ ID NO: 887550 - DNA, 624 bp, Homo sapiens
tttgtatctagtgagattgaggtgtagataatttttcttctttatacttatctgtgtttctgagcattattatgagcatgaattgcttttgtaatcattaaaaacaataaacgttatttttaagagaatcatgttctatgtccaaattatcactaaatctgagttaatggcatctaaattaagagtctttcaatggtaaagttttagtagtataatagtataatatacgctcagtggsaattcagtgtatttcatagataagtttcatttgtagcaagatgctaaataaaggctaaaaaagataatgatcttccagagatttgtagataaataattgttataaaacaagtcttgtttctgcctgagatagccaggaaagaggattcaataagatgctcagaaatgtaccaactgacattttactaagtcaacatggtttgggtatcatttggggtaacctgtgttctcagtggctttccataaccctaagaataattttgcaggcattttggcattgagtcttcatttaaagaatgaaaatgaaatgcattccagtgcttacagcatctttttgaggttcttttgcgtgtgtgtgtgtgtgtgtgtgcccacacgtgtgtgttg

SEQ ID NO: 887551 - DNA, 603 bp, Homo sapiens
ttttggttatttcttttctccttctacctttgtgcttggttcgctcttgctcctgtttcccctaggtgtgatgttaggttgttaatttgagatcttgctaacttctggttataggtgtttagcactatcaactttcctcttaacattgttttacatgtatcccagaaattcttgtatgttgtgtgtttgttttcattaatttcaaagaatttcttgatttctgccttaattttattgtttactcaaaagtcacacaggaayaggttgtttaatatacatggaattatagtggttctgagaaaacttcttggtattgatttatatttttattgtgctgtggattgagggtgatgttggtatgatttttaacctttttaaattttgttgagaattgatttatggctgagcatgtggttgatcttagattatgcgccgtgtgcagataagaagagtgtattttctgttgtgattgggtggagtattctgtagatgtctgtcaggtctatttagtcaagtgtcaagtttatatccagaatatctttgttagtattctgccttgatgatctatctaacactgtcagtgtagtgtcaaattatcccaat

SEQ ID NO: 887552 - DNA, 652 bp, Homo sapiens
aaagacaaatctgatatgtcatgtcccttcttgggaagcaattaagggaattaataatgtgaaggctctggagtaagagtctgtgatcttggctctaccacttattagctctgtggccttggcaagttaattgcttaacctctccaagtcttggttcacttctttttagcataaggatcatcattgcgcctatctcataaggttaatatgaggattaaatgaaagaaaatgcatggaagacattacagtattgttcatataggacrctgtcaatacaggaagcttattattattatccaattaaaatcttatatgactcctctcagcttttagataaactataatctttttatgatatataaggaccttcatgatatgcagattgtctccaaccttatatcttcactagagagtttctgcttttcccttgggtaaattatactgagtagtttgtaattctttataagccccctcctttgtcctagcctctagacctcaggaaaaaacctccctcacattaagtgatgttccctccttctccagtaagtaacacctgcctaatcatcattaaataatcaattctagagtttcttttccaactaagattccatgacttcctcattttatctagggtaggttttcctctcctttc

SEQ ID NO: 887553 - DNA, 652 bp, Homo sapiens
aaagacaaatctgatatgtcatgtcccttcttgggaagcaattaagggaattaataatgtgaaggctctggagtaagagtctgtgatcttggctctaccacttattagctctgtggccttggcaagttaattgcttaacctctccaagtcttggttcacttctttttagcataaggatcatcattgcgcctatctcataaggttaatatgaggattaaatgaaagaaaatgcatggaagacattacagtattgttcatataggacactstcaatacaggaagcttattattattatccaattaaaatcttatatgactcctctcagcttttagataaactataatctttttatgatatataaggaccttcatgatatgcagattgtctccaaccttatatcttcactagagagtttctgcttttcccttgggtaaattatactgagtagtttgtaattctttataagccccctcctttgtcctagcctctagacctcaggaaaaaacctccctcacattaagtgatgttccctccttctccagtaagtaacacctgcctaatcatcattaaataatcaattctagagtttcttttccaactaagattccatgacttcctcattttatctagggtaggttttcctctcctttc

SEQ ID NO: 887554 - DNA, 648 bp, Homo sapiens
ggaagaaactgcatcaactaacgagcaaaataaccagctaacatcataatgagaggattaatttcacacataacaatattaaccttaaatgtgaatgggcaaaatgccccagttgaaagacactcagactggcaaattggatagagtcaagacccatcagtgtgctgtattcaggagacccatctcacgtgcagagactcacagaggctcaaaataaatagatggaggaagatctacaaagcaaatggaaaataaaaaaagacaggggttgcaatcctggtctctgataaaacagactttaaaccaacaaagatcaaaagagacaaagacggccattacataatggtaaagggatcagytcaacaagaagagctaactatcctaaatatatatgcacctgatactggagcacccagattcataaagcaagtccttagagacctacaaagagacttagactcccacacaataataatgggagactttaacaccccactgtcaatattagacagatcaacgagacacaaggttaacaaggatatccaggacatgaactcggctctgcagaaagcagacttaatagacatctacagaactctctgccccaaatcaacagaatatacattcttctcagcacctcatcgcact

SEQ ID NO: 887555 - DNA, 613 bp, Homo sapiens
tttgtgcgtgtagctagagaaagagagagaaccattttttggtgacattttctaatttgttaaacccaaataaacgtgtgtgtgtgtgtgtgtgtgtgtaaataatcattaaggtactttatttacctttgcttggaaacctctccagctaaatatccaatttcaatacttgcaatttctaccttccacaaaattacagaatgggaataaaaattaggtaagttctttgccactttatgrcaagaatcttcttttctccatttttcaatatcatattcttcatttacatctgacctctcctcagaatggcctttaccatccatatctgtaccaacattgtgcacatgattacttgtgtattctctaggaagatggaggatttatctccatctcttctcttttctttctgagccctcaccagaatcacctttagcagtctcttcacagaaatatcagttttttctaatatacacctcaaaactcttctagtctttactcattacctagttccaaagcctcttccacatttttaggtatttcttacagcagcatcccatttccaggtgtggatatttgtcttagtcagtttgtgctgctatatccgaatactgta

SEQ ID NO: 887556 - DNA, 588 bp, Homo sapiens
agcttctggccaggacctatagccatatcacaaacttcaggcttgtcctcaaggtacacacaccattgtgttacacttgccaggtgtgggaataactaactggtagtggccaaatgaactacaaataagctataacaaccaggatgagatgactaggtttgctgtaaaactgcctgcatatacagacaccaaaagccacaatcctctttgatagtattaagaaagcactgtcagttttttgaaggtgtgataatgatattaaggtatttatttaaaaaaagcctctctctctctctctmtatatatatatatgtacatatacataaaatatatatctattttaaatatccttatcctggaagcgtccttatattttaactatacatgctgaaatatatttacagatgaaattatatcaaaatatttacagatgaaattatatcaaaatgccttgctttaaaacaatttagggtaatggggggagagaaacggtggcatatataaaacaaaattgacaatgagttgataattgttgaaactgtgtgatggatacatgggagttcattattttctttacttttgcattta

SEQ ID NO: 887557 - DNA, 569 bp, Homo sapiens
ccaatacaggagtacccaaattcataaagcaagtccttagagacctaaaaagagacttagactcccacacaataataatgggagactttaacactccgctgtcaacaagacagaaagttaacaaggatatgcaggaattgaactcagctctacaccgagcggaactaacagacatctacagaactctccaccccaaatcaacagaatatacattcttctcagcaccacatcrcacttattcaaaaactgaccacatagttgggagtaaagcactcctcagcaaatgtaaaagaacagaaattataacaaactgtctctcagaccacagtgcaatcaaaatagaactcaggattaagaaactcactcaaaaccactcaactacatgaaaactgaacaacctgctcctgaatgactactgggtatataatgaaatgaaggcagaaataaagatgttctttgaaaccaatgagaacaaagacacaacataccagaatctctgggacacatttaaagcagtgtgtagagggaaatttatagcactaaatgcccacaagagaaagcaggaaaga

SEQ ID NO: 887558 - DNA, 629 bp, Homo sapiens
acagtgcgtctactgcacgttaccaccaccactcctacaaacaacccgaagggtaagtcctaaagacgtgtctgcagctttgccttcaaacaggaagaaaaatgtcaagttaccagtgactatggccactctaataagctacagccagggatctaacagaaatcgacttaaccagttatgattctaggacaaggaagaatgaaaaataagaackgaagaaggaaaaaaaaccactttcttgtaaatatattatttactggatgagcaaataaaaacagttctctctggtcaaagctgtgctaagacaaaatttatctcaggtattaaaatgaaacgtgaaacaaaggcaatacaacctctcggtaaagatgacaaaacctcatatagtcaaatcctcttaccctaaaacgttaacaatgtataaatatccgatgtcagtggatcacattctcaaataccgagttcaataaagtagaaaaagatgacaaggataaaaatgtactggaccgtagtttcccgtttaccctgttaaggaatggctcattcactccgcttgccttttgaattgctttgtactgtgacgaagccttttaagttagcttcaaattaatatttagctgcaaaacaaa

SEQ ID NO: 887559 - DNA, 600 bp, Homo sapiens
tacagatgggagaaaatttttgcaatctatccatctgacaatgggctaatatccagactaaaaatacttaaacaaatttacaagaaaaaaacaaacaaccccatcaaaaagtgagctaaggatgtcaacagacccttctgaaaagaaaacatttctgcagccaacaaaaatgaaaaaagctcaccctcactgctcattagagaaatgcaaatcaaaaccacagtgagataccatctcacaccagttagaatggcaatcattaaaatgttaggaaacaacagatgctggagaggatgtggagaagtaggaaggcttttagactgttggtgagagtgtaaattagttcaaccactgtggaagacagtgtggccattcctcaaggatctagaaccagaaataccatttgwcccagcaatcccattactgggtatatacccaaaggattataaatcattctaccataaagatacatgcacacatatgtttattgcagcactgttcacaatacacagacttggaaccaacccaaatgcccatcaatgatagactggataaagaaaatgtggcacatacataccatggaatactatgcagccataa

SEQ ID NO: 887560 - DNA, 612 bp, Homo sapiens
gcaattagaagagaacttccaagctctcaccacatatctctccacccaaacacatctcttcccattcactctctcttctctccactgactctaggtagattctaggtgctcctggctaaaagtacccccaccctgtattctggtcctatctccttctgyctatcccaggaagctcctcactggtctacccttgcacccctgcattgaccagctcaccctctatcctggatcactgggatcctcctcattggcctattctcccccaactcccacattttttaaaacaacacaactctttgaaagggttgtctacatctactgtctcttatttgtttcctccccattttcaagttcagtcaagttttgtgcccctcccactccactgaaacctatcttgtcaaggtcgccaataaatttcacaccacaaaaaccaagagtcaatactcaatcctcattttacttcaactatcagcagcatctgacacagctgataactctcctccttggaaactatcttcacttggctttgagaatgccaaatgcctgattttcctcccacctctcacctctgcaaacaaatactgaaaggtcatgttctctaaacattggtgt

SEQ ID NO: 887561 - DNA, 619 bp, Homo sapiens
taaatgctatcaagcaaaataaagctatggaaagtggcactaacagagccagagtactcaaggtaccctgccttgagctgagagggtgacatttgagcaaagacctgaatcaggtgagtttgccatgtgtcagtggggcaaaatcctgttatagtcctggggcaaagcctgctttgagagccaaaggaacagaaaggagtccaatgtggcygggacacagaaagcaagggagaagcagcatcccactaggtttttaaatttaattctgagaggtcaccagaaggttttcttcctttcttccttccctccctccttccttccttccttccttcctttctttcttttagcagagggatacagcttctttttgaacaccaaactctgggttaatcaaagctgatagttaaggatagccacagaaatctatatcagcctacagcattagagaagctaataaatttaagaattcaacgtacctaagatcaaaggcatctaattgctgaaatacaagagaccaagcatctaattcataactgtacagtctacgtaatttttactggccagctcttctcccaggccctgagtctcacagaggcaggggttgtgctgggctgtgctg

SEQ ID NO: 887562 - DNA, 619 bp, Homo sapiens
tgactgtaatcttggggcttcctattcaaactggaggacagtaaagctcccaggatggagttttttttttatggtttttaaagtcataggcagaatactggctgtcaaaatcaggcaagggaaagcattgataattcaggaggtgacagatgagggaaagtgycagatgtatagacaggaaaatggataacataattttctttgggaccaattaacgtaagagctattttgcatactttcaatcagaaaggtgtcagtgttgtcagaagtgaaattttttcctgatgaaagttaacatgacacattcttgtattaatgaaacacattctgaattatttcacaggaaagaggagaaaaagcactttaagtacaaataccatcacaaggcaagacttggggacataaatattcatgacatattccacatgtttaattaagctctgttcttgattttcttttctggtttgtttttctagtaggaaagatgccaaatattatgagcttctacttcagaattttaggccacagtgtgacctcgtatcaccctgtttcatttggcaagcagtattgtcaaaaatgacatgcactgatgaagtaatcattcatgaaaaaggggaaa

SEQ ID NO: 887563 - DNA, 627 bp, Homo sapiens
attattggaacttgaatggcaaacactaacatttctcagtttgcataagataatctttaaagcatccaaaagataaaaatatgacaaaatattaattttgaatcctgctgagatcttcagattaaaccattctctccatgcattgccagcgtaagaaataagctgatcatttttcccatgttatagaaagtatctaatcaagttaaactgccaacacctaccaaaacactactaccagccttaaaagcatcttggtgtaatgtccattatcacatggaattaaagcacaataacattttttagatttaaaaaaaaagtgggctgggcacggtggttcacgcctgtaatcccagcactttaggaggccgagacaggagggactgcttgagcccaggagttcaagaccagcctcagtaacatagagaaaccccrtctctacgaaaaaactaaaaaattatccaggcatggtggtgtgtgtctgctgcatgtctgtagtcgcagctactctggaggctgaggtgggaggatcgcttgatcctggaaagttgacgctgtagtgaacactgagcacaccactccagactggacaacacagtgagaccctgtttctttaaaaaaaaaaaaaaa

SEQ ID NO: 887564 - DNA, 627 bp, Homo sapiens
attattggaacttgaatggcaaacactaacatttctcagtttgcataagataatctttaaagcatccaaaagataaaaatatgacaaaatattaattttgaatcctgctgagatcttcagattaaaccattctctccatgcattgccagcgtaagaaataagctgatcatttttcccatgttatagaaagtatctaatcaagttaaactgccaacacctaccaaaacactactaccagccttaaaagcatcttggtgtaatgtccattatcacatggaattaaagcacaataacattttttagatttaaaaaaaaagtgggctgggcacggtggttcacgcctgtaatcccagcactttaggaggccgagacaggagggactgcttgagcccaggagttcaagaccagcctcagtaacatagagaaaccccgtctctacgaaaaaactaaaaaattatccaggcatggtggtgygtgtctgctgcatgtctgtagtcgcagctactctggaggctgaggtgggaggatcgcttgatcctggaaagttgacgctgtagtgaacactgagcacaccactccagactggacaacacagtgagaccctgtttctttaaaaaaaaaaaaaaa

SEQ ID NO: 887565 - DNA, 653 bp, Homo sapiens
aatatgtcataaagtttgaatcactaagtctgtgacgctggcacaagactgctaatagaaccaatgagccacagaacaacccccagcatactctggagtttaacacacatggtaaaggaggaatcccaaaccagtaataaggaaaaagcttgctcaatgaatggcgctggaacaatcaggtagctatttggaaaataaatatatttaaatcagtggtttccaaacctgattgtgcatcaagaactgtctatgatatatattttttaaatattctgagattttaccaccccatcccacccctacatttagtgagtgcggaagggaactgaagggaactgggcaaatgtctctaaaaagcacttcaggtgattctatcataaagctggaattttcaaccatagatttgaagtcttaacrtcataggtcggaataaaattccagatcagagacatagtttgattacagttagagatacaaataaaactaatgttaaaaaaatttttttaatctttcatttctaaataaaggatgattctaagtacaaaagtaataaacaaaattataaacaaaaaattgactaaaatcaaaattaaagaaaaacagagataattatttataaccaagatatcagttaaataatgaataccttaaat

SEQ ID NO: 887566 - DNA, 615 bp, Homo sapiens
cataaaacttatattaaataaattggtgtgcttttctcctgttaatttgttctgtcaattttttttttcttagagatgggggtctcactatgttgcccaggctggtctcaaactcctggcctcaagcaatcctcctgcctcagcctccctagtagctgggattactgtgcctggcttawtttgtcatgtccatttaattctcaggcccagccaggaccctaagaggatagaggtaaagctttgcctcccctgcatcatttaactgccactactacctgcagaggtcaactaaatcttattttataattatgactctgaagtacagaaagatcattcaactggagcttgaatctaaagctcatgttctctgcactgcaaaattcatgtctctcagctctttctttctaaaaaccatcccttataacatccccacctccttcaaatactgtcaatgcacagcaatttgaaattattttcttattaaggatttaaaattgtttgcaatagtttttatctattgaggatgggctttttacttttttttaaaagccatctataagaagatatatctgtactttggataggccagttggacaagagttacatcaaagtgca

SEQ ID NO: 887567 - DNA, 648 bp, Homo sapiens
tggggaacgaatgcgctgagcgagcaggattcaagggatgggctgtacaggggctccctgcctcttcttaaccagacagaccccctccctggtcctctttttcctcctctgtgaagagaccaatgaggaggatttctaatgttccttaagccaaagcctatgcttttaagttgaaaacaaaaatatgggattcagtaataataatgatagggcagcagcaagtgctgatttcgcacataccatttgatcatcagtaactgggctaagtgctttccacgcattggctgctgtaatcctaagcacaactctgcaaaattggtgctgttattctctccattttacaggtragaaaacccagctcagaaagattgacacagtatgcccgaggtcacaacctaagaagtggccaagacaagactaaacacaagcaagtgtcttcttgctccaggctccacaccctcacctactctgttacattctttgatttcttcaaaacacacatttggaagctttcacataattctgctgagcaactgggccgtgggtgggagacagaacacaggtaccacagcttccgctcccaacactgtaagaatccagcagaggagccacaaccacaccacttcactccagcctggacgaaagagc

SEQ ID NO: 887568 - DNA, 643 bp, Homo sapiens
agtgtttttttttcaaatgccttcaaaaattcagatgaaaatgcaaaggacctagagcagccaaaaaactttgaaaaaaaatgttagaggacttattctacctgccttcaaggcttattataacttatgtaattaggagagtgtgatattggcatcaagaaagacaattagattactggaacagattaagattccagaagtagaccacacatatatgctcaattgacttttggcaaaagtgcaaaagcaatttagtgggatatagacttcatgcataatagtatggggagctctgcagacatgttccccagtaaaatggtgaaattattttattatttcattttttaatttaattttttgagacaatgttgcactctattgtccagactggagtgcagtggtgcaatcatgactcactacagccttsacctcttgggcctaagcaatcttcccacctcagatacatgctaccatgttccactaatttttttattttttctttgtagtcagtctcacaatgttacctgagatggtctcaaactcctgagctcaagcggtccttccacctcagcctcccaaatagtgctgggattacagtatgagccactgcatctggccatgaaaattgttttaaaaacaacta

SEQ ID NO: 887569 - DNA, 643 bp, Homo sapiens
agtgtttttttttcaaatgccttcaaaaattcagatgaaaatgcaaaggacctagagcagccaaaaaactttgaaaaaaaatgttagaggacttattctacctgccttcaaggcttattataacttatgtaattaggagagtgtgatattggcatcaagaaagacaattagattactggaacagattaagattccagaagtagaccacacatatatgctcaattgacttttggcaaaagtgcaaaagcaatttagtgggatatagacttcatgcataatagtatggggagctctgcagacatgttccccagtaaaatggtgaaattattttattatttcattttttaatttaattttttgagacaatgttgcactctattgtccagactggagtgcagtggtgcaatcatgactcactacagccttgacctcttgggcctaagcaatcttcccacctcagayacatgctaccatgttccactaatttttttattttttctttgtagtcagtctcacaatgttacctgagatggtctcaaactcctgagctcaagcggtccttccacctcagcctcccaaatagtgctgggattacagtatgagccactgcatctggccatgaaaattgttttaaaaacaacta

SEQ ID NO: 887570 - DNA, 630 bp, Homo sapiens
cactgaagatgaacctcaataaaggaattggacacgtaagagtaaatgtacataacagatatgagcagccatgatgctgtctaggttggaaaagtctccctaggaagtatgattggagtggtacctaaaggaagaggaaaagttaccttggcaaagtgrtgagggaggagtgttccaggcagagggaatagcatggatgaaggtgaagtgataaggaccacattcaagggacttcagtaaggtcattgtagagcaaggtcttggattaggctgagggataggaggagcagatcctgcaggtgttggaggctgcattcagtttcagccgttatcctgagagcagagggagaagagtaggtctgcggcatgagcagtggcctctaagagataggaaagagtcaggaatcctgaatttcaagggtggcagagccctatgcccactcatgcgtggcacccacagccaatacacagacaagtactattggctttattttcaaatatattccaaatcacatcttctctcaccctcttctgcatatgtcgtggcagtgaattcctgatttgtcctcctgctaacttttgtccatctgcagcctattatagacacagaaatccaagtgactttgtaag

SEQ ID NO: 887571 - DNA, 605 bp, Homo sapiens
tcagacattatcaggttggacctgtgaaaatctgattgaaacctggatgtgggataccagccatagttgtagcaactttggccagtgtaagagatagggatgaaaggttgtaaagatgcacaaaaggggctgttacaactcccaagtacatttctctagcccagactttactgagctccagacccatgtaacttcttagactttgcatatactaagttgatcatatgctcctttccccaaagcctgtacttcccaagtttcctgttttaagaaatggtacctagtttttcatgtcrcaaaacctagtcattatacttgacattgtgctgtcttcaactctccatgtgaattcatcccaaattcaacctcttggtgattcctttccatttccacagctactaccgtagtccaagccaccgtcttcttttaatttgactataatagctacctaacatttactctttattccttgaatctgttctccactttgaactgaaaggacccattttaaaaatgaaatcgtaagcacataactcccttaagtccccttgctagcttcccattgctcaacatcaaatccagactccctaaatgtggtccacaca

SEQ ID NO: 887572 - DNA, 649 bp, Homo sapiens
taaaacagaagcattggtatagacaaaaggacagtgcatataatgtgtaaatatatttttctggaaagatagatatgaaactgctgatgtggttaattctggaaatgacaactgagtgggaagagagatggcaaggagacagtatcaccttatatgcttctgcattgtttgaattagtttaactgaagattctttttaatatattttatttttttcctaaaacagcaactcatcttacctctytcactttacactcagacacttatccagaaataacttgtttgtactaacacacatagtgtctggtaagtgatggatccagaaattgaaatattcatgctcacttgatgtgacaaatccctttgggggttaaattttatatttatagtttgctctgacagaaatattaaaatctgcatttgcatgccacagcgaggatgttttgggcacaaacagaggctcttgctgctgcagtgaagggcagatgcctccaacaggagtgacagtatttattctggcattgtgaaaatcctgtttttttccttgtcctttcttttctgtacttccctctgggttaagcagaaaaataacttttacaatggtaccattttcttagtagcttcctggtaaaaataaaagggggaaaagt

SEQ ID NO: 887573 - DNA, 617 bp, Homo sapiens
ggcactggattgtccgatcagccacctatttcaagtaatggcaaaaccaaaattctggcaggaaagtggcattgtatcttagaggtaactgtaatgtcccagacagcccatctgccccacgtctgaagaatttgagacctgagctctgtctgacatccaattatcgaaggataattctacttgtgcctctcttcttttctcttggctcacttcattttccatccaagtccttttctccttatagaacttgaccttgaccccctggtccaagaaagacatctggcatctccctacttctgagtccagcactgttttcttgcttttctcattcagctccctgagctccagggtcacaaggtcaggatctctctaaagtacactatgcctgcaggaagcaacagtgccaccacccccaatggaactcagaagcagatagattactgaaaagagctcagasagaaattgatttttcttatctaaattatgggccacgtgaaagttttcaatgcactttgaattataaggaagctgtacttttctaagcataaataggggtgagagaagtttgtgcccctttttatcttatcatcctaccttaatcctaaactttcccacct

SEQ ID NO: 887574 - DNA, 491 bp, Homo sapiens
agcatggtgcaggggatataagaaaagcactgttaaggagaaaagaaatgaagccaacacatctctctaagtctcagtctttttatctataaaatggaggtgttatctactactgtgttatgcagtactatgcagtgttcttgaaagaattggaagacactgttggcaaagccctagccaaggtttgatctccctgtcatataagttctttgaactttttctttwtaccacctaccataatagtaattatattgctatttgtgtaattattaactgtctcccccataacactatagtccttagaagaaataaggtccatcttacactatattccacaatgctcaacatgtggcacaaccttaataaacgtttgttgaataaatgaatggatgaacaaaggccaataagttttagctctacttcagactaaactaagagtcttgtgtattattttatttgagtacatccaaaactataccaaaaaatataag

SEQ ID NO: 887575 - DNA, 602 bp, Homo sapiens
accctcagcagaattcaatgaggatcacttcattatgttaccatcccttggatagttggagtggtttggctcaacataaataatttttttgtctttaatatttgcttaagtagaaccatcatcattatgccattaggttgaattttaagatgtaggctcgtttcrttggcttttggcgcatttatttttggctttcttaggaattaaccgcaaaccattagtgaaaacaataaagcagccaggagaactgtacagaaagcctgggcaaagacagttgaggaggtctttagcaaagtctcccagatttttgcctgagttacccaaatacattgacaaatatctctattttaaagtcattaaaaaggaaaaatatctggaacaatttctgcagaaatccctcggactttcctcatactccccctaagcccatgccacaacatgtaccactagacacacatgacaaattaccaagaccacaccatttaaaagtaaaacaagattaagtttggttgtccataaagaggaaagatctggaagcactttttaaactaatcttccactaccaccgagattctgatgagtgcaggagggagagatgttag

SEQ ID NO: 887576 - DNA, 642 bp, Homo sapiens
acttaggcagaattagcaaaggaagtgggtaaaaaccaggttgcaccattgacccctcaagcctattataaggtgtaaaaaggttaaatttgaagagccaaaaggaattggaaatgagagagaagatttctttgaagacagctgtagctgtgtggrgtctccacccacccacactttgagagtggagtgggagcatcaggttgtctcctaacttaaagcctaattaaaaggggtttacaaagatcacttagagagcttgaaatgtgtcccctgaagtttgaaaaacagagtggacctgtgtatctgactcatacctgagtactctaaaagacaagggtctggttggggcacagagaacaaaccgtagtttgaaaaataatctcattctttggacagagagtctcagatgtgcatttctcatacactaaatgtgagtcatgagcaagcaagtggaagagaagttatcttagatcctgtgcaacagagcctctgggaggagcaaagaaacatcaaaggaaagatgctggaggaaccgctagcattcttgggaaatgacaactgaatcccaatgatcatgaaagaggatgcatgcacccacactgaagaaactgcatgtataagatccaatgcaatggcagggga

SEQ ID NO: 887577 - DNA, 613 bp, Homo sapiens
gttggggcacagagaacaaaccgtagtttgaaaaataatctcattctttggacagagagtctcagatgtgcatttctcatacactaaatgtgagtcatgagcaagcaagtggaagagaagttatcttagatcctgtgcaacagagcctctgggaggagcaaagaaacatcaaaggaaagatgctggaggaaccgctagcattcttgggaaatgacaactgaatcccaatgatcatgaaagaggatgcatgcacccacactgaagaaactgcatgtataagatccaatgcaatggcaggggacagagaggatgtctcccaagaacccaagtgcccctgagatgccaccatggtcaaagtaaacctttatcatgtctgagatgtttaagaacacttccttctgcccttctacctctcctttctcccttcagttaactgtagaraaaccaatcccgggacaaagggagaggagcagaggcactaggcatggaaatacacaaggtagccgtgccccttaatcccactgcatttgactagacatatttctgaacttagacatttggtgattaaaagctactaggaggatttgtatttttgacaaaaaaaaaaaaaagt

SEQ ID NO: 887578 - DNA, 621 bp, Homo sapiens
ttaataagggttaataagattaacacaatgtataaatcttaattttgaattaaacattttttaaaagttatttataaaataatcagaaatgtgaacacagaatggatatttgatgatatatcaaggaattattattaatttttacatgatgtattatgaatcattattatgttaaaaatagaatcctaatcattcagagataaacattgaaatatatataacagaaaacatatracatctggaatttgctttaaaataatatgaatcattatatagtctatgcatgtaacaaaatatcacatgtatcccataaatatgtacaaatattatgtatcaattaaaaaattataattgaatcaattattaaatggggaagaaaagacaaatccatgcaaaagaatttcaaatatcttatgtagataccccctcaagaagaaacataccttaagtgtggactggttatagtgacttccttagagggtggggtagatttactgtagaaaaacctaacaaacattacttcagccaggtgatcaaggcgaacgtcagcagtcataaatcatgctgatagtgcgacgtgatgtgatgtgatgaaaatggcacttcacctctgtgaataac

SEQ ID NO: 887579 - DNA, 603 bp, Homo sapiens
caaagattacagcctttaacttgctttgcaggttttcataattcaactttggcagtttagtcatcttagaagatagggaaaaatagactccaaactgatttacatatagaaaaatttattctgctaatgctaatagatattataacatttgtttattaaccccatcactaatatttagatcatataacttgtgcttacctgtttgaacagtaaataacttacatgtcacaatatgcttaattatgataaaataaggcagacaaaattgcttcctgtgttcaattttaatcccagaaattgttttctgtgtcagttacaaaactagtggtcttaaacaaactctaaaattcagtggttcaacacaatagtttatttctcactcatctaatagttcagggcaggtgttccaggagaacagagagcttcctgttacatgagccgtcaagactcaggcctcwtccattctgcggctctgctaccctttagaactgtgtcatcttctgccttcagcaggaggaggacatagggagcatgaagaagacacagcactgatcacattgtccaggaagtaacacacatcacacatgggacctacctagaggc

SEQ ID NO: 887580 - DNA, 597 bp, Homo sapiens
aaattttccttgagtctggaaatgtaaacatcagagattagatcattgctacttttaaccctcagttaactgtagaatggatcttgccctaatagccttataatatgacttaatgtgagttatggcagattcaacatctttgtatcccagctataagaaacctcaatcactgttaggtccagaaggtgcccacaggccaatcatactcagcaggccacaggggattggtgatcactccatctgccccttaagttggtataatatttagcaagcatctactaaatgaggggagaggtaagatatattgagatgggaggatrggtattaaaattaattgtttgtagcagattggttttcacttactatctgctattcatcttaccaagtgaagagataaaattggtttcatttcatatgtattttgaaagataaatatgctttttcaattagtactactatatctagaatttacgtagcaaatttttatctactaggctataacatctgcaagggagagggaccaacactcttttttcttacccatccaaagatacgtgaagtgttggttatgctaggcttgaacatatgagtgaataa

SEQ ID NO: 887581 - DNA, 619 bp, Homo sapiens
gggagggttagactcacgacttaatttaagactagcagagctccaggggaagttgtactctcaactttgactcatttgctacaccaagatcagagccctgactgggaagtagcgggaagttaaaacatgggatatctgcattgatacattcaaaaatcttatatcctcaatttttcctgagccctttgrgcctgcagaagtggcccactcctcccagttaaagtctagtgaccctctcgtttcttaaaaagtattaagagacttctgccttataatattaaacacacacacacacacatgaatacacagggcactcttgatctactcccacctcctggccaccagaccaataaccaagtcaaactataatcccactgaagtagtattgggtctgctaagaaaacaaagggattataccttaatattgccacaagaccccaagaggtcccacagaaaccagaacagtacacaaaggactggagcctaagagtactagatcaccaggagcagaacgtaaactggacagggaagagtttatgtcacagcagcactcctgtgacatagaacttaccacgttggcaaggatccagggagacaatccaaacgcattggtagggtg

SEQ ID NO: 887582 - DNA, 549 bp, Homo sapiens
tttgagaaaaatacttataaattatggtcaatagcactttttttcattcttttatgaaaatgaacgcaggccttttccactcactactatcttgcctctgagacataaataatacctttaacaaaatttgagaaatggaataaagacttaaattaagaagttatcacattgatgggcttggtgatggaataaggtgagctatagtaattgatggcaataaaccttgagaacagtgtttttctgatactgtgatggaaagaacacaaagtcagttattatagtcctattcttggcatttattaactggtaaaattgtttaattttctyatccactggactgtacctttgggaaaaagtcagactgtgtctattttgctcactgatatctgaaactcctaagagagtgctttgtacatagtgctcaacaaacgtagttcatgtttattctttaaaattagtctatttctttaaaatgagtctgttcaatgtcttccctgtttagactcacaaaaatgttatgagactcaaactgctcaatttagggaaaaa

SEQ ID NO: 887583 - DNA, 637 bp, Homo sapiens
ggcgagcgcagtaaacgcgtgttccctttctccctcaaagagagcgctacccagcgctctgggagagactgagagagaaacagacaggcaggctgactgacaccttctgtctaattttaccccaggaattgcccccgccgtttctcatctcgcactagtttaacctctggtcctaagcaaacctctcaaaagtcttccccaggcagcgcccaggagaaccgaaccccacaaagtgcttttttgctggcatcacccggatgcttccctttggcgatttgccccttctcatttccccccaaatctagaggtctcaaagcccctcccccgcgcgaggcgggcagcgcgccttgctcaccgtggtccccggcggtggcggcgcgggcgggagcctcagggcgcggrggtcggcggcgggtcgcgtgggggtcacccggccgctgctgcggtccggacggcagttggtccagtagtttcggatgcccgggctaggctcggcggagagcgagtcggcgtgaatgagagcaaaccaacagggctgtgcgtggcgcgtgtgagtaagacgcgagcgggccccacacgcaggcggcggcggcggcggcggcggcggcgaggtctgaggcggggagccgggcggggg

SEQ ID NO: 887584 - DNA, 653 bp, Homo sapiens
acaggatgaggcatgacactaccaaatcacagtctcattgttgggtattttctatgtaacataagctttgtttttgttttctcaaaaggcgtttaaacagaaatcaccttcagctgtttcctgagttgctgtttcttgggactgcgaagctatacaggctgtaagtagacacaaatagttattgttgctttgggtagtaccttgtgttttattaaatgtattttggatctgtttgtgtgtgctttcctggaatctrttcatcaatagattaatggattaaaagtttgtgttttttctttaggaaatttatgatttgttttctagtggttccagttgttttatttggttaggatttagcggtttatgtatgtgttatggaaattggattattattatttttttggtaacgtgatgatggcgagatttacctaccttttaatggaaatgtttgattaagttctgaagggagaaaattgctactgtttcctcttaagaggaagttggcagtgtgttcttataaagttgagatttttaatgtcagcttttttggtattgtttctgggctcaagtagtcgtgtttattagtccgaaatattattataaggtatttaaagagggctgtaaatttcctcttaaatgtttcctttaaagcc

SEQ ID NO: 887585 - DNA, 653 bp, Homo sapiens
acaggatgaggcatgacactaccaaatcacagtctcattgttgggtattttctatgtaacataagctttgtttttgttttctcaaaaggcgtttaaacagaaatcaccttcagctgtttcctgagttgctgtttcttgggactgcgaagctatacaggctgtaagtagacacaaatagttattgttgctttgggtagtaccttgtgttttattaaatgtattttggatctgtttgtgtgtgctttcctggaatctgttcatcaatagattaatggattaaaagtttgtgttttttctttaggaaatttatgatttgttttctagtggttccagttgttttatttggttaggatttagcggtttatgtatgtgttatggaaattggattattattatttttttggtaacgtgatgatggcgagatttacctaccttttaatggaaatgtttgattaagttctgaagggagaaaattgctactgtttcctcttaagaggaagttggcagtgtgttcttrtaaagttgagatttttaatgtcagcttttttggtattgtttctgggctcaagtagtcgtgtttattagtccgaaatattattataaggtatttaaagagggctgtaaatttcctcttaaatgtttcctttaaagcc

SEQ ID NO: 887586 - DNA, 556 bp, Homo sapiens; identical to SEQ ID NO: 885771

SEQ ID NO: 887587 - DNA, 611 bp, Homo sapiens
gacattctaagaagaattgttaccaatccttttgacacaattccacaagatagagaaagaaggaaccctccctaattcattctgtgaagccaccatcaccttaataacaaaaccaggaaaggacataaccaaaaaagaaaactatagaccgatatctttgatgaacatagatgctaaaatccttaacaaaatacttagctaactgaatccaacaacatatcaaaaagataatccaccatgttcaagtgggtttcataccaaggatgcagggatggtttaggatatgcaagtcaatacatgtgatacaccacataagtagaattaaaaaccaaaatcacatgatcatttcaatagattcagaaaaagcattcgacaaaatccagcatygcttgctgattaaaactctcagcaaaatcggcatacaaggagcattgcttaatgtaataaaagccatctataacaaacccacagccaacatgatactgaatgaggaaaagttgaaagcattccctctgagaactggaaaaacacaaggatgcccactcacaccacttctcttcaacattgtattggaagtcctagccagagcaatcagacaagagaaagaaata

SEQ ID NO: 887588 - DNA, 621 bp, Homo sapiens
tagttcacttgaggcagagtaatggatctcctaagattaaaccacctacttctaatcaaaatgatctatcctcaaatactcatattcaaggaaaagcaaaacctcttcttggcttataggatttatgttgtttatgagctagttttgctaaagcacttcttcctgcctttttttttttttttttttttttgagacggagtctcacgttgttgcccaggctgtagtgcagtggcacaatctcggctcactgcaacctccrcctcccaggttcaagcagttctctgccccagtctcctgagtagctgggattacaggcacccaccaccacgcctggctaatttttttttgtatttttagtagagacggggtttcaccatgtgggccaggctggtcttgaactcctgacctcatgatccatctgccttggcctcccaaagtgctgggattacaggcgtgagccactgcgcctggccttcctactactttttaaagcaaatatattccatttgatcttggaccatgataaaccagtaaagactattggtttgaaacaaagaaattgcctgttgctacttagtccaagaatttaaaaaataataaaaaaagaaggaatccattaga

SEQ ID NO: 887589 - DNA, 545 bp, Homo sapiens
cttcccaaccttgctctgcactttttatggctcacctactctttcaacagaatccaattccttgctttaatttcaggtagccctgagtccagaatttaggtgttcgaggaaggacctcctgaattgaggtaagggaataagacacattccccaaaatgagactgtaatcaagtggtgctatttccactttgcaaatgaggtaactgaagtttagaaaggttaagttacttgcccaaggacacacagctagtaaacagtaaagtagatttggactcaggtctgccgacaayaaagcctcagctatttacaaagcaggtctaatgtactggttataattatggattctggagcccagcaggcctgggttcaagtctccatatactaattggtgaccttgggaaagttatttagcctctctgtatctcagtgtcctcattggtggaacagtaataataatgctacctgcctcacagggttgttgtgaaaattaaatgagaaaaagcatgtaaagcagttggcacagcacctgtatgtgataaccactc

SEQ ID NO: 887590 - DNA, 642 bp, Homo sapiens
gatctaatacatagaaatgcttccatgaaatagaaatgccttacagttgtgtgtagctatttcactgagtgggtttgttatatctgaatggactagtgatgtctgcctgcctctctgggtaacaaacacattttggagggattgttaacttgaaggttgtaataaaatctttaccactctgaacagctagcattggtgtctgctaagggggaacaaaggcaaaacgtagttctgttggtgaaaatagtttgactgtgtttaaaaactaatcattctgcaaatatcaacaagctcakcagatgcaagctagccaccttatagtttaaatggagcccttcacgctgtattggaaatgccgccgcctccagcccaccctatactccacaggccagctcctgctcttctggccaaggaaaggcgagtaagcaagtctattgcccgttggcctcctgagacacctctgaggattaaataactaatgactgtaaagtgctctgtgaaaagagagtgctctataaagtgttattgttggggctgttaaaaatggaaaacgacttttaatttagaaagagaacactcagcataaggaggggtggctataaagcttttatcaccactttgctttcggaggcttcttagctg

SEQ ID NO: 887591 - DNA, 609 bp, Homo sapiens
gtgatttgaggaaatgatctcaacaaattaacttctcacttgtttttaaatgactttgagatacaaaggaagaaaaaaaatcagtcactgctgaagttcaaagaaacgatgttctactgagtgctttatggatttttttaagtacaattttccaaataatagaaaaacattccgaatgatgatgttgcctgattcactgcacacagctgtcagctgatcccaaacatttatgcttmccattaaaagcttggagaaaaccagataagggtgacttctagtccatctagacagataacaatgcaaggctgtgccgactctaatgtaaacatgtaaaataaacccacagaagcaaaacaacaacaacaacaacaaaaaactgcaaaaattttaaaggctctcccatagcctggtggcttttatggaaaaattttttttgcacccatggggtgaggaaagaagagaattttgtccttctggtgaaacctcttgccatagacttgaaacctgtaaaatcatgtggtttatggagcaatgttttgtgccttgaattccatatgcagagtttggggaaaggacacatgtggtgagaggttctgaggtcttgtctca

SEQ ID NO: 887592 - DNA, 609 bp, Homo sapiens
gtgatttgaggaaatgatctcaacaaattaacttctcacttgtttttaaatgactttgagatacaaaggaagaaaaaaaatcagtcactgctgaagttcaaagaaacgatgttctactgagtgctttatggatttttttaagtacaattttccaaataatagaaaaacattccgaatgatgatgttgcctgattcactgcacacagctgtcagctgatcccaaacatttatgcttaccattaaaagcttggagaaaaccagataagggtgacttctagtccatctagacagataacaatgcaaggctgtgccgactctaatgtaaacatgtaaaataaacccacagaagcaaaacaacaacaacaacaamaaaaaactgcaaaaattttaaaggctctcccatagcctggtggcttttatggaaaaattttttttgcacccatggggtgaggaaagaagagaattttgtccttctggtgaaacctcttgccatagacttgaaacctgtaaaatcatgtggtttatggagcaatgttttgtgccttgaattccatatgcagagtttggggaaaggacacatgtggtgagaggttctgaggtcttgtctca

SEQ ID NO: 887593 - DNA, 620 bp, Homo sapiens
tggctgcgtacagaattcatgagtaactacctatttccttcagaataaaaataaatttttaacttcatttttttcctgaagtttaaagctgtgaaagagagtctggctagggagaccagctgttagtaaaatatgagawacttcaaacttaatgcctctctccaaagatttgtagcattagacaaaggtaaacccaccctccagatttagcatcctgaaacatttttcatatgtaactcagatttcctttctttatttttaagaaatgaaatgttatgagtcagctaaattcccgatctgacttttgatgagaatattttgctttagtctttgacattttgaaagtcttcatatgtgtacaggtgtgtcttatactgaaagagtcatctctcagagtccacccggtgctgctagaatccctttttttcagatgtggtacttaagagcaagttgttatgcatatgccagacaaaactgccgctgcctaacagtcatttatccactttatcaggtttccgaagtgtaggcatgactggatattactccatcttcaatatgttccatcttgttttgagattgggggcaatttctcccaaagattagtaatatttcaattgaca

SEQ ID NO: 887594 - DNA, 592 bp, Homo sapiens
tctgtgttgagagatttcaaattctttttattgataggtaaactacagctctagatataactaagtgaagcacggctggagagggaagaaataacacctggactgctgactgccgtcgtggaagggcaaaacaagaggacacaaatgcatccagctattctctgtgctgcttggtgtaatagattaaacttcaatgcaccttgggctcttttcatgggctttgcctgtcacctttacacccttcagagttctataaggaattatcagcactacgactctttggcagtcttagtgggaaaccctgggaggtcaggaatatgggcctgtgaaatgacatcttcctgcctcgtccaaagatagcattcatcatcatttaggcagatgtatgatgctgctaggcaaaacgccagccatggatcacatyggtgtcccattacagagcctacgctgtcccagtgtctacacagagtgggaatctcaaggctggatactgagagccttcctggaacttcagggaaaataaatgtactaaatcagttggttaattatctgtgtcattgaccttggtgccttaatggaaaaatatggttca

SEQ ID NO: 887595 - DNA, 569 bp, Homo sapiens
aatgtgcaggaattttctgctacctgagatacacttacagatgaacatagacatggtaaaaaaaaaaaaaaaaaaaaaaaaaaagtactcaatgcattctctgctatataggaggacccttgaaaggtctgttgagtgaatagtaaatgttgctgcatttcttttacttttacaggtttcctttggggagtctagaatttgataaacaatccgacccattgtgttgattgtktacctaatatgatcaaaactcttttcgagacaagccagattgagattccaacaggtttggtctattaaggacaaatgattggataaacaggtttctctctctctctctctccctctttctctctctctcatacacacacacacacacacacacacacacacacacatttatttatttaaaatttatttataatgctaagaataaagtgataaatgctcaggagatgtcacagtgcattatttacattaattccttccttgctggatgaaccagcaattcccatgaaagagctgaacctagaaggctcatgacaatgtggttgtgctgagagaaaaat

SEQ ID NO: 887596 - DNA, 617 bp, Homo sapiens
ccttgaacaagaagaaagctggatgcatcacacttcctgacttcaaaatatattgcaaaaccatagtaatcaaaacagtatggtactggtataaaaacagatatataaaacaatggaacagcatagacagcccagtaataaatctacacatctatgaccaacagttcttcaacaagggtgccaagaatacacaatgaagaaaggatttaaaaaaaaaaaacggttttgggaaaactgtatctccaactgcagccacatgcagaagaatgaaattggacccttattttacaccaagcacaaaaatcaactmaaaatagtttaaagacttaaacatacaatatgaaactgaaaactattagaataaaacataggggaaaatcttgacattggttttggagatgattttttagttatgacatcaaaagaacagagcaaacttggacaagtgtaattgcatgaaactacaaagcctctgcatagtgaaggaaacaattaacagagtaaaaaggcaacctacaaattgggagaaaatacttgccaatcttttatgcgataagaagttaacatataaaatatgtaaagaacttatataacggaatagcaaaaaaccctcaaat

SEQ ID NO: 887597 - DNA, 617 bp, Homo sapiens
ccttgaacaagaagaaagctggatgcatcacacttcctgacttcaaaatatattgcaaaaccatagtaatcaaaacagtatggtactggtataaaaacagatatataaaacaatggaacagcatagacagcccagtaataaatctacacatctatgaccaacagttcttcaacaagggtgccaagaatacacaatgaagaaaggatttaaaaaaaaaaaacggttttgggaaaactgtatctccaactgcagccacatgcagaagaatgaaattggacccttattttacaccaagcacaaaaatcaactcaaaatagtttaaagacttaaacatacaatatgaaactgaaaactattagaataaaacataggggaaaatctygacattggttttggagatgattttttagttatgacatcaaaagaacagagcaaacttggacaagtgtaattgcatgaaactacaaagcctctgcatagtgaaggaaacaattaacagagtaaaaaggcaacctacaaattgggagaaaatacttgccaatcttttatgcgataagaagttaacatataaaatatgtaaagaacttatataacggaatagcaaaaaaccctcaaat

SEQ ID NO: 887598 - DNA, 624 bp, Homo sapiens
acttttccaattacttaattgatcacttctttcctgaaatacagtaaacatcatatactgagaaaactgggactgcaaagtgcctattaaaatgtcatatgttaaccaaatgttgtcatatgagacaaaattttgccatgttgcccaggctggtctcaaactcctgagctcaagtgatccacccacctcagcctctaaaaatgctgggtttacaggcatgacccaccatgcccggcctcaactaattttctaactaaaatatttctcaaattactaatcaaaggacttaatcacaatttgttcaagaatgaatatacatgttttatacatgtgtgttggtgtgtgtgcatgtgtataaatacagtcttcaggactgtttagtacaggcagaatgaagtgaaaaataggacaattattatggtcctaaaactctatactttttttttttctrttttctcattaaaatgccaaggataggaaagatgtctcaacccagattccaagttcccaactgcataggaaagatgtctcaacccaaattccaagttcccaattttgtatcccattcaaataccaacatctaaaactttgcatctaaagtacattctgaacagagacatacac

SEQ ID NO: 887599 - DNA, 647 bp, Homo sapiens
ccacccatcccattactgggtatatacccaaaggattataaatcatgctactataaagacccatgcacacatatgtttattgcggcaccattcacaatagcaaagacttggaaccaacccaaatgtccatcaatgatagactagataaagaaaatgtgacacatacacaccatggaatactatgcagccataaaaaaggatgggttcatgtcctttgcagggacatggttgaagctggaaaccatcactctcagcaaactgacacaggaacggaaaagcaaacaccacakgttctcactcataagtgggaggtgaacaatgagaacacatggacacaagaaggggagcatcacacactggggcctatttgggagtaggagggtgctagggaagggatagtaggtgacgggttgctgggttcagcaaaccactatggcaagtgtataactatgtaacaaaactgcacattctctacatgtacctcagaacttaaagaataataataataataataaagcaaatgacttataaggcaaagaaaagtagacaaccatcagactttttggcagcaaaaatttataccaaaaaaagatgaagaatatacttaagaacacaagagaagaaaatgtgaaccaaggattttatat

SEQ ID NO: 887600 - DNA, 647 bp, Homo sapiens
ccacccatcccattactgggtatatacccaaaggattataaatcatgctactataaagacccatgcacacatatgtttattgcggcaccattcacaatagcaaagacttggaaccaacccaaatgtccatcaatgatagactagataaagaaaatgtgacacatacacaccatggaatactatgcagccataaaaaaggatgggttcatgtcctttgcagggacatggttgaagctggaaaccatcactctcagcaaactgacacaggaacggaaaagcaaacaccacatgttctcactcataagtgggaggtgaacaatgagaacacatggacacargaaggggagcatcacacactggggcctatttgggagtaggagggtgctagggaagggatagtaggtgacgggttgctgggttcagcaaaccactatggcaagtgtataactatgtaacaaaactgcacattctctacatgtacctcagaacttaaagaataataataataataataaagcaaatgacttataaggcaaagaaaagtagacaaccatcagactttttggcagcaaaaatttataccaaaaaaagatgaagaatatacttaagaacacaagagaagaaaatgtgaaccaaggattttatat

SEQ ID NO: 887601 - DNA, 657 bp, Homo sapiens
cgatatagacgctttgggaagttttctgtctctgtgttgtataataaaaatacaaaaacaaattttatttgatttttatttttcagaacatacatgtagagttaaaaatattgaaaaatattatccaagcattagtcataattattatcaccatcatttaagacaaacaattaaggacagtgatactgtcagaaggaattcagaaatcatatcagtagcataaacagctgcacaaaattgtcaaagaatgctgggtgataggtgtcatttctgtctaaatccaaacatacaaaagaactgctaacataataacatatgtactaacatagtatctcacttcatttcaggagttctcctgtctgttagtctaaaccaaattcagttractaaattcagtcagacaatacacattctcactgtttaccttaagtttcctaataatttaactagcactggttgttagtttttgtcctctgtcctcatttgtggctttggttttcatctatgctttttaaataatgaattgtgctctattaaaaaagtaatagcaaagagatgagaattgcttctcaagtggttctgtgattaacagagatcatttggttattataaatcaagaaaaggattgataccaagaatattaatagcttgtaacca

SEQ ID NO: 887602 - DNA, 660 bp, Homo sapiens
acagtttttatgtctcagtttggcagtttctatctagaggtgccacaaattaatgttattatcagcttaaaagtttggtgaaaagtgttatacattcttattctttgaaaggtgagagagagaaaataagattccgaggttttgtgtacaggaaaaaacttggaagctactaggtaccaggcacggtgaatagtcattttgcttttcttatctcatttaagtttcacaataaatatgtaaagaagttattattaagtatatttttttagtcttgaaaaaactggattcagagagattaaaaacttgtccaaactcaaagagctaagaaaccatgctgagactaaaactaaactttctgactccaaaagtcaccctttcccataaatcaaatgagakttttgctttaattgcacctgtttttttcaatcacatgcacagagggtagcctctgacattgaggggatacttgcatgactaatgctgattttcttgataaatctttaaatagctattttcaacattcaaatgatatcatgaagatggttgcggtcatcatcttaaggatatgcaagttagaaaattctttctatgcaatattcaagcagcattgatatgtacattccaagaaaaaaaatcataaaggcttaattttaaaagaga

SEQ ID NO: 887603 - DNA, 573 bp, Homo sapiens
aggaaagagaatagtcctagcacccagagatattggtttacatctctaactctcctaaagactacaggctccttgagaaaagaaaaacaaaaaacaaaaaaactgagtttatttaccttagagatggaaccagttggtagagaaccttagattaagtgttacacacwcacagggagagagagagagagagagaccaaacaggtttagaaaataacgttcaattcctcaaattagtaacaagcatagccagaactaaaactctcattttcaagttccttgtcatagtctgtcattgtttactgtctctttccaaattatcacttggtgagtaacagaagatattttcaagtctctcataagatttgtactgagacttaaggttaagaatattcttatttcttttcacttccttggcaagtttatatttaacggatataagaagctttattcataaaagtagactacatttcatgtgttcttcctgtaaaatatgcatgtaacctgttccattcttgcagtttctactgtatattctgtaaaattaataaaattactgaatctatattttacaaa

SEQ ID NO: 887604 - DNA, 602 bp, Homo sapiens
aacagtagaccctaattgaatccgactggtgttcttctaaaaacagaagattaggatgcaaaaaaagacgtcagggatggtccctcacaaaataaaggcaatgtgaggacacagtgagaaggcagccatctgtgagacaaggagagagggttcagaaaaatcaaacccgcccacaactggatcttggacttctggcctctagaactgtgagaaaataaatttctgttattttagccaccaactctgtggtattttattatggtagccctggcaaacgaatacaccaacaacwaaaatattattctaaaaacatcttgtaagaaaacacaagcaatctaacaaaaaaatcagcttaatattatatttcatttaaacatgacttctacctttattgttatcaattaaggattttttttttcctaatagcatccatatgtgtttactggtgtctattctcctcatccacctgtagtcaattccttactatgcaggcaaaattatcttgtgcaaataagatcacataatgccttctgctcaaaacccctgatggctttacatccaaaataaaatcccaaggaatcaaagaacttattttgacctat

SEQ ID NO: 887605 - DNA, 622 bp, Homo sapiens
gtaatttaacaattttttttcattttccactagggattttgttggagaaaaaaaattatattgttagaatcaaaattatcactgccttaattccatatttcatatagtgttggtgaatacattcttctaataatcttaaattcaagtctatctgattaagtgctgagattagcatgtcccaatcactctgcaaatcctaaagacaaaatgttttagatgatctacttgagtccataagaattatacaattcattaggggaggaaaaatatgcatataatccaaataaaatgtgctctaagtgttagcatatatamaaaatgccctattttaaacactcatagtgtctaacatagaagactactagagtataataggtatctttccctctagttgtctcctcccatccaccatttaatctctttctctcactagtgccagaatgacctataaaatgctgatctgactttcttactctgcatgaagagacctctggtggttctccattacatacggaatcagctcaacctccttaacaaaatacatgaaactttcccaacttgggtatgttcctcccctacctcacctctaccatctattacctattttctgttgatagattat

SEQ ID NO: 887606 - DNA, 627 bp, Homo sapiens
tttctatactttgttgggttgattttgctagcattttgttgaggacttttgcatctatgtttttgagtgtaatgtctttgtccgattttggtatttacataatgctggcctcatgactgttttttaaaacatattttttaaattgagagctttcatgaattttaatgtagagaaataaatatcagaaatcatcaaaggaccaactggtgatataaagtttcagggaatgctatcttgatgatttgcttcacttcctagagaaatacattccagagccaaattgtatcaaaagctgaataacaaatatatttgcttatattttccaactgaaacaatcatcggccaagcctttatatatatacagccatcatcaaagcatttgatgcactcctgcaaagagctttattatcmcaaagattatctctttcacaaaactctattgaggcgcccctgaactctttttcaataaggcctgacttttggacttctgtgctcatctctgcattgaccaattgaagcaaggattctgctgagtcagtttaaccagaactctctgcccttgatatctgatcatcctggatatttgattgggtttctcattttccaccatcccccaagaaatgtctg

SEQ ID NO: 887607 - DNA, 628 bp, Homo sapiens
tatagtaaagggaagtttctcatccctaaattttttttaaatctgtattccttacagttaatattatcagcagttttatatccctgtggataatttctggaaaatcctttcatgctttcttttgccagaaataagaataagagcatgatgtatttgtgttatcacctatgaaaactcacttaccctttgcaataaactaaacatctttgaactgtattaagaaactttctttagattataacatgggatactgcattgcacaattttatgggcattatttatgctgtaattgtgctctgtaggtgtcaatcacataggatacatatgaacagcacaatmtcctgagtttatgtctggagtaagactactcaattgataaatcctaatggctaaattggttaagaggaggaatgagagaaaggagataatattgaaatgatagggaaaaccagactttctgaattaaaccatataatatttgtggttaatattagcgaagtatacatttagtgctgggtgtctactcatcctcagtttcagataatttagcacatgagactgaaatacattataatctgaaggatctgtatttattaatacagttacttctgtaatcacccaatgggtt

SEQ ID NO: 887608 - DNA, 604 bp, Homo sapiens
cattcatatctgctgggaatgcaaaattgaacagctacttcaaaatatagctgggccatttcttataaaactaaacgtactcttaacatataatgcagcaatcatcgtctttgatatttacccaaaggagttgaaaacatgtccacacaaagcctgcatatggatatttatagccgctttcatcataatagccaaaacacggaagccaccaagatgttcttcagtaggtaaatggataaataaactctagtacatcctgtcaatggaatattattcaatgctaaaaaaaatgaactatcatgctgtgaaaaaataacaaagaaacttaagtacacattactaaatgaaaaaaagtcagtctgaaaagattatatactgcatgatttctacyatgacattctgaaaagggaaaaatgtggagataggaaaaggattagtgaatatcaagggacaggaacgagagagaggaatgtatagttagaatacaaaaagttcttagcgcagtgaaaatattctttatgattctataatggtatatacatatctttatacatttttccaagcccatataatgcagaacaccagagggaactctaatgtggac

SEQ ID NO: 887609 - DNA, 604 bp, Homo sapiens
cattcatatctgctgggaatgcaaaattgaacagctacttcaaaatatagctgggccatttcttataaaactaaacgtactcttaacatataatgcagcaatcatcgtctttgatatttacccaaaggagttgaaaacatgtccacacaaagcctgcatatggatatttatagccgctttcatcataatagccaaaacacggaagccaccaagatgttcttcagtaggtaaatggataaataaactctagtacatcctgtcaatggaatattattcaatgctaaaaaaaatgaactatcatgctgtgaaaaaataacaaagaaacttaagtacacattactaaatgaaaaaaagtcagtctgaaaagattatatactgcatgatttctactatgacattctgaaaagggaaaaatgtggagataggaaaaggattagtgaatatcaagggacaggaacgagagagaggaatgtatagttagaatacaaaaarttcttagcgcagtgaaaatattctttatgattctataatggtatatacatatctttatacatttttccaagcccatataatgcagaacaccagagggaactctaatgtggac

SEQ ID NO: 887610 - DNA, 623 bp, Homo sapiens
aataaacaaataaacccagggattaggatgacataatacagggaaaaggtaaagagagagaagagtgccaaaaaccaagcctttgactacatcatttttttttttttttgtagttacaattagcctgatatatatacattaagttctgggatacatgtgcagaacatgcaggtttgttacataggtatacacatgccatggtggtttgctgcrcccatcaacccttcatctacattaggtatttctcctaattctaaccctcccctagcccccccacccctcgacaggccctggtgtgtgatattcccctcccggtgtctgtgtgctcttcttcttcaactcccacttatgactgagaacatgtgatgtttggttttctgttcctgtgttagtttgctgagaatgatggtttccagcttcatccatgcccctgcaaaggacatgaactcatcctttttaagactgcatagtattgcatggtgtatatgtgccacattttcttcatccagtctatcattgatgggcatttgggttggctccaaaatctttgctattgtgaacagtgctgcaataaacatacgtgtccatgtgtctttatagtagaatgatttatattcttttgg

SEQ ID NO: 887611 - DNA, 566 bp, Homo sapiens
ggaggttcccaaatcccagctcttgacttctgtgcactggcaggctcaacatcatgtggaagccaccaaggcttgaggcttgcaccctctgaagccatgacccgagctctacattggccactttcagccatggctggagcaggtgggacacaggggaccaagtccctaggccgcacacaacacggggaccctggatctagcccctgaaaccatttcctcctaggcctccaggcctgtgatgggaggggctgctgtggagacctctgacatgccctggaaacattttccccrttgtcttgggaattaacatttggctcctcattacttatgcaaatttcttcagctggcttgaatttttcctcagaaaatgtgtttttcttttctatcacattgtctggctgcaaattttctgaacttttatgctctgcttcacctataaaactgaatgccttcaaaagcacccaactcatctcttgaatgctttgctgcctagaaatttcttccactagatactctaaatcatctctctcaagttcaaagttccacaaatctctaggctggggcaa

SEQ ID NO: 887612 - DNA, 696 bp, Homo sapiens
ctctccaagaagtaacactcttaggctgggaccggctggatgaggagacagctgagcaggggatgtgctggggagactgaggcagatggagtgaagggtttaacctgagaaaaaactggcacatttgaggaaccaaaataaggtcactgcagctggaatgttggagtgagtggacttttttcttttttcttttcttttctttttttttttttttagtggcttgcaataaatcaaggtagtcaggtggttggggaggggagttggggagaaraggcaagtcataggtagctcgaagctagattaagaagcacagatttatatattaaaaatccgactctttctcgaacataattttccccctcatgtaaattttgtttgtgttactatctgtcatttgatcaaggaaaataaatactttctgtaggtaagtattcaaagattatctgaagtcaaaatgctttctctgattaatcttgttctgttatctgattgtagcagaacattttgtgttgcacagttatttgcatgctagtcacctttggactgggttatttaatattcacagaaacgaatgcagtacagtttgtgtgcttgaaaaaagtaagtgggaaaaaatgttacaattttataattaactcttggttgttgtgtagcattcttgaatgaactatagaaatgatccctgaaagtatagtc

SEQ ID NO: 887613 - DNA, 648 bp, Homo sapiens
aaaatacttactgaacatccaccatgtacctacaaattgctatacttgatcccagaagtataagaaaggaatagaaacactcctggtcttcagggagcttatggtttagtgtagagatcagacaagaccagcaagtcagaaaataactatgatgcaaagcagaaagtggtaacttcctcaggacacagagaaaagaagagactctaaagaagggaaaagatacatcccactggaaccagggaagatttcctgagtggaatcttagtggcactgtaaacaggggttagtgataggtcagggagagaattcgaggcagaggacaaagcatggaagtgcaaaagtgcaggataggtctaagagcaagaaatcgtgtgaagaaaagtaatggaatttcagcctgcaaaggtagrttggatccgatcaagaatgatcttcaggatcaggttaagaaagttcagtcatcttggattctctcctaacctccatagatctagtgagtcctatttttatagtagcatgtgcccttatggttaacctgtttatgtgcctacctcttgcattaatctgggagtgatttgaagtcctggttgatcatttatttttctatcataggcacctatcagaacacctgtcacacagaacaagttt

SEQ ID NO: 887614 - DNA, 628 bp, Homo sapiens
aaaggagggaaaacacaaaattacaaaatatcagaaatgaaaaagaagacattacaatagaccctacagagaatacaagcataagaaaattgtatgaaaaactccatgactttaaatacaaccacctagatgaaatggaaaaatttcttgaaagtcacattgtccaagctcacttaaaaaaaaataacctcaagagcgaaatcatgaatgaactcacattcacaattgccacaaaaagaataaaatacctaggaatacagctaacaagtaaagtgaaggacctcttcaagaagaactacaaaccactgctcaaagaaatcagaaatgacacaaacaaatggaaaaacattccacactcatggataggaagaatcaatatygtggaaatggccaaacagcccaaagtaacttatagattcaatgctattcccatcaaactatcactgacattctttacagaattagaagaaactattttaaaattcatgtggaactgaataagagtttgcatagccaagacaatcctaagcaaaaagaacaaagctggaggcatcacgctacccaacttcaaactatccttcaaggctactgtaaccaaaatagcatggtactggtactaaaacagaca

SEQ ID NO: 887615 - DNA, 710 bp, Homo sapiens
agagcgaaatcatgaatgaactcacattcacaattgccacaaaaagaataaaatacctaggaatacagctaacaagtaaagtgaaggacctcttcaagaagaactacaaaccactgctcaaagaaatcagaaatgacacaaacaaatggaaaaacattccacactcatggataggaagaatcaatatcgtggaaatggccaaacagcccaaagtaacttatagattcaatgctattcccatcaaactatcactgacattctttacagaattagaagaaactattttaaaattcatgtggaactgaataagagtttgcatagccaagacaatcctaagcaaaaagaacaaagctggaggcatcaygctacccaacttcaaactatccttcaaggctactgtaaccaaaatagcatggtactggtactaaaacagacacataaaccaatggaacagaatagagaacccagaaataagaccacacacctacaaccatttgatccttgacaaaggttatttcacaccgtgtttatccattcacctgtggatgaacatttgagttatttcagattttggccattaacaaataaaggtactataaatgcttgtgtacaactatttatgtatcaggataaaaacaagcagtggggaaaggattctttattctcccaatgctgggagaactggctagtcatatgcagaaaatttaact

SEQ ID NO: 887616 - DNA, 645 bp, Homo sapiens
aattgtgtcaggcatcttgactcctaactcacagaatatagtctcttgaaagatctatctagtaaccctttcacatcaagcccaagaatattgccctcatagccaataagccctatggggaaagttcaataattcaggttttcttgcaaaaagaaatctgctcttcactgattccaaatgtttatgtctctgacctcattggttctcagtcaatgaggccccatccccttctgtagcaaatttttttaatgctccctttactgtcctaaaatgggaatccaaaaaaaaactstaacctgcatatacaaataatttaacaaaacggtgtaatgccctgactatactacaaatgagaaatgaaaagaatggaatttatgataaaataatacatatgccaagaggctcaggcacagctattccagaagacacaatgaagtagccaatgcatctacacatggaatcagtgggaatttgtcatccacaaatgcatactgatttaggtgtgttgcgctggtgattggaatgccaaaagcagcatggtctttgggtaatacggtttgccaaaatagggaacaactcttggaaaacttacaaacaagtcaaatgtatactttcatcaatttacaaagtagtagtcacggaaaa

SEQ ID NO: 887617 - DNA, 482 bp, Homo sapiens
cattaaagtcagaacatcacaattctgcacctgtagtgcctggggtgcccctgggatttgctcaggctgtaataacaataattgcagctatttgttgagcactgatgttgtgaaagaccctgtactaaggactgaatgctttttwtccattatcaatattccatatataactctacaaagtattattttttcccatgttacaaatgaagaatctaaagctcagagacgttaagcaatttgttcaaggtctcctaggtaaaaactggcagagctgatgcacagacccaagtctgcctgattccagagaccctggtctttctgctctaccattggattggcttgtattttccccatgaggccaggacatgtgtacaggcagtttattcgtgaggtgatcctagagattaggacagaggaacaagagagtgtgaggaagggaggaagagccaatatgagaagcattttcctggggtcactgccat

SEQ ID NO: 887618 - DNA, 579 bp, Homo sapiens
atgcagccatttctataaacagtaatttataaataattgatgtggtttggggtccttaaagtgattaagctctacagcttagcatcctgggacagccattaaagtcagaacatcacaattctgcacctgtagtgcctggggtgcccctgggatttgctcaggctgtaataacaataattgcagctatttgttgagcactgatgttgtgaaagaccctgtactaaggactgaatgctttttatccattatcaatattccatatataactctacaaagtattattttttcccatgttacaaatgaagaatctaaagctcagagaygttaagcaatttgttcaaggtctcctaggtaaaaactggcagagctgatgcacagacccaagtctgcctgattccagagaccctggtctttctgctctaccattggattggcttgtattttccccatgaggccaggacatgtgtacaggcagtttattcgtgaggtgatcctagagattaggacagaggaacaagagagtgtgaggaagggaggaagagccaatatgagaagcattttcctggggtcactgccatg

SEQ ID NO: 887619 - DNA, 577 bp, Homo sapiens
ctttgaagttgagacaatcaggtttgctgacagatcatatttgcaatatggtgttaggaataatggcaaggattttggtctgatcaactgcataaaaacagcattgctggccgggcactgtggctcacacctgtaatcccagcactttgggaggctgaggtgggtggatcacgaggtcaggagattgagaccatcctggccaatgtggtraaaccctggctcactaaaaatataaaaattagctggacgtggtggtgtatgcctgtaatcctagctacttgggaggctgaggcaggagaatcacttgaaccagggagtcagaggttgctgtgagccgggaccgcgccactgcactccaggcaacagagagagactccgtctcaaaacaaacaaacaaacaaacaaacaaacaaacaaaagcattgccattccctgagaaggggaaaactttgtgaggagcacatgaaaagggaagatctggaatttggtttgggaaacgtaatgcttaatgtgcctgttagttgctcaagtggaaaggttaagtaggttatcaaataagtgagatgagtagcggata

SEQ ID NO: 887620 - DNA, 577 bp, Homo sapiens
ctttgaagttgagacaatcaggtttgctgacagatcatatttgcaatatggtgttaggaataatggcaaggattttggtctgatcaactgcataaaaacagcattgctggccgggcactgtggctcacacctgtaatcccagcactttgggaggctgaggtgggtggatcacgaggtcaggagattgagaccatcctggccaatgtggtgaaaccctggctcactaaaaatataaaaattagctggacgtggtggtgtatgcctgtaatcctagctacttgggaggctgaggcaggagaatcacttgaaccagggagtcagaggttgctgtgagccgggaccgcrccactgcactccaggcaacagagagagactccgtctcaaaacaaacaaacaaacaaacaaacaaacaaacaaaagcattgccattccctgagaaggggaaaactttgtgaggagcacatgaaaagggaagatctggaatttggtttgggaaacgtaatgcttaatgtgcctgttagttgctcaagtggaaaggttaagtaggttatcaaataagtgagatgagtagcggata

SEQ ID NO: 887621 - DNA, 581 bp, Homo sapiens
gtttaaccactgctcaagtcttgtcatctctttctcctcaataggaccctgctaaggatgtcagttatctgctgaatggctcctttccccatatgccccaggataatygaaactcagcaaactatttctaatgagcagggagcttagccatggcttgatgctctgaaaaagagtcattatattttagaatgagcgtgagctttaaaaaatgtgggtaatcaagtctgatcacaccacgaaggctgctaaaaaacgcagtcctcgatttgggctcttataaatctcaaatcttttggaaagattctaaatttagaaccaccttttcaattccatcaggacagaagctgctttaaatgatgtgtcatccactgatgaaagagaaattggtatcattttcaacttaccatgtttggttcttgccggtgcaatgctgaggctggggagaatcgggcacgttgcagagtttggaggagccttgccctacttagagagaatatttaacacatgggagtgttggatgcactgactcagttcattagtggagattcaatgttatcgtactgttagtttttccagtctga

SEQ ID NO: 887622 - DNA, 581 bp, Homo sapiens
gtttaaccactgctcaagtcttgtcatctctttctcctcaataggaccctgctaaggatgtcagttatctgctgaatggctcctttccccatatgccccaggataatcgaaactcagcaaactatttctaatgagcagggagcttagccatggcttgatgctctgaaaaagagtcattatattttagaatgagcgtgagctttaaaaaatgtgggtaatcaagtctgatcacaccacgaaggctgctaaaaaasgcagtcctcgatttgggctcttataaatctcaaatcttttggaaagattctaaatttagaaccaccttttcaattccatcaggacagaagctgctttaaatgatgtgtcatccactgatgaaagagaaattggtatcattttcaacttaccatgtttggttcttgccggtgcaatgctgaggctggggagaatcgggcacgttgcagagtttggaggagccttgccctacttagagagaatatttaacacatgggagtgttggatgcactgactcagttcattagtggagattcaatgttatcgtactgttagtttttccagtctga

SEQ ID NO: 887623 - DNA, 693 bp, Homo sapiens
gtattaaagattcttgtgcttgatgattattagattgaaaatgctattttttgtaggtcaaaaatggttggatatcagaaattttgtatagttagaactttatttgctatggttagacattcaaggggaactttttttatttatttttcttattatactttaagttctggggtacatgtgcatagtgtggaggcttgttacataggtatacatgtgccatggtggtttgctrcacccatgaactcgtcatctacattaggtatttctcctaatgctatcccttccctagcctcccatgccccgacaggccctggtgtgtgatgttctcctccctgtgtccacccgttctcattgttcaactcccccacctatgaatgagaacatgcggtgtttggtttcctgttcttgtgatagtttgctgagaatgatggtttccagctccatccatgtccctacaaaggatatgaactcatccattttgatggctacatagtattttatggtatatatgtgccacattttctttattcagtctatcattgatggggatttgggttggttccaagtctttgctattgcgtacattgccacaataaacataagtgtgcatgtgtctttatagtagaatgatttctaatcctttgggtatatacccagtaatgagattactgggtcaaatgatatttctagtta

SEQ ID NO: 887624 - DNA, 542 bp, Homo sapiens
ggggttcagaaagaaaaaagataactttttcatatggggtatagtgattacttttaataactcttaactgttgcatattgggagaaagttcttccaatgtaaacaaatgctgaatcctcaatcaaatatatgcatccttgagctcgcaagacacagatgactatgccctcaattattgaaggataagcttgtcttgttttagctccctattttctaaagaaaacataaaattcccttggtaaacatgggtaaataatacagaattgcatyttacttgctttatttatttattttttattttacaagtcattatttgaagttgaatggaggcagttaaggcaaatcctgaactacagttttatttgtacttaaaccagatgagtcttcctctggaacattaaagcattatttccagtgatacccacaggtccactttaaagctctcttacaacgagtcccattatttcagcctgaccatttgcttgaaatgatagagaggggtacaaatgagataagaaccctgtccacaaattcattattct

SEQ ID NO: 887625 - DNA, 625 bp, Homo sapiens
ttggttattagacttgggttgtttgagctacccagatctgcaggttttcaccaaatttggaaaattttcagtcatatggcttaaacaatttttttctggctctccctttctcttctctttggccacttctctctcacacacacatagatataattaggtcacttgaagatgttccatagctcactgatactgtttttgttgctgttattctccttttctctctgtttcattttgcatcatttctactgctatgtattcaagtttactaatttttccttgtgtgtgtgtaatctgctgwtgattctatccattgtaattttcttttcagacattataatttcatctttagatgtttcttcacacacatacactggtcaatatgcagcaaactcaagtggaaccgtctacttatttctcaaattctttttgtactcagctttcttctctctggtcctttgtcctgtaaactctaactacactgatctccaaagactctcatctctgtcttctcaactcagaaaatctactagtttcatcctgtgttgttcttccctgtagcatggactggaaaatctctggacaagtgggataatcataggactaaccttagttgttttctctctct

SEQ ID NO: 887626 - DNA, 625 bp, Homo sapiens
ttggttattagacttgggttgtttgagctacccagatctgcaggttttcaccaaatttggaaaattttcagtcatatggcttaaacaatttttttctggctctccctttctcttctctttggccacttctctctcacacacacatagatataattaggtcacttgaagatgttccatagctcactgatactgtttttgttgctgttattctccttttctctctgtttcattttgcatcatttctactgctatgtattcaagtttactaatttttccttgtgtgtgtgtaatctgctgttgattctatccattgtaattttcttttcagacattataattwcatctttagatgtttcttcacacacatacactggtcaatatgcagcaaactcaagtggaaccgtctacttatttctcaaattctttttgtactcagctttcttctctctggtcctttgtcctgtaaactctaactacactgatctccaaagactctcatctctgtcttctcaactcagaaaatctactagtttcatcctgtgttgttcttccctgtagcatggactggaaaatctctggacaagtgggataatcataggactaaccttagttgttttctctctct

SEQ ID NO: 887627 - DNA, 558 bp, Homo sapiens
ttatacattttgaagctgtattattaggtaccatgttacctctcattcgttacaaagttttgtgaatatgatgctttgactttttcagagaatataattcataaatcagtgcaaccagaaactgcaacatgtcacattgtaatgaatgtttacaagtaaatagagaarccaaagtcagcctagctgaacctcagtctcccactttttcctcacaagctaaatgaacatctgatccactcttctgcaccaagatctcgaccaaaacaaaacttcagcttcaatcagtattttaattgaggaattagtatttagaattttatattttcttgtttaaaaaattggtatcattatacaaagaacctctctaactttaaccttgattgctatctttttgactcattttagtctaattattttagatttattttgtttaatgtttgccttatatctttttcccacatcttatatatcttttgttgtattgaagtggaacattactaaagggcatggaaataataaaacctcagtgcaggaaatataccctagcttcagtggaaa

SEQ ID NO: 887628 - DNA, 595 bp, Homo sapiens
caaaagaaaaaatcttaaaggcagctagagaaaagggccatattacctataaagggaagcccatcaaagtaacagcagacttctcagcagaaaccttacaattcagaaaagattaggaaacctttttttttttttttttttttttgagatggagttttgctcttgttgcccaggctggagtgcaatggcaccatctcggctcaccgcaacctaaacttcctgggttcaagcaattctcctgcctcagcctcccgagtagctgggattacaggcatgtgccaccatgtctgactaattttgtatttttagtagagacaggttttctctatgttggtcagggtggtctttgaactcccaaccttaggtgatccgcctgccttcgtctcccaaagcgctgggattacaggcstgagccaccatgcctggcctggggaaccatttttagcattctaaaatagaagaaatgtcagccaagaattatatgtcttcccaaagcaagctccttaaacaaaggagaaataaagtattgcccagacaagcaattcctaaggaaatttgtcaccaccagaatggccctacaaaagatgattaaggg

SEQ ID NO: 887629 - DNA, 576 bp, Homo sapiens
acggaagaatctataattatattaggattttacagggagaatattatctcccttcctaaagcaccttcctaaaggaggaggtatctcaatgtgcaaagtgaacctaatttcttattaaatataattttaagggggaaagctggtgcataaaaactcataaaaaagagcaacccaaactggaaactggcaattgtttaaggctcttttacaattattyaatctgtgtgtctttcctgactctgggcattctgctccttttgcatgtttgtaagctgagatgcgtgggaaataataaaatattatgcacagcccacaccccacatagaaagcttgctgtttctctgtgggaagttttaacttaggtcagcttcacctaagaattatttttctttctttctttgaagaaggcagattcctggtcctgccactcaaattttcaaagtgaaaatatttggtctgattttccaatgtatttccttgatgtcaatcaagtgtctgaaacattagtgattgtttttaccttgtacagtgaagtgaggtagcattttaattagggaagaaaaaaactgacttatg

SEQ ID NO: 887630 - DNA, 576 bp, Homo sapiens
acggaagaatctataattatattaggattttacagggagaatattatctcccttcctaaagcaccttcctaaaggaggaggtatctcaatgtgcaaagtgaacctaatttcttattaaatataattttaagggggaaagctggtgcataaaaactcataaaaaagagcaacccaaactggaaactggcaattgtttaaggctcttttacaattatttaatctgtgtgtctttcctgactctgggcattctgctccttttgcatgtttgtaagctgagatgcgtgggaaataataaaatattatgcacagcccacaccccacatagaaagcttgctgtttctctgtgggaagttttaacttargtcagcttcacctaagaattatttttctttctttctttgaagaaggcagattcctggtcctgccactcaaattttcaaagtgaaaatatttggtctgattttccaatgtatttccttgatgtcaatcaagtgtctgaaacattagtgattgtttttaccttgtacagtgaagtgaggtagcattttaattagggaagaaaaaaactgacttatg

SEQ ID NO: 887631 - DNA, 651 bp, Homo sapiens
tccttgatgacatcatggactagtagtcaaccaagagtcttatggtcatggttggataagagagggtgagaaaggtggtagcttggagttggggtggtaaaggtaagggccataggcacaggcaatacctagacgtactagatacgggtcaataactgctagatatgggttaagacctgggaggagggtaccctgtagtttccttcatctctgcttatctcagaagtcaagaaataaaggcaacagagcctggaattcagcagatgcatgcaaatatatctgaaaaagttggttggtcacttaattaactatattaccctaacttgggacaaacattgaagaataaaaggtggcggtcagctcacagaggtgagtcatagaagaaaagccacagagatgagtgcagatgtgctcagggagaaggagcgcctttcagacaattgaatcccaatagcactgtgggtagatasaatcagctaactccgcctactatgagaccagacgcagcaaacctgcttctgatcactgttcagctcccacaaaatgctgactggaaactatggcattgtctgcatgctgtgggtatctgtccactgcatagatggccagaatgaggtttctaagccatcaaggcgagaagggccacggtaa

SEQ ID NO: 887632 - DNA, 641 bp, Homo sapiens
tttgacaaaacacaacagcctttcatgctaaaaaccctcaataaactaggtattgatgggacgtatctcaaaataataagagctatttatgacaaacccacagcaaatatcatactgaatgggcaaaagctggaagcattccctttgaaaaccagcacaagacaaggatgccctctctcaccactcctattcaacatagtattgcaagttctggccagggcaatcaggcaaaagaaagaaataaagtctattcaaataagaagacaggaagttcaaattgtctctgtttgcagatgacatgattgtatatttagaaaaccctatcgtctcagcccaaaatctacttaagctgataagcgaattcagcaaagtctcaggatacaaaatcaatgtgcaaaaatcacaagcattactatacacaaataatagacaaacagagagccaaatcatgagtgaacttccattcmcaatcacttcaaaaagaataaaatacctaggcatacaacttacaagggatgtgcaggacttcttcaaggagaactataaaccactgctcaaggaaataagagaggacacaaacaaatggaaaaacattcatgctcatggataggaagaatcaatatcgtgaaaatggccagact

SEQ ID NO: 887633 - DNA, 567 bp, Homo sapiens
tgataggctatgaaaaagccttttgtaaaactataaagtattcttcaattatttatattgttattgtagttataaaaaacaatgatttttattattccattccattagtatggctttaggctgcttatataagatacattaaacacgctaaaaagatttaaattgaggctggggattgggaggtgacagagtaagtgttacagtggccattaaaatgtcttaaacattaaggtacctaaaaatgtaatatttaactgaattaagatcgccaaattaaattggctgttttcccaagtgtgatctctggtaattgccacttgattraatagggaaccaaacagacagaattgtagacaacgcagtgatgttcaagccctcccgctacccccaccaccctcattaggtacaagtagctttaccaattgctcagaaaacagaacatccatgctctgctttagagtcatacaaatatcaggaatgtttgcatatgtttccccaccacttacaaggatttaaaaagaaacttttccataagaacataacatggatgaaaccagtcatatgatt

SEQ ID NO: 887634 - DNA, 651 bp, Homo sapiens
ggtttttacccttacataaagcagtctgtcaagtgcaaaatggcaaagtgcagactgaatactacaataaggaaacagcggtcaccaggatgagaagaggttaaatcacaagaagattctcagacctggcttttgacctggctttaaagaataggaattttaaaattgagatcagatatacattaggaacacctgtgtagaagcagaatattgtacatcccatattccctttscaaaatctagtttcctatgtttgcaatcaagtgattaggtcctgctctttctaattcagttctaacaaatgaaatctcatcttaggctttggaaactgtcttcaattagcagttcaagtaacaaaaggaactctgggcagctaagatgaataaattttagagagaaagctgcagagacaggaaaacttttactataacctaatcatgttctgtatttagtggtgataaaattatactggaagtctattttttaaaagcactttttgagacacctggaccttgaaagtttaatatgcatcctgtaaatataatcacaggtctttcatgccatttgatcatggggaaagaattcaaattaaccttttgacatctgaatttgaatttcagaagataaagaccatagctaaaaagcccttag

SEQ ID NO: 887635 - DNA, 613 bp, Homo sapiens
agagtagctctttagaagaaagaaagcatgtggcttcattacagaactccgcttaatctcaggatctgaatgttccaagtttaaataaattctcacaagcctgcttgctttctgattgccaagtctgaacagccacaagcaggatctgacctgtacctataaacatgtaaaccagcacaaatgaaatcactaagcgacgtaaaagcaacaaggaacaagcacccgttcattttaaagataatataaacaaaatgatacctgttcttcggctctttggtttctcagcgtcgataaatatctcctaattgcatggagaggatattttttgaaataagagaatctagatggaggcaacagactatccatagtgaggaaagcaagagggtccttgtctgcacctccttgtcagcaaccatatgaaattagaaacttagcaattcctcagatgcctaaagatttgtttgtagctcgacmacttccctcctacaaacaaagcaaatgttctccttgctgtttcctcttttgggtagagttcctggtgaaaccagacagccaagtatgaacactgtctagaagcgtccagaaatgcaatgcccaaagggcaataggaatt

SEQ ID NO: 887636 - DNA, 648 bp, Homo sapiens
gctgactctaatgagggcaagagagaagcagtgtgcttgtgaaacacctgaatgctaagggcacagtgctgcatgctccctgccagttcatgacccagaaaaacaagaagtatagaaagccagataccctgggccaacttgaagccctggaaagagaggcagccctagggattgtgggggcagggaaatgtgtcgttcatacgaacccttgagatccactaactgcccttttgcttctctttttaaaaatatcagaaccttcagagatgcctctttattgtgggcagaagccagcagcctgctaaacamccacagcatgactggtgatccaatcttttcccaacagacgaacacaaagcagacttcatttccacagttgtttcaggatcactttttctggggctgaggtgagtgatgaaaagaaatggggagggagaaatgcagcatccccaaacaaaaactgttctattagattaagcacaaaaaagaaaaatgggtgaaacaaattcaattaaaattcctttaggaatttaattgataacgaatataaatcgtatctaatactaattgggccctttggccaggtgatgtgctaaagtctttacatgtattatcacaggtaatcctacagtaacatatgggtaaact

SEQ ID NO: 887637 - DNA, 616 bp, Homo sapiens
aaagttaacatttactggatacctagtagctgccaggttaagcacagtggttaaaaaatgtaggttctgacatcaaattgcctggatttgtatccctggcttcaccatctcttacttgtgtgatcctgggctacttactaatctagctctgtagtttactgtcctcatctataaaatacagataactacaaatgttcaaacaaaaactcatacatgaatgttcacggcaacactattcacgatagccaaaagatggaaacaggccaaatattcatcaactgataaatgtaaaattgtgacatccatgcaatggagtattactttagccacaaaaaggaatgaagtactaacacatgctacaacatgaataaaccttgaaaacattatgstaagtgaaaaaagacagatacaaaaggtcccatattatatcatttcatttatatgaaatatctagaataggcaaatccatagagatagcagattagtgagtggttgccagggactaggggaagaggaaaactggggagtgactgcttaatgtgtacagggttttcttctggcatgatgaaaaggttctgaatctagatagcggttaacagttgtaaaacattgcgac

SEQ ID NO: 887638 - DNA, 591 bp, Homo sapiens
ggcaaataaccttatataaaatgatacaaaatttaacaaaaattaactcaagttggattaaagacttagacataagacctaaaaccataaaaactctagaagaaaacctagggcataccattcaggacactggcatgggcaaagacttcatgactaaaacaccaaaagcaatggcaacaaaagccaaaattgacaaatgggatctgattaaactaaagagtttctgtasgacaaaagtatcatcacagtgaacaggaacctacagaatgggagaaaatttttgcaatctatccttctgacaaagggctaatatccagaatctacaaaggacttaaacagatttacaagaaaaaaacaaccccatcaaaaagtgggcaaaggatatgaacagacacttctcaaaagaagacatttatgtggccaataaacataggaaaaaaagctcatcatcactggacattagagaaatgcaaatcaaaaccacaataagataccatctcacgccagttagaatggcaatcactaaaaagttaggaaacaacagatgctggtgaggatatggagaaataggaacacttttacactgttggt

SEQ ID NO: 887639 - DNA, 672 bp, Homo sapiens
ggaaaccctatctcagacttaaacaagttatgttttgctattgccccctacattttctcctagaagcctacctgcacagttgacctcagtgggcagcctttccggtccttatagatttcatggcaccttattcctagaattccctctccaaaataatctagtcacaacattccactcctggggaaagccactccattcctccttttccaaragtccagcaaaagcctccactggggtttgatggaaaggtgtgtaatctatcacacatcctatattgttccctttttccagctcccagccctgaaggatgcagggcccggcggggccccctggccactgagggaacaggagtcacccagtcgccgtgttctgacagcttgtcacattatttttccctgtgggggctctgctccctccatctaaccttcttctctgtcccctgagaccagaggcctctatacaaggctcctgaggcaaagcaaagcaagattgatgccttacgaacggccatgcccgggagggctcgcggttcaatgcatagagcagcccattcttccccatttcaggttcccaccctggacaccaaagcaggagctcagagccagggcagcaagaattcaacctttgttcatcctccgaacacaaataatccaccacattccccaatctctc

SEQ ID NO: 887640 - DNA, 593 bp, Homo sapiens
cactcccactctcactgcagcattattcactatagccaagatacagaaacaacgtaagtgcccattgacagatgaatggataaagaaattatggtatatataaacaacggaatattcttcagccataaaaaaaaagaaatcctatccattacaataacacagacgaacatgaargataagagaaataagccaggcacagaaagacaaatagtgcacgatctcacttccatgtggaatctaaaaaagtcagattcacaggagcagagaatagaacagtggttgccaggggcttaggggaggggagtgggaaatgcagagatgttagtcaaaagtgcgaattttcagttaaaagatgaacaagttctggggacctaatatacagcatgggtggtgatgggtgtgtccattaacttgattgtggtaattacaacatacatgtttatcagatcatcacattgtacactttgactatatttaatctttgtcagttaactattttaagatttaaaaaggaaaggaaaaaaatctcttcctcaaccaagcatccacgactcccctccctctatcccccattcttcgctacttagctagga

SEQ ID NO: 887641 - DNA, 611 bp, Homo sapiens
tgggcatatacccagtaatgggattgttgggtcaaatggtatttctggtcctagatccttgaggaatcgacacagtgtcttccacaatggttgaactaatttaaactcccaccaacagtgtaaaagcattcctacatctccacaggctctgggcaatttttaagcgctttgtatgtaactgctcrtttaattcgtgaggcaagggttgttattatccccattttctagatgacaaaacagacagagagcttaagtgattctccttagagtcacacagatgattaagagtaatgccaggatttgaacccatgcagtctgctccagagcccacactctggatcaatattttgctcatcctgaaagctattaatcagaccatgagctattaatcagaccatctccccaaagaatctgtggctttttccagaatggagaactagggcccaggatggggtgaagagagcagagaggagagcccacagacatatgggaaaccacgtcctggatatgtggaaggcatagtcctggagccttcttagaatttcttctctctgttacagaggtagctaatcagacatgagcagagcaggacagggcttccccccactccc

SEQ ID NO: 887642 - DNA, 616 bp, Homo sapiens
ttaatcaatgtctaattcaataaaatgaattactctagctctttgtcctgtgattgtagtcaaactattgaaatagaggaaatagaaatacaaactaccatcagagaattctaaaaaacacctctatgcaaacaaaccagaaaatctacaaaaaatggttaaattgctggacatacataccctcccaaaactaaagcaggaagaagttgaatctctgaatagaccaataataggttgtgaaattgaggcaataattaatagcctacaaagcaaaaaaagtctaggaccagwtgaattcacagctgaattctaccagtgatacaaagaggagctggtaccattccttctgaaactatttcaatcaatagaaaaagagggaatcctccctaactcattttaagatgctagtatcatcctgataacaaagcctggtagagacacaacaaaaaaagagaattttaggccaatatccctgatgaacatctatgcaaaaatgctcaataaaatactggcaaactgaatccagcagcacatcaaaaagcttatccaccacaatcaagccggcttcatccttgggatgcaaggctggttcaacatatgcaaatcaataaatgta

SEQ ID NO: 887643 - DNA, 616 bp, Homo sapiens
ttaatcaatgtctaattcaataaaatgaattactctagctctttgtcctgtgattgtagtcaaactattgaaatagaggaaatagaaatacaaactaccatcagagaattctaaaaaacacctctatgcaaacaaaccagaaaatctacaaaaaatggttaaattgctggacatacataccctcccaaaactaaagcaggaagaagttgaatctctgaatagaccaataataggttgtgaaattgaggcaataattaatagcctacaaagcaaaaaaagtctaggaccagttgaattcayagctgaattctaccagtgatacaaagaggagctggtaccattccttctgaaactatttcaatcaatagaaaaagagggaatcctccctaactcattttaagatgctagtatcatcctgataacaaagcctggtagagacacaacaaaaaaagagaattttaggccaatatccctgatgaacatctatgcaaaaatgctcaataaaatactggcaaactgaatccagcagcacatcaaaaagcttatccaccacaatcaagccggcttcatccttgggatgcaaggctggttcaacatatgcaaatcaataaatgta

SEQ ID NO: 887644 - DNA, 495 bp, Homo sapiens
gacttttagttttatttcctctaattcattgtccaagctatagcctgcatgatctttcaaaaatggacagtgtggctcacacctgtaatcgcagcactttgggaggccgaggtgggcagagatcaggagttcgagaccagcctggccaacatggtgaaaccccgtctctactaaaaatacaaaatattagccgggcatggkggtgtacacctgtaatcccaactactcgggaggctgaggtgggagaatcattggaacccaggcagtggaggttgtagtgagccaagatcatgccatcgtacttcagcctgggcaagagagtgagactccacctcaaaaaaaaaaagaaaaaagaagaaaaaaaaggacagcagacaatggcactctgcaggtggaactgcttcatgtttcccactcctgtccctgttcttcaagagccggcctccccttctctctgctccatccacatgggtttcaaagaagcttagctctttc

SEQ ID NO: 887645 - DNA, 636 bp, Homo sapiens
aaagtgaaggagaaagcagtccaaaggatagctcctgggttctggcttacatacatgatggggcattcagaaaaactggaagaaaaccagaagggggcattggaaagaggatggacagcatgaatttagttggacctcaactttcagtgccctagagacattcaagtggagatgtctagcaggcatactagtctggagctcagggatacaacttaggaatcatcagtacagaggtagtcaccaaagcccttgcctcagatgttgatgcttgggagggagaaggaatgaacagagcagggagtctagggccgagctttaagaaacatcaattcttaatggctttgaaagaagaatcttcaaaagagactgaaaaagagtagccacaaacagaaggatgtgacacaaaagccaagagaaaaatgtgtttcaaggaggaagyggccaataggatcaaacagtgggaacagattaaatcgcataagggctaaaaactacacattgggtacaaatgtagcatctaagtaatgttttttacaacttcctcactaccaccaagcacatacactgcaccctgtacatattatgaattcatgaagtgctgacatatcaatctagcaatatacactgcataatagg

SEQ ID NO: 887646 - DNA, 636 bp, Homo sapiens
gccccatattagattcttgtcctgtttaacgtctttggggttttgttatctattgatgtctacaaactggacgggttcctgatgtttctagtttcctccagtatctggctgcaactcccaaactaacactttcaattttctcccaccgttcttattggaatcacgaagaacaaaactgccctttgcccagaaatcctgcaaactgaggctggacgacttgaaatactcatcagcgagattaccacgaagcccaggtgcgagggaccctcacgcctgttgctgcrtgggccgcccagacatcgccagagaccaaaccgcagaagatgctcggagcccaacatctacaaacctgccccgccacggcccccaggctcagaaactggtttttagtcagctccaatgattagctttttttttttttcttttgtttccatagaaatgcctcttcaaagcattatgggacaacacacccacccagtttctgtaccgtggagcttcttggggaagtttcagactaggaaacaatggggctcaggacacatcaccccaaagtatgactgtaggagaccagaatacgccacccctaaatatgactataggagaccagaatacgtcaccccaaaatatgactgtagg

SEQ ID NO: 887647 - DNA, 636 bp, Homo sapiens
gccccatattagattcttgtcctgtttaacgtctttggggttttgttatctattgatgtctacaaactggacgggttcctgatgtttctagtttcctccagtatctggctgcaactcccaaactaacactttcaattttctcccaccgttcttattggaatcacgaagaacaaaactgccctttgcccagaaatcctgcaaactgaggctggacgacttgaaatactcatcagcgagattaccacgaagcccaggtgcgagggaccctcacgcctgttgctgcgtgggccgcccagacatcgccagagaccaaaccgcagaagatgctcsgagcccaacatctacaaacctgccccgccacggcccccaggctcagaaactggtttttagtcagctccaatgattagctttttttttttttcttttgtttccatagaaatgcctcttcaaagcattatgggacaacacacccacccagtttctgtaccgtggagcttcttggggaagtttcagactaggaaacaatggggctcaggacacatcaccccaaagtatgactgtaggagaccagaatacgccacccctaaatatgactataggagaccagaatacgtcaccccaaaatatgactgtagg

SEQ ID NO: 887648 - DNA, 576 bp, Homo sapiens
aagggaggcgattgccattccatttccaaaaactcccaggttgcagaacggcaggaggaggggcaggtctggcagagatagatttccaggctgagagtagattcgggccgagagtagagaggagacttacccaaggccatgcggcttgtaagttggacccaggagtagaactggcaagccagggttttgaatcagtatttgtggggtggggtggactctgtgtgctctcttgtggacctcccgacactctgccatggcctggtccagctgtgggctctgcaccgccayggagggagagaaggccatgctgcccctccctccccacccacataagcgtgcacactccattctgctccagctgttggagagtctggggcgggccgcatgaggcacctgttagtgagatgatggatgtgctgtttgcttccaggagaaggagccacaaaaggggatccagggaagggacagcaccagggctgtgtgctgggagagggggtcctgctatggtgcccagcagccttttttggagtcactgacagatggggagtgcagaggagggcaggggcggagggaagg

SEQ ID NO: 887649 - DNA, 638 bp, Homo sapiens
ccaatgacaaacaatcttaaaataaatcaagaaataatcctgtttacaataggtacaaataaaacattttctttataaaacaataggtacaaataaaactatagaaagacagactttgcatgttctgacttatttgttggagctaaaaattaaaacaattgaacttagagtagaagygtcattaccagaggcaggaaaggtatttacgggaagaggaaatgtttaaaaatatagtttgatggactataccacaaggctacagcaaccaaaatagcatggtactggtaccaaaacagatatatagaccaatggagtagaacagaggcctcagaaataatgctgtacatctataaccatctgatctttgataaacctgacaaaaggaatggggaaaggatttcctatttaataaatggtgttgggaaaactggctacccatgtgcagaaaaccgaaactggaccccttccttacaccttatacaaaaattaactcaagatggattaaagacttaagcataagacctaaaactataaaaaccctagaagaaaacctaggcaataccattcaggacataggcatgggctaagacttcatgactaaaacaccaaaagtaatggcaacaaaagtcaaaatcgac

SEQ ID NO: 887650 - DNA, 638 bp, Homo sapiens
ccaatgacaaacaatcttaaaataaatcaagaaataatcctgtttacaataggtacaaataaaacattttctttataaaacaataggtacaaataaaactatagaaagacagactttgcatgttctgacttatttgttggagctaaaaattaaaacaattgaacttagagtagaagtgtcattaccagaggcaggaaaggtatttacrggaagaggaaatgtttaaaaatatagtttgatggactataccacaaggctacagcaaccaaaatagcatggtactggtaccaaaacagatatatagaccaatggagtagaacagaggcctcagaaataatgctgtacatctataaccatctgatctttgataaacctgacaaaaggaatggggaaaggatttcctatttaataaatggtgttgggaaaactggctacccatgtgcagaaaaccgaaactggaccccttccttacaccttatacaaaaattaactcaagatggattaaagacttaagcataagacctaaaactataaaaaccctagaagaaaacctaggcaataccattcaggacataggcatgggctaagacttcatgactaaaacaccaaaagtaatggcaacaaaagtcaaaatcgac

SEQ ID NO: 887651 - DNA, 626 bp, Homo sapiens
tctcaaaaacaaaaacaaaaaacaaaaattagccaggtgtggtggtgcacacctattaatcctggctactcgggaggctgaggcataagaatcacttgaacccaggaggtggaggctgcagtgagccaagattgcaccactgcactcgggcctgggcaagtaagtgagactctctcaaaaaaaaaacaaagacraaaacaaacaaacaaaaaaaccaacaaccaaattttcagattaaatgcctaaactagtaggcccagtttttataaaatcctaatgacaatttttaaacattcattcagccactattcattatatacttatgagccaaacaataagttggaaaattccaggaacactgcaataatcaagatagccttttagtcaagcatcttaactgtcttgtaaagagatacaactaggatgtcaaaaaccataagaaggtggtaccagtaggtgtttgtaataatggggtctgaaaccaaactggcgggggtgttcctgcttcattacttcctggctgtatgaccttgggcaaggtactaaaactgtataacttagcctccttatctgcaggatgtatttcccgcaaaggctgttcgaggattaagtaagagaagccacat

SEQ ID NO: 887652 - DNA, 578 bp, Homo sapiens
gggcccagccccttccttatcatttcttaataacatttatttttcttctagcttactttactgtgagaatatagcatataatacacataaatataaaatatatgttaatcaactgtttacgctattataaggcttttggataacatcaggctactggtagttaagtcttgggggagtcaaaacttatatgtaagttttttactgtgtgggggtgagcagctctaatcctggctttgtccaagggtcagctatagtgtcacagagctatgatttgtgggtgtgcattgggtacatgtgggtgcttccacrtggcttgcagagaatggttgtcacttctcctccaataggagatgtcaggacaaggggatcattttctacaggggccaagtcttctcttttcattcccttaaaatagaaagtcatccaaggtcactcttctccccttccccgtgccttcctaaactgctctccaatgagggtaacacaaactaacacatttgatccctataatatgtaccacacttcaccgattctagaaaaggtaacaattctctgatgatgattattccctccttctt

SEQ ID NO: 887653 - DNA, 595 bp, Homo sapiens
tctttgaaaacttctaatgatttatgtggtgggagtagtgactccagcgagtgggggttgatataatatctaacctctgtgctgacctctcaatgatgaaaagcagtgatcaaactgaatcatttctattttgagggaacacagtctstatttcccaatctcgttctagctagccacagcagcatcatgggtgccatctccatatctgcctgtcacagggtttggggatgggttgatagtggctaagcaaaacaccaaaattcaatgaaatttaccagtctgtttcttcatcaagcgcctcccaggatgttgagagtgttcccctagattacagagctccaaaattgttgccttacagttcttgccagccagcttaatagaactgtgtgtgtgtgtgtgtgtgtgtgtgtgtgtgtgtgtgtgtgtgtaaggacagattcctggagcttccaattccactatcttttgtgatgtaacttctcctatattatgtttgttcttctatttattaagaagaacccaaaacaatgtttagactcttagctctggtagaaatggtacattcactaattttccaattttgctgctatggcct

SEQ ID NO: 887654 - DNA, 595 bp, Homo sapiens
tctttgaaaacttctaatgatttatgtggtgggagtagtgactccagcgagtgggggttgatataatatctaacctctgtgctgacctctcaatgatgaaaagcagtgatcaaactgaatcatttctattttgagggaacacagtctctatttcccaatctsgttctagctagccacagcagcatcatgggtgccatctccatatctgcctgtcacagggtttggggatgggttgatagtggctaagcaaaacaccaaaattcaatgaaatttaccagtctgtttcttcatcaagcgcctcccaggatgttgagagtgttcccctagattacagagctccaaaattgttgccttacagttcttgccagccagcttaatagaactgtgtgtgtgtgtgtgtgtgtgtgtgtgtgtgtgtgtgtgtgtgtaaggacagattcctggagcttccaattccactatcttttgtgatgtaacttctcctatattatgtttgttcttctatttattaagaagaacccaaaacaatgtttagactcttagctctggtagaaatggtacattcactaattttccaattttgctgctatggcct

SEQ ID NO: 887655 - DNA, 595 bp, Homo sapiens
tctttgaaaacttctaatgatttatgtggtgggagtagtgactccagcgagtgggggttgatataatatctaacctctgtgctgacctctcaatgatgaaaagcagtgatcaaactgaatcatttctattttgagggaacacagtctctatttcccaatctcgttctagctagccacagcagcatcatgggtgccatctccatatctgcctgtcacagggtttggggatgggttgatagtggctaagcaaaacaccaaaattcaatgaaatttaccagtctgtttcttcatcaagcgcctcccaggatgttgagagtgttcccctagattacagagctccaaaattgttgccttacagttcttgccagccagcttaatagaactgtgtgygtgtgtgtgtgtgtgtgtgtgtgtgtgtgtgtgtgtgtaaggacagattcctggagcttccaattccactatcttttgtgatgtaacttctcctatattatgtttgttcttctatttattaagaagaacccaaaacaatgtttagactcttagctctggtagaaatggtacattcactaattttccaattttgctgctatggcct

SEQ ID NO: 887656 - DNA, 574 bp, Homo sapiens
taactggattgtttattttcttattgtcaagttttaggagatctctgtgtattttggatacaggtacattatctgtttcttttgtttgtttgttttttcctttgttctttctttttaattattatactttaagttttagggtacatgtgcacaatgtgcaggttagttacatatgtatacatgtgacatgctggtgygctgcacccactaactcgtcatctagcattaggtatacctcccaatgctatccctcccccctccccccaccccacaacaggccccagagtgtgatgttccccttcctgtgtccatgtgttctcattgttcaattcccacctatgagtgagaatatgtggtgtttggtttattgttcttgcaatagtttactgagaatgatgatttccagtttcatccatgtccctacaaaggacatgaactcatcattttttatggctgcatagtattccatggtgtatatgtgccacattttcttaatccagtctatcattgttggacatttgggttggttccaagtctttgctattgtgaatggtgccgcaatgaacatacctgc

SEQ ID NO: 887657 - DNA, 640 bp, Homo sapiens
gtcagtgtgtctggctgtgcctggccagaaattataaatttatttcttacagctctggaggctaggaagcctaagacagaggtgccagcaaattcactgtcggcgtgaatgcctgctttctggtttataaatggtgccttcttactgtgtcttcatatggtgaagggggcaagggtgtctctcttaggcctttttaatttaatttttatttttttagacacagtcttactctgcaatcgtagttcactggagcctcaaactcctgggctcaagtgattctcctgcctcagcctccccagtagctgggactacagttgcatgccaccatgcctagctaattttttaaattttctgtagagacagggtctcctrtgttgcccaggctggtcttgaacttaagtgatccttccaccttggcctcccaaagtgttggggttacaggcatgagcctggccattgggcctttttaataagggctctaatcccattcaggagggctctgccaccatgatctaatcaccttctaaaggccctatctttcaatataatcactttggggataggatttcaacatacgaatttttttttaattgggcctcactttgtcacccaggctggagtatggtggtacaatcatggc

SEQ ID NO: 887658 - DNA, 640 bp, Homo sapiens
gtcagtgtgtctggctgtgcctggccagaaattataaatttatttcttacagctctggaggctaggaagcctaagacagaggtgccagcaaattcactgtcggcgtgaatgcctgctttctggtttataaatggtgccttcttactgtgtcttcatatggtgaagggggcaagggtgtctctcttaggcctttttaatttaatttttatttttttagacacagtcttactctgcaatcgtagttcactggagcctcaaactcctgggctcaagtgattctcctgcctcagcctccccagtagctgggactacagttgcatgccaccatgcctagctaattttttaaattttctgtagagacagggtctcctgtgttgcccaggctggtcttgaacttaagtgatccttccaccttggcctcccaaagtgttggggttacaggcatgagcctggccmttgggcctttttaataagggctctaatcccattcaggagggctctgccaccatgatctaatcaccttctaaaggccctatctttcaatataatcactttggggataggatttcaacatacgaatttttttttaattgggcctcactttgtcacccaggctggagtatggtggtacaatcatggc

SEQ ID NO: 887659 - DNA, 665 bp, Homo sapiens
ttttctaatgaattgaacatgttgttgcagggacatttgccctgatatgacagttagtgttttatgatatttcctaaatagtatgcttggggtagacatgcaacagatatcttctcttacagagggctttttaatgtgatctgaagagaattaatgtgccttctatgagtcatctttgtgctagtttatgttcagtttctcctagaatgtttttagcttgtttttgtttcttttccttttgctggagaaaaatgtgaaaaaggatctattccagaaatactaaatcatagaaattcacatcatgagtctaaatgtgaaagtagctttttactttaacaatggaatcattttctaagtcrgtttaaaaaaaaaagtttccatttgctctgaaaaggtttatgctcattattacctaattctttttcaacggaaagtttcaaagtatttctgaaagggtgctcaacatttgagtcaggcatttcagtacagactagttaaaccggcaaattatgtacttgtgaagttctagccagagtgaggaccccctgggatgcaagccaaagctgcggaatcccgagtctcctccagcactgctgacaggctacagaactttatacacttaaacacacacacacacacacacacacacacacactgataagatt

SEQ ID NO: 887660 - DNA, 683 bp, Homo sapiens
tggtgggaaaataaaatgatggtacggctgctgtgaaaaacagtgtgctgattcctccaaagttaaacatagaattactgtatgatccagcaattccgtttctgggtatatgtccaaaagaattgaaaacaggactcaaacaggtatttagacacccatgttcatagcagcactattcataagaggcaaaagaaggaaacaacccaagtgtctgttgatggacaaatggataaaaagtatagtgtgtacatatactgcggaatattatttatgccttaacaaacatgctgcaggctgggcgcagggctcacgtctgtaatcccagcactttctgaggccgaggtgggtgaatcatgaggtcaggagttcgagaccagcctggccaacatggtgaaaccccatctctactaaaaatacaaaaaattagttgggcataatggtgggtgcctgtagtcccagctactcaggaggtggaggctgaggcaggagaatctcttgaacccagggggtggaggttgcagtgagcygagattgcaccactgcactccaatgctggcggcagagtcagattccatcttaaaacaaaacaaaacaaaacaaacatgctgcagcatggctgaaccttgaggacattgtgctaagtgaaatcagccagttacaaaagaataaatactgtatgattc

SEQ ID NO: 887661 - DNA, 602 bp, Homo sapiens
gtgaagcacctccaactagtaaatactgaagaatacagtcctaacacatataggacatatataggaatcacagtgactgattacactaactagattgcttctgaaataccagtaccattttaagtcctgatctgagtgggtttcatatgcctctgttctgtctttcatatttaatatattgcattttgttttagagacagaacaaagtctattgcgtaagacaataaaaagattatctttgggcaattcccataacagactttctgttttaacaaatctcttaagttactggagctgtcttatttatttttagagatgtttttacattgtaraaaagtacacgagtacccctatgtattgaccaccaagatgagtttttagttttttttttttttttttctaagagacaaggtattagtctgttacccagcctgaaatgcagtggtgctatcagagctcgctcaaactcctgggctcaagtgatcctcctgcctcagcttcccaagtaggactatagtcatgtgccaccatgcccagctaattttttaaaaaattcttttttgtgaaaacaaaaaatcctactatgttgccctgacttgttt

SEQ ID NO: 887662 - DNA, 621 bp, Homo sapiens
cttttttttaacaaataataaaacaaaatcaaagataggctggagagggagtaacaggccaggcagaaacttcaaggatgaaagaagtaacagctttagaaatcttagaaatcctagaaatcttgcttagtgaccaagactttggtgtgctttttagaggttgtattgacctaacccaggccagaaacaaaacaaagsaactagtacataaacaaaagtaatatttttatttcatttaatgcaagtacttactaagtagttcttatgatggagcttagaaatatttatgaactgtggaattatactccaatgtattgtcatgtaatttaacttatcattcaattattggtattttgttagtaactaaaactctgctcttaataatgtttgttataattttgatgttactatttcttcaggaccaatgaattaattgatcagcaaatttttactaacacattttatttagataactagcttgagaactatttattagatacctactttagatctctggctcagttttctggtacatttaataaaaggtgtggctttcaaatttttctgtgtatgtgaatgacttgaggatcttgttaaaccacagattctgggacagtagtt

SEQ ID NO: 887663 - DNA, 546 bp, Homo sapiens
cctgggaccaggccttatcctctgactggaaatctttgggctcaccaaaaatttggagacgtctgcttcaattatattttatacataattttgcctttacagtcccttcagaatatgtcgtgtggaacatatgaagagcactgagctggaagtctgggtttatatttgagccctggcacttattagctgtataagtacaggaaattgcacatctctctgagcttcaattccttgtwtatctgaataagaagggagtgataaaagaaaaaaaatctgtgaagtatctagcataatatagtaatacctgcaataaacaatagcaattcttataatactgttactgtttccctgaactagcttttgtactcctggtaataaagcacctcaaggcagagaatggtaagtggagaagaaattaaaatgacttttcaccaaattttgcttgtaaaatgtctgaaatttaagcaaacagacagcaaacttacttatactcaggacaagtaactaggtcatggagaagaaatgccagatcttacaaatgtaaaa

SEQ ID NO: 887664 - DNA, 599 bp, Homo sapiens
atctctctcaagttaacagttgcacagatctcaagggcaggggcacaatgacaccagtctctttgctaaagcatagcaagagtgacctttactcctgtttccagtaagttcctcctcttcatctgagaccacctctgcctgcacttcattgtccatatcattatcagcagtttggtaaaaaccatttgacaagtctttaggaagtttcaaactttcccacatcttcctgccttcttttgagccctccaaacgattccagcctctgcstgttacccagttccaaagttgcttccacattttcaagtattcttatagcagtgtcccactcccagtaccaatttactgtattagcctgttctcacactgctgtaaagatatatccaagactgtgtaatttataaagaaaagaggtttaattgactctcagtttctcatggctggagaggcctcgggaaacctagaatcatggcggaagtagaagcaggcatgtcttacattgtggcaggcgagagagagcacaggtgtgactgcaggaaaaacttccatttataaaaccactagatcttgtaagaatttgctcagtctcacagaaacagcat

SEQ ID NO: 887665 - DNA, 640 bp, Homo sapiens
atagacaaattgaagatgatagagtcataagatgaaagtagcatgaaagtagcatgagtccctagagggggtgcctccaaccaatcagaaccacccagtttggaatttctatgcatgaaaaatcaactactctgtcaagccactgagatgtaggggttttactgttactgcagctcgattactctaacatccagcaaatccttcagggaatgaaagacagaacagataaacctttgatgttagagggaagaactagcattagatggtcctacagtaagaggtacccggcagcctgagagcactgaggagatctggagtccggggagatgcaggggcaacaaaaacatatttcttctctttgctactttacctggggacagccctagttacagtaataaacctgaagccacaagatgaatcttcccagcatggtamtatttatacctctgatccctactctgttcctgttcaaagagcacagatttataattttaattatctaaaacttgtagagatttaaacatctgttttaagtgttcaataagtattagaaaagcaatccatttttctttaagctgagtcataatttacagtttcctgcgacttgcacaactcactgcagccaatgcccaagggggaa

SEQ ID NO: 887666 - DNA, 653 bp, Homo sapiens
catagctaaataaaaggcagcagaaacttctgcagacttcaacgtccctgtctgacagctttgaagagagtagtgcttctcccagcatggagttggagatctgagaatggacagactgcctcctcaagtgggtccctgacccccaagtagcctaaatgggagacacttcccattaggggctgactgacacctcatacagatgggtgcccctctsagatgtaacttccagaggaaggatcaggcagcaacatttgctgttctgcaatgtttgcggttctgcagcctctgctggtgatacccaggaaaacagggtctggagtggacctccagcaaactccaacagacctgcagctgagggtcctgactgttagaaggaaaactaacaaacagaaaagacatccacaccaaaaccccacatgtacatcaccatcaccaaagaccaaaggtaaataaaaccacaaggatggggagaaaccagagcagaaaagctgaaaattctaaaaatcagagtgcctcttctcctccaaaggaacatagcctctcgccagcaacaaagctggacagggaatgactttgatgagttgagacaagaaggcttcagacgatcagtaataacaaacttctccgagctaaaggaggatgttcaaacccat

SEQ ID NO: 887667 - DNA, 646 bp, Homo sapiens
gcgggcgcccctcccccagcctcgctgccaccttgcagtttgatctcagactgctgtgctagcaatgagcgaggctccgtgggcataggaccctccgagccaggtgcgggatataatctcctggtatgccatttgttaaccctgttggaagagcacagtattagggtgggagtgactcgattttcctggtgcygtctgtcacccctttctttgactaggaaagggaattccctgaccccttgcgcttcccaggtgaggtgatgccttgccctgcttcagctcacgcacagtgcgctgcacccactgtccggcacaccccggtgagatgaacccggcatctcagttgtaaatgcagaaatcacccgtcttctgtgttgctcatgctgggagctgtagactggagctgttcctatttggccatcttggctccacccccccccccccccccccccccccccgccatctcatcaatttatacagaaatgtctgctgggagtttgattgggattacattgaatctttggatccatttggggagagttgctatcttagcaatataaacaagatgtatttctccattgaagtatttttactttcagcactgttttctagttatcagtgtacaagtatttcatctcttttgcca

SEQ ID NO: 887668 - DNA, 631 bp, Homo sapiens
acccccttttctctctgggctgggtgaagaagtttcatgcaattcctggtgcatatttctgcatcatccttacctgtgcataagcctatctcccctgagtgtaagctccttgctgggagggattatgcttctccggatcctagccaagggcctggccttttgctaaaaggcttaaagggactttgrgaatggacagacaaccttgcaaggaaggctgagcaagtctgataatatggagagctgaggctcaaagaggttaaatggctgaatggctggtcagtggcactgttgggatggggagcaggtgatcagtcagcgcactttcccctctgtcctgtaagatcttcagcaaaatgttctcttcaggcctcgtctctggtcctgtggctcccttttctccactgaaccctcacatctcttcctcccttcacatattcatggaacaggaaccttaggggaaggctgtcacacacaccagaagtggctagatcatgaggccatctcactctccctctgcatgtgtgtgcatgtatacatataattttttaagttgatactgagcaaaattactataaaaggttttcagagtgggaactttagttttgagtgtcacgaggcatggtataaaggg

SEQ ID NO: 887669 - DNA, 513 bp, Homo sapiens
ttcaaactcctgacagtgtttactattgatgtatatcttctgtatacctaattcattaagctgaaatacaagcatagtggctcatgatttctcagtgtaaataaacatcggtttggtagacagcacagtctgtagcaagagcactgtgccaggagtcagaaggctgttatctccatcttattagctctaacccttgaaattgtcacttaccctcattggccttctggtttctaattctgtaaagcctaccacacagaaatgatgaatgaagagaggaccttagaagaaaggcctttgcaagttgtaacacagggatgataataargtattcttcacgtgcttgagtctttgtggaattccctctacactccactttctcaggctgaatgatgccacagagatacctaagattactatcatgtctcagccttactctgaaggaacttgaggtccagcccccattatggcaattgcaaatcacagagagacaaaaaataccagaaaggtttagag

SEQ ID NO: 887670 - DNA, 618 bp, Homo sapiens
cacaatttacatggcccaccctttgacaatagagattctaagtaacaaactgtcttctttctacttgagatttattttcatgggggaaggatactgcataatatgtagcattcaactaatctattctgttaatttggtartataaaaagatttgtagataatgaatttctatactctttaagatactttatacaccttgcactgcttctgggtttactgttgcctcgttttaaagtgggactttctcttgacggaagtgtgttaagaattggaaaattccctatcagtagactagcaccatcttgacagccttgtgttctgcttctaccttgctaattgtttccttgggattatttggattgtgtagaaagctttttgcaaatcctcttattactgaagtcattgttgccagcaggaataagattaaaggtgcttaagtctgtagggttgtttctaatttgtacgtgtcatttcagtggcattttaacagaactctgtctcctgtacctcccttctcccttggtactatctccagttaggtccaagaagccaggccattggaagaagtctcattttatcctcctaattattatgctggcactcaggagataatttttc

SEQ ID NO: 887671 - DNA, 619 bp, Homo sapiens
ctcagtttcatagtccattgaggctgctataacaaatactttaaactgggtagcttataaacaacaaacatttatttctcacagttctggagactgtgaaatccaaggtccaggcaccagcagatatggtgtctagtgagggccaatttcctggttcataaaatgtgccttctcactgtattcccacatggtggaagtggctaatgagatcactggagcttattttaaaagggcactaatgccagtcatgarggctccaacctcctgacctaatcacttctccaaaggccccaactcctaataccattcccatgagggtaaggatttgaacacacaaactctggaggggaacacaaacattcagaccatagcaggcagtcatggtaaaaaagtaattctcagctctgacataatgattttaatctggaatagagctgagtggtgagttataaagtcaaaacctccagactacaaactcaagaatacacaaaaagaataacctaaatgtttttattcaagagtgacatcatatttaaagactcattaccaaactggcaagcataggtttgattcttgaatcctgtgtctgtaagaacttttaaatggcttcagatcatga

SEQ ID NO: 887672 - DNA, 632 bp, Homo sapiens
tccttaattaagggaaggtgatattataataataaaatatctgatataggaatgggaggttctttttgacactgttccaataagtaatcacttaataatgatagaaaaaattctggttactaaaaataccataaaataaaagtgttctttattttgggaagggcttcaaaatcatcaattgtatttcatattcactccaagttgtaaaaactatcttggaataagtgtatctgtattattacataatttccataaatggaaaaccacctttccccctcctctaagctttaataaaacaagcaaatatacatctcaatggcagattaaggctttttttgtagctaagcctaattaaaatggcaacattccaatggtttctttaccagggagcaaggacatctgcaagggataaaaagatagcaagcattttgatgcatttgtttccagtgtttaaatgtggcracagaaaacagggattgatactggctaagttacaagcaacatttgagttaaatgttttaaaagagtacaggaaatcaaagcagttatataaattgtgattttaggttgttgttttgcctgctatttctgcctgttttcagtagcatagacttccccaaatcgtgtcccag

SEQ ID NO: 887673 - DNA, 607 bp, Homo sapiens
gtagaaaaccagtttgagggtggtggtgtcccctaaatttcagaccagtatatctatagatgtgcaattccagcccaggagagccacagggacacgacccaggcacgttgctgctgcagaggtggggttactgcagggaactgccgtatgggtggagmcacccaagcctagaagacagggccatcatcccagtgggcctggaagacagagccactgctccagagtgcccagacggcacagtttcacgccaaagaagttatttttgacccttaaggttttggacttgctcaggacccattacctcttccttctttcctatttctcctttttggaatggacatgtctatcctatgcctatctcgccattttattttggaagcatataacatgcttgatttcacaagtcaacagctggagagctatttgcttcagaataaagggaaccttgagtctctccatatctgatttagatgatctttagatgatgctctgggttttagacttctgaggtgatgctggaatgtgtaaagacttttgaggctattgggatgaaatgaatgtattttgcatatgagaagggcatgaattgaagctagggaaagaatgc

SEQ ID NO: 887674 - DNA, 575 bp, Homo sapiens
tactggagaactctgttggtttttaatctgtttacagataacagcttttacctttgtgcacacttctaatactagtatcttttaatacaattatctttcatgtcaggcattttttaaagttatatgttgattgtgtagatttccatttcaaaggggaaaagcaacggttagaaacttctgaatggaacataaacaaaaccaagcattttttcatattggtccattacactcccatctcttgcttgatgcttgaagaaaaactcagtcgcacaggcttcatgcatataaagcatttcttatgtggaatatatgaagagaaactcaatagcaaaacttactttcaagactagatgaatgagccacttatttcaaaaaatatataaargatactaccaaggaagtcacagaatttgatttgttctatgagtttactatgtttactcttgattgtatttgaactttaatcctgtcttgctgactttcttccactgtacaccaagagcctcacaaagaaaggaaaattggaaggtttgatgatgtaaaacctgagacatttaacagatatttttaaactt

SEQ ID NO: 887675 - DNA, 646 bp, Homo sapiens
gcatctgacacaggcctaatatccagtatctataaagaacttaaacaaatttacaagaaaaaacaacccattaaaaagtggcaaaggacataagcagatacttttcaaaagaagacatacatgtggccaacaaacatgaaaagaagctcaacatcactgatcattagagaaatgcaaattaaaaccacaatgagatgccatctcacagcagtcagaatggctattcttaaaaagtcaaaaaaataaaagatgytgacaaggttgtggcgataaaggaatgcttatacactgttgatgggagtgtaaattcattcagccattgtggaagatagtgtggtggttcctgaaagacctaaagacagaaatagcatttgacccagtaatcccattactgggtatatacccaaaagaatacaaatcattcttttataaagaaacatgcatgcatgaatgttcattgcagcactattcacaatagcaaagacatggaatcaatctaaatgatcgtcaatgatagactgcataaagaaaatgttgtacatatataccatggaatactatgcagccataaaaaagaatgagatcatgtcctctgcagaggcacagatgaatctggaggccattatcctcagcaaactcatatagg

SEQ ID NO: 887676 - DNA, 615 bp, Homo sapiens
aaagccgagagaacacaacaggatactctaggagaaaatctccaaatgagcttgctctccccaataccttcatgccatgatttttcttatttgaaaacagtttttcttaagcaaagatgctgcatctttgaatgagatttaggctaatgcctacatatcatattattatatatatgcaaagcagtgcctggaacattgcaataaatgtcacataacatctttattacattcaccctgagggaaactaggtagaactgcaaatatcttgattaaaacacttatatttaaggactctacttactctttttgatatgtacactttcatagatagataaggaatgcttggctttttcatctcaaataaagcaaaagtgagttataactgtatttcactgtgggcctgggctgtgatttccaccccagggaaagaaggagagagagrgagagagagagcgagagagagagagacagagacagagagagagagagagagagagacagagagagagagaagcagaaagagagagagagagagagagagagagagtatagggagacagggataggaggaatagagaaagagaaaggggggaaatattcttatccctctacaga

SEQ ID NO: 887677 - DNA, 658 bp, Homo sapiens
atgaacttccctcttagcactgcttttgctgcatcccataggtttgatttgttgtgttttgatttttaattgttttaagaattttttttatttcatccttgaccgagtggtcattcagtagcacgttgtttaatttctatgtgtttgtatggtttcaaaagttcctcttgttattgatttatggttttattttgatgtggtctgagaaaatacttgatatgatttcatttttaaataattagttgagacttgttttgtgtcctaatgtatagtgtattctgctgagtgttccatgtgcttatgagaagaacatttattctgtaactgttggatgaaatgttttgaaatatctgttaggtccatgtggtctaatatgcactttaaatccaatgtttctttgcaaattttctatctagaggctaattctgagagtgggatgttgaagttcctaattattattatacygaagtctttctcactatttaggtctaatagtattttctttatatacctgggtgctccagtgttgggtggaaatatatttagaattgttatattctcttgtggaattgatctctttatcattttataatgatgacctttttttttctttttactgttttgacttaaaatctgttttatctaagtatagctactc

SEQ ID NO: 887678 - DNA, 653 bp, Homo sapiens
tgctaatgaagtgtggagggagggaaagtgttctgtgatcctatgattaggttttattttgtatatgagtcggtttccccagtctgtaaccttcacaagtgcttctactccattgcccctcatgtgagacaggaagtctagaggtgtttgaagttaggcattcctcttcaccagtgtcaaagacacagggtgctagagttggatattttcctgcccccaagtgagttaggctctcataaatcacagatgagataatctctggcaaagtagtttctttttaatttgatttttattattaatatctgctgggaaaycgatcacaacttgttcaaattgttcctaaaatcagagcaagcagatattgggtgacagcttcaaaaactgtcttctgaattatgaatgtaaacttaataacataaactttgagacatttattaattatctttcagggttttggcatttggtggatgagattgccaacctaatgtcttataggcaaatgaggtttaatcttgttgtcctaatttttcatgcattacttattaaaattaagctccaaacaaatataaatatagttcagcattagtagggaatccagcgatatgtctcctgtaaatgttactaacggttgttagctgtatttgtaagtttac

SEQ ID NO: 887679 - DNA, 629 bp, Homo sapiens
aaaggctttttaactctgacttaaaatcagaggcaataaaagagaagattgataaatttaacacataaaacattaaaaaaattttatgctcaaactactataaatgaagtcaaaagacaactgacaaagtgcaaggaaatattcacaacatctagggaaaaggctgatatctctaatacataaaggaaaaaggctgatatccctaatacataaaaaactcttaaaaatgaagaggcaaaagatcaaaaagtctaaagaaatcttctcaccacaaagaaatgataaatgcatgaggtgatggataaagtagctactctgattggatcattatactacatagatatgtattgaaatatcaaattttaacccataatcatgtacaatcataatgtaccaattaaaaaataataatttttaaaaatgaggaacatatctatgaatttatttggagtaatttctagaatattctgttatgaaaaaatarcaaagtgcaaaagaatgtctccagggcacttctttcatatgagaaagaaggagatattagaaagtacttttgtgttctgctcatttgtgagaaaaacatatacaggagttaataggtaagactctgaagaaattagttatgtaca

SEQ ID NO: 887680 - DNA, 595 bp, Homo sapiens
ctttgttctttttgcttaggattgcgtaggctatttggtttttttttttggttccatatgaattttaaaatagttttttttctagttctgtgaagaatgtccatggtagtttaataggaatagcattgaatctacaaattgctttgggcagtagggccattttcacsatattgattcttcctatccatgagcatggaatatttttctatttgtgttctctttgatttctttgagcagtggtttgtagttctccttgtagagatatttcaccttcctagttagctgtactcctaggtattttatactttttgcagcaattgtggataggattgcattcttgatttggctctcagcttgactgttgttggtgtataggaatgctagtgattgttgcacactgattttgtgtcctgagatttgctgaagttgtttataagcttaagaagcttttgggctgatactatgggttttcctagaatatatctagttaatttgtttacttgttgactattcattgcatttcactaggatataagcttcatgaatatagacatcttgtatatctataccccatacctagaactgtagggtgcct

SEQ ID NO: 887681 - DNA, 601 bp, Homo sapiens
tatactttttgcagcaattgtggataggattgcattcttgatttggctctcagcttgactgttgttggtgtataggaatgctagtgattgttgcacactgattttgtgtcctgagatttgctgaagttgtttataagcttaagaagcttttgggctgatactatgggttttcctagaatatatctagttaatttgtttacttgttgactattcattgcatttcactaggatataagcttcatgaatatagacatcttgtatatctataccccatacctagaactgtagggtgcctgaaacatagtagatrtgcctgaaactgtgtgtgtagatgctcaataatgatttgttgaatcaattcaatgcattgtagtacagggaagaatctagcatttaccccctttttatgagggagacctcttgaaatcataactttagtatctagaaatcagaaaaccatcaattaaagtagctatgctaatctggaaaagaagtgcttcattttcttaaagtttttatatgttctgacgcactctcagatattaaaatgcccttctttcatgttccttggaaggactatctacacctagggagagctacg

SEQ ID NO: 887682 - DNA, 598 bp, Homo sapiens
tttctgctgttgacccttatgcaaatgagcacatttacctaactttaatctctcagttctgttcctctcctactgatttccagactaagaatgccttcaaataaccaagtatataattgtctgattctggaaacaaaatctttctgtagtaatccattactctaatattattttcctacttagactttgactccatcatatctttctttcctttgcagtcaattctttttgataaaggtccttgataccaccttatacctattttctgctcttctttttgatttttaattcactttatgtgttctggttcttttayctgattccaaaatgttagctttttgccagatttttattctttcacatagtttctgtccatggtgtttttttcttcttgtaataatcacttaattttcataaattatcatttattccctgatgacatatatttgtatgatcagtctagatagctgttctgagctcttagtctataaatttttctgcttcatagacatggatatctatgaaatatcaacttggaggtcccagaaagatctcatatctaacatgcctatagcagactcattatctccccaaattt

SEQ ID NO: 887683 - DNA, 614 bp, Homo sapiens
tcagtcaacccggttgggaagaagaaagaagtgagaggggagggaatataaagaggatagattctgtgccatgtttgttgagcagaactcagagaaacctagaggataaagactagaaagtccttgaggctagattacatcgtagagtccagggagtcaggaagatccctaaaagtaatgatccatgctgtccatctagacatgggagtccaaagataaactcactgaaacctatttaccttccctatggcatgaggtatcagcaatttcccaaagagtccaggaggactggaatgaaggcagtctcatttgagacccctctaggcagatgagacaatggacatataagmagaccaatgacccagggttgagaatattgcacttccttttgatgataacgatcctctggaattgaggtaaaaaaagaaccgaagtttctgtcataccaatgcaataggaattagacatttttaaaaaatggaagaaaaaaaagaaagctctgtttccagcacaaaaaaattagtgacatatgtgtcataccttatgtagtagagactgctttagatttacataaacattatttacacaaaacctatcaattattgcttaatttg

SEQ ID NO: 887684 - DNA, 582 bp, Homo sapiens
taaataatgtattttacctaaacgtaaatcattttattttgtaaattttatttatttatttattttatttattttgagatggagtctcaccctgtagcactggccagagtgcagtggcaccatcttgactcactgaaacctctgccacccaggttcaagcgatcctcccactcagcctcccaagcagctggaattacaggctcctgccaccatgcctagctaatttttgtattttttagtagaaatggtgtttcaccatgttggtcaggctggtctcraattcctgacctcaagtgatcctcctgccttgaactcccaaagtgctgaaattacagtcatgagccaccgcacccggccaacataaacataaatcattttaaagtgctatgtacttccattgacatagttagaatagcagaatactgaatttcttttgttatggagtacttaaagtatgctaataaacaacatctagtccaatgtattgtcaaaatatctactgtcttttgtttcaatgatgtaagattggacacagttaaatttaaaaatacttgatttttttactattattttaacttttaa

SEQ ID NO: 887685 - DNA, 542 bp, Homo sapiens
ctctctttcattatggtcctccttcatgagttatagagtaacagcactgctaaagctcttacttgtgaatctgaatttttaacagttatatagatagctattagaaaaattagatgtggaataatatttaatttgcctgttgaacttctgaacaaattttaacatgtcacaatagtcccttgcataytttaggatttctaaaaatatttccttttagttttattacaggtatcatgcacatagttaaatttatatgatgtaatagatttgtcagcttacattgaatgaaaaaacggttattatttcataaaactgatattcaagggaaatgaaataaaaaatacagcacttatttatttgctactcagcttaaatatgatagtgttagttttgatagtcattaaaattcaagcctgaatttagagtatttattttccataaaataacttatatgcaaatggaagaattattcctttaaatacaaaaacaattcttataataggcatgagaaaatttaaaaaaaactaaaacatgtaaataca

SEQ ID NO: 887686 - DNA, 608 bp, Homo sapiens
ttgcagctgggagctctctgccagcagagttctttgctcgtcatctctcagcgctcacccacattccccttgattcacaccgtattgtttgtttacatgtttgtctccctgactcaggttggaaatctttaaggacaaggacaacctcttgttcctttttacatttcccatggtgctttgctcgcagtggccactacagacatgattcattcattgttttaaaaaaagtgttaactagttaagtgaaaataaaatgaaacagcaaaatgagacaaacgcctagatctgaaaggctacaaaatacagcagagggttcagtggacataagaggaaaggaacacaatgatatccccaatcttgtgatggaatagaaaaaaaaaaagtgattggtgttgatgtracacttttcttggccagttgaacattccagagtagaggtcagttttgtagttaaatctggtaggaagatgtttccaaccagaaggaatcatactaaaattattttatcacaacaagcagtccataaccgaaactttaatttgtgagttgggaatcaggataggaaacccaattttatattctttttataggaagaagaatccattcca

SEQ ID NO: 887687 - DNA, 597 bp, Homo sapiens
ccccaccccgccccaccaacttgatgcagtgtcattgccaagattcttaatatgcatgttcctctctcttgctacacgtttttttttaaccattccagctgcctgatcagctacttccactaaaaccatctctggccctyggaaccccctgttcattcattctttaaccttttcctcatccattggtctctccttatttctctccatatgtaccttagattccttggttcctcaacattaggtcttaccaaatcatctccccgtccctcggcaaatttgtcaaaaccccaactctggacgaactcaacaatacattttctctgtacctgtacccaggtatcccaggaggtcagagaaaaccacacaatagggcagataagaatcctgataaactcataagataccagccttgaatgggggctccatcctgccgagcaatcctaccgtatttccctggccaggatgttctcctgtgctcttaatgactattttgaactttctttactattttggaaattctaaagcctcatcaatacctgtcttttcagaagagaaccctgattcttttctaagaaaattaaagcatttagactagaa

SEQ ID NO: 887688 - DNA, 647 bp, Homo sapiens
ctctttctcttcctcctttcgtttccatgtcctgaggatttcaactcttaaatatatggaatatctcttacatacatccacttttatcaactcctgtccgtctgtcagaggcgtttgaaccagagctactccgtcttgaataggggctgggtaaaataaggctgagacctactgggctgcattcccagatggttaaggcattcttaatcataggatgaaataaggggtcagcacaagatacaggtcatggagaccttactgataaaatagattgcagtaaatgagctggccaaatcccatcaaaaccaagatggcaatgatagtgacctctggtcgtcctcactgctacactcccaccagcgccatgatcatttacaaatgccatggcaacatyaggaagttaccctatatggtctaaaaagggaggcatgaataatccacccgttgtttagagtatcatcaagaaataaccataaaaatgggcatccagcagcccttggggctgctttacctgtggagtagccattcttttactccattactttcttaataaacttgctttcactttactctgtggactcgcccccgaattctttcttgcgtggggtccaagagccctctcttggggtttggtcaggacccctttc

SEQ ID NO: 887689 - DNA, 647 bp, Homo sapiens
ctctttctcttcctcctttcgtttccatgtcctgaggatttcaactcttaaatatatggaatatctcttacatacatccacttttatcaactcctgtccgtctgtcagaggcgtttgaaccagagctactccgtcttgaataggggctgggtaaaataaggctgagacctactgggctgcattcccagatggttaaggcattcttaatcataggatgaaataaggggtcagcacaagatacaggtcatggagaccttactgataaaatagattgcagtaaatgagctggccaaatcccatcaaaaccaagatggcaatgatagtgacctctggtcgtcctcactgctacactcccaccagcgccatgatcatttacaaatgccatggcaacattaggaagttaccctatatggtctaaaaagggaggcatgaataatccacccgttgtttagagtatcatcaagaaataaccataaaaatgggcatccagcagccctyggggctgctttacctgtggagtagccattcttttactccattactttcttaataaacttgctttcactttactctgtggactcgcccccgaattctttcttgcgtggggtccaagagccctctcttggggtttggtcaggacccctttc

SEQ ID NO: 887690 - DNA, 656 bp, Homo sapiens
ttctgcttctagttttctctttgaaagcaaaaactagaagcctcggagctcaaattgttctgaaaggcagagagtcccaagtgtgagggccaggggtgcacgtggcctcctgtgttcctctgtcagcaggtttggaccagaaggaagaccaaggtgtggatagccatgcagttgtgtctgcttgtctcatcatctcactttcatgggaagctctttaatcttggagttcagcactctccggtcatgtggtgaaagtgggttggagcaaagatgaattagaggagtgctgcttctattgaggataggaggcatgagtttaaggggcaagttccattcttccctgaagcagcaacctmcaccaaggtagagatgaccacctgtctctggttcttcttggccccactgtttggactcttggctacttaagaagatgatttctcccagatgaaattcttgttggcatttagttgtattaaaagtcatttttggtgctagtggatgaagccttttcctttaaaaataatagccaggttagtccaattgtgagagttctaaagttattttgagtcttctgtaatgactttacaataaatagtttaaataaaggtaaaggactctgaaaagaatactcaaattgaatgaatttttttatgacg

SEQ ID NO: 887691 - DNA, 622 bp, Homo sapiens
acttttaagtttaaaattaagtttttctccatcattccttctaacaaacatctcattctcctgactcaaaaagtaaaattctctcttccttttctaaactttcctccctatgtaaattacccaggctcaaaattgtagaggtaaattcaatttctaatacttttataagtctgctgctttarctaacttttttcctttctgttttcactggcataggtccagaccaggccttcatttttatttaaaatcatctaagaaactcttcttttgttttcttcaacttaacatatgtttccaaatttttcaaatcaatcatcttatagaggcagttcctgtaaatcgatttccttgctcagagactttcaataactctctgtttatccaaagtaaagtagaatccacatttcttatttctgattaatactggaaaagtaagtcaaaacttgtcctaccaataatgggctttgtggaaggaaaacataaaacaaaataattatgtcaagcctttcattaaaacattgcaatgtgaaagaacagctttaaaatgtgtgttctgcagggagaatacagattggtgaaggtcaatcatagttctggttattcctagaattgaatactgttc

SEQ ID NO: 887692 - DNA, 614 bp, Homo sapiens
attctgcgtccattcatggttataactcaataaaataagatattggctattaaaatttgcatctggatagtaaatctagaatataaatcttcaatgtaaactctgtaagttttattccttctttgcaattgttcctcttgccatttaagytgatttaagggcttacttaaataaacattgttttaagaaaagccaaggacagtctataaaataagttaattaaaagtactattaatgtttgtaattcaatgatataaacatcatttttcaaagtgcaatttcaatgtgtaagatccagcttttgataaaagagaaatggatttgcgagttctaagtgataaaggcaattttataatgaggttttggatttcaaatgaggatgagacagcttggacatagtaagcaaagcccatggaagagaacatggacatcaagagtctataccagtacacagtacccaaataccagggacaatgtctttctccattgcgtccagattaaacagagcaaaagagtgacggatctctgaataaaaaagatattcaactccaaaactgatataactgaattttgtcttgaaaaagtcacacatcgacttggcacattgacatttt

SEQ ID NO: 887693 - DNA, 592 bp, Homo sapiens
cctatctattaaggataacaattaattgagttttcttttacttgtagctgtaccaatatgcaaacatatattaaaacatcttaaatcatgtgccactggtaacatcttagataatatcattttaaaacaatgctaagtaccatattttgaaatgaaattaaagaggttatcaaaagaaaaataaagaacatgttaatctttcaaatgttgatacatttaaaatatcagagcaaggtgttataacaaataattttacaaaatgtrtttcttagtcatgttgagctcagtgtgttgtttcttattttaatacttctagcagcagtaacaacaacaaggtgaatggcattgctgagtggatatatatggttctacattgatagctcaataattttgaagataatgggcaatgtgaaacttagaaagtaaactgttttatagttgaaatttaatgtttcttgtatattatatgtaatgaactttgcagaaaatgatactttttgggaaatattaacttaatctgatagtttttgtgtatatgagatttgttaccaagattacctctgaagccatcaagatttctcaggaaagacac

SEQ ID NO: 887694 - DNA, 575 bp, Homo sapiens
atcagtgttttaaaattctgaatatgaatgaaaacatgcagtatttttctttctgtgcctggcatatttcatttacaataatgtcctccaggatcatgtatgttgttacaaataacaggacttcattctttttcatggctgaagagtatttcattgtttatgtatactacatattttttattcattcatctcttaagtaaagtaagccagacagtaggggagaggggataggaaagattgattgatgggtgcaaaattacawgtagaaaggaagaataaatttggtgtcctattgcacagtacggtgactgtagtaaacagtaaggtattgtatattcaaaagagctagaggagaaaattttgaatgtttgcaccacaaagaaatgatgaatgtttgaggtgatctctatgctaattatccttattcgttcattacaaacgaatgaacaaatgtgctgtaatacaatgtattatgtagtataatgatacaatgtattcatgtatcaaaacaacacaacaaaacaacacataaatatatcaattatgtgtaaatgaaaaataaaattaatagaaaa

SEQ ID NO: 887695 - DNA, 575 bp, Homo sapiens
atcagtgttttaaaattctgaatatgaatgaaaacatgcagtatttttctttctgtgcctggcatatttcatttacaataatgtcctccaggatcatgtatgttgttacaaataacaggacttcattctttttcatggctgaagagtatttcattgtttatgtatactacatattttttattcattcatctcttaagtaaagtaagccagacagtaggggagaggggataggaaagattgattgatgggtgcaaaattacatktagaaaggaagaataaatttggtgtcctattgcacagtacggtgactgtagtaaacagtaaggtattgtatattcaaaagagctagaggagaaaattttgaatgtttgcaccacaaagaaatgatgaatgtttgaggtgatctctatgctaattatccttattcgttcattacaaacgaatgaacaaatgtgctgtaatacaatgtattatgtagtataatgatacaatgtattcatgtatcaaaacaacacaacaaaacaacacataaatatatcaattatgtgtaaatgaaaaataaaattaatagaaaa

SEQ ID NO: 887696 - DNA, 624 bp, Homo sapiens
attaataacaagatattgtgcacttaaaattttttaagagagattttaagtgctttcttcatgaaaaagataactatgtgaagtaatgcatatgttaattagcttgatttacccatttcaaaatgtatgcatatatcaaaacattatgttatacaacataaatatacacaatttttatgtgttaattttaaaaattagttcattatttcctgcaaycattacatatttgaaacacaaaatttcaaccaaaactgctaggtgaaaaagaaataatgaccgttaataataaaatagtattgttatctttttagtgtcctacaaattggggacataggaaagggaagaattttttttaatgagctaccgaattaaataattcattcattattttattgttttgtctattaacctatttacacccttaggtgtacataccatcaacaaaattatattcataccgaattataacatgaacattactaaactcttaacctctgcaatcttcttcttggaaataaatgtggaaaatcacttagctcatttagacggaaaaatctattgtaaaaaatatttgtaaacattaaaaatagaatacaaaattaaggaccactttgaataacagcc

SEQ ID NO: 887697 - DNA, 507 bp, Homo sapiens
cattgttcctggacaagatctctactgttatttctaagttcacaataccattcagactgtcgcatagacctgtagcttaaattaaatttgaccactgcataaacattttcttgaccacttatagtagttttgaaaaattctacttacttgtatattaaatatcttgataacatctgaaaatatgacgttagtgattctttttaggttatttattacattgaagatgagccaagccaaaatgtgttcttttggaattagctttcaaacaaatgtacttcataatgtaatctccaaagaatgaaactcttttagacacagatattaaaaraagtttcaggtgattttaatgaaataaatttggtggtcatccccgcatcagttttaacaaccataagagccagacttacagatagctgacatttcttctccttgtcaaagggaaggaagaccctgtattttaaaacagatctgtcttgcagtttactctcagctactttttgcagcctc

SEQ ID NO: 887698 - DNA, 618 bp, Homo sapiens
cagagagtcagggagtggttgtctgtgacttcccatttcctggacatccatctgtccttactacatagaaactggcttctgtgaaatttatcatctgtagcctttcaacaagccccactgtttcttgaactaaactgagtatgtttatcttttttgcaactgaaataatgcagataacatgtattgtatttattgagcacttaaaatatgttaggcattgtggtaagtgctttccatggactgttttgtttaaacctcatagcaattccatgaggtaatttctgttcattctcaatttttgtgcctgagaaaaatgaggcttggaaaagcctcactgttagcaggtagcagagcataatttgaacctgaactctaaagtcttgctccacattgatgatctttaccaccactgaagtcagkcatgagcttgcagacctatggtaggatgaggccaggcaaggctggggcctgagaccaggctgactcattaaaatgaggtaggtactgaggaacaacacacagtgatatgtcctggcaagaagcccagttggaggcaggaactcgatgtctggggccacacaggtaggctgttgagcgtatctaacctgcagagttggg

SEQ ID NO: 887699 - DNA, 643 bp, Homo sapiens
ctgatattcctcttcttgttacttatgcaagtttctgcaactggcctgaatttctccccagaaagtaagtttttcttttctaccacaggatcaggctgcaaattttctaaacttttatgctctgcttcccttttaaatagaagttccagtttcagataatctttttgtgaatgcatatgactgtatgctttcagaaaaagccaggtcacctcttgaatgctttgctgcttggaaatttcttctgccagataccctaaatcatctaagttcaaagttccacagatctctarggcaggggcaaaatgctgccagtttctttgctaaaccatagcaagagcgacctttactccagttcccaataagttcctcatcttcatctgaaaccacctcagcctggacttcattgtctatatcactatcagcattttggtcaaattcattcaacaagtctctaggaagttccaaactttcccacatcttcttatcttcctctgagccctccaaactgttccagttctgcctgttacccagttccaaagttgcttccacatttttaggtatctttacagcaataccccactatcccagtaccaattttttgtattagtctgttttcacactgctataaagaatacctgagact

SEQ ID NO: 887700 - DNA, 458 bp, Homo sapiens
aggggcaaaatgctgccagtttctttgctaaaccatagcaagagcgacctttactccagttcccaataagttcctcatcttcatctgaaaccacctcagcctggacttcattgtctatatcactatcagcattttggtcaaattcattcaacaagtctctaggaagttccaaactttcccacatmttcttatcttcctctgagccctccaaactgttccagttctgcctgttacccagttccaaagttgcttccacatttttaggtatctttacagcaataccccactatcccagtaccaattttttgtattagtctgttttcacactgctataaagaatacctgagactgggtatttataaaggaaagaggtttaattgactcacagttccacattctggggagacctcaggaaacttacaatcatggtggaaggcaaaggggaagcaaggcacatc

SEQ ID NO: 887701 - DNA, 574 bp, Homo sapiens
accttcacatcccagtgctgagaacaacgctgggcacatgctggggcttcaatatggaagaaagagcaaaaagagggtttgtgagaacatttcatatgtgggagtattcattagtgtatccattgtgaaaactaatctggtcatgtctattaaataaaatcatgtgccctaagatccagcaatatcatttctgagaaactataggccagaaataaaattaccrgtatgaaagaatttgtatacagaaatgctaatagcagcattgttggagggtggtcaagaaataaggacagtctaaatgtctatcaaagacatttgatagataagcagacaggttctaaagctcaggctctggaacctgtctgcttggatttaatctgggtcccaccacttactaactacagtatgtgacgtgggtaggttatttagactaccagcgattcagtttgctcatctgcgtattgatgatgacaataatatctacttcatatgtttatgataaaaagtaaaggaaatcattcaggtagggtgcttagaacaatgtcttgctctcgataaatattctcattagtgg

SEQ ID NO: 887702 - DNA, 574 bp, Homo sapiens
accttcacatcccagtgctgagaacaacgctgggcacatgctggggcttcaatatggaagaaagagcaaaaagagggtttgtgagaacatttcatatgtgggagtattcattagtgtatccattgtgaaaactaatctggtcatgtctattaaataaaatcatgtgccctaagatccagcaatatcatttctgagaaactataggccagaaataaaattaccggtatgaaagaatttgtatacagaaatgctaatagcagcattgttggagggtggtcaagaaataaggacagtctaaatgtctatcaaagacatttgatagataagcagacaggttctaaagctcaggctctggaacctgtctgcttggatttaatctgggtcccaccacttactaactacagtatgtgacgtgggtaggttatttagactaccagygattcagtttgctcatctgcgtattgatgatgacaataatatctacttcatatgtttatgataaaaagtaaaggaaatcattcaggtagggtgcttagaacaatgtcttgctctcgataaatattctcattagtgg

SEQ ID NO: 887703 - DNA, 618 bp, Homo sapiens
gtctgtgagggtattgccaaaggagattaacatttgaatcagtgggctgggaaaggcagacccactgttaatcagggtgggcccaatctaatcagatgccagcatggctagaatataaacaggtagaaaactgtgaaaagagagactggcctagcctcccagcctacatctttctcccatgctgggtgcttcttgcccttgaacatcggactccaagttcttcagtttcggaacccagactgtctctccttgctcctcagcctgcagacaacctattgtgggaccttgtgatcctgtgagttaatacttaataaactcatatatatatatatatatatatacacacacacacacacacatatatatacatatatacatatatttatattccatcagttctgtccctctagagaaccctgactaatacacagaccatwgcaatgactatgtgattttcctgacatatgaatataatgaatatgttaatagataatagagtccctgatactaaaacatcattgttttcatacatataaaaatgtataaatgtacttatatatatcatattagtctgttcatatgctgcttcattctttttataaatattttggttaggat

SEQ ID NO: 887704 - DNA, 647 bp, Homo sapiens
gattagtctttttgatttgctgctgaacttggtttgctagtattttgttgaagatttttccatcaatgttcatcaaggatactggcctaaagttttgtttgttgtgtctctgccaggttttggtatcaggatgatgctggcctcatagaatgagttggggaggagtcccttctcctcaattttttgaaacagtttcactagaaatgatrccagctcttctttgtacatgtggtagaatttggctgtaaatccatctggtcctgggcttttttttagttggaaggctattactgattcaatttcaaaactccattattggtctattcagggaatcaatttcttcctagctcagtcttgggacagtgtatatgtctaggaacttatccatcttttcaaggttttctagttttttttgcacagaggtgttcatagtagtctctagtggttgtttgtatttctgtggggtcaatggtaacatcccctttgttatttataattgtgtttatttggatcttctctctagtcttctttatttagctaacagcatatcttctttttttttttttttttttttttttttcaaaaaaccaactcctggattcattgatctttgtgatggtttcttgtgtctttacctgcttcattca

SEQ ID NO: 887705 - DNA, 587 bp, Homo sapiens
cctgacaatttgatttagagtgggggctggaaacaccaggtagccttattaggctactgattgagttaataataacaatgtcattagggtggggactttgggtcatatggtatcgattgacctctggagagacaggagactaagatcagctatatgagcaatcagtcatgcctataggatgaagccccaataaaaactctggacatcaggtaaacctccctgactggcagtattccatgcatagtcactcattgacactagtgaaataatgctgtcctgagtcaaccacaggggacaactggaagctccctctttgatgtactcctatacattccctatgtgtctcttcctttggctgattttaatctgtttcttttcccttccaaaaactataactgtgagcataacagcttttagtgagttctgtgagcccttttcacaagttatcaaacctgaagtggttttgggaatcccctgaatttgcaactggtatcagaaataaggctggccttgtgtgcactgatcyctctaacttcacagttaacttacacaatggatgaccctactttactagacaaagcaagctg

SEQ ID NO: 887706 - DNA, 562 bp, Homo sapiens
agttatttcactttcataagtggcttattctgactcagtagcctcaggacctctggctaataaagtgaagtaggttgtcttaacttcgttgtcaaatgaagggagaatgaatccactggctttatttctgaaagtttgaatattttcttatagaactaacattaaatattacttccaaaaatgcaaacactttggtctttctagtcattgtaattattgtctagataattacaataatccaaacaataaccattacggatttggtgagctcttaaaatacccatgtcccagatttctgtcacggttattascagtctctgcttattaaggtaatgagaaatgtttcaaatgaagatgaaattgaatttggatggaggttgtgttgagggattttaacagttgaaacaggagcatgctaaaaagttacttctgaagaccaaggatagactgtttagttccagtctttagctttatacatgactcaacgccagtagaattgatgctgtatcttgaatcagcttttggaatgattgttttttgatcttaagaaacatagtactca

SEQ ID NO: 887707 - DNA, 607 bp, Homo sapiens
gacctccagttccatccatgttgttgcaaataacaggatttcattatttttttatggctcaatagtactccattgtatgtatatactactttttatctattcatctgctgatggacacttaggttgcttttaaatcttggctattatgagttgtgctccaataaacataggaatgcagatatctctccaatatactgattttctttctcttsagtatataactaggagtagaattgctggatcatatgttagctctatttttagttttctgaggaaatgccaaactatactccatagtagttttaataaaacatacatttgcaccaatactgttcaagggttctcttttctccacatcctcaccagcatttgttattgcctgacttttggataaactttaactggggtgagatttggtctcattatagttttgattttcatttctctgatcaatgatgttgagtacttttccatgtacccgtttgccatttgcatgtcttcatttcagaaatgtctattcacatcttttgcccatttttaatcagattattagattttttcctatagaattgtttgaactctttatgtattctggttattaatccct

SEQ ID NO: 887708 - DNA, 607 bp, Homo sapiens
gacctccagttccatccatgttgttgcaaataacaggatttcattatttttttatggctcaatagtactccattgtatgtatatactactttttatctattcatctgctgatggacacttaggttgcttttaaatcttggctattatgagttgtgctccaataaacataggaatgcagatatctctccaatatactgattttctttctcttcagtatataactaggagtagaattgctggatcatatgttagctctatttttagttttctgaggaaatgccaaactatactccatagtagttttaataaaacatacatttgcaccaatactgttcaagggttctcttttctccacatcctcaccagcatttgttattgcctgacttttggataaactttaactggggtgagatttggtctcattatagttttgattttcatttctctgatcaatgatrttgagtacttttccatgtacccgtttgccatttgcatgtcttcatttcagaaatgtctattcacatcttttgcccatttttaatcagattattagattttttcctatagaattgtttgaactctttatgtattctggttattaatccct

SEQ ID NO: 887709 - DNA, 492 bp, Homo sapiens
gttagatatttattgttgtcttcacagtctgtgcctgtttgtgcttgtcctccctgggaaggctttccgaatattcacagggatttgggtgttgtgatctaagtctttgatcattgcattatatgtacatttggtggctcctcaagcccagtaatgctgtggctcttgcatactcatataaataccatcttggtggtgttggataagatcctgaagaattccatggattaccagacagaggctctcgttctcttcccttactttcccccaaacaaacaaagtctctttctgtgctgagctgcctggagctaggagaggggtaacacaagtgcccctgtggccaccaccactaggrctgtgctgggtcagccctgaagcctgtacagcactgattctcacccaagacccatcataactactgcctatattctctcaaggccctagggctctacaatcagcaggttgcaaagccagccaggtttctgttcttcc

SEQ ID NO: 887710 - DNA, 642 bp, Homo sapiens
taaaatcagtttctctcctcactgagctcttctttcagcctggtttgaaaatccagtagagagctccaggtcacaatcaagccccggggtacatgataattatgcatagcttattccagttactctctatcagtatagtaaccatgacaagaaaaataatttaaaaagaatccagctggccaggtgcagtggctcatgcctgtaatcccagcactgtgggagactgaggctggcagactgcttgagcccagaagtttgagaccagcctgggcaacatagtgaaacctcttctctatgaaaaactacaaaaattaactgggtgtcrtggtgtgcatctgtagtcccagctactcaggaggctgagaggtgggaggatcgcttgagcccaggaggtcaaggctggagtaaactgaccacacaactgcactccagcctgggcaacagcgtgagaccctgtctcaaaaaaaaatctagcaataaaagaactgaacttttctgaactaaacagcggcttttcccttgagctaatgtgataaattgcctctttattttgataatttttatagaatatatcctagaaggcatatttttatcaagtaaaggtataatacaaaaataaaaattttcttgagtgtgctaata

SEQ ID NO: 887711 - DNA, 643 bp, Homo sapiens
ctattgagttttgtggctcaccaaaaggaggttgtagtggtcccttaaattttatttaactgttggatcctttcttttttgtgcctatcatggaacctagtatttcgtgcaatacttatcaggaccattaatatgctaaggaactttgaaatgcattttttatatrcttccctagataagcaaaattgccttcaagcaatgccttatgccttttacagggcactctgtccaaatatattaataaagtgattcattttgtggaaatcacaaactcatatatacatatatatatattttttttttgagatggagtctcactctgttgcccaggttggagtgcagtggagtgatctcggctcactgcaacctccacctcccaggttcaagtgattcttctgcctcagaacccaagtagctgggattacaggtgtgtgccaccacgcccggctgctttttgtatttttggtagagatggggtttctccctgttggccaggctggtgtctaactcctgacctcaagtgatctgcccacctcggcctcccaaagtgttgggattagccaccgtgccgggcctcatattctgataataatagaaaagtacttgggaacacaggagggaagagtgggagaaaccttttaaa

SEQ ID NO: 887712 - DNA, 633 bp, Homo sapiens
gaaaccatcgctgcaatcaaaataatgaatatatccatctctcccaaaggttttcttctgcacttttataaataacccctgcgccatcaccaggcaaacactgatttatttcgttactatcagttttcattttctagaattttaaacaagtagatctgtacaaatgtatttttttgttttgtctggcttcttccactcaacataattgagattcacctttgttgctgtgtgtaaggataattgatttctttttattgatgagtagtattccactggatatatacatatattatatatatatayacacacacacacacacacacacacacactaaaatttacttttccatctattaatggatatcagaagtgtttctagttttttgctcatacacataaagctgctataaacatttgtgaccaagactttgtgtgaacctgtgcttgggtaagtaccaaggagtaggatggctaagtcatatggtaggcatagaattttttttttaatgaaccatttttctatcctgtccctgtgtgtggtagatgctcactctctcattctttctagatagctttatcagattaaggaggttcccttttttttaaattatactttaacttctgggacacatgt

SEQ ID NO: 887713 - DNA, 631 bp, Homo sapiens
tgttctcgtgtttatctgctgaccttctctccactattatcctatgaccctgccacatccccctctctgagaaacacccaagaatgatcaataaatacttaaaaaaaaaaagaaaaagaaaaagaaaaaatagtctagccaaatgagaaggaaccaaaaaagtaattttggcaatgtggcaaaatagggttctataacaccctcaaaaattcacactaactctccaagaatggatccaaaccaagagaaatcattgaaaaaccagataaaaaattcaaaaggttgattgttaagctactaaaggagatacgaaagaaatgtaaaaaccaayctgaagaaatgttaaaaaaaatcagaatatgaatgaaaaattttctaaaagatggatattttaaagaaaaaacaatcagaacttttgcaaatgaattacacatttagggaattacaaaatgtagtggaaagttttaagaatacactagacctggtagaagaatgaatttcacagttcaaagacaaggcttttgaattaactcagacaatttttttaaatatcaaaataaatgaacaaagtctccaaaaaacatgggattgtgtaaaagggctaaatctaaaaaggaatggtgttcctgag

SEQ ID NO: 887714 - DNA, 665 bp, Homo sapiens
ttaataaattgaaatcatacccagtaacttttcagaacacagtggaataaaactagcaatccactctgaaaggaaccctcaaaactatacaaatacatgaaaattaaacaatctgctcctgactgacttttgggttaacaatggaatcaagatggaaatttaaacattattyaaaatgattaataataatgacacaggttatcaaaatccctgagttacagcaaaagcagtgctaaaaggaaagtctatagtactaaatgcctacatcaaaaaatctgaaacatcacaaattgacaacctaaggtcacacctcaaggaactagaaaaacaataatgaaccaaactaaaagccagcagaagaaaagaaataacaaagatcagaacacaactaatgacactgaaacaaaaataaaatgaaatcaaaaagatcaacaaaacgaaaacttgattatttggaaagattaaaaaagttgatagagcattaggtagattaaccaagaaaagaagagagaagattcaaataagctcaattagaaatgaaaatggagacattaaaactgacaccaaagaaatacaaaagatcatttgaaactactgtgaacacctctatgcacacaaactagaaaatctagaggaaatgaataaattccttgaaacatatggcc

SEQ ID NO: 887715 - DNA, 681 bp, Homo sapiens
gtgatgtgtgtatcaaaatctcagaaatgacctctaaacaacttattcatgtaaccaaacactaactgttccccaaagacctattgaaataagaacaaacataaaaaaatatataaaataaaaatttagaaaatgagccttaatacaactgatataaaactaaaatttggtctttttaaactgaattttttatatagtattaataaaagatagtaaaatattcacattttgattaaactgcaaaaagagagagtgatatgttatcaaaaattaaatattaagaattaaggttttgcttttcctrtgtagcttcctttacttgcttttaaaaacttataattatcactttgtttaaatggatgactattattttgcaatgacctatgatcctcttttgatcaagtgttttaaacctttgatatatttgacagtcttcctaaaatcaaattccaaattctaaatttagtctatttgaccacaagctaacttttggacaatctagaagggcccgtggaaagaaaagagagacttattaaactaattggcttacttaacatgttaaaattatatggaaagcttatcaaataagaaatgatgtttaactctgagtcatatttgtataaatttgttattaatatttgatctgaaatgtatgagattcctagaaatctgataagtctt

SEQ ID NO: 887716 - DNA, 640 bp, Homo sapiens
cacccctaataccgtaaaagaaaatataaatgccattgcagtcctgaaaaaaagaaagaaaatgccatagaaaagactcagttgcactgaggccgacattcctgaaccctgagagcgacgtggaagggcagtttccctgccctcggactaagtctaaggttgaagaagcttagaaatgaaagggaaagagatttttgggtccacattttacttacccttcctcatggccctgtacaggccacagaaatgatgcaggattttctgctctttagctcagttaaatccgggatcttgtctcatgrcgagaaagaagtaggcatgtggacacaatgaagagtgaggaggatgaaatttattaagtgaaaagtaatcaaagttgaataccaggcctccacacacaggagctgaagagaccaggctcctcgtcaacataaagcacaaattcctggcggctcctccccattcttttagtgcccatgccggccctaagtctgagccactccatattgatttacttcccttattgcacatgtgttaagggatggaatttttcgctgtgggcatgtttaagaaagcccactgtgtacaacgacctgggtgtgaaggaagttctctggggagccttccctatctgctaggc

SEQ ID NO: 887717 - DNA, 640 bp, Homo sapiens
cacccctaataccgtaaaagaaaatataaatgccattgcagtcctgaaaaaaagaaagaaaatgccatagaaaagactcagttgcactgaggccgacattcctgaaccctgagagcgacgtggaagggcagtttccctgccctcggactaagtctaaggttgaagaagcttagaaatgaaagggaaagagatttttgggtccacattttacttacccttcctcatggccctgtacaggccacagaaatgatgcaggattttctgctctttagctcagttaaatccgggatcttgtctcatgacgagaaagaagtaggcatgtggacacaatgaagagtgaggaggatgaaatttattaagtgaaaagtaatcaaagttgaataccaggcctccacacacaggagctgaagagaccaggctcctcgtcaacataaagcacaaattcctggyggctcctccccattcttttagtgcccatgccggccctaagtctgagccactccatattgatttacttcccttattgcacatgtgttaagggatggaatttttcgctgtgggcatgtttaagaaagcccactgtgtacaacgacctgggtgtgaaggaagttctctggggagccttccctatctgctaggc

SEQ ID NO: 887718 - DNA, 658 bp, Homo sapiens
tttttttttttttttttttttgaggcggagtctggttctgtcacccaggcttgagcatagtggcatgatcttggctcactgcaaactctgactcccaggttcaagcaattctcctgcctcagcctcctgagtagctgggattacaggtrcatgcttccatgcctggctcatttttgtattattagtagagacgggtttcgagaggctggtctcgaattcatgacctcagatgatccgcctgccttggcctcccgaaatgctgggattacaggcacaagccatcacgcccagccaaagcagagtgtttttgcagcgagtctcatagaactgtatccttctattggagcctgttaggattttatgggatacttacaagtagcagtgataattcagttttgaaatttgaataaaaaccaaatcacttcagctataccctagccatagactgacacaggtataaaaatatttaccttctgtaggttcatctctgcacaatttctcaattaatgagagtaaaaccttgaggttttttttcatgaatacacaagagttttgaatgagatcatggcctcaatctcagggcatctgaagtcataatctgtgcatatgccgcagacagccttctgtctaacttctactgggtatatttagtttaacc

SEQ ID NO: 887719 - DNA, 658 bp, Homo sapiens
tttttttttttttttttttttgaggcggagtctggttctgtcacccaggcttgagcatagtggcatgatcttggctcactgcaaactctgactcccaggttcaagcaattctcctgcctcagcctcctgagtagctgggattacaggtgcatgcttccatgcctggctcatttttgtattattagtagagacgggtttcgagaggctggtctcgaattcatgacctcagatgatccgcctgccttggcctcccgaaatgctgggattacaggcacaagccatcacgcccagccaaagcagagtgtttttgcagcgagtctcatagaactgtatccttctattggagcctgttaggattttatgggatacttacaagtagcagtgataattcagttttgaaatttgaataaaaaccaaatcacttcagctatwccctagccatagactgacacaggtataaaaatatttaccttctgtaggttcatctctgcacaatttctcaattaatgagagtaaaaccttgaggttttttttcatgaatacacaagagttttgaatgagatcatggcctcaatctcagggcatctgaagtcataatctgtgcatatgccgcagacagccttctgtctaacttctactgggtatatttagtttaacc

SEQ ID NO: 887720 - DNA, 652 bp, Homo sapiens
aaactgaaaacaggaggagaactggttacagacccaataacaataattagtatttagtatagacatattttctcaatatttaaaaagtatttttgaacatctatgattttcttacccttgaaatatttttgttaagaatgcccataaaatagaaacacaaataaaatattgtaaatgttgaaatgaattttaccttgctgtactcaagtatcttctttttgtatatatcattatattcagtttttatttctgtggatgaatttatcaacctttaataaatgttcctgttcattgtatagtctttttattaagccttccattgagtccagcatttatttacttgtaaaatagggagtaatttcagtgttaatggawttgaatatgaataaaaggaatgatgctttctcttaaaggaatccacatagaagcaagtcaaaacaaaaatctatacaccaggttttccaatgaataggactaattggttgtttaaaagatagatatcaattaggaaacattatttgtctatactttccttggcaacaaaataaattgctactaattatttttcacaatactacagtctttctaaagtactcccaatcatatatacatacagtgcatttcagtaaaataaaaaaaaaagaaatatata

SEQ ID NO: 887721 - DNA, 623 bp, Homo sapiens
tgattctttttcaagttctgttaagaacatagttgataacagatctcttttaagaccagagtttctgcaagcatcatgcccgaccataagagaatttgatcactttgtgttttcctgcacctttcatcatggcagagagcgtactctgaagatttacatgggatcatctcttctctggccaccttgtggaatgcaaactatatcgccatatctaaaggggagcccattacaatttacaaattaaaagtcagtgggaaagaacataatcttggcaactgcctcttgggaaatcttacaactgcaagagcgccatggaagagcgctttaaataccatcgtgtttcatccaatctcctcacaattgtataggagggcatgtggccaargccttgcagagaaaaggccggggtgcccaggctcgtgattggctggggggcgtgatgcttaagcgagccacttagcccgctcttgcttcatgaggagcacgccacatgcttctttgcaccttcttttaaatccttgtgtggttggcatttggaaaaatatcgactgcaaccagaagtcgcaatcctgatgacagctcccgaaatctcatctttctcgcagcaacatctactgtcagct

SEQ ID NO: 887722 - DNA, 599 bp, Homo sapiens
caggacgctgagatctattgaacccagggggcagaggctgcattgagctgtgattgtgccactgcatgataacaaggtggcagagcaagaccttgtctcaaaaaaaaaaagaaaaagagattattaagaaaaatggttacctcatagggtggttattctcataacaycaaacttaaagcgtttagcacagcgtttggcacatagtacatgctaatacctggcaactattattggttagcattattaagcagggttaatccatgagctgcttagcaatccatctcaaaagcagaatactcatattacttgaagaaagatccgataacttccaccaccttaagtgtttattcatgtttttacaaatcaacggtcttgcgaatcttatcattgttatctttgctgggcaagtctattttcattaccatcatttttccagcattattctgtatttaagataaaactccaaggaatgaattgtattatgcctctggattattaaactctctcacctttctgtgtagagctcggtaatgttccttctaataactttcttccaatcgtgtctccttagccaacaaatttaatttgtagtcatatga

SEQ ID NO: 887723 - DNA, 577 bp, Homo sapiens
ctttatagatttaccgaagcattcacttatgtctactcagcacttattgtaattattagtgaaaatagctgattaatttatataggtcctctcggaagtctagtgaggcacatgccatgtcccgttttcataatctctagacataattctaaaaatgaagatatgggccgggtgtggtggctcacgtctgtaatcctagcactttgggaggccaaggtgggcagattacaaggtcaagagattgagaccccatggccaatatggtgaaacctcatctctactaaaaatacaaaaattagctgggcgtggtggcatgtgcctgtagtcctagctactcgggaggctgaggcaggagaattgcttgaacccgagaggcagaggttgcagtgagccaagattgcaccactgcactccagcctgsggacagagtgagactgtctcaaaaaaaaaaaaaaaaaaaagaaaacgtaattggacataactggataccaaaaggccaaaagcctttctcacgttttgtattttttttttttttttttggcaaatttgtttagtgaccgtaagtagatggcctcat

SEQ ID NO: 887724 - DNA, 502 bp, Homo sapiens
ttcttttgtcgatgggcttagtcttctgctatctcatcattaagtcttcccccttttcaagtaagctcctaagtgatgtttggtttttactcatttttgctgggatttgcctgtgagcttaccaaaactgtgattaagacaagtgcacagtgcgggaaagaggggcagacagtaaataaaatcataggcgggttatatgtggactaaaataagtgtcagattctgacttaaagcctgcaacaaacgcagcggtacagctgaagtacttcacctcatttgccactataaagcctgtcaccagatgcagcttattgtcatttgacactcactgataggcttttgatgagtctgcgaggaattgatttwttatggtctttgtgcagtcagcctctctgctaatgttaatctgtatttgctgcctctccccagcactagcatcaccacttcaactctacatcagatcattaggcattagattttcataaggagcacacaatctaga

SEQ ID NO: 887725 - DNA, 615 bp, Homo sapiens
gttctaattcctaaaccaagaccctaatgtgctttcaagtagataaagctcaatattgtaatttggttctctaacttggtagaatttggacttcaaactctcctccctagtcctacatacaaatctctgcccagttcttaagtttacccaatatttcttagttttttaaagaggactttacagtcaaattttgacctcatacttttatgttccctcctttttagtttccttccctctcaacttacagatgttctggaagcactagattataacctgagactcctaagcccaggaaagctgccacagtgggcttgagccctctctttggtgtgtcaagaagctaaagaaactatggacaaagagctaacaagaacaagaagaatgatatttcrttaaatagagatatcaataaaaaagatagaaatgatccaaaggtttaacgagagctctgcctctctatttggttcttttttttttttttttttttttttgaggtggagtcttgctctgttgcccaggctggagtgcagtggcatgatcttggctcactgcaacctctgcctcctgggttcaagcaattttcctgcctcagcctcccgagtagctgtgattata

SEQ ID NO: 887726 - DNA, 615 bp, Homo sapiens
ctagactatactgtaataccaatcttactaagataaatttagtgtcagcctggtaaaatatcattctgccttatttgcataaactaattttcccttgtttccacaacctttcctcattgctccctattcttagtagggatgccarttaagaaatgtacacatagagcaagacctttcagcagaattaactctttaaaggaatcagtgaatgtgagtgaaaagaagactgggattgtcttattaagagaatgaaaacgccgtaaaaaaaaaaaggttgttaaacccactggtggttctgggagtggctggttctttcataagaacagtttggtatactgggtcatgctagaattcgcctgcctcagcctaaatggattgagtccatttgcagaaaacagaggaaaagtacgctgtttccactggtttcaacttggagcaggattgtctgttggtgtctcagcatggggccttcttcactctccctggaagcaaggcccagaaacataaaggctatgttttctagactccttgtaagtagtgctctgatttagggtcttctaacgagagacacttgcacgagaaggtggaagagaaggcactgttattgctctggag

SEQ ID NO: 887727 - DNA, 655 bp, Homo sapiens
ataattattaaccatcccagacaaactataaagactcaaataaaagtagactcaaaggataaacatattgcatattgaagaatgctactagaatgaatatgtcatcctatagtttggattaatagggctcaaactatgaaatgtgtcatgtcatttcagaaaaagcaaaaaagtttgaatgtagagagaaaggagtaggagttcatatagccactagactcacattttttacatgaaccattgtaggatatgcattttacatcatgacctggtacacaatacatacataactaaaacaaaacttttacaaagcaagacttaycgctatgtgcaatgcactatgatatttctctatttctatttaacttcttaagtaatgctcatggtgacccacaaaactgatttcatgatacactaatgaatcagatccacattttgaaaaacattataccagaagactatcaaatcttcttgcccatggcatattattcataaatcccagcattcttcccagcaagttcagctaagcttcagaacccatttcaaacaagcattccaggcagcgagtatcaactatagttgggacacagtcaccacctaagttttaagaggacaaagtgcagggacagagtagctatttttattattttgcact

SEQ ID NO: 887728 - DNA, 655 bp, Homo sapiens
ataattattaaccatcccagacaaactataaagactcaaataaaagtagactcaaaggataaacatattgcatattgaagaatgctactagaatgaatatgtcatcctatagtttggattaatagggctcaaactatgaaatgtgtcatgtcatttcagaaaaagcaaaaaagtttgaatgtagagagaaaggagtaggagttcatatagccactagactcacattttttacatgaaccattgtaggatatgcattttacatcatgacctggtacacaatacatacataactaaaacaaaacttttacaaagcaagacttaccgctatgtgcaatgcactatgatatttcyctatttctatttaacttcttaagtaatgctcatggtgacccacaaaactgatttcatgatacactaatgaatcagatccacattttgaaaaacattataccagaagactatcaaatcttcttgcccatggcatattattcataaatcccagcattcttcccagcaagttcagctaagcttcagaacccatttcaaacaagcattccaggcagcgagtatcaactatagttgggacacagtcaccacctaagttttaagaggacaaagtgcagggacagagtagctatttttattattttgcact

SEQ ID NO: 887729 - DNA, 687 bp, Homo sapiens
aataatcagtaataggttttactggaatgacagagttgtgtaatctctggaaattttctgaagatttctagtgcctttttctgatatggtttaagcatatatttggtcaaaggtactctctcaagggtccatccagttaagaatctatmatcattaagcctcaaacattcttaaaataatgaagggttcctctttccacaacttcctctttactttcctgatcagtaaattgaccagaagaaattaacctacttactactaactgtttatttcttatatcagcaagtatgtatatgtgtgtgttttaacaaatctaaaagtagatttcttataaacaagtgtatcagctttcccttatagtacctaggtaattatcaattgattaatctgtatattttaatgatttggctccttctctaaagaagcagaaaactacttcaaaatctaagatagctgagacttcattacttgttgcaaaatagaatttaagtggtagaatcccactggggagtactaacatgaataattaccattacaaacaatcttccaaaatgaacagtttcactgcattgattgatagtagcatcttcaaatgtgatttacatttatatctctaatgaaaattagtacgtacttcacactttctgatttttctatgtcccttctgtggcaacataatgtcttatt

SEQ ID NO: 887730 - DNA, 463 bp, Homo sapiens
ctttttctactgtggggagatcgcccaagattactgaatttgctaaccccaggggaagtaggcatttgagtctaacagcgccatccctccctccacaaaaccctgtagagcagtgttcgctctatgacgtgtgaaggtgaaaagccackcaggaaaccagagagatttggcactaaaatatatgtttttcgtaaccagggcaggttgggcttcccttcatcacacaccaacagatgcacacggagccccgcgcggcccattcctgagggcggattccccagggcagggcgagaaaggccctcgggcccctgcctgtgtgcccatctctccatcctaggtcgaggatgagcgggtgtgcgcaggcccagcgtgggagaggcaggcaggccaggagcggcccgccagaaaggtgcaagggaaagccccagaggcggaggggaaggtgagaacccggggcggtgat

SEQ ID NO: 887731 - DNA, 600 bp, Homo sapiens
caatcaacaaagtgaagagttaacctacagaatgggagaacatatttgcaaactatccatccaataagagattaataacttgaatatataaggaattcaaacaactcaatagcaaaaagacaatctgatttaaaartgggcaaaagacctgaatagacatttctcaaaagaagatggacacatggccaacaagtgtatgaaaaagtgctcaacgtcactaattatcaagaaaatgcaaatcaaagccacaatgagatatcactccaccctaattagaatggctattatcaaaaagaccaataataataataacaagtgctggcaaggttgtagagaaaggagaacttctctttctcccagctagagtaatatcagcagagccctagtaggggaactggaatcccactctacctagcagtaataagcatctcttccctctcacgtgtcaaagaaggtcaaagagagaactgggactttcctatttcacctaacagtaatgaagcagcaccttcccacccctgctggtgcagtgtcagaggaggtgtggaaaaacaaagtttaaataagatctgaagtctcacaacataatactcaaatatc

SEQ ID NO: 887732 - DNA, 600 bp, Homo sapiens
caatcaacaaagtgaagagttaacctacagaatgggagaacatatttgcaaactatccatccaataagagattaataacttgaatatataaggaattcaaacaactcaatagcaaaaagacaatctgatttaaaaatgggcaaaagacctgaatagacatttctcaaaagaagatggacacatggccaacaagtgtatgaaaaagtgctcaacgtcactaattatcaagaaaatgcaaatcaaagccacaatgagatatcactccaccctaattagaatggctattatcaaaaagaccaataataataataacaagtgctggcaaggttgtagagaaaggagaacttctctttctcccagctagagtaatatcagcagagccctagtaggggaactggaatcccactctacctagcagtaataagcatctcttccctctcacgtgtcaaagaaggtcaaaragagaactgggactttcctatttcacctaacagtaatgaagcagcaccttcccacccctgctggtgcagtgtcagaggaggtgtggaaaaacaaagtttaaataagatctgaagtctcacaacataatactcaaatatc

SEQ ID NO: 887733 - DNA, 532 bp, Homo sapiens
tagctcattgcggttttgatttgcatttctctgatgatcagtgatgttgagctttttttcatgtttgttggtcgcataaacgtcttcttttgagaagcgtttgtctgttcatatcctttgcccactttttgatggggttgtttgttttttcttttaaatttgtttaagttcattgtaaattctgkatattagaccttcatcagatgggtagattgcaaaaattttctcccattctgtaggttgcctgttcactctgatgatagtttattttgctgtgcagaagctcgttagtttatttagatcccatttgtctatttttgctttcattgcaattgcttttgacgtttttgtcaagaagtatttgcccatgcctatgtcctgaatggtattgcctaggctttcatctaggatttttatggtttcgagttttacatttaagtctttaatccatattgagataatttttgtataaggtgtaaggaaatggtccaatttcagttttctgcaaatggctagccggcactatttactg

SEQ ID NO: 887734 - DNA, 532 bp, Homo sapiens
tagctcattgcggttttgatttgcatttctctgatgatcagtgatgttgagctttttttcatgtttgttggtcgcataaacgtcttcttttgagaagcgtttgtctgttcatatcctttgcccactttttgatggggttgtttgttttttcttttaaatttgtttaagttcattgtaaattctgtatattagaccttcatcagatgggtagattgcaaaaattttctcccattctgtaggttgcctgttcactctgatgatagtttattttgctgtgcagaagctcgttagtttatttagatcccatttgtctatttttgctttcattgcaattgcttttgacgtttttgtcaagaagtatttgcycatgcctatgtcctgaatggtattgcctaggctttcatctaggatttttatggtttcgagttttacatttaagtctttaatccatattgagataatttttgtataaggtgtaaggaaatggtccaatttcagttttctgcaaatggctagccggcactatttactg

SEQ ID NO: 887735 - DNA, 563 bp, Homo sapiens
tagcttatttggtatgttaaaatcatatgggaagcattgtcaaatctcaaataaataatggagtttaattttttagtcatatttttctgaatatgttattattttgatatatcatgatatatgttgtcaagcataattatgatttatccttggtaaaaayggggaaacgggagagaaaaattgcatttcagaagacaagtacagtatgcctgttatcagattctagtcttgcccattgtttttgagtttttattattttcctacaatttggactaaatcctgaattctttcttggctgcaagtcttcaaactaatgcttttgaacttttctctcatttttctcacttggaatcactagaatttaaaactgcttttcttgaagccctgcaaactaaagttagacaacttgatataaacttcaggaggagtcagcacagcaactcacatgtacacagcctttgtgcctgctgatgtatgggctactcaggaagttcacatgaacacgtaattcaaactataatccaggaaaatctgtaagattaccactacaatctgaagatact

SEQ ID NO: 887736 - DNA, 642 bp, Homo sapiens
atgtaatctctaactaccaccactgtcaatttgtctctctatataatatggatttttaaactgtaagaaaaatgactgaaatagtaactgaaattttctctgggtagagagatttagaaaaatagtcattattttcacaatctaaatttgtgtatatctcctcaattttctgtggaaggtgtattagtttgctagggctaccataacaaaataccacagactgggggctgaaacaatgaaaatttattctctcacagttgtggaggctggaagrctgagctcaaggtgctggcagagtcctgaggcctctctctctccttggcttgcagatgccctgtgtcttcacgtggtcttccccctgtgtgtgtctgtgtccccatcttcttagaaggacatcagtcaaatttgatgagagcccaccctaatgatctcatttaacttatttacttctttaaagatcctatctccaaatacagtcacattctgaggtgctaggggttagggctttaacacatggatttgtgggtgggaaggcccaattcagctcataatagttggcatgtggtaattctataatctgaggaaaatgttaaaacaaaaggagaacaagagagggagcagagggtcagggcgtgtccttgt

SEQ ID NO: 887737 - DNA, 608 bp, Homo sapiens
agatatttaatgctcatggattggaagaaataacattatttaaatgaccatactacccaaaccaatttacagattcagtgtaatccctgtcaaaacatcaatgatattcttcacagaaacaaaaaaaaatcctaaaatgtatatagaacccmaaagaccctgaatagctaaagcaattgatatggtttcgctctgtgtccccatccaaatctcatctcatattgtaatccccataatccccacgtgtgggagggtgggacctcgtaggaggtgactggatcatgggggccatttcccccatgctgttctcatgatagtgagcgagttctcataggatctgatggttttgtgtttgacagttcctccctctctctctctcctctctctctctcttttgcctgccaccatgtaagacatgcctgcttctccttttgccatgattgtaagtttcctgaggcctccccacccatgcggatctgtgaatcaattaaacctctttcatttgtagattacccagtctcagggaagctctttacagcagcataagaacagactaacacagcaatcctaagccagaacaaggctgaggcatcacattagctgacttc

SEQ ID NO: 887738 - DNA, 608 bp, Homo sapiens
agatatttaatgctcatggattggaagaaataacattatttaaatgaccatactacccaaaccaatttacagattcagtgtaatccctgtcaaaacatcaatgatattcttcacagaaacaaaaaaaaatcctaaaatgtatatagaacccaaaagaccctgaatagctaaagcaattgatatggtttcgctctgtgtccccatccaaatctcatctcatattgtaatccccataatccccacgtgtgggagggtgggacctcrtaggaggtgactggatcatgggggccatttcccccatgctgttctcatgatagtgagcgagttctcataggatctgatggttttgtgtttgacagttcctccctctctctctctcctctctctctctcttttgcctgccaccatgtaagacatgcctgcttctccttttgccatgattgtaagtttcctgaggcctccccacccatgcggatctgtgaatcaattaaacctctttcatttgtagattacccagtctcagggaagctctttacagcagcataagaacagactaacacagcaatcctaagccagaacaaggctgaggcatcacattagctgacttc

SEQ ID NO: 887739 - DNA, 585 bp, Homo sapiens
acaaaacaagtgtcgccaaattcaagagtcaaaattatatcatgtatcttctctgaccacaatagaatgaactagaagtcaacagaaagtagaaatttagaaactatacaaatacatggaaattaaaatgctcctgaatgaccaatgaagaaagtaaagaaggaaattctaaaaagtattaaaacaaatgaaatggaaatacaatatatgagaacctatgggatatagcaaaagcagtacaaagagggaagtttacatatagcctaaataaaaaaataggaagacttcaaatagcctaacaatgaacctgaagaaactagaaaagcaagaacaaaccaaacctaaaaatagtagaaggaaagaaacaataaagatcagagcagaaatgaataaaattgaggctaaatacagaagatcaataaaatgaaaaggttgttttytgaaaagataaaaaaatgacaaatctttagctgggctaaaaaaagggaagattcaaataaaatcagagacaaaaaggaacacattacaactgatatcacataaattattagagactactaaggatttttgagactgctatgaaca

SEQ ID NO: 887740 - DNA, 611 bp, Homo sapiens
cctgaaactttactgaattcatttatcagatctcagagctttttgagtgagtgctcagggtgttctaggtatacaatcatatcatcagcaaatagcaacagtttgacttcctcattaccaatttggatgtcctttatttctttctcttgtctgattgctctggctaggacttccagtactatgttgaatagaagtggtgaaagtgggcgtccttacgttgttccagttctcagggggaatgctttcagctttttccccttcagtataatgttggctgtgggtttgtcacagatggcttttattaccttaaggtatgtttttttctatgtagattttgttgagggttttaatcataaaattttgtcaaatgctttttctgtgtctattgagatgacaatgtgatttttttaacaaaaattmtgtttatgtggtgtatcacatttattgacttgtggatgttaaaccatgcctgtatccctggtgtgaaacccacttgatcatgggggattatctttttgctatgctgttggatttggttaggtagtattttgttgaggatttttatatctatgttcatcagggacattggtctgtagtttccttttttgtta

SEQ ID NO: 887741 - DNA, 554 bp, Homo sapiens
tgaacctaccttttaaacttatgaaaatagtgaagcactatccaaaacctcagtctcttttcttccccttttccttacacctacaaacagtaaatgtacttgctggagcatatgattcctgttttgggcttgtttccatttatatttagagagcaatactaggattaaaaacttttttattgttgttattattattttttgagacggagtctagctctgtcgcccaggctggagtgcagtggcgcgatctctgctcactgcaacctccgcctcccgggttcacgccattctcctacctcagcctccccagtagctkggactgtaggcgtgtgccaccacgcctggctaattttttgtatttttgtagtgacggggtttctccgtgttggccaggatggtctggactcctgtcctcgtgatccgcccgccttggcctcccaaagtgctgggattacaggcgtgagccaccgtgcccggccaatttttttgaggcagggtctcactctgtcttccaggctggagtgcagtggagggatctcagctcactgtagcct

SEQ ID NO: 887742 - DNA, 554 bp, Homo sapiens
tgaacctaccttttaaacttatgaaaatagtgaagcactatccaaaacctcagtctcttttcttccccttttccttacacctacaaacagtaaatgtacttgctggagcatatgattcctgttttgggcttgtttccatttatatttagagagcaatactaggattaaaaacttttttattgttgttattattattttttgagacggagtctagctctgtcgcccaggctggagtgcagtggcgcgatctctgctcactgcaacctccgcctcccgggttcacgccattctcctacctcagcctccccagtagcttggactgtaggcgtgtgccaccacgcctggctaattttttgtatttttgtagtgayggggtttctccgtgttggccaggatggtctggactcctgtcctcgtgatccgcccgccttggcctcccaaagtgctgggattacaggcgtgagccaccgtgcccggccaatttttttgaggcagggtctcactctgtcttccaggctggagtgcagtggagggatctcagctcactgtagcct

SEQ ID NO: 887743 - DNA, 591 bp, Homo sapiens
tcaggcaacttgtcaaggatccgaatgttgagaacccagaacagattcggaacagacttttggagctcttggatgaggtaaactgtcatctttttgtcctcaggataaaggcttcagcattctgtagttacgatggatttttactacctgaaatactatgttttagaacagaatatcgacaaaaaaactgcccttttcttgggttctgagccttccctacaccagttgcttccttgggaccataaattactggcaattggagttttgaggttgaaagctttctgaatgccttggcctaaaagagagagaatgagaatgtgtatgtatgtgtttgtgtttgtgtggagagagcgtgtgtgtgtrtgtgtgtgtgtgttcatgtgttcatatctttaaaaccatggaggctttgactgtgaatttgccttgttctcaaattggtggccagtgaatattgtgcgtgcctcccttttcataggatgtctgaacatcagcagaactgtgaaagggttgtctgccccggtttttggtggataggttggattagaatagattgattcagtcatttctttttttctttttatagggtag

SEQ ID NO: 887744 - DNA, 572 bp, Homo sapiens
taccattattttttcatatagaaagtaataaactagtttctgatcatatagatcacaaggtgacttatcttcatgaaattaattcatgtcatgttcataaacactgtatgacctcatttagattcattcccactttgtgataatttaggtgtaaagagcagtaaagccaccagtgttttacccatgaagacagtgctccttgagtaaattcactgtgtaaacaagggaaacggactttctytacttaagagtgaggtctaacattgtccagggcctgagaaaccagttagtggcattgtgggcatacaaaaatcatgtcaattacagatgattcttatctatctattaacatacctagcagtccgcagctaagacttataaccccgttatcctgatcataattttgctgtttgtttactaacacaaacacatatctttttttaaaaatcacagatttaagtgatctaatgagctttcttctatgtttattttattattctaaaaatattttcatcaacactgaaaatcatttattcattcattcaacaaacactaccccaactgagaatgct

SEQ ID NO: 887745 - DNA, 597 bp, Homo sapiens
atgtaaaatgtaaaactgtaggccaggtgcagtggctcacgcctgtagtcccagcactttgggaggccgaggtgggcagatcatgaggtcaggagatcaagaccatcctggccaacatggtgaaaccccatctctactaaaaatacaaaaattagccaggtgtggtagtgcacacctgtagtcccagctactcgggaggctgtggcaggagaattgcttgaacctgggaggcgaaggttgcrgtaagccgagatcgcgcaccactgcactccagcctggcaacagggcgagaccctgtctcaaaaaaaaaaaaaaaaagtaaaattgtaaaactttaggacaaacagaggagaagaacataggagaagacctctaggatctagacctagtcataggttctttggtttgacaccaaaagaacagtgtataaaaggaaaaaaatagaggaaactgttctataccttgagtgtattaatgtcaatattctgagtatgatattatactatagttttctaagatgttaccattgggaaaaactaggtggggggtacctgagattgttctgtattacttcttataactgaatatcaatctaca

SEQ ID NO: 887746 - DNA, 670 bp, Homo sapiens
cactaaaatggaccactactacctgatttgtcagtcaggcggataaaacttctgtagttaatctaataatctaatctaataaaaatgagtggtcaatttcctcaacagtagtacaagtagcccacccacttaaaaaaaaaaccttacttttgacaatatacttaatgtcacttttatataaataatgtgaatcatttttaaaagctggattgcttaatgtggcaaaagtaactttgatggtcttctatatacaggaaataaagtattctaatactggacctctgtttacagaaagaaagcacttaacaaccaaaaagccraaaaaaacccctgcacttactgctcaagttaaaaggattaatagtgaaaattttactaccgatattgtgtctgagatttgcttcaaaataatttggcaaggaggaggcaagtgtatattgatgaagcaagactgatcactgttgacactggctgataggtatatgaatgctcagtatgctacctgattttgtatatatttaaaattgtctagaataagaagctttttaaaagtcaagtacagtacctctaatacttctatttgtcaaactgttgtctttagccatgcctggcattttttaccacataaaaatgtttcaagcctcttttaaaaaacatgaaacatctctca

SEQ ID NO: 887747 - DNA, 670 bp, Homo sapiens
cactaaaatggaccactactacctgatttgtcagtcaggcggataaaacttctgtagttaatctaataatctaatctaataaaaatgagtggtcaatttcctcaacagtagtacaagtagcccacccacttaaaaaaaaaaccttacttttgacaatatacttaatgtcacttttatataaataatgtgaatcatttttaaaagctggattgcttaatgtggcaaaagtaactttgatggtcttctatatacaggaaataaagtattctaatactggacctctgtttacagaaagaaagcacttaacaaccaaaaagccaaaaaaaacccctrcacttactgctcaagttaaaaggattaatagtgaaaattttactaccgatattgtgtctgagatttgcttcaaaataatttggcaaggaggaggcaagtgtatattgatgaagcaagactgatcactgttgacactggctgataggtatatgaatgctcagtatgctacctgattttgtatatatttaaaattgtctagaataagaagctttttaaaagtcaagtacagtacctctaatacttctatttgtcaaactgttgtctttagccatgcctggcattttttaccacataaaaatgtttcaagcctcttttaaaaaacatgaaacatctctca

SEQ ID NO: 887748 - DNA, 559 bp, Homo sapiens
tgaatgggaaaaagctgtgagcattttcattgaaaacaggcacaggacaaggatgccctttctcaccactcctattcaacatattattggaaggtctggccaggtcaatcaagcaagagaaagaaacaaatgatattcaaataggaagagaggaagccaaattgtctctgcagatgacatgatcctttatctagaaaaccccattgtctcaaccccattgtcagcaaaatctcaggataaaaaatcaatgtgcgaaaatcacaaggattcctrcacactaacaacagacaagcagagagccaaatcatgaaagaactccaattccacaattgttacagagaataaaatacctaggaatacagctaagaagggaagtgatagaaagaaccaatatgattaaaatggccatactacccaaagtaatttacagattcaatgctattccccttatactaacattgacatttttcacagaattagaataatctgttttaaaattcatatggacaaaaaagagtctgtagagccaagacaatattaagcaaaaatagcaaagctg

SEQ ID NO: 887749 - DNA, 616 bp, Homo sapiens
ttattcaatgtcaactgcttattaaaacatcccagggctagactcttctgagtcttttatatactttttttctacaacagaggagaaagtaatcactattgatttgggcacatatcaaaaaatcaaaaaaagagaaayaaatgaacatttgcatttcaattgtgaccaccatacagctaatagcttatcataactcttaaaggttggtcccaaggctctcatacaggttcaccctttgctgacctcttacaatctttctgtcagcattttgaatgctactgattctgtgagtaatattttcaacggaggtcagacaggcctgtaagtccagcgtgtcctctcacttacgaattccccttcttttgtggcttttcaccatgggttcacatgtcatggactctacatcgcaaactgcagtaagcaaatttcaatcctgagtgaaaggagaaaaaagcaaatcctacttgactattgctagcttgtttacaccatagggctagagtaagctgaaatcgacagagtataaagaaaagaaagtcctcttgcagtaacacacacacttattttcagactcatagtttaaatgcagtcttttatttgtcactaccactgcatt

SEQ ID NO: 887750 - DNA, 616 bp, Homo sapiens
ttattcaatgtcaactgcttattaaaacatcccagggctagactcttctgagtcttttatatactttttttctacaacagaggagaaagtaatcactattgatttgggcacatatcaaaaaatcaaaaaaagagaaacaaatgaacatttgcatttcaattgtgaccaccatacagctaatagyttatcataactcttaaaggttggtcccaaggctctcatacaggttcaccctttgctgacctcttacaatctttctgtcagcattttgaatgctactgattctgtgagtaatattttcaacggaggtcagacaggcctgtaagtccagcgtgtcctctcacttacgaattccccttcttttgtggcttttcaccatgggttcacatgtcatggactctacatcgcaaactgcagtaagcaaatttcaatcctgagtgaaaggagaaaaaagcaaatcctacttgactattgctagcttgtttacaccatagggctagagtaagctgaaatcgacagagtataaagaaaagaaagtcctcttgcagtaacacacacacttattttcagactcatagtttaaatgcagtcttttatttgtcactaccactgcatt

SEQ ID NO: 887751 - DNA, 634 bp, Homo sapiens
tgacttacatggtgcaacatatgtatgaaaacaactttagatctgggatttgactgtgttatgtaaatgaactaatattgttaaagtgacagtagaactcccataatcttgtctgaaggtaacagactgccatgtatcaaatattgtcattgtttttcttcaactctttttgttatataggtaagacatgttcaytgtagcaaaaaaaaaaaaaatgggttttgtgccattactcataccttttgctttagttagttaaacattttcagtggatactactaggcatctctgtggctgtatccactcattagtccattttaaaacaatttaataagtgcccattctaccacaagctatgtagcgaatgggtatctgaagagtaagcaagtagtgatagtttatgagtttttgactgttggtatgcttccaaaagaaggcaccaaaagacatttgtgatgcccacattacttagaaatgtagggaaatcttagtatttgaaactcttatgtcctagaatcttaagaaacctctggattgagatggtgatgttaggcagctcttgcagttgacttcaatgctagctaggctactttctccaagcagtgagaaagtcctaaagagtcttgcttcattt

SEQ ID NO: 887752 - DNA, 591 bp, Homo sapiens
agtgcagtggtgcggtctcggctcactgctacctctgtctcctgggttcaagcaattctccagcctaagcctcccaagtagctgggtttaaaagcatgagtcactgcacctggctattttttttgtatttttggtagagatggggttttgccatgttgcccaaagtggtctctaattcctgacctcaartgatctgcctgcctcagcctcccaaggtgctagtgtatttaaaatacagttgtttttatgtgtttcagtttaacttcccctccttcccatccttattgatttaactttttcaaaagttgaaactacatgaaaagataggtttacaagtttcagtcacttccatgtcctgtctgtctcattttccctgtcttttgaggacaatcaactatattgatttctggtttacccttcatatgtttcatatatgtatgtttccttgttgcctctttttcttctaatatatgctcttgtgcttcagatagtattaagatttttaaaccagataaaaaaggaagaaaaaagcagtaaaagtttacatgttccttgactctagattctgtgactagaaatggaccttataaa

SEQ ID NO: 887753 - DNA, 671 bp, Homo sapiens
aaattgagcaaatttaataatgataaatgttaaacacaattttataaaaaaagtataaacttctttatgagtccattctctatgtacaaattaaattcagtgcattgctgttgtccaaaagcaggtataattttaaaaaatgtttttacaatgtggtaggtactaagagcatttgtaagcatcctctatacagtatatctttatgaaagccctgaataaaggtgagttgacagtaatgccaagagtatgtgaataggcatttctaacttatggattatatacttagtccatttctataaacccatggtcccttttctatagtcattcaaagcccagctaaccaatttgaaataacttcaaaaaatactccaaaagaactaaatgtgtgtacaaaagacactagatggatgaacctggttatctcattgggcccttcaaaccctgaggtccatactatttattaccattacaaatgtttcwttaagttcttcctgatcagtgctggtttgaaaattctatgattttactcacttgtgtaatccacagtgaaggtcagcaaaattctcaatactactgactaagaatttagaattatggttatctaaagaacttgctttgcttgatctaaactagaaatatttaaaatttcaaacaattatttgtgattacag

SEQ ID NO: 887754 - DNA, 619 bp, Homo sapiens
aaaaaccattacacttacatataaaacttacccaaagcttgaagtgttttatccagggtaaaaaacaaaacctccattatttaactaattctcaaccaatatacaattaacattattaataaatacctacccctatatatttttatatacctctttatttatacacacagaaaagcaccttgaaaattataaagtgctattaaaatttttattgttgtaattggagaatactacaatgggtagacatgattaaataaaatgtgatatgtagacagatttaatcatttattctccccaacaaatgctaagttctgactcatcagaaaaagtccagaaagggtctcataacaaaattattttcatcaactatccttttgaggatctctccataaatctaggaactacctcaccagaaagtacaaatgtcctttatyttttaaaaaacaaactgggacctattttacaggattaaaagttttcttctggctctcatctccatatttaagcctatttcacttgtatataagatcaattattaagcctcttgttacatttatttttttaaaaaactgagatacaattagcataccataaatttcaccattgtttttttggagac

SEQ ID NO: 887755 - DNA, 621 bp, Homo sapiens
tcttatggaataactccattgaagtctggagcagcacctcataattaactgcaacaaattataacagtattcaccctaagtgggataaatgaagaccataaggccacttgtagtggctcacacatgtaatcccagtgctttgggaggctgaggctgaagaatcacttgagaccaggcaacaagaccagcctcagcaacatagcgagattccatctctacaaaaaaaatttataattaaccagatatggtgtatgtgtctgtagtcctagctgctcaagaggctgaagaaggaggatcatttgagcccaggaattcgaagttacagtgagctatgagtgtgccactccactccagcctaggagacagagcaagatcctatctctaaaamaaacaaacaaaaaaagaagacatacatagtgttacatagtgtcatattaattcagattaggttttgccttcaaatgaatttttgttgaaaacttgtgaaaatttttgttttcagagttttttttggattttagaattatctatcatttggctgcttctagaaaactatagagaccactgacaaatatcttttgccccttccatgttgcttcctatatccagtctcctggaatg

SEQ ID NO: 887756 - DNA, 625 bp, Homo sapiens
  misc_feature 503: n = A,T,C or G
taaaatgcattaacaataagaaactatcaaaatgacagtaggtttgaaaatgaaccaaatagtacttttattttttcaaactgattaagaaataatttaatacaatccagtgcacccattttaagggtacagttcaaaragttttgacaaatgtatatatctgtgaaaccatcaccaccagcagaatgcagactatccccatcaactgaaaatggtaactcatgcttctttgcagtgattcctccctccactcctggtcccaggcaacccctgatttggcttatgtcactataacacaccttgcattttctagaatattatataaatggaatcatacaatttgtacatctttggatctggtgtctttgactcagcatattgatttttgagtttcactcattttgttgtgtatatcagtagttcattcctttttgttactaagtaatattccattatttggatataccatgttttgtttatccattgcccaattagtggatgtntgagttgtttccagtttttgcctattataaataaaagtgtaaagaacatccttgtaaaagtctttgtatgaacatacgttttcattactcttgggtaaacacctagtagtagaatggctggg

SEQ ID NO: 887757 - DNA, 597 bp, Homo sapiens
aaaataactcagtctcagcctgaaacacttcagttaaagaacgaagtgatctgatactgcaatgaaaataacccaaatatagaatgaatttatttggttaactatcttttggccagcctagtcaacttgtccccctatgttggaaacaaaagaataattctaaagctatctgtccaaatagaacaagggatataagatggacaccaagagacagatgtttatatattataatattaaaagtatggattcgcatgctacagaatgggtaatatatccaggcatctcttggttggcccacatggaacttcctggatgcatggcacaaattaatatgttctttcggttacacacgggtgcaaggtcagakagttcacactctttcaaagcctgggaatttccttcatttggaatcccattgggcccaatctgttttctatcggtacaacaacttagcttctattttccttcctcaacgggacatcaaagatgttatttagcatgtggaagctgtaacaaattatacaaagaaagcttttaataatagccacaagagaatctctctctgaaacacagaagtcactctcatgagaaagtctg

SEQ ID NO: 887758 - DNA, 656 bp, Homo sapiens
ataccataaagatgtcattctctccaaactgatgaataaatgtaatttaaatgagattatttgatgactgatgataatacaagtactcctgaaaaagaaaaataggaataagtcatagagctaattaagtccatgacctattggcacaggaatagagaagtaccaatggaatggaatagagatatcagaaacagttttacgtttgacacataaggaagatggcttcgaagatcacttgggagtggatcaatcaggaaacaaatggtgccaggccaattgcatatccattaaaaaataattgcagtgggcttcctaactcacaccatacatcaaaattgcttcttcatagattcaaagctttaatgttatgttaaaatggtaaataaaaaagaagggagtcaatgaaatgaactagcactttatagaaggggaaataactacccatatgcgtataaaaagtattaaacttcrttagaaaccactgaaattgtaaaacatccatattataatattatttagtacacacttaatttttgcaaaatttaaggcatctgatagtttcaaacattgagtggtgacttttacgcaatgtttatgacagtgaaatttgttatcatattggatacaacttatcactctcttaaaattgtggatct

SEQ ID NO: 887759 - DNA, 578 bp, Homo sapiens
attttaacagtaactgaaattaaatgattttcttacttagcttactgttgctaggtgtggtggatgagagagatgagaaaatgccacgttgtgaacgattgacagttgttctttaatactaatgtcttttacctttatctttatatggatagactatattcctttttttctgtggttttctcctcttgttttccacaattaacaatagaatggaaatttttatrtataaatgaataagttacttattattattatcatcattatttagatacagggtcttcctctgttacccaggctggagtgcagtggtgagatcttagccaactgcagccttgaactcctgagctcaagcgatcttctcgtctcagcttcctgactagctgggactacaggtgcacaccgccaaacccaggtaatttaaaaagtattttgaagagacagggatctcactctttgccaaggctggtctgaacctcctggcctcaagtgcctctaattccaatatgtcaacgttatttctattttctaaactatgtttcacagttacatttgtgcttcatttcttaaacacatgtgca

SEQ ID NO: 887760 - DNA, 591 bp, Homo sapiens
tcctttgccacaacatgaatgcagctgaaggccattatcctaagtaactaatgcagaaacagaaaaccaaatactgcatgttctcacttataagggggagccaaacagtggatgcacaaggacataaagataaacacaacaatcattgggaactccaaaacataaatagagggaaggaagtaaggcttgaacaacttttcactgggtgctgtgttcactatttgrgtgacaggatctaaggaagcccaaacctcagcatcatgcaatataactgtgtaataaacctgcatatgtacaactgaatctaaaattaaaatacaaataaagttagttgaaaatgatttttaaatcttctatgtctgatatggtttgtgtctgtgtccccacccaaatctcatgttgaattgtgatccctagtattggagaaggggcctggtgggagatgattggatcatggggctgatttctaatggtttagtaccatccccctatagtgtcttgtgatagagttttcatgagatctggttgattgaaagcgtgtggctcttcccccttcactctgtctctcctgctctgacatgtaaagatgtg

SEQ ID NO: 887761 - DNA, 591 bp, Homo sapiens
tcctttgccacaacatgaatgcagctgaaggccattatcctaagtaactaatgcagaaacagaaaaccaaatactgcatgttctcacttataagggggagccaaacagtggatgcacaaggacataaagataaacacaacaatcattgggaactccaaaacataaatagagggaaggaagtaaggcttgaacaacttttcactgggtgctgtgttcactatttgagtgacaggatctaaggaagcccaaacctcagcatcatgcaatataactgtgtaataaacctgcatatgtacaactgaatctaaaattaaaatacaaataaagttagttgaaaatgatttttaaatcttctatgtctgatatggtttgtgtctgtgtccccacccaaatctcatgtygaattgtgatccctagtattggagaaggggcctggtgggagatgattggatcatggggctgatttctaatggtttagtaccatccccctatagtgtcttgtgatagagttttcatgagatctggttgattgaaagcgtgtggctcttcccccttcactctgtctctcctgctctgacatgtaaagatgtg

SEQ ID NO: 887762 - DNA, 670 bp, Homo sapiens
tgaacaagagcactactccaggaaatgggctcaaggcccaatcaaagaacattctctattctcaagatatggaagctcaaaacatgagatttcagaatcattacagaccagtgctcactgtggtttcccatgcttcacttttcatcttctaaatgggagtgttcactgtggttatcccacttctgttcaatcagtgtcttagttcattctgtgttgctataatggtatgccacagacttgtaatttataaacaaatttcttccttagtcctggaggctgggaagtccaaggtcaaggggctcgcatctggtaagagccttcawgctgtgtcatcccaaagtggaaggcaaaagggcaagagagtgcaagaaagcaagaaggtaagagagcaagagagggccagacttgctttcacaaaaacccactcctgcaatatcaaaccctctcccaagataacattaatccattcatgaggatgggccctcttcacagtcctacctcttaataccatcactatggcaattaaatttcaatgagttttactgggcacattcaaaccacagaaaccagtacatacattgtgtgttgagggcaaataactgttaagcccacggtgtccagatcaattggagccacatttggattcaaaataagacaagagggcatgcca

SEQ ID NO: 887763 - DNA, 648 bp, Homo sapiens
tgtcactatctacgtaactggcaaaaggttaactcttttatcattcatcaatttaataaaattctgtaagaaaaagaaaactcaacaggaaacaggcaaagatgtaaataggcaaatgagaaaaaaatatatagatgacagatatacatgtggakaaatttgtaaactaggcaatataaacttaaaaattagattctcatttttagccatcacgtaatgtcctgagccagcaaagagcattggaaaaaaatatttttatatgtttactggagtttacactggaacaatcttaagtgaggaggacaatttggctggatttataaaaatgcaaccaccttttggcccaggaattctactaatcataatctgtcttctataaatgtacctgtgcacagaaatatacatacaatgatgttcacaacagtttgtagtggccaaatgtctatggaccactttaataggtatagtatatccatcccatgaaatgaaacccagccatcaaaaagaataggagacatttaggcatactgatctggaaagagatccaagacatattgtaaacagtgaaaaaaaaatcacagaaaaatacattttgatcccatttgtgtggaaaaaatggtttgtgaatgtatatacataaatggctcc

SEQ ID NO: 887764 - DNA, 641 bp, Homo sapiens
tcaggtcattaaaaagtgcaagcacggccagccatactaagccacctgttcactgtgttgctggggtttttttttttttttcaatttatttttttgagccagcattcttttgtgaatatcaatttctactgggcaatcaggccatgtggtctctcctctggactggcccctacagccttccacactctgtgacactcagtggccacaggcccctggaaaattggatgtgtgactgagtctttaagaggtggagtgacttactttaattcagtaagtcaatatgttttaaactcagattgtttgttccacaataggaaaaagctgtgaaatttcttgtctcagctctgtctaccactactttggaggggctacaggtatcagtgagataaaccaaagtcaratattcaaactggggcataaaatgttctgcatgagtgtcaagaatggttctttgggtgtggcgaagggttcacacctacatttaattttcgaaatgtgtttcttaaaaatatgccaaaaagatacctagaaaaacacatatcactgattgaaatatgtaatgcatttaaatatacatacatatgtatatacacacacacatatatgttttcataatcacactaatatctgccctgctacac

SEQ ID NO: 887765 - DNA, 659 bp, Homo sapiens
tgtgttggctcactagcatgggcttgtggaatgggactctgagttacatatttctatatcctcagcctctaacacaatataaaggagaacacctcccatttgtttatttattcattaactcactgattcattcattcagtgaaaatgtattakgggcaggcaccatgctagttgccaggaacgagcaaagtagaccaactttctgcctctgtggttaaatccaacctcacaagagtatgatatagaaaaatgatgttgatattctttaaattggacacacttgtctgttctacaaacagtactactagattactttgcattgcaacatatcagttccctccctaccacactgtgtggtgaaataacattgcaaacagctattttattcctattttaccttacctaagggcattggttacccatattggtcagatctaatattcaaagctcaggaaaagctttttggtgcagagctgatggaagaatgatcaggcttccacactgcgaggcggggctgcttcattccttttgttatatgaaaagcttcaagcattattaagtgatgacagagtacacttggcttctggtctttctttgaaggctggcctgtagcatgctgcttggaagcaggaacgattccacaaatggtcagggagcta

SEQ ID NO: 887766 - DNA, 659 bp, Homo sapiens
tgtgttggctcactagcatgggcttgtggaatgggactctgagttacatatttctatatcctcagcctctaacacaatataaaggagaacacctcccatttgtttatttattcattaactcactgattcattcattcagtgaaaatgtattaggggcaggcaccatgctagttgccaggaacgagcaaagtagaccaactttctgcctctgtggttaaatccaacctcacaagagtatgatatasaaaaatgatgttgatattctttaaattggacacacttgtctgttctacaaacagtactactagattactttgcattgcaacatatcagttccctccctaccacactgtgtggtgaaataacattgcaaacagctattttattcctattttaccttacctaagggcattggttacccatattggtcagatctaatattcaaagctcaggaaaagctttttggtgcagagctgatggaagaatgatcaggcttccacactgcgaggcggggctgcttcattccttttgttatatgaaaagcttcaagcattattaagtgatgacagagtacacttggcttctggtctttctttgaaggctggcctgtagcatgctgcttggaagcaggaacgattccacaaatggtcagggagcta

SEQ ID NO: 887767 - DNA, 549 bp, Homo sapiens
tcctgcatacatttgtatatatgataatttaatttagttttatttttgtttctttcacgttaacctcaaagcagaattattcctaaactctttattttacatactttatctgtgtggcagaattaaaccatttataatattttctggaggttacaatgcacgagagaaaatataaaattattcattatttccatatgttccttgctccccttyttccaaaacaaacaaaaactgagataatttgtaaaaaaaaaaaaaaaaaaaaaaaaaaaaagaaaagaaaaaagcagttattttctgattctaagttatgcaggtaatatatacaatataaatatgtaatattcacactaccccaagatattaaatcagttcagaatcacacttcgtgcaaagctgaattagcacaagcaaggcctcagtttatagaatttatgtttttattgtaaacactcacataggcattcatagctctacagagatgctgctgttatcacagtaatgataccaaccctaacaccaaaagacctgaataggaaacctaatttg

SEQ ID NO: 887768 - DNA, 604 bp, Homo sapiens
gtaaaaatggaacgttgcaccattggaccttaaatgcatattgctaagtgaaagaagccagtctgaaaaggctatatactgtatgattccaaacatgacattttgggagaggcaaaactatagaggcaatgaaaggatcagtagttgccaggtgttaaggggaagaggagagagagattagaaggtgaagcacaggagatttttagggcagtgtgactattctgtatgatactgtaacggtggatgtgtgatatgcatctgtcaaaacccttagaactgtaccacaccaagagtgaactaatgygaactatgaactttaatcaataacagtatatcaatattggcttaccaattctaacaaattcaccacattaaaccagatgttaataatgggacagctaagggtgggggcaagggtatatttgggaactctgtactttccacttaattttttctgtaaactaaacactgctctaaaaaataatgtcttttaattaaaacaaaataacaggttgcagttccagaaaaactcaggtggagagagttcctgtttaacatggtgagtatttaaaacatacccagcaaagccattaactaatacatt

SEQ ID NO: 887769 - DNA, 503 bp, Homo sapiens
tacttacgttacataattgtgttttaggagtaatgtgtacttggcacatagtggatacttaacaaatgataactaatattattgctattcatgatattgagcttgtgttcagtgaaaagccatcctagtactagatttgtcacagaaccaaagattgctaataacttaaaaatacaataaatctgaattcaaattctcttatgctaagtaataaaaaaagcactgtgattgacttgaacctcagaatctttttaaactgaaggcaaactaggaatataggtttagagatgyaatttgaatgtgttcctaagaaatctctattgtaataggaaaattcccctcaataccatggaaactaatctatattgggaaatttaaagcaaaaataattgataatacaggagggcactgtcattaaaaagatctagcataccttcagattaagtgcatttctcccatatacttgacagtttactatggccaggttggtcatggctgttatt

SEQ ID NO: 887770 - DNA, 677 bp, Homo sapiens
aaacattcaatcgcctctcttctagccattttaaaactatgtactgttaactatagttatcctatagtgctatagaacatgagagcttattcctcctgtctagctataattttgtatctaaacaaatctctcctatcctccaccttccccctacccttcccagcctctagtaatctcaggtgtaacatttaaaaagtagatcctttgtacctccttgacatcatctgctcatatcaccctcaccagaaaggccagcttgaacaaagaagagtgggatataaattctttatagagaaagctaggtaataggtgcaaagtgggagtaaggaaaaaagagaagatcaygcctgtagttttgcactgttgagcactcttttgtcatcttaaaaatgcgaactgaacttcccccactgtttctaatgctttataaacagttttaaagtttccctttgaaaatatggaatatggtaggcaccttggaaaactttggattttttccttttcttgctgtcattcatgttgggactgttcctcaaaatatcatggattctgtttcttttctgtgaccactgagaatgacagttgtgatacttcatctacctggtgatgttcacacagtttttctcctccctccgtacccaccctactgttcactgcacgcagttcttcctccagta

SEQ ID NO: 887771 - DNA, 665 bp, Homo sapiens
tgtggtataaagaaaggggagcaaaggtagagacagatttggatttatattctgggctcttggtaaatgtggaggctgagcaagtctctggagcctctgaagttcagtttcctcatctataaaatcaggcaagtgctatctactcgctaggtgtgatgtgggttattttccccttccattttcccatgttgtcgtctaggtagatatggagcatatctactccacccagcgtcaccactgacttactgagcccctaatatttactaggcatcatgccaaacgcttgaaagataattactcttttattttcatacatagctaggtaaagttgttattaattatatccttattccagatgaccaagctgaggttcagggagggttaagtgacttgtctggggtcacagaaccagtaactggcagagtcaagatycacacctttcctctctctcattttatgttggcagtttcttaaaagtataatccatgtctatttaaactgttttgtatcttctaacatgatccactagttgcttcctgataatatgtctatatacttttttgtgtttccatgattattgaatgattatttgtaattccacattttctttcttttttctttttttttttttttttgaagatggagttttcgctcttgttgcccag

SEQ ID NO: 887772 - DNA, 656 bp, Homo sapiens
aattttgcaaaagttctagttcttttacattttcttttaacttcctctgttccttcccttttccttctttctttccttcctctcttcctctctttctcccttcagtcaccaggcactgttgtatatattttaaacactctgtctcacctaatcctaatgctgccctatgaaatgaacggtgtgattgcattattagcaccccttctttaaagatgaagaaactgaggctcggaaaatttaagtaacacattcaaatacacacagcaaaaaatagttgagtcagaaaattcagcatttcaccataccatgtcactgcctagttgattcattttaaaaacaatatataatgatcctaatttcataaaggaagcgaggaacattagcttttgtttggaatgcctttacatgggtgtatccctgtatcctagatccacacatctaagaagtaaagcacatttcayggaccgtgcatctcaaaggttttttaaataaaactttaggttcttaaaatgccaactgacttgtgtttttcccacgcattgcttcgaccaaactaagactccagaggttccacttacttctctttttggaccagtcactgacttactttgagactttggggagtgacttcaccctccagggcccctatttcccca

SEQ ID NO: 887773 - DNA, 656 bp, Homo sapiens
aattttgcaaaagttctagttcttttacattttcttttaacttcctctgttccttcccttttccttctttctttccttcctctcttcctctctttctcccttcagtcaccaggcactgttgtatatattttaaacactctgtctcacctaatcctaatgctgccctatgaaatgaacggtgtgattgcattattagcaccccttctttaaagatgaagaaactgaggctcggaaaatttaagtaacacattcaaatacacacagcaaaaaatagttgagtcagaaaattcagcatttcaccataccatgtcactgcctagttgattcattttaaaaacaatatataatgatcctaatttcataaaggaagcgaggaacattagcttttgtttggaatgcctttacatgggtgtatccctgtatcctagatccacacatctaagaagtaaagcacatttcatggaccgtgcatctcaaaggttttttaaataaaactttaggttcttaaaatgccarctgacttgtgtttttcccacgcattgcttcgaccaaactaagactccagaggttccacttacttctctttttggaccagtcactgacttactttgagactttggggagtgacttcaccctccagggcccctatttcccca

SEQ ID NO: 887774 - DNA, 713 bp, Homo sapiens
tctactctacctccaacagatccatttttttagctcccacgtatgagtgaaaacatgagatatttgtccttctgtgcttgatttatttcacttaacacaatgacctctggttttatccagccaggttgctgcaaataacaggatttcattctttttatggctgaatgatattccattgtgtatatatacattgtctgtatccattaatctgttgatggatakctattgattccatatctcagctgtcgtgaatagtgaaacaataaacatgggaacacacatttcaaaatactgatttcctttttgtatatccagcagtgggattgctggatcatgtgacagttctgctttttagctttttgaggagcctccctactgttttccaatttttaatgggtcccctgtgtggagaagaagagcttttgaacaacagacctattgtataactctctcgacctctcatttctcccctacccaggggatattatgtctttctgcaccacataaatattttatatctcagtaagaaaaaacttattttgcatgttatcaaacagttatcactttgtcatttcttggcctgatatattcattcatttcccaacaaatattcaacaaatacatcaggcactgtgcttagttctaggaatacaaagatgaggttgtggacccaaaaaagttctccagcttggaaagaaaccagtttcttggag

SEQ ID NO: 887775 - DNA, 651 bp, Homo sapiens
gttgcaaactcttgaaggcaaatatatattttaagcctgtttgggttcctattgtttaataaatatgtcttcatagtataaattgtcatgtcttcttattccctgactcctctcctgattgaattttttcatccctctcaagctgactataacagcttctttaggaactttgtctttagatttctttgaagagcctagagctaaatattttcagcctattagacctacttcctttttttgtaacatttaggcatgcctcatttactgtcttgaagtggaattcaaagataatacaactcacctatacatataacttttaaaaatatatatgtatttaaatccctatctttaggatacaagagaaaggtaagaacagtaatccacagtaaactactctgaatttcaacccatcagtactctgacacsattacatgggaggcatgctgagatagtaggatgtgtgtacctctcacacagccaccatggatgcaccgcctcctcagccccaggtggactgtcacaggtatgggccaggtgtgggccaggtgatgccctatataatttcccctgtataatttcccaggtgttataatttcccaaattgatggtcagttgctgttaaagcttcaaacacaaccaagtacagttttt

SEQ ID NO: 887776 - DNA, 645 bp, Homo sapiens
ctgtatatctaactcagtaaatctgaacaggattgtctccaatatgaagtgccagtattcttggtctggacacaggcatgtttttttttctataaagtgagatatggtgtttatggaaattgctggcattctgaaggtttttaaatatatgatgrtacagctaaaggatactctcctacatttcagtagatatcatgtttcagttaacccatgatgaaatacgaaaggtcataagaatgcaagaggctgttagaaaatctgtctgaaacatctttggttcacctttacttaatgcctacagcttaggtagaaagctctgtgacagcattaaagaattttaaaacgaaaaagttgctctaggtgaacagattgcctatgaacatagcagactgtaaccagtgagtttacaactcgtgtttacaagtaagagcaccaattaaaagacaaattgaagtttttctttttaaaaaagtctgcttttcaacttttagtttatgaacactacatgtttaacaaatctcccctaaaaatgagggcttgcaattgaatgacaacatggacttagctatagtatcacttgttctaacacccctaaaattaatcttctgcttttttttttttttttttttttttttttgagacaga

SEQ ID NO: 887777 - DNA, 587 bp, Homo sapiens
gaaatgctttgcaatgcctcctcccccttttttaattagcagacttacttgtcctggatttcattccctgaagatgaaatttcaatattttcagagtaacttcaggtagctatgagcttaactgaatcactgtggtatgccaatcacaggtagaaatagagatggaaattctctatgagtttcctaagtatcatcaaaggccctgtgaaggggttgtacatttgaagtaagagttggcaaagaatctgaatttttcagcaaaactaaatgttcaaacattaaactttttctcacattggcaaaattgagctattaaatattggagtggtctstggcagttttccaaatcagggctaatttccaggttagtcctatacaaaggggtcaatcctatgccactagcatcatcttgttagctatatcaggaaattgaggaaatatgggggaaatttgcctttcaaaccacaaagaacttccaaaaggtttcattccataatgatgatagaatagatgatggtaggagcagaggtcaggtttaaaataaaatatccaaaatgcttcaaggtgccttatataactgctagaaa

SEQ ID NO: 887778 - DNA, 609 bp, Homo sapiens
ctggctgctgcttttcctccctgcttcctgtcctcccttcctctctaccttgctctactctcctatcccttcactggtgctccttttgtgttttatctcctctgccaatcaacatgcagggcaaggaagccaggcatagcaccgggcactggccggccctgctggtcgctctcatgcctgaagctctgtgctaaaacacctagtttccggcaatgtgcagacggtggacactcagaggtggggtgcggcaggaktcagacttctcaaggacaccatagtgtggcaaacactaaggagttcgctgccagtgtcttagtcggagtagggcaaggctatggagtagggtcccttctatttggaaaagagaaaagtgcttctgatgttatttttatataatgatccaggcagcttggtttgaccatccaacacctgcagagcccagctcagcattcatgtcttcattcccctctgctatctctggggcatatccagtgtccctgaaccgtgagttcccggctcactctcaggtttctgccgactttggtgggtctaagatgagacctttggtaaccacagaaacaaagcttctccccatgctcatggcctgag

SEQ ID NO: 887779 - DNA, 673 bp, Homo sapiens
agatacacacgtacatcaatggttatcatcaagatggaaatagcaatgtgtctgtatagttccttcctcatgctccttctgccgctctgttgctgacccaattaatgagtcctggggtgcactgctcagaggtggcttcataataccacgttcaagaggcttcttttgtgttaattataataaaaacatttacaaatgggccaattcactagctctaccttttatcatacattgtcatctcaagacatctgaaaaaccaacgatgttgtgaaataaagaatgaacatggtctacctttgcaaggacatggrtggagctagaagcccttatgctcagcaaactaacgcctgcagaaaaccaaacactgcatgttctcactcataagtgggagctgaaaaatgagaacccgtggacacagggaggggaacatcacacactggggtctgtcaggggagtgtgggtggtggtggtggtaaagcattagggaaaagacctaatgtatgctgggtttaatacctacgtgacgggttgataggagcagcaaaccaccatggcacacgtttacctatgtagcaaacctgcacatcctgcacatgtaccccagaacttaaaataaaaatagaaaagaatgaacgtggtctataataaacacaagcacttactaaaaactgca

SEQ ID NO: 887780 - DNA, 630 bp, Homo sapiens
aagcatgtttgtaggcatgaacataggttaatattattccatttactggctgagtgatgtcaggctaagctgttatttgatgtgaacatcagtttctaataactaaaaaatggtttgttgtgatatttaaatgaactatccataattytgtttcttttttcttcttttgaagaattttgattttcagttttaacatcaaggaaccaagggcaaaacttaacagcataatgttgggttttacagtgtgcaaagaaatcccttgaagctctgtttataaacttagttgcatttttttctaagtatgtttaggaagcagatttggaaggagctagagatctatgcactacaaagcactagcttctagatcaatgttttcagcagggaaggattaggcagtagaagaatatcacatgaagataagctagagagttttttgttttgttctatttatgttttaaattcatatacattgaactttaatatatgttaaatacttatttttaagtcctctcaatatcaagtggaggtgccattaatattcccatttagtagataaggaaacaggcttgggatgtcagatatcttgcctcatgtctcatggctaataaatggagaagctgctatgtgaac

SEQ ID NO: 887781 - DNA, 638 bp, Homo sapiens
tagttatcattgaatacttactatagttgtagattgtgccatgggaaaaatagagaaaatgtaaggtatgatcctaatttcttaaagacctgacagtaagaaatggaagtatccattcatatatttaatttcagtgatgttagaaatyccatattctttgaagctaagtaagtggtatagataataagtacaaataagaaactggaggaaggagattcctccaagaactaatagcaagaaataaaattttgtgaaggagatgggagctaaggtgcacttttggtaaacattttattataacaaatttcacacgatcaaatgttgaaagaattttacattgaatattagtatgctctctaccacactgttgacattttactatacttgctttatcacatatttgatatattttaatgataggtagaaattggacaggtccagctaaaaggatgaaagtttgctcaagagtgggaaaagttagaaggtagattttgtggtagacatgctccagtggtctctatacacattctttataatcccctctcatgttgtttcaggattggtctgtgtaactgtggtaggctaagtaatccctccaaccctcccaagggtgtccatatttgaatccgtagaacctg

SEQ ID NO: 887782 - DNA, 638 bp, Homo sapiens
tagttatcattgaatacttactatagttgtagattgtgccatgggaaaaatagagaaaatgtaaggtatgatcctaatttcttaaagacctgacagtaagaaatggaagtatccattcatatatttaatttcagtgatgttagaaatcccatattctttgaagctaagtaagtggtatagataataagtacaaataagaaactggaggaaggagattcctccaagaactaatagcaagaaataaaatttygtgaaggagatgggagctaaggtgcacttttggtaaacattttattataacaaatttcacacgatcaaatgttgaaagaattttacattgaatattagtatgctctctaccacactgttgacattttactatacttgctttatcacatatttgatatattttaatgataggtagaaattggacaggtccagctaaaaggatgaaagtttgctcaagagtgggaaaagttagaaggtagattttgtggtagacatgctccagtggtctctatacacattctttataatcccctctcatgttgtttcaggattggtctgtgtaactgtggtaggctaagtaatccctccaaccctcccaagggtgtccatatttgaatccgtagaacctg

SEQ ID NO: 887783 - DNA, 612 bp, Homo sapiens
ctatgttgagtgaagtggtaagagagggcatccttgtcctgtgccagttttcaaggggaatgcttccaactttttcccattcagtaaaatgttagctgtgggtttgtcacaaatggcttttattgttttgaggtatgtccttcaaygcctagtttattgagagtttttaacatgaaggggtgttgaattttatgtaaagccctttcttcatctgttgaggtaatcatgtggtttttgtctagttttgtttatgtggtgaatcacatttagcaaataaaaacaagtctgcttatattgaacctaccttgcatcccgaggatgaagcctacttgatcatgctagattagctttttgatgtgctgctggattctgtttgcaagtattttgtttgaattattgcacagatgttcatcaaggatattgacctgaagttttctttttttgttgtgtctctgacaggttttggtatcaagatgatgctggcctcatagattaagttggggaggagcctctctcaattttttggaatggtatctgtaggaatggtaccagtttttctttgtacatctcatagaatttgactgtgaatccatcaggtcctgggcttttttt

SEQ ID NO: 887784 - DNA, 580 bp, Homo sapiens
ctgtaagggtctatcagatccattttgtccatgtcgagtttaggttctgaatatctttgttaattttctaccttgttgatctgtctaatactgtcatgggagtgttgaagtctcttcctattatcatgtgggagtctatgtctctttgtaagtctytaagaacttcctttatgaatctgggtgctcctgtgttgggtgcatatatgtttaggatagtcttcttgttgaattgaatccttcaccattatgtaatgcccttcttgtcttttttgatatttgttggtttgacatctgttttgtctgaaattaggattgctatccctgcttttgcctgttttccatttgtttggtagattttcctctatccctttattttgagcctatgattgtcattacatgtgagatagcatgtaatgacaagacagcatactattagttcttgcttttttatccactttgccactctgtgccttgttgagtgggacatttggtccatttacattccaggttagtattgatatgtgtggatttgatcctattattgtgctgttagctggttattacataggcttgtttgtgt

SEQ ID NO: 887785 - DNA, 633 bp, Homo sapiens
gatgttccccatcacacattgtcaaaactctgtcaaagtgttctcgttgttcaattcccacctataagtgagtgagaacatgcgatgtttggttttctktccttgcaacagtttgcttagaatgatggtttccagcttcatccatgtccctataaaggacataaactcatcatttttgatggctgcatagtattccatggtgtgtatgtgccacgttttcttaatccagtctatcactgatggacatttgggttggttccaagtctttgctattgtgaatagtgccacaataaacatgcatgtgcatgtgtctttatagtagcatgatttataatcctttgggtatatacccagtaatgggatggccgggtcaaatggtatttctagttctagatccttgaggaattgccacactgtcttccacaatggttgaactagtttacagtcccaccaacagtgtaaaagtgttcctattgctccacatcctctccagcacctgttgtttcctgactttttaatgatcaccattctatttggtgtgagatggtatctcactgtggttttgatttgcatttctctgatggccagggatgatgagcattttttcatgtgtcttttggctgcataaatgtc

SEQ ID NO: 887786 - DNA, 627 bp, Homo sapiens
gtgggtcgcacaagcagaaatttctctgagtaggaagagtaaaaattaaattcctaaatttgagagtctttttcctgttttatttgtaagaagtacatgtaggaaaaggtgtgtgcatatgtgtgtgttggtgagattggaatgctcctttttagtctacacacatatacatataagtatatttatgagactacaaatagatatataaagtatatataagacataagattttatattattatgcctataygtcttgtaaaatactcattgtggtttactggtataccatagatttcattattccaaggttgaacaaaaagtataataacatctctctcactgtgtcatgaaagcccaaataattagtttattatttgtcctgaaacatcagcaccacatggtattgtagcaataactgcctgtattagctatcattgctgggtaacaaggtaccacaaacatagcagtttaaaacaatggccatttattatctcacagtccatttaaacacagcgagttttcaccaagtccaaatgaacttgtctggattctctacttagggcttcttaaggctgaaattgaagtgttagctaggctggactgttatctggatgctctggggaagac

SEQ ID NO: 887787 - DNA, 590 bp, Homo sapiens
tgagagtaactgagtcaaaaccacaggataacaggcacttttagttagtgaaaggagaatcctttttttttagttggtgggtatttttttcaagtttttcctcctctagtggcccatgtgaaagtcttattattagagtctctgtgattcccaaatacaatttcaaattttgatgcataaaattgccacctttggaatttttaaatttatttttgacaattaagggcaataaaaaagaacttccatctgctctatgaaaaaaagcaaggaagacaaaatataagaatttaaaaaatggattttccaaaacagcacattttgcaattatgttaatacctgagtttaaatttatatactcatatatatatatgcatacacatatgatattataatacagtaaaatatgtgtgtgtgtgtatatatatgtatgtgtatatatatatwtatccttattgtatcattattgccataacttattttttggtttatttggtcatgaaagctttgccatgatctggtaagacactgatgactagactttgggtcctgaagaagtgatatttcttttgaatgctgaaggaataggcata

SEQ ID NO: 887788 - DNA, 610 bp, Homo sapiens
atgtagaatcaaccttttcctaatgctctgctatgaatataaatttctgtactccattgtgaaaacattttaagctagcctgctcgatgtcattagccaccttcagtacttggatatatatagttaagctgtcatcattccagttcacagtcagcttcatatttacatcatctccccctgcctccttcttctctaagatttgtgattcttctgcggacatacttcagaaggtactctgacattttccactcaggaagatttcctgggctcttgagagcagggtgccagaacaggacactcagatgggagattatgtttctaaagtgtctagaayggtacacaagcatagcttgcatatcttcagtgtgtggggatcatgctctattttagaggttcttacctggggtgattttggtccctaggagacatttagcaatgtatggaaacactttattttgtcatccacaattgatagggggcaggtatgtgtgtgtattgttactagcatttagtgcgtagatatgctggagtagtaatgtgggtaggaatgctgctaaaccttctaaaatggacaggacagctcctctgcctcacagagtgctttgatcca

SEQ ID NO: 887789 - DNA, 622 bp, Homo sapiens
caggcttgccattcttctgagaaggaccccagaatctcacctctccagatggcctaaggtaacaggcagaaatactgtaaatttaaaatttcacataggcacaaattcctattcttttagtatttttacttgggctttgagtggargccttaatattctatgtttagagattggatctagtggtaagtccaatgtctgttttggaggaggccaggaatgtgggaaatggtggttgcttggcacatttgcaggaaatccctccacctgcgggacacacccgcacctcctgtcctggaaatatacaggaaatcaataggccacaaaatggaaacaattttgaactcaagaaaagggttctccttttctaatttaatgatgcagtgaactgtctgcagactttggatgaaaatgaggccctgagaagatcctggggagtgcaggagcatgagggctgaacatcaagagcaagaaagatttctttttcattaaaacaaattggtacacttggatttatagtacccagtaaagtataagcaggaagatgaaaattccaccatgaaataagacaatttaggaaagacaagagggggtggagatagcactcagcttattccaaagtgaa

SEQ ID NO: 887790 - DNA, 617 bp, Homo sapiens
atgggttcattacgagttactcacatccaggggtaggcaggcatgtggcgtgaaactccagaatgctgagagagagctggaaggtacaaaaatctcccactaagtggtattacaattttcggttacaaaatcagaatatcactttttatcccataaatatatattaatatatatataatgtatggactatatatagggaataaatatatgtataatttgtctctacatagggaatatgtatatatgtaatttatcaataaaaaatttgttaatctcctactaatgtaaaagggagtttctcaaaggtcttgatgggctcctcacttgattagaaggtggtaactagaagctgggtgcattcataaggatttgaaaaccaaggaaattatcacctcttgctgggaaggccccatcccttgctctgtgtagatgtattawacctgcagtctgagtctgtgggctcatttccatgtacactctcaccttcagctctgccgccttgctggcagtagctcaggccacaggtaccctggacagtggagggctcaagcaagaccaaatcttctacaggtagatgattcccaactcacaatctcttttctcaaccccagagtttt

SEQ ID NO: 887791 - DNA, 634 bp, Homo sapiens
aaatgtagacaccttttctcaaccagaagaagaaatgtagcagtcattctttttttttttttttttttttttttgagatggagtctcactctgtcgcccaggctggagtgcagtggcgcggtctcggctcactgcaacctctgcctcccgggtgcattccattctcctgcctcagcctcccttagtagctgaaactacaggkgcccgccaccacgcctggctaattttttgtatttttagtagagacggggtttcaccgtgttagccaggatggtctcgatctggtgacctcatgatctgcccgcctcggcctcccaaagtgctgggattacaggcttgagccactgtgcccggccctagtcattcttagaagtagtggtgcatgatgcagcattctcttggtttttactctgaaaatggtgctaactccttcctttggtcaccttttcagttttcaccccaatctttgcagatgaactgagacacaatttaggtacagaggagcaaggagctccaaagacacgaacctgccccgcctctgacagtgccacagtgctgatgggtttactctcagtttctgtgagacgtgctcatacgtgtgtaagcaagtgcaggcccaacctgggcaacaaga

SEQ ID NO: 887792 - DNA, 629 bp, Homo sapiens
ggaaaagaggaagtaaaattgtctctgtttgcagatgacctgattgtatatttagaaaaccccatcgtctcagcccaaaatcttaagctgataagcaacttcagcaaagtctcaggatacaaaatcaaggtgcaaaaaatcacaagcattcctatatgccaataatagataaacagaaggccaaatcatgagtgaactcccattcacaattgctacaaagagaataaaatacctaggagtacaacttacaagggatgtgaaggacctcatccaggagaactaccaaccactgctcaaggaaataagaggacacaaacaaatggaaaaacattacatgctcatggataagaagaatcaatatcatgaaaatggccayggtgtccaaagtaatttatagattcaatgctatccccatcaagctaccattgactttctaaatagaactagaaaaaactactttaaatttcatacggaactaaaaaagagcccacatagccaagacaatcctaagcaaaaagaacaaagctggagacatcatgctacctgacttcaaactatactacaatgctacagtaaccaaaacagcatggtacttgaacaaaaagagatatacagacctatggaacaga

SEQ ID NO: 887793 - DNA, 599 bp, Homo sapiens
actaacagcagatctctctgcagaaaccctacaagccagaatagagtgggagccaatatacaacattcttaaagaaaagaattttcaacccagaatttcatgtgcagccaaactaaccttcataagcaaaggagaaataaaatcctttacagacaagcaaatgctgagagattttgtcactactaggcctgccttacaagagctcctaatggaggcgctaaacatggaaaggaacaactggtaccagcaactgcaaaaacatatcaaattytaaagactatcaacactataaagaaattgcatcaactaatgggcaaaataaccagctagcatcataaggacagggtcagattcacacataacagtattaacttgaaatgtaaagaggctaaatgccccagttaaaagacacagactggcaaattggatgaagagtcaagacccatcagtgtgctgtattcaggagaccatctcacaggcaaagacacacataggctcaaaataaagggatggaggaatatttaccaagcaaacagaaagcaaaaaaaaaaaaaaaaaaaaaaaaagcagggattgcaatcctagtctctgataaaaca

SEQ ID NO: 887794 - DNA, 578 bp, Homo sapiens
aaaattcacactcaattaggaagagtggtttgaggtagaagttggtggttttttatttctttaaaaaaaaatattggccaggcacggtggttcatgcctgtagtaccagcagtatgggaggccagggtgagtggatcacttgagcccaggagttcaagaccagcttgggcaacatggcaaaaaccccatctytacaaaaaaataaattaaccaggtgtggtggcgtatgcctgtagtcccagctactcaggaggctgaggtgggaggatcgctaagcctgggaggcgaaggttgcagtaagccaatatcgcgccactgcactccagtctggctgacagagacagtgtcaaaaaaaaaaaatcttcgagaaaatccatttgaaacaaggaatgaaatttaaaatttgcatatataaacacgtatacatatacatatcatgtatatacataggattatgagaagtagtaatgttctaaaagtgagtatgcatatttttaaaaatttctgtaaagttgcacttgtaaggaaattcctaggtgttatttcctaagacgtaaaagcagtgtatacatccttga

SEQ ID NO: 887795 - DNA, 625 bp, Homo sapiens
atcacaagcattcctatataccaataacagacagagagccaaatcatgagtgaaatctcccattcacaattgctgcaaaaagaataagatacctaggagtacaacttacaagggatgtgaaggacctcttcaaggaraactacaaaccactgctcaaggaaataagagaggacacaaacaaatggaaaaacattccatgctcatggataggaaaaatcaatattgtgaaaatgaccatgctgcctaaagtaatttatagattcaatgccatccccatcaagctaccaatgactttcttcacagaattggaaaaaactactataaatttcatatggaaccaaaaaagagcccacataggcaagacaatcctaagtgaaaagaacaaagctggaggcatcacgctacctgacttcaaactatactacaaggctatagtaaccaaaatagcatggtactggtaccaaaacagatatatagaccaatggaacagaacagaggcctcagaaataataccgcacatctacaaccatctaatctttgacaaacgtgacaaaaacaagaaatggggaaaggattccctatttaataaacggtgttaggaaaactggctagccatatgcagaaa

SEQ ID NO: 887796 - DNA, 581 bp, Homo sapiens
catatagccaatttgttggagatgtaaaactccttacattgtcctatagtgattttcagccattaaggataaccctagcatactgttttcttttgcagttttggtgtagtgactgtttaagagcaggtgagggctttggaactagacttctttgtttcaaattcatatagctatgcatactgtcccatacatacttaagtatatccctaacatacttaaatgtatgcttgtcagtttagctaggctaaagtacagcaaagtggcccattgtccacccacccattcatccatccatccatccatccatccatccatccatccatccatcatccagtttactttggtggttaggagtataaamtgtgaagacagatacccggggttcaatctcagttctgccagttaatatgggaccttgggcaagttacttgaaactcagttttttgatcataaaaagggatgctaacatggttgttgtaagcattaaatataaagcaattagaatcattcctgacacttagttattgataaatattattttgtattattattactagaggttgaataaaatagattttggt

SEQ ID NO: 887797 - DNA, 685 bp, Homo sapiens
acttttctttctgtatgactcattaggcaatgactatatatgtactacaacgtaaacagcacctcctggattgaatagaacataactgacatgaccagcagagacaggctaaagacactgagctgaaaaccctggactctattgctaaattgaggctcctgaatccgttcgctctgagcwactgttgctgtggtgctgccttcacaagcactctgctgagcactcagatagaggggctgtgctatccgtcaacagacaagctgcagccagaactgctcagctgacaaactggtagaggtccagaaacacagttctgctgcatagtgaaaaaaggccaatttagattctttttcatagagagaaaaacataaacatgtgattgaacgagtctcctgtattagactaattgggttggctttgatatttaattgctaaaaatacacttagaatataaaccttactgtgtcaaggtctcaaagaataaataattggtatggtataaagaagtattgaattctatgctacaaacttctaagctaaaatattttcaatgtatgcaaggataggtgacatacatattagatactattcccccattaagcaaatttataatgagagaaaattatcttccataaaaaaataaaagccatgtaaaattaaggactaagtttttctgcacagacta

SEQ ID NO: 887798 - DNA, 685 bp, Homo sapiens
acttttctttctgtatgactcattaggcaatgactatatatgtactacaacgtaaacagcacctcctggattgaatagaacataactgacatgaccagcagagacaggctaaagacactgagctgaaaaccctggactctattgctaaattgaggctcctgaatccgttcgctctgagcaactgttgctgtggtgctgccttcacaagcactctgctgagcactcagatagaggggctgtgctatccgtcaacagacaagctgcagccagaactgctcagctgacaaactggtagaggtccagaaacacagttctgctgcatagtgaaaaaaggccaatttagattctttttcatagagagaaaaacataaacatgtgattgaacgagtctcctgtattagactaattgggttggctttgatatttaattgctaaaaatacacttagaatataaaccttactgtgtcaaggtctcaaagaakaaataattggtatggtataaagaagtattgaattctatgctacaaacttctaagctaaaatattttcaatgtatgcaaggataggtgacatacatattagatactattcccccattaagcaaatttataatgagagaaaattatcttccataaaaaaataaaagccatgtaaaattaaggactaagtttttctgcacagacta

SEQ ID NO: 887799 - DNA, 584 bp, Homo sapiens
tcaaagaataaataattggtatggtataaagaagtattgaattctatgctacaaacttctaagctaaaatattttcaatgtatgcaaggataggtgacatacatattagatactattcccccattaagcaaatttataatgagagaaaattatcttccataaaaaaataaaagccatgtaaaattaaggactaagtttttctgcacagactagacaacgattgctaacacataaggtcaamgagagaacagtcagagaaagcttcatgaaaacaataaattgtctgccacgtctgagtgaatgaggctagatgaacagaaactgagaaggcagaaaggatagcatgagcaagacaagtgctgaaatctgcccaattaactctgaggataaagtccaatggcagggaaataaaaacccgtgtccacataataacctgtaagtgaatgttcgcagcagcattgttcataatagctaaaaagtggaaactaacttaaaggtccatcaactgatgaatgaatggaaaaccagtatagccatggaatagtacatcatttaactataagaagaaataaactactcatgtg

SEQ ID NO: 887800 - DNA, 636 bp, Homo sapiens
acgcatccccatgctcatggatgggtagaaccaatattgtaaaaattaccattctgttaaaggcaatctacaatatcaatgcaatccccatctgaatgccaccatcattcttcacagaattacaaaaacaattctaaatttaatatggaaccaaaaaagagccatgtaaccaaaccaagcctaagcaaaaagaacctggaggtatcacactacttgatttcaaactgtacaataaggccatagttaccaaaacaccaacgtactggtttaaaaataggaacatagaccaatggaacagaagagagaacccagaaattaacccaaatacttacagccaactgatcttcgacaaagcaaacaaaaacataaagtggggaaaggacccccttttcaacacatgmtgttgggataattggcgagccacatgtaggggaataaaaatggattctcatctctcatcttatacaaaaatctactcaggatggattaagaacttaaatctaattcctgaactataaaaattctagaagagaacactggataaacccttctagacattgacatacgcaaggatttcatgaccaagaacccaaatgcaaatgcaataaaaacaaagataaatagctgggacttaat

SEQ ID NO: 887801 - DNA, 559 bp, Homo sapiens
gtgagtcaccacgccatgcccagccatttttaaaataataacgttattgaaatatggttaacgtatcatgcaattcatttatcaaagtacgcaattcaggccaggtgcagtggctaattcctataacgctaagactttgggcagctgaggcaggtggatcgcttgtgttcaggagtttgcgactagcctgggcaacatggcaaaacagcatctctagcaaaaatacaaaaattagctggatgtggtggctcatgcctgtagtcccaactacttggggacatgagactggaagatcacttgagcccagaagccataggttgcagtgagaccagatggcaccactgcactacagcatgggtgacaaaaggagaccctgtctttaaataactaaaraaaaaaagaaagtatacaattgagtggtttttagaatattcaaggagctgtgcagtatacatacagatggataattgtataaataagtacagatgtgtataaatgtgtgagtatacatacatatattttctagctcctctaacaaaagggcctagaaacaacatca

SEQ ID NO: 887802 - DNA, 590 bp, Homo sapiens
  misc_feature 213: n = A,T,C or G
atgacatgacctttcagactatacctttagaatccaatagatcataattttatatttaatttttaaaacatcttaaccagttatgaaacttaagatattcttactatctctagtaactattagttattctagtaattcttagtatctctagtaattcatagctgtmtttacccttagaattgaggcaagaaattttcagaattaccttgctgntttatttatataaccttactcataatacacaaggtaacatgaagtattgggtcatattactgaggaatagaaattatgaacagtttaacaacaatggccgctgagttaaactagtgttaaaggagtcatcattgccagtgcttcaaatgttgcagttttatattgctggtcaccagtgccgaggttaaagatttattctgttttgtggtcaccagttgacttctgtgtctgtgttcagggagtgaatggggtcataaaagtcaatgcagttgcctattaagagaatcctaccttgcagaatgggacctttggtgtcagggtgtgaacaataactttatttcaacataaatacatagtaaacattactgaaatttaaa

SEQ ID NO: 887803 - DNA, 649 bp, Homo sapiens
gcattggtctcagtctagagatccagaaagcctttttgatttgtggtttacccaccccaaagaaatgaagcatatgattcagatagaaagtcacagtatttctgctgctacagatacttataaaaacagaaaaccaacacagtgcttattccagaagccgctgtatgamaatcccagtgttaataactacaaaaccatgaatcttgaactataaaatgcgggttattctttgccacatagtgagagaacatcaaaaatatagctagaagacttacagcaagatatttcaaggtcaccaagatatcacatatatacatatgtaacaaacctgcacattgtgcacatgtaccagaacttaaagtataataatagtaaaaagaatgaggtaggcatgttacaagtagagctcctggctttggagaaacagaaagtccaacttcaaaaagacagaggttcacttgctgcttcttttttctctttatcaattatttgatttagtcaaattttctattcaagaaaatctcatgtgtacagttacagcggggttttctaaatgtgtaattatgtgtcaaagtagattagtcctgctatctaaacaatggttctggagaatgttctcataatgtttcttcattaatcaacctaagtc

SEQ ID NO: 887804 - DNA, 616 bp, Homo sapiens
atttgcagtttaaggaaaggcttatagcatcagaatccttaatcatagatttcattattgtgtgttgtttttttgagatagggtctttgtctgtcatccaggcagaagtgcagtgataataattcactgcagccctgaactctgggtacaagccatccttttgcctcagtatcccaactagctggttctacaggcatgagccaccatgcccgggtaattaaaaawtttttttttgtagagatgggggtctcactatgttgctctggctgatctcaaattcctggcctcaagtgatctttctgccacagctttttaaagtgctaggattacaggcatgagccaccatgcctaatatagagtgtaatattattttcaaagtcttattcctaggcccatttattgactttggcctaaataactcaatatgatatctctgaaactttttttgacatactgtggggaatgataatgaaggaagggggttagacactttttactaggagataactttgtgccatttaaggaggaacaaaaatgaattatcgaaaaataaaagtaaaatgaagtacaaaaattctgtggcgaagatgatgatagtaaagaatatatttttatg

SEQ ID NO: 887805 - DNA, 616 bp, Homo sapiens
atttgcagtttaaggaaaggcttatagcatcagaatccttaatcatagatttcattattgtgtgttgtttttttgagatagggtctttgtctgtcatccaggcagaagtgcagtgataataattcactgcagccctgaactctgggtacaagccatccttttgcctcagtatcccaactagctggttctacaggcatgagccaccatgcccgggtaattaaaaatwttttttttgtagagatgggggtctcactatgttgctctggctgatctcaaattcctggcctcaagtgatctttctgccacagctttttaaagtgctaggattacaggcatgagccaccatgcctaatatagagtgtaatattattttcaaagtcttattcctaggcccatttattgactttggcctaaataactcaatatgatatctctgaaactttttttgacatactgtggggaatgataatgaaggaagggggttagacactttttactaggagataactttgtgccatttaaggaggaacaaaaatgaattatcgaaaaataaaagtaaaatgaagtacaaaaattctgtggcgaagatgatgatagtaaagaatatatttttatg

SEQ ID NO: 887806 - DNA, 664 bp, Homo sapiens
tcaaaatgaaaggcaacaaacataataattaggttataattgttttaaaagtgtattcttttcctctgttttaggaacaagcacaatataaaaaacaattagagcagttaaacaaggatataatacagcttcactaaataagaaggaactcacacttaaagatgtggaatgtaaattctacaaaatgaaaactgcttatgaagaggttacaactgagttagaagaatataaggaagcctttgcagcagcattgaaagctaacagttccatgttaaaaaaattaactaagtaagtcaaaacatacactcatagaaaatgaattaacctcattaatttgtttcaaaagcataatttttagtgagatggcttcaggagattagaaggaagtgaatgttaatttgacaatgtaattttgaaaaataatgttagtaaataatyttacctttaaaatgttagtcaaagatagtttttgtctctcccctcatttttttttttttttgcttttgtatggctttttttcctgaaaagtctcaggtaattaacctgatctgttagttttcttcactaagtatttttgaagctttataattaatgaagtgatcttgttataaaattacttgtcagaatttccctaaatagaaatattaatgtgtttaatttactt

SEQ ID NO: 887807 - DNA, 610 bp, Homo sapiens
tcagatctctcagctcagtttaacaggttcttaagaaagattaaccacccaaccaccactgcagtaaaataatgaaaaatcaattcaacatcatttatttatttactcaacaaatagagatgcaagaataccaggctctatgctagatgttggagatacaatgatgaaccaaacagaactgaaccctctttgagtttgtggtcttgggaagaaattaatcagatcatcacaataaataatgcagaattgcaaactgtgagaagtgaaggaaaggtagagggaaatacgggaaagaataatgaaaggatcyggcctgttagagagaattcttggaggactggtgatgcttgagccaaactatggaagacgaatgggtgtgaatcagtgaggaacattggggctcaaaaatcagtgtgggacaagatctcagagtgagagacaatgtgggtacattcaaggaagtaaaaggacatcagtcgtggtaaatcagatttgggaactgaacctacactagagccttgtgcatgttgtctcatttgacaatcacaatgaccaatcaaattggtgttaatatgattttcattatgcatatgtaggaaccaacacttac

SEQ ID NO: 887808 - DNA, 615 bp, Homo sapiens
tagaagctaagaatttacattcagggatttactgaggagagccttattaaacagtccacacttttagctgagactcctgaagaggcttcaccttaaagataaaggcacaccagaaagagatcaacccttgaaaagaactaaagccaggcccagtttatcccaatcccttattagatcaaggtgacatgctccaacattcactgcttgctacaagagaaattaatcccatctggagaagggaagcatcattcatagcctataaaatttttcctacaaaagttctgctaggaaatttttttaaattacctaacgatttcaaaggagcaaaaataaaaagygagggctaacttttcaacccacaaaatggaaaccacaagacaataaagtaatatctttgagatcgtagaaaaacatgtctaccaacaaagagttctaaacacattgaaaatatattttaaaaatggaggtgaaatataaatactaaagaagcataaacgattagtcaccagtaaagacacactgaaagcaataagaaaaggagtttttcaggtgaaaggagaatgatctcagatggacacatacaaatggcagaagaagcaaaaagtaccagaaagt

SEQ ID NO: 887809 - DNA, 574 bp, Homo sapiens
tgcattaattagtgctaggctaaaatctttaatatgtatttagcgtttataacaaacattggtaaaaatttaaattattcagaatatgtatagttatgttgtcttacatagctattaatcaaaatttgaaaaatcatttagtcttaggaagcttgaacatatgaaagtgcaataaattttagaaatatrgaaaattaaaacttctgctagtcccttgtagttttttgtattacaacttttcttatgtgttatactttttatggagaaaattctatgtgcatctagagtgttttctggcagaaaatcactaaaaatcactgagtttctcttcttacatcccctttcatatgattcagccttgtcatgaacttctctaaactgatcctttataagaattgcaagagaagaggagagcagaaactggaaaaaaagagagtgaaatgaaagcagtacagtatttttgcatccactcaaaccaaggcccctgaattagtgctctgcagaaatgaacaaggaatcaacttcccttgcgtttttgtcctcaaaatggtaaatccttgttagtgcctttatg

SEQ ID NO: 887810 - DNA, 596 bp, Homo sapiens
aaaattatacatatgggtgttctctatagctaaatgtctttctttatattgtaatgtgcaattgctttaggacccaacttagaattcaggatgtggattgacataggtgttccccatgctggaaaaatcagtagagaactgaggtgaagaatagtatttctgaaatatccctgtagacttttggcaataattaattttacttgcaaaataatagtttaattgctcctcttcccttgtctgtgccaagtcatgtcatctgttttttacttccagttttatgtatttttaaatggatcataaaaaaactccccaccctcttcttgacaaaaagctctgagctactcagaacaaaggagcaaagtaactacacttgaggtttttattgacatgtacacacatgctaagccttgacttacartgtattttactcatttatgaaaaagatgagtcacctgtgtctgcatttgtcacatgtaagttatttattttcttagccacgtttccccacctggattattctgtaatgcaaaaaaaaaatattgtaaatggcttagctagaagttttatcatttcaaatttattcttttactttggta

SEQ ID NO: 887811 - DNA, 647 bp, Homo sapiens
taacaaagacagaggcatttgaatcttggcttctaatggcagaagccctatagttagggtgtaggaaggagtagcctgtttatataaaaataaacctacacatcattgaatctggttatcaaaattcaactaaaccaaaccaaagctctgcttagaaaataaaatacagtttatattttaaacagtatataaatacagtttatacccaatggtcatgtcagaatcctgtaatcagaagcagcttgaaactctattttcacatcctctgggatttcaattcactgacttgccagttcaaaatcacggaagtcctctacataattaatgctcatttttagtgtattgcctcagtgtatatcttattttatacacgattcatagtttcttgatgaaratgcacttatataagcataattttgtagtttttaaaaattgttttcagaaatctactctttcaaagtaactccataagcactttggtccagaatgaatcatgagtgagttagtgaactgtttctgtgtctatatatgtgtatgcgtatttagtgctgctaatctattccacaatttttttctgacttgctacaacttggaacttctccaaacatgtttttaaaaaatgctgttaattacaggaactttaataa

SEQ ID NO: 887812 - DNA, 619 bp, Homo sapiens
aggaattataccaagtagtgtataggaattatactaactatagtagaagaaattttattagctaggtgtaccctcaacgtgtcactaatgagacactcattttctataaacaatactgatttcatgggttttacctagtgctgcttgagaaatagcgttcatttcacagacatactctctttatatataatttaaagcactttcctatttgctaatagaattaacagggcattcacccrtattttacaaaaaataagacctatgacattcattacaaacaaattttccaaatttgcaaataatttcccattgttacagttttactaggtacattcatttgctggggcagctgtaaactaccacagacgggaaggctgaagcaacagagatttacctcctcacagttgaggaggctggaagtccaagatcaaggtgtcagcagggtgggtttctcctgcaaccctctccttggcttgtaggtggccatcatccccctgcatctcacatggtcttttctctgttgtgtctgcatccttatctcctcttgtaacacaccagttagatgggattagggcccaccagaataaccccattgtaacctaatcacctttgtaaagat

SEQ ID NO: 887813 - DNA, 619 bp, Homo sapiens
aggaattataccaagtagtgtataggaattatactaactatagtagaagaaattttattagctaggtgtaccctcaacgtgtcactaatgagacactcattttctataaacaatactgatttcatgggttttacctagtgctgcttgagaaatagcgttcatttcacagacatactctctttatatataatttaaagcactttcctatttgctaatagaattaacagggcattcacccatattttacaaaaaataagacctatgacattyattacaaacaaattttccaaatttgcaaataatttcccattgttacagttttactaggtacattcatttgctggggcagctgtaaactaccacagacgggaaggctgaagcaacagagatttacctcctcacagttgaggaggctggaagtccaagatcaaggtgtcagcagggtgggtttctcctgcaaccctctccttggcttgtaggtggccatcatccccctgcatctcacatggtcttttctctgttgtgtctgcatccttatctcctcttgtaacacaccagttagatgggattagggcccaccagaataaccccattgtaacctaatcacctttgtaaagat

SEQ ID NO: 887814 - DNA, 627 bp, Homo sapiens
tactctctttatatataatttaaagcactttcctatttgctaatagaattaacagggcattcacccatattttacaaaaaataagacctatgacattcattacaaacaaattttccaaatttgcaaataatttcccattgttacagttttactaggtacattcatttgctggggcagctgtaaactaccacagacgggaaggctgaagcaacagagatttacctcctcacagttgaggaggctggaagtccaagatcaaggtgtcagcagggtgggtttctcctgcaaccctctccttggcttgtasgtggccatcatccccctgcatctcacatggtcttttctctgttgtgtctgcatccttatctcctcttgtaacacaccagttagatgggattagggcccaccagaataaccccattgtaacctaatcacctttgtaaagatcccacctctaaacacagtcatattttgaggcactggggggttaaacatatgaattttggtggtacaaaatccagccaataatactgactaaaataaaatgtgcttgaaaattaaagaatgaccagtctttgagaatgttgtcacctaaattttctaaacacattgccatgaatttttatg

SEQ ID NO: 887815 - DNA, 627 bp, Homo sapiens
tactctctttatatataatttaaagcactttcctatttgctaatagaattaacagggcattcacccatattttacaaaaaataagacctatgacattcattacaaacaaattttccaaatttgcaaataatttcccattgttacagttttactaggtacattcatttgctggggcagctgtaaactaccacagacgggaaggctgaagcaacagagatttacctcctcacagttgaggaggctggaagtccaagatcaaggtgtcagcagggtgggtttctcctgcaaccctctccttggcttgtaggtggccatcatccccctgcatctcacatggtcttttctctgttgtgtctgcatccttatctcctcttgtaacacaccagttagatgggattagggccyaccagaataaccccattgtaacctaatcacctttgtaaagatcccacctctaaacacagtcatattttgaggcactggggggttaaacatatgaattttggtggtacaaaatccagccaataatactgactaaaataaaatgtgcttgaaaattaaagaatgaccagtctttgagaatgttgtcacctaaattttctaaacacattgccatgaatttttatg

SEQ ID NO: 887816 - DNA, 654 bp, Homo sapiens
aagcacatatacgaaggtggttccataaggttgtaatactgtatttttactgtaccgtttctatgtttagatgcacaaatatataccattgtattacaactgcctacagtattcagtacaggagcacgctgtgcaggtttgtagcctaggagtaatagactataccatatcgcctaggtgtgtwgaaagctatgccatctagttttgtgtaagtacacaatgattttcacacaatgatgaaactgcctaacaacacatttctgaaaacatatccctgtcattaagcttgactgtgtttgtgtgtatatacactttgcacttctttagagaatgtagattacatgattatctcagttctgaacacaactggtgtctacataggttagacgcttccccaagcaaaattacctcatgtaaggtgacagacagtaacagagtttgacatacaagaaatgtctatagatatcaccagcattcataggaggtaagaaagattactgaaatatctatctatttatttttgagcattaagaaaaaagttttcattttccccttgactgatatcccatatgttttgtgggaagttactcaaaaaagaaaatcatccaaggtcagatgaaaaaaattttaagaaaataaagaacgcccagcatg

SEQ ID NO: 887817 - DNA, 661 bp, Homo sapiens
agcagttaaatcagttcagttaacgaaaaaatgtaggtgtttacatgaatgcaaatcacagtgagttattggggcccaattcagacacttgttctgtcccgtcgatgttcaatttcctcaggccttgctaaaataaataaataattgtattccatagctgtagtttttcactcaataaattatgaacatttatgatgctcccaccagatatgtcatgaggaagatggtgtgcccagaccaaaggcaaagacctccctgggcagtgtcttctctccttcattgaagatactgcatatgtgaatttcaggaatggctcctgcagttctggcggaagttgggttttccttagttagttgtgttgaggcaaccacaatatagaggtgctatgaatttctccagggatggtggagtggtgacacaaagcacaaccttgatgcagctccttagtgagtttaatgttcaagaaaaaaataataaaatkattaaatatttaaatcccttcttcatttctaatactgtgcattttttatccactgatttggctactatgtaagaaaacagtcaaccattgtaatcacttgtggttgactattttcttacatagaagccaaatctgggtgaaaaatctactgtattaaaataaatattgtataaaatacaa

SEQ ID NO: 887818 - DNA, 430 bp, Homo sapiens
ggtacttgtgttctgtgatgaggaaagttgggtcataattaccattgaaatgttcccatattatgtggaggagtctgaaaaattccactttatcactaactagtgaagcacaatagtgaatgaacccaactacttctatggaacagattgttcatttcttggaagttacatgaattctttcagaccaaacagcatacaaagttcttgtaagtttctttagcattatttaaaggrtgttatatacacaatcaatattcaatagatgcttcattcaattaattaaaatgcattaaatggccttccattggctgcaaccaagtcaaatttggcttgaacctctcatttactcatagggagggcctgagtgaatctaactttacataaaacatggatcgggtcattgcctgatcacattcagtatgttgccctc

SEQ ID NO: 887819 - DNA, 584 bp, Homo sapiens
aggttgggtcaacataaacaaattgataaataggattcatcacataaacagaactaaagacaaaacccacataattgtctcaatagatgcagaaaatgcttttgataaaatttaacaccacttcatgttaaaaactctcaataaactaggtatcgaaaggacgtagctcaaaataataagtgcccacagccaacatcatactgaatgggcaaaagctagaagcattttccttgaaaaccagcacaagacaatcaagcaaaagaaagaaataaatagtatccaaataggaagagaggaagtcaaactattcctgttttcagacatgatcytatattcagaaaaccccatagtcttggtccaaaagctccttaagctgacaaacaacttcagcaaaatttcaggatactaaatcaatgtgcaaaaattactagccctcctatacacagtcaagctgagagccaaattggaatgaaatcccattcaaaattgccacacactcaaaataaaatacctaggaatacagctaaccagggaggtgaaagatctctacaacaagaactacaaaacactgctcaaagaaatca

SEQ ID NO: 887820 - DNA, 597 bp, Homo sapiens
ttccagaaaacaaaaacaaagaggggaaagtaactgaacttccaaacactggcagtgcaatccaaagaggtgaaaagcaaattcacatgagctgaataaagaaactagcaatcaggaaggaagcacaggggaaatcacaaaagaaagcagaagagcagcccttgagataagaaaarggaggcaaacatgagaagggttcttcagaacttggagatcactgtagataacagcagaagcacggcccggcaccgtggctaatgcctgtaatcccagcacattgggaggccaaggtgggcagattacctgaagtcaagagttcgagacccacatggccaacatggtgaaaacccatctctactaaaaatacaaaaattagcggggcatggtggcacgtgcctgtaatcccagctactcggaaggctgaggcaggagaatcacttgaacttgggaggcagaggttgcagtgagccgagatcacgtcactgcactccagcctgagtgacagagtgagacttcatctcgaaaaaaaaaaaaaaacaccaagcagatgcatgaagaaagagaaacaaaggtataggaaacaaatgcaggagtgca

SEQ ID NO: 887821 - DNA, 597 bp, Homo sapiens
ttccagaaaacaaaaacaaagaggggaaagtaactgaacttccaaacactggcagtgcaatccaaagaggtgaaaagcaaattcacatgagctgaataaagaaactagcaatcaggaaggaagcacaggggaaatcacaaaagaaagcagaagagcagcccttgagataagaaaaaggaggcaaacatgagaagggttcttcagaacttggagatcactgtagataacagcagaagcacggcccggcaccgtggctaatgcctgtaatcccagcacattgggaggccaaggtgggcagattacctgaagtcaagagttcgagacccacatggccaacatggtgaaaacccayctctactaaaaatacaaaaattagcggggcatggtggcacgtgcctgtaatcccagctactcggaaggctgaggcaggagaatcacttgaacttgggaggcagaggttgcagtgagccgagatcacgtcactgcactccagcctgagtgacagagtgagacttcatctcgaaaaaaaaaaaaaaacaccaagcagatgcatgaagaaagagaaacaaaggtataggaaacaaatgcaggagtgca

SEQ ID NO: 887822 - DNA, 608 bp, Homo sapiens
cggcgagaaaccagattttttatttttctagtaagttgtttgcatttaaacataccaaagtttcaacaaatagatgtattattataactttctttttctcttttatagtgtttgctttttgtgtgatgttcaacaggttaktttgaaacccaagagtccataactattgtatgtatttccttttctttctttcccttttttttttttttttttgagacagagtcttattctgtcacccaggctggagtgcagtggcgcgatcttggctcaccgcaacctccacctcccaggttcaagcaattctcatgcctcagcctccagagtggctgggattacaggtgtgcaccactacgcctggctcatttttgtattttttagtagagacaggatttcaccgtgttggccaggatggtctccaactcctgacctcaggtgatccacctgcctcggcctcccaaagtgctgggattagaggcgtgagccaccgcgcctggccagtatgtattttctcccaggtattattgcatattttgaagttatgatcataatcactttggaattgtgatcaatttggtatacaatgtgaagtgtggataagcatatttttc

SEQ ID NO: 887823 - DNA, 608 bp, Homo sapiens
cggcgagaaaccagattttttatttttctagtaagttgtttgcatttaaacataccaaagtttcaacaaatagatgtattattataactttctttttctcttttatagtgtttgctttttgtgtgatgttcaacaggttagtttgaaacccaagagtccataactattgtatgtatttccttttctttctttcccttttttttttttttttttgagacagagtctyattctgtcacccaggctggagtgcagtggcgcgatcttggctcaccgcaacctccacctcccaggttcaagcaattctcatgcctcagcctccagagtggctgggattacaggtgtgcaccactacgcctggctcatttttgtattttttagtagagacaggatttcaccgtgttggccaggatggtctccaactcctgacctcaggtgatccacctgcctcggcctcccaaagtgctgggattagaggcgtgagccaccgcgcctggccagtatgtattttctcccaggtattattgcatattttgaagttatgatcataatcactttggaattgtgatcaatttggtatacaatgtgaagtgtggataagcatatttttc

SEQ ID NO: 887824 - DNA, 687 bp, Homo sapiens
cctgggtgatgaaataatctgcacaaaaaacccccacgacacaagcttacctatgtaacaaacctgcacctgtacccctgaacgtaaaaataaaagttaaaacaatcacaaaactctttcatagtaatatttaaaatttaaaactcagtctacacaactattaatttcatgttttgatgatattttcagagtttattcaaaatactagtttgaaagtttcaagctgaaattaacttggtttctatccatttattgtttgcgtttagaagaaaaaagaaaaccatccagcataccgcatgcactttaaggagaagaaatccaataataccgtgtgaactaatcatgaaatgtattaaaggctggagattattttgaccaagtgttgacagtctaaastcttggatttaaaattagtttaatagcactgccaaatgcatcttaggctttaattaacgtgaagtgttgaaaaaatgtctgagtgcaaaatctatcttaatttctcagccttagtttagtatttactgaaactggaaatgccgtagaggcttctggtttttatttattcataagtaaataatgtaacagaaaaaaatattcaggcacatcaaccttaaaaaaaaatgcatcctcataaaaaagtgtggggtgggcagcaggtgtcaaagaaaaatttcatcagacccgagc

SEQ ID NO: 887825 - DNA, 596 bp, Homo sapiens
ctaatttgttctaggcagaggcgaggcagaggcaggagagtctttcagagggagtaacaattgatctgagattcaaagaataaaaaaaaaaaaaggcaaaaaaagacacaagaaccagatgaccattccagcatataaagtagtgcacttccattgttgaattatgcgagattcagttatctgttccttcttaacaaacatttccaaaattaatggtttaaaacaatgattactactgtcatggttcctgaggtgacaggtgagctgggaagtttttcctgctccaggtgttttcaacttggtggtattcagcaggtagacaggctggtccagtagatataaaccatgtctggcatctttacagggatgcccacaaatgctggactcagcttagaatgctgagccaggaacctataccttgatggtcttggtccaaggtgggcacttgtgaacttcttacwtggcagtgcaagaaacactggggcaagaattccaaaagaccggaggggaacctgccagccttcttacagcctaaacctggaatgtccgaccattacttccttcacatcctattagtggaacaagtcacctaggcc

SEQ ID NO: 887826 - DNA, 536 bp, Homo sapiens
gaggttcctgaagggtgtattaacccttctcctaaaagttaaaaatgagaactaagcttatgagtggtgacttgcagatagcattttttttttgagacagagtttcactcttgttgcccaggctggagtgcagtggcacaatctcggctcaccgcaacctccgcctcctgggttyaagcgattctcctgcctcagcctcctgagtagctgggattacaggtgctcgccaccacactcagctaatttttgtgtttttagtggagatggggtttcaccatgctggtcaggctggtctcgaactcctgacctcaagtgatctgcctgccttggcctcccaaattcctgggattacaggcataagccacctcgcccagctgtagatagcttcttaagaggacatgttggagctgtgactccccaaatgatggaccaggcaattcgtattgcactggactcctccagagaggtgaaggaaatcaataatgagtgtgtctaacaggcaataagggcctcttttgggggcagaaagtttactg

SEQ ID NO: 887827 - DNA, 536 bp, Homo sapiens
gaggttcctgaagggtgtattaacccttctcctaaaagttaaaaatgagaactaagcttatgagtggtgacttgcagatagcattttttttttgagacagagtttcactcttgttgcccaggctggagtgcagtggcacaatctcggctcaccgcaacctccgcctcctgggtttaagcgattctcctgcctcagcctcctgagtagctgggattacaggtgctcgccaccacactcagctaatttttgtgtttttagtggagatggggtttcaccatgctggtcaggctggtctcgaactcctgacctcaagtgatctgcctgcctyggcctcccaaattcctgggattacaggcataagccacctcgcccagctgtagatagcttcttaagaggacatgttggagctgtgactccccaaatgatggaccaggcaattcgtattgcactggactcctccagagaggtgaaggaaatcaataatgagtgtgtctaacaggcaataagggcctcttttgggggcagaaagtttactg

SEQ ID NO: 887828 - DNA, 598 bp, Homo sapiens
gtgccaaggagatggtcagggattctgaccttttgtaatacccactaagacctcctaagccaccacaaataaacatattatctgagtagaatagtgcacttgctctgcaaatgcacttttgaggcaaatctcttgactcccttctagctagactgcagtctcaaagcccttcttgtgtagagcytgcgagctgtcagtggatagcatcaaatcaagcggatggattcttgaaagctaaatgtcatcatttgacagagctactatgaggaaaaatatttttatttttaaaaaagttttattgatcgattgatttgagatggggtcttgctctgtcacctaggctggagtgcagtggcttgatcatggctcactgcagcctcgaactcccgggctcaatggatcctccaggttcagtcgatcctccgggctcaattgattcttgtgcctcagcctcctgagtagatggtactacaggcacgcaccaccacacctggctacttttttgtattttttgtagagacagagttttgtcatgttgcccaggctgatgtcaaacccctgggctcggccaagtgcagtggctcacgcctgtaatccc

SEQ ID NO: 887829 - DNA, 534 bp, Homo sapiens
gtgcctccacattccatgggccagaactcagtcatggagctgcacctggcaggaggggcctgggacatgtagacctactctttgactagggggaaagggatgcgacttggttgatgatccgcctgtatataccacactatgtgaggcagggaagtcctaactataactacctaaaagcaattttatatttccttctgggctcagaaggtgcacagagccactagccttctgccaaccatgagatgcagaaaattccctacatcagcagccgccagcccacyttcccaatgggcccttgtaagtcttcctgtacccagtgctggagggtaacgaggtaaggatgagtgggaggagaggggggatatagggagtccctcacttccctggaaagcttcccctctccaggcctggcagcagttcaagcagggagcactgggagggcctcgtggaggagcaagctgactcttctctgggaagatgcagtgggctctgcagactatctattgggtcctctctcacacaagccctaggcag

SEQ ID NO: 887830 - DNA, 592 bp, Homo sapiens
aagggaactagagccccggcgccttcgcagccggagcggaagccggagttgtgggaggcccgcgtgccctccccgcccgtggggcccagacgcgcggggacaacccctcccctccacgcatcccgagtctctctctccctcccttgtcctagccatggaagggctggaggaggcagaggccaactgctccgtggcgttcgctgaggctcagagatgggtggaggtgagtgcctttcactgctttcccttccgcaggtgttgactgcctcggggcggtcgtcgcgaggtgactgcagccccagtcactctgcactttagcctccttcggcgacccagccgacgtgaacaagctggtttgcttgtgcacttttggggactctgcgggttctgccgctcctgcatcttatgtcccgcttakattggcgctgccctaacccccgccccccgacggtgtcactggcttcctagggcagaggtgggcgttcgcctgccggcatcgcgcgtcccggaggagcagcgcagtccgccctggctcgcccggggcgtctctgcggggcacagcccagagcgcgcggtgcagagctgggccagg

SEQ ID NO: 887831 - DNA, 669 bp, Homo sapiens
ggtgaaaaaggaggtctagtttcaatccactgcataggtctagccagttattccagcaccatttattgaataggaagctctttcctcattgcttgttttgtcaactttgtcaaagaacagatggttacaggtaggctgcattctttctgggttctctaaccagttccattggtctatgtttctgtttttggacaagtatcatgctgttttggttactgaagccttgtagtattgtttgaaattgggtaacgtgatgcctctgtttttgttctttttacttaggattcttttgactgtgagggctcttttctgatttcatataaatgtaagaatagtatgttaaaaattggtaaaaatgtcattggtagtttgataaaaatagcattgagcctgtaatcccagcactttgggaggccgaggcaggyggctcacgaggtcaggagatcgagaccatcctggttaacacagcgaaaccccgtctctactaaaaatacaaaaaattagccgggcctggtggcgggcacctgtagtcccagctactcaggaggctgaggcaggagaatagcttgaacccgggaggcagagcttgcagtgagctgagatcgccactgcactccatccagcctactgggcaacagagtgagattctgtcaataaaaaaaaaaaaaa

SEQ ID NO: 887832 - DNA, 636 bp, Homo sapiens
tgccacacaccactttccgacaaagacacagtgttccaggaaattaaaatatgttttactaagaaagaacaaagtcagtatagatgtaatggagcctatctacacacaaatcaatttgctttacaaaatagaaaattattwtttaagtcttaaaacatccaaattcatgctgggaaaactggctagcaataagcagaagactgaaactggacccctatctctcacaaaaaaatgactcaagatgaattaaagacttaaatataagacctcaaactataaaaatcctggaagacaacctaagaaatactcttctggacattggcctagaatttatgactaagacctcaaaagcaaaagcaaaatcaacgaaaataaaaattgacaattggtacctaattaaactatagaaattttgcacagccataataaactatcaaaattgtaaacagcctacaaaatggaagaaaatatttgtaaactatgcatccaacagaagactaatatccataatctataagcaacttaaacaaatcaacaacaacaaaaacaaatgaccctattaaaatgtggacgaaggacatgaacagacttctcagaagaagacatacatgtggccaacaaacatgaaaagagaaa

SEQ ID NO: 887833 - DNA, 636 bp, Homo sapiens
tgccacacaccactttccgacaaagacacagtgttccaggaaattaaaatatgttttactaagaaagaacaaagtcagtatagatgtaatggagcctatctacacacaaatcaatttgctttacaaaatagaaaattattttttaagtcttaaaacatccaaattcatgctgggaaaactggctagcaataagcagaagactgaaactggacccctatctctcacaaaaaaatractcaagatgaattaaagacttaaatataagacctcaaactataaaaatcctggaagacaacctaagaaatactcttctggacattggcctagaatttatgactaagacctcaaaagcaaaagcaaaatcaacgaaaataaaaattgacaattggtacctaattaaactatagaaattttgcacagccataataaactatcaaaattgtaaacagcctacaaaatggaagaaaatatttgtaaactatgcatccaacagaagactaatatccataatctataagcaacttaaacaaatcaacaacaacaaaaacaaatgaccctattaaaatgtggacgaaggacatgaacagacttctcagaagaagacatacatgtggccaacaaacatgaaaagagaaa

SEQ ID NO: 887834 - DNA, 636 bp, Homo sapiens
tgccacacaccactttccgacaaagacacagtgttccaggaaattaaaatatgttttactaagaaagaacaaagtcagtatagatgtaatggagcctatctacacacaaatcaatttgctttacaaaatagaaaattattttttaagtcttaaaacatccaaattcatgctgggaaaactggctagcaataagcagaagactgaaactggacccctatctctcacaaaaaaatgactcaagatgaattaaagacttaaatataagacctcaaactataaaaatcctggaagacaacctaagaaatactcttctggacattggcctagaatttatgactaagacctcaaaagcaaaagcaaaatcaaygaaaataaaaattgacaattggtacctaattaaactatagaaattttgcacagccataataaactatcaaaattgtaaacagcctacaaaatggaagaaaatatttgtaaactatgcatccaacagaagactaatatccataatctataagcaacttaaacaaatcaacaacaacaaaaacaaatgaccctattaaaatgtggacgaaggacatgaacagacttctcagaagaagacatacatgtggccaacaaacatgaaaagagaaa

SEQ ID NO: 887835 - DNA, 645 bp, Homo sapiens
ggcaacatatgtaccagtaaaatttctaacttacattgggtcttcatcttccatctatcaaggcataagcttatccatgtataaggctggctgcaaaatttttcacaaagtatattccatgagtccacacaacagaccccctttttacttctattattcaaagaggcataagcaaagaaaaaaattgaaagataagagtctcgtgatagtagaaaagtcttgatccgtgatcttgggataaagctgtccacatcaaggatgccatcttcttctgggtagaaacttctctgcctagttttattttaagggtttcaaagggygtacagttccaagagtattgagggatgcttctgagttgtgagattatgaaccttaggttcaaggtcccaaagttatgctacaatgtggatggcaagggcagtttttctctgatgctcttggatcacaatctagaatctttgggttctagattgtgaagaggttgattgtccccagtcagtgaaccatgaagaattttctttactttgtgaaaatatactgtggcataatgagctactgttataacatcagacttcttacatgagaaacttttgtataactagaaaacatgcattgagatgacaagtgattaaatccttctataaa

SEQ ID NO: 887836 - DNA, 590 bp, Homo sapiens
accaggaacttagaaacacaaatctttgggccgcattccaaatcactgaatcagaaactctggagttggggttcagcaacctgtgttttgacaaaacctccaggtgattcagatgcaccctcaggtttgagaaccactagattacaagaaatggaaatctgacaagtccgatcagacatttcctcttaggctgtaagaagcaaaacctctcttcccaccccagtgtcctytctgcttgctccctgtcttcattcccttacactggcatcctcttccctctcctccctcgtcaccccttccgcctcaccacacaccaacgaacacctgtacggcgttcaaagaactagaaaccagcccccatttctcctctacttggagaatgtattttataacgtgtgcatagtgcgcaggcaaggggcggaatttaaacaatgtctaattaaagaagacaacaccacacgtttatcacattacattgttgtgtatttaccccttgccgcttttgatgcatttgcatatcatcttttataattcaattcacttgcttaaatcatttcttttattttcacttatttatccagaaggaaaag

SEQ ID NO: 887837 - DNA, 590 bp, Homo sapiens
accaggaacttagaaacacaaatctttgggccgcattccaaatcactgaatcagaaactctggagttggggttcagcaacctgtgttttgacaaaacctccaggtgattcagatgcaccctcaggtttgagaaccactagattacaagaaatggaaatctgacaagtccgatcagacatttcctcttaggctgtaagaagcaaaacctctcttcccaccccagtgtcctctctgcttgctccctgtcttcattcccttacactggcatcctcttccctctcctccctcgtcaccccttccgcctcaccacacaccaacgaacacctgtacggcgttcaaagaactagaaaccagcccccatttctcctctacttggagaatgtattttataacgtgtgcatagtgcgcaggcaaggggyggaatttaaacaatgtctaattaaagaagacaacaccacacgtttatcacattacattgttgtgtatttaccccttgccgcttttgatgcatttgcatatcatcttttataattcaattcacttgcttaaatcatttcttttattttcacttatttatccagaaggaaaag

SEQ ID NO: 887838 - DNA, 618 bp, Homo sapiens
ttcagtggcccgtttagcatagaaactttctgtgaactctgtaggtgaccttttccctttctttgtttccacttaatcagattgcatgcgacctttgggagcctaaggcttcgatgttgagaagagtacatgaaaggattaaaaaaaaataatacattttttggtacattgcctttggaggcatattaaaatcctcttgaatgctgttgtctttttctcattgaaaatacccagcctgttttctatataaacagcccttttcttttatcttggtgatattgttttacaatccaaccttatgrcttaactattttatttgtctcaaaatcattttttttagcatggcccaattattagaaacaatctcactcatgtgaaaaagaattgttagtgatctttctttcaactaaggagaaaaacaaatatacaaacagcactgttcccctgtaggatttgcgttggttggtcagacatactttctctggattgttacctgaaattgaaagggaactatggcgatctgagtattcctcccatctgtcatttgcatggggactcttgcctaggccaccaactcaaaaaagaaaaaataaagattgctgcatttggaggctagaa

SEQ ID NO: 887839 - DNA, 485 bp, Homo sapiens
atctgacatttcccctgcttgcactcattctctctcctgccaccctgtgaagaggttacttcagccatgattgtaagtttcctgaggcatccccaacatgtgggactgggagtcaattaaacctcttttctttataaattgaaactgaaatactcagtcttgggtattcctagcagcgtgaaaatagactaatacagtaaattggtaccaagagtggggttctgctgtaaagataaccgaaagtgtggaaatgacttttgaactgggtaacacgcagaagtgggaacattttggagggctcaraagaaaataggaaaatgtgggaaagtttggaacttcctagagacttgaatagctttgatagtgatccagaaaatgaagatcaggctgaggtcatctcagatgaagatgaggaacttgttggtaactggagtaaaggtcactcttgctatgttttagcaaagagactggtgacattttgcccc

SEQ ID NO: 887840 - DNA, 655 bp, Homo sapiens
ctaacaaagtttagttaaagagacaccaacatgtgtatcaaagtagggaaagttatcttcagaaacctaagatttccataattaggatatgtttccaaggctgcctatgcatcagtgataacggattttcagatgaggattttccctcattagatttcctttaaattgatgagacttgggagttggttcctaaaatccattcgaattcatggcaataagcaatattcagaataagtcagctcaattgtggtgcacygtgattaactgagacatagctgggggcctgggatagggaaaactgctccaaaaaataaacagaacatatttatgaagggctctttagagagcacacctgagaaatgaaattcccttttagaccacatgaagatattggcctttacctgatgggcagagttcatttcagacaccctgggagcaggaaaaagatgaaataaacaagagggtggtggatggacccaggtaggtggatgctttgatctctgatctccagtcttctctgggtatttggtcacttcttctcgcctggtgctggtgtggtactcaatatacttgcagggagaaggagcaatatgtgacaagcagaggagcaatatcggtttcctttaaaacacagagcattacaaacaaatcgtga

SEQ ID NO: 887841 - DNA, 586 bp, Homo sapiens
ggcatatctaaaagataatccaccatgatcaagtgagtttcataccagaaatacaggaatagtttaacatacacaagtcaataaatgtgatgcaccatataaacagacttgaaatcatatgatcatctcaatagattcagaaatagcatttgacaaaacccagtatctttttatgattaaaaccctcaggaaaatcagcatagaagggacatatgccttaaggtaataaaagccatctatgacagacccacagccaacataatactgtttgggaaaaagttgaaagtattctccctgagatctggaacraaacaaggatgcccactctcaccacttctattcaacataatactggaagtcctagccaacaagagaaagaaatcaaggttatcaaaattggtaaaaaggaagtcaaactgtccctgtttgctgatgatacgatcatatacatagaaaaccctataaattacccagtctcaggtattttcttataccaatgtgagaatggactaacacatcaaatatgtgcatgctgtatgccctttgtcttttttctatagctatcatgggatggtattgaatggag

SEQ ID NO: 887842 - DNA, 633 bp, Homo sapiens
tgtttgggcaacttagcagtttcagccttcaggcactgttttggtctaagccaaatggagcagaatgaatcccacagtataacacagttggtctacccaagcatggccagactgcttctttaagtgggtgcgcaatcccatccctcttaactgggcaggacctcccaactggggtctccagcagcccctgtcggtgttctccagccaacagagatttgtaacctccctaggctggagctcccagagggagaggtgggccaccatctttgctgtttaggcaacttagccattccagcctttgggcttcagaatgttggaggtgactgggggctgaagtggacccccagcatagcatagatgytctaccaaaacatagacacactgctttttaaagtgggccctcaattctgttcctcctcactgggcaggaactcccaactggggtcttcagccacctcctacagggctggaaacaagtctgtacctccctgagacaaagcttccagagggaggggcaggctgccatctttgctgtttcacagccttcactggtgataccttaaggtgctggaaaacctgaggtgactaaggactggagtgggccctaagcatactacagcagccctgtggaaa

SEQ ID NO: 887843 - DNA, 602 bp, Homo sapiens
caataaagtgatactggagctgaaggacaaaatagccagtattaaaatgaatctaacaggtccgacgagctgaataacacaatacaagaatttcacaatgcaattacaagtgttaacagcagaataaatcaagctgaggaaagaatctcagaacttgaagattggttctctgaaataagacagtcagacaaaaataaagaaagaaaaacactaaataaaaagaaatcagcaaaacctccaagaagtatgggattatgtaaagaggccaaatctatgaattgttggcatcaccgaaggtgggggagaaagcaaacaacttggaaaacatatttcaggatatcatccataaaaacttctccaactttgctagagaggccaacagtcaaattaaggaaatacagagaactcctgcaagattctacacaagatmatcccaagacacaaaatcctcagattttccaaggtcaaaatgaaagaaagaaaaaatgttaaaggctgctagagaaaaaagggcaggtaacctacaagggagccccatcaggcttaaagcagacctttcagctaaaaccctgcaaaccagaagagattaggggcttatattc

SEQ ID NO: 887844 - DNA, 646 bp, Homo sapiens
tcgtttgtttatttcctaaatcctttcttgagacaatcacaactccttggcagttatgcaacatgaggagtccttcatgctgttattcttgcaattacttcagatgacttgcaggattaggagaccatctctgtgtctcattaaaatcctgtgtttgaaaggtgcaactaagaatgtctcatagaagattgttggcatatcctgacaagaggacgttcctggatttctattgmtcaacatgtcaatcttttattgaatcaatcattcaatctcgctaaattgctagtgcagcttcccatcttcctatccaaacttactgagaatttactggaccaaaaaatatatatcctagatttctgctctgtatgcaccaatgttttagggttatttcgtgttagtctttataggaaactatagagttgagtcttgcctcagttgaggtcatgaggcctgcatataatgaggctcatgtggcaacatcacattgatcaaccaaagtcattttccagaggggatcgcaaacacatcacctaccgattgctagtgttatagggttctgtttagtatgtttcattctgagtgtttgtttatttgtctatacttcctagaaatttccaggaatataatgtcaggacacaataattta

SEQ ID NO: 887845 - DNA, 646 bp, Homo sapiens
tcgtttgtttatttcctaaatcctttcttgagacaatcacaactccttggcagttatgcaacatgaggagtccttcatgctgttattcttgcaattacttcagatgacttgcaggattaggagaccatctctgtgtctcattaaaatcctgtgtttgaaaggtgcaactaagaatgtctcatagaagattgttggcatatcctgacaagaggacgttcctggatttctattgctcaacatgtcaatcttttattgaatcaatcattcaatctcgctaaattgctagtgcagcttcccatcttcctatccaaacttactgagaatttactrgaccaaaaaatatatatcctagatttctgctctgtatgcaccaatgttttagggttatttcgtgttagtctttataggaaactatagagttgagtcttgcctcagttgaggtcatgaggcctgcatataatgaggctcatgtggcaacatcacattgatcaaccaaagtcattttccagaggggatcgcaaacacatcacctaccgattgctagtgttatagggttctgtttagtatgtttcattctgagtgtttgtttatttgtctatacttcctagaaatttccaggaatataatgtcaggacacaataattta

SEQ ID NO: 887846 - DNA, 605 bp, Homo sapiens
agcaacttgaggtagaccttgaaggatttatatgaaccaaggaaatatttcaaggacaatcttatagatgataatagcaggcaaggttaagacctagcattgggaagaagcaaagccttttgcaggacacatggccttcctggagtattgactttaaattggagaggaaaagaagataagtttggaaagatacttggagttcagattagtaataactttaaaagccaggccaagtaactaggttttgtggtagtggtaagactttctaagcataagakaaatatattaggagaggttctcaagaatataaacttggtcatgatctgaagagtggtttggaaaatattggaaggagagagaaaaataaagtatagttgggacatggaccaaagtagtagcaaggaaaatgggaacatttttgattctcagattctcagtcatctcaatctactagctacctttcttcacgtttctctctctcaatcttgatttccaggacaccacatcttcccagattttttttcctacttagctaatcctttcttcccagtctccatcgctggtttttccctgtcttcactagcacttaacattggagtgctcta

SEQ ID NO: 887847 - DNA, 656 bp, Homo sapiens
caaaaaatatatatataatatacatatatatatgccacttataaaataaatagaaaataattgggaataaatccaatgaataatataccaggtttctacatagaaaactataaaacatcaaaaaattttaataagacttcaactagtgaagggatataccatattcatggataaaaaaatttaatattgtaaagactttcatattaattgatggacagatttaatgtaatcccaataaaaattccagcagggttttttttggtagaatttataaagttatcctaaagtttatgtggaaatatagaagttcaagaatagccaaggctcacgcctgtaatcccagcactttgggaggccgaggcaggcagatcatgaggtcaggagattgacmccatcctggctaacgcggtgaaaccccgtcgctactaaaaatacaaaaaattagccgggcgtagtggcgggcgcctgtggtcccagctactcgggaggctgaggcaggagaatggcgtgaacctgggaggcggagcttgcagtgagccgagatcatgccgctgcactccagcctgggcaacagagcaagactccatctcgaaaaaaaaaaaaaaaaaaaaaaaagaatagccaaggcaatcttggggaagatgagaggcatgaag

SEQ ID NO: 887848 - DNA, 555 bp, Homo sapiens
ttctcactatacacaaaaaataagtttgtaggagctgggcacggtggctcacacctataatcccagcactttgggaggctgaggcgggcggatcatgaggtcagcaaatcgagaccatcctggctaacacagtgaaaccccatctctactaaaaatacaacaaattagctgggcrtggtggtgggtgcctgtagtcccagctacttgggaggctgaggcaggagaatggtgtgaacctgggaggtggagtttgcagtgagctgagactgcgccactgcactccagcctgggcaacagagtgatactccatctcaaaaaaaaaaaaaaaaaaaaaaaatttaaaaaaaagtttgtaaggcaatgcatatgttaaatagcttgatttggtcattcataatgcatacatttaccaaaacatgttttacaccataactgtatacatttttttatttgtcaattaaaaaaataagtttaaaaaatcaaaataaaagttttccaggagaggtgagatttgaagtagttttcatcatgtgaatgtgattttgagaggcaagg

SEQ ID NO: 887849 - DNA, 591 bp, Homo sapiens
gaaaactgggtgaagagtacagaggacatttttgtactgtgttttttttttttttttttttttggcagcttcctgtgaatctatatttatttcaaagtaaaaagttttttttttttttttttttattttattttattttattttttttttttttgagacggagtctcgctctgtcgcccaggctggagtgcagtggcgcgatctcggctcactgcaagctccgcctcccaggttcacgccatcctcctgcctcagcctcccgagtagctgggactacaggcgcccgctaccacgcccggctaattttttgtatttttagtagagacggggtttcaccgtgttagccaggatggtctcgatctcctgacctcgtgatccgcccgcctcggcctcccagagtgctgggattacaggcgtgagccaccgcgcccggccaagttttttttttttwaaaaaaggtattaactaaaacatgtacctatctgtattaatttcctagagctatatttggtactttgttccttttggaacaaaccaggtggcttaaggcaacaaagattttttgtcttacaattctggatgctacaagtc

SEQ ID NO: 887850 - DNA, 589 bp, Homo sapiens
gttaggagcacaggctttgaagtccactgagcttaaataccagcttccacatttattagctgtgtgatcttgggctacctaagccttggcttcctgacctgttaaagtgggctaataccatcactaccagatagggtctccataacaataaaggggaaaaatgcctgaaagaatttagcgctttatctggcatatagaaaaagtgaaacaaattgcctgttattatcagtattgttcctaaaacaaacttcagaatacatttagttttcatatgtgtgtcagactcatatttgtgcacatgtgttatactctgctggtatgagtgaccaaccactatcctctatgtagtattgtcttccacctttaccagtctctgaaattgagaggaggtaaccttaaaaatgtgaactaggaggctgggcgcagtggctcacacctgtaatcccagcacttygggagtccaaggtgggcggatcaaccaaggtcaggtgttccagactagcctggccaacatggtgaaactcccatttctactaaaaatacaaaacttagctgggcatagtggtgggcacctgtaattccagctact

SEQ ID NO: 887851 - DNA, 631 bp, Homo sapiens
atttccctctcaccttagaattacataaagcaaatcccagacatcatatttcttctgtgaatatttcagcatgtatctgaaaaataaggatttaaaaaaacataaccatactaaaattatttcatttaaaattaacattaattcctaatatcattaaatacctagtcagtgttgtagagatatcaaggaggaatgttcaatgacctagtctcaaaaatcacacaccgtcactkctgccatattctgtttgttacaagcaagtgattaaattttgcccacactcaaggttccgctttttgagatgtgaattgttaaagaatctgtggacatatttttaaaccatcacactctttaaatctctttaaatgtattggttccccctccctctccctttcaccttgcaacttatttgttaaaaataaaaatgatttgtccagtaaagggtcccacagtctgtttttgttttgtttcgtttttgctgattgggtcccaccgatttgtttatcatgttcatctgtcctttctattttttattatgagaacaatcagattcaggtttgattttgtttatttgcttgcttgcttgttttggcaagattatttcacaggcggtgttgcctgcttccattca

SEQ ID NO: 887852 - DNA, 601 bp, Homo sapiens
ccttctgaaacagcctccgatttccctccgttaccctcctctgaactcttttttttttttttttttttttgagacggagtctcgctctgtcgcccaggctgcagtgcaatggcaagatctcggctcactgcaacctccgcctaccgggttcacgccattctactgccttagcctcccgagtagctgggactacaggcgcccgccatcacgcccggctaattttttgtattttgtttagtagagacggggtttcaccgtgttagccaggatggtctcgatctcctgaccttgtgatccgcccgccccggcctcccaaagtgctgggatcacaggcttgagccaccgcgcccggctccgcccccacaccsccgccgccccctgaactcttaaagtcacatctaacattcgtcatatattattgtggtttttcccccattgctgttgtcttacctatccttctctcttcctagctagatagtacatttcttgaaatacacctatacctcctcaaagcccggttatctgttgaagtggccagcacattgcatgtttagtaaaagtagttggtttgaaaatattttgtttcaatcatggatattgc

SEQ ID NO: 887853 - DNA, 601 bp, Homo sapiens
ccttctgaaacagcctccgatttccctccgttaccctcctctgaactcttttttttttttttttttttttgagacggagtctcgctctgtcgcccaggctgcagtgcaatggcaagatctcggctcactgcaacctccgcctaccgggttcacgccattctactgccttagcctcccgagtagctgggactacaggcgcccgccatcacgcccggctaattttttgtattttgtttagtagagacggggtttcaccgtgttagccaggatggtctcgatctcctgaccttgtgatccgcccgccccggcctcccaaagtgctgggatcacaggcttgagccaccgcgcccggctccgcccccacacccccgccgccccctgaactcttaaagtcacatctaacattcgtcatayattattgtggtttttcccccattgctgttgtcttacctatccttctctcttcctagctagatagtacatttcttgaaatacacctatacctcctcaaagcccggttatctgttgaagtggccagcacattgcatgtttagtaaaagtagttggtttgaaaatattttgtttcaatcatggatattgc

SEQ ID NO: 887854 - DNA, 594 bp, Homo sapiens
aggcctgcacagcccaccaatctctcacctccactcctaatcaaggtgcccagaacccagtaagcctggagcttgagttcatttatcttatcaggcattggcacgggcagcttggggagctcagaggcctcctagctagggaaggatgtccaggttctgtgactgtcagtgtgcccctaagaaaataaatccgttaaaatgatttctttttctttccaaccaagaaatgaggttcataacccatccttggctaccagagaacagtcctctctgaattccttccctaccttggttacagctgttaaattggtcatttgggtttcamaggatgaaagtctgccctgcaaaacctgtggttgggcctggttaactcactggctcaggcctgagagaagggtggagagaggcttagcttcccactggctgtcttgagcacagatggaacttgcctggatagagcactcagaaatgctctcccttgatcaccggagagaggttggatggctcagctgaaaccctgcccctctgctccagaaacttcctgatgccctgcctcccgagaatggctctggtacaatatcacattcattgagc

SEQ ID NO: 887855 - DNA, 587 bp, Homo sapiens; identical to SEQ ID NO: 875749

SEQ ID NO: 887856 - DNA, 653 bp, Homo sapiens
gatagtggcctgagccaaatgaacgcagcaaagcaagcccacagcgccctggtgcctgcctccctgggccctgcttgaatgccagccaacacagcagcccctgtggccaaccttgagctcagggaccacatctgccaggaccctgcaacacgcagaaggcttcagcagagacgaacggtgggaagggatgttatgggtccagcctagcttagcgtatgcaagtgtctcagatctcctttcatctgttcacattttctccctgcctggttaatacaagagggagctcgcctccagtaaatgccctttcgtcccctggaaggagagtttatttaagcccagtgagacaaaaagtcaacaaggaagaaaacagaacagaaagggcatgagggccaaaaggcctttcacgttttacagctcacgtaattatgcaggaaagtgacaccccccgtctcgggcctccatcagtcctgaatagttaataatatctctgacctaccctctrtgctccttcagctgtggcttaaaaatgcaaaatatgttcaataagagtgacctccttgacctactcgctagagaaaagtgaggacaaagtgatagtaacagcgatggccttgtctttacttgttctaaccccagatctttgatcctttgca

SEQ ID NO: 887857 - DNA, 575 bp, Homo sapiens
accaaaactaccgtaagataccatctcacaccagtcagaatggctattactaaaaagtcaaaaaataacagatgctggaaaggttgcagagaaaacagaacacttatacactgttggtgggagtggaattagttcaatcattgtggaaaactgtgtaacaattcctcaaagacctaaaaacagaactaccattcaacccagcaaccccattactgggtatacatctaaaggaatataaatcattctatcataaagacccatgcatgccaatgttcatgacagccctattcacaatagcaaagacatggaatcaacctcaatgcccatcaatggtagatagggtaaagaaaatgtggcatatgtaccccatggaatactacgcagccrttaaaaaaattgagatcgtgttctttacaggaacacaaatagagctggaagccattatccttagcaaactaatgtagaaacaaaaaaaacgaatactgtgtgttcttacttataagtgggagctaaatgatgagaacacatggacacatagaggggaacaacacactctggggtctatcggagggtgg

SEQ ID NO: 887858 - DNA, 575 bp, Homo sapiens
accaaaactaccgtaagataccatctcacaccagtcagaatggctattactaaaaagtcaaaaaataacagatgctggaaaggttgcagagaaaacagaacacttatacactgttggtgggagtggaattagttcaatcattgtggaaaactgtgtaacaattcctcaaagacctaaaaacagaactaccattcaacccagcaaccccattactgggtatacatctaaaggaatataaatcattctatcataaagacccatgcatgccaatgttcatgacagccctattcacaatagcaaagacatggaatcaacctcaatgcccatcaatggtagatagggtaaagaaaatgtggcatatgtaccccatggaatactacgcagccgttaaaaaaattgagatcrtgttctttacaggaacacaaatagagctggaagccattatccttagcaaactaatgtagaaacaaaaaaaacgaatactgtgtgttcttacttataagtgggagctaaatgatgagaacacatggacacatagaggggaacaacacactctggggtctatcggagggtgg

SEQ ID NO: 887859 - DNA, 621 bp, Homo sapiens
cattttgaggtgaagactgaaagttctacccacagcttcagcttggaaaaatcaccctgtgcacggcaggtggcattggctctggagctggcttaaattgctggtgggagggtgggccatggctgtgaagtgctggaagacagaagaggcaccaaattgggtgagatttaatctgtgaatgcgggccttctggagggctcctggggctgggctggcgagctctggggacaagccctgcagagcaggtgcctcttattgtctccyggcagagatcctggcgggaaaatgatgaaggatgtggcctaccctgggtcttgctacctttttgaggtactttgggggtgagtttagtagtgattaaagatccaaaccaaacccacatgtcaagggatttgtgaatttcctacctgaagactgaacactgcagggcatgtgaatgttgtcgcctttccagcatggagagagcccagggctgcgtcaacccagggagcctgaaggatggcatcgggggccctaggcaggctcaggcgggcactcactggcatcttaaatcttctgcaaaatggagtcaacaaaatcataacccagggacatttctgagaaattgttctctagaattag

SEQ ID NO: 887860 - DNA, 612 bp, Homo sapiens
tttattgtattagtctgtcctcatgctgctaataaagacataccagagactgggtaatttataaagaaagagaggtttaatggactcacagttccacatggctggggaggccttacaatcatggtggaaggcaaaggagaagcaaaactatgtttaacatggtggcaggcaagagagcatgtacaggggaactcccatttattaaaccatcagatctcaygagacttattcactctcatgagaacagatgggaaaaacccacccttatgattcaattacttcccacagggtctctcccatgacacatggagattatgggagctacaattcaagatgagatttgggtgggacacagccaaaccatatcatccttctagagttatatggcagtttggtaattcagcctgcaggacggttctccagttggctgtggactgaaccagttgtcctcctttactcacttgtagttctcaagaataaccatagaacatgctgagaatataataccttgagctaaggatgaactggctggaatagcctgggctctgttgttgttccttgtagaacagaatgtcctacaatgctttagcccacaagtcatgtttcacccag

SEQ ID NO: 887861 - DNA, 612 bp, Homo sapiens
tttattgtattagtctgtcctcatgctgctaataaagacataccagagactgggtaatttataaagaaagagaggtttaatggactcacagttccacatggctggggaggccttacaatcatggtggaaggcaaaggagaagcaaaactatgtttaacatggtggcaggcaagagagcatgtacaggggaactcccatttattaaaccatcagatctcacgagacttattcactctcatgagaacagatgggaaaaacccacccttatgattcaattacttcccacagggtctctcccatgacacatggagattatgggagctacaatycaagatgagatttgggtgggacacagccaaaccatatcatccttctagagttatatggcagtttggtaattcagcctgcaggacggttctccagttggctgtggactgaaccagttgtcctcctttactcacttgtagttctcaagaataaccatagaacatgctgagaatataataccttgagctaaggatgaactggctggaatagcctgggctctgttgttgttccttgtagaacagaatgtcctacaatgctttagcccacaagtcatgtttcacccag

SEQ ID NO: 887862 - DNA, 612 bp, Homo sapiens
tttattgtattagtctgtcctcatgctgctaataaagacataccagagactgggtaatttataaagaaagagaggtttaatggactcacagttccacatggctggggaggccttacaatcatggtggaaggcaaaggagaagcaaaactatgtttaacatggtggcaggcaagagagcatgtacaggggaactcccatttattaaaccatcagatctcacgagacttattcactctcatgagaacagatgggaaaaacccacccttatgattcaattacttcccacagggtctctcccatgacacatggagattatgggagctacaattcaagatgagatttgggtgggacacagccaaaccatatcatccttctagagttatatggcagtttggtaattcagcctgcaggacrgttctccagttggctgtggactgaaccagttgtcctcctttactcacttgtagttctcaagaataaccatagaacatgctgagaatataataccttgagctaaggatgaactggctggaatagcctgggctctgttgttgttccttgtagaacagaatgtcctacaatgctttagcccacaagtcatgtttcacccag

SEQ ID NO: 887863 - DNA, 650 bp, Homo sapiens
tagatagatagatagattcaaatatatatatggttatagagatagatacccctctattctatttccctgtacagagagatcttagagatctctctctttctccttctcctgctctcttttcataaacacacacacacatatttccttagtctgttttgtgctgctataacacaataccacagactgagtaatttatagtgaacagaaatgyatttggctcataattctggaggctgtgaagttcaaaattgagcagcctcatctggtgagggccttctcactgcatcatcccatggtggaaggcagaaggagaaaagagcccatgcgagagacagcaagagatcaaactggcagcctcagatcctttttaaatcagcattaatctattcatgagagcaaagccctcatggcctaatcacttctcaaatgtgccacctgtcaacactgttgcattggggattaagttcccaacacaggcttgctggggggcacatttaaattatagagtgtatagatacagatataaagatatatgaatatagagatgggtatagatctataaatataggtatctgtatacacatggatataggtttagagattaggtatagatgtagatatatctatatccatatcaatatatctatcat

SEQ ID NO: 887864 - DNA, 630 bp, Homo sapiens
ttattcctaatttaactttagaacgatgatgaaatcctgcatattaacaatgtacgaaggcctgctgttcactggccacttgcacacaccacctcattcagtccttacatcagttcagcgaggcagggattattttcctctttcacagacgaggaaactgaggttcagcgatgtcatgagacttccctccaagaattcctaattttaaggataagagcctgtgcccccactctcagcctcacctccttccttccatcctgacttcccacattgtcaaggaggtgaagccctgtgagtcataccatgccctgctccgggtgcccacagaagccacgtcggtcaaagcagggggctagctgtcagcttcacattggggaaattgtttccccttctagcttcatcattttgaactggtgtggtggctctcattctgaatagatggaagcctgcttctcatcgatggaaacaggcygagcgctgttgatactcttgatcttgaagagtttggagcataaagctgtgtttgtggcttggcaatgcaatgcaatgcaatgttgagagtgcccttcaagcaccccttggacagttcttacacatggatgagtctgcaacttcaactagcgtgagagc

SEQ ID NO: 887865 - DNA, 628 bp, Homo sapiens
gctagcaaagcaacttccataaagactataaatagcaggcatgtgcctctgtaagcagtgcagctatttttttttaaataggggattctcatgttacaaggacatcacagattactgaataatttatttaatggtagattatatgggcttcactctttgccagtgagctcatacccaaatgtctaaaggagataaggtgagcaaaagctagatgtcaggcttgggtgagctgtttatttatttttattagatatgtataactattgtagccatttatattttacttaatattatctcagctgcaaaggtcatatatacaatagtgtcactactttattacagacatttagctaacttctaacaattcatatcgcacacagcatgagaaatacagaatagaataataaataactttggttgcacttkattttaacaaaggactgtgatatataggagtatgtttgttctctatgaaagtatagggaaatgaggggacaaaattcaaaaaaaggatgttagatttgaaaatagagataagaaaaaatgatctaaatccatgtttttctgtgaactattgttataatcttttcaatgacttatagtaaaaaaaaattgcttataagcttac

SEQ ID NO: 887866 - DNA, 623 bp, Homo sapiens
ctccagcctaggaaacagagcgagactgtgtccaaaaaataaaatagaataaaataaaataaaataaaatagaacccaggagcccatactaatacaaatgaatgaatgaatgaatgaatgaataggggcaaacggaaaacttacttacagtaggattctagcaacctcatgtgcctcctgatatcatgccctgagaaggacactgcaccatggctgtactgtgctgtgtctgtgctaaagtcgcagaacttgaatttaaccacaagaaaactccaacaaacccaaatctagggccgttcttcaaaataactgacctatactctttaaaagtgtcaaggtcctaaaagacaaagaaagacaaaggagttattccagatgaaaggaaactgaagagacatgacaaytacatctgtttgaatctgaattggatcttgggacagataaaggacattagtgggataattgacaaaatttgaataaggtctgtagattagttaacagtattgttttaatgttaatttcctgatattatacctgtactatggttatgaaagagagtgttcttgcttttaggaaatacacactgaagtatttacggatgagggaaattgaaattctagttc

SEQ ID NO: 887867 - DNA, 503 bp, Homo sapiens
tgatgactgaaaagaagcacatggtgagagaagcccagctggctcaacatctcagccccctccccttttcctgagtgtgcagccacttagaaaaggacagtagaagaactatagtcagcaactatagaactattgttgtaagtcactaagttttaggatagtaataatgtagcatatgtatactatgaaatagacacagtcatagataactgatacagagaaggtaagtgatttgctcaagaacacagagcttmtaagtgatatatatgaatatataaacaggcccatgttcgcacaatatacattcctagtccagctatcctcttctggacactgctgggcatcgtgactggatctctgctttctgggctcctctcctggtctacactgctgtgcttgccccctcctcatcaacctggcttcctctggccttgttgtcttgagcatgtcctggatgagacaggaccattggcagtagcaaaagtccctgggtaagatgggca

SEQ ID NO: 887868 - DNA, 670 bp, Homo sapiens
ctggctgaactgtgtcaccgggcctctgtcttgggaagacttacaggcaggaatgctggccattctactgccttcccagattaactactgcctcctcaatcttgggaatgaggacctcaaaattgagaagagagaagagaaagtaattcatgacgccttctagatgccagcctgggcaggggtgggagtgggagccagtgccacctcctgcctgcagctccagatccccagagtctccagctagggccttgttgcttctattgggcatagaaaggaacagcttcctagagaggccgcaggtgcagggaggcaggcagggcagaaggaagggaatagaaggagagcaacgggaagtcrcaaaattactaaaaccaaaaccagccacaaccccaaacaaaatatagctcaagaactgatgataccaacacagccaacaccaaaggaagaaaccaggggcagcgggagagacaaggagaaagatcaagggtggagaatacagaggctgggccgagacgggggcagggaccaggacagagacaggaagagggagatcaagggaagaaggaaggagagagaaggagaaacagaagggatggctggagtgagccgcggaggctgcagggaggggtggcagggaagaagagatgggagtggggcagggggcctgggg

SEQ ID NO: 887869 - DNA, 666 bp, Homo sapiens
ggcagggcagaaggaagggaatagaaggagagcaacgggaagtcgcaaaattactaaaaccaaaaccagccacaaccccaaacaaaatatagctcaagaactgatgataccaacacagccaacaccaaaggaagaaaccaggggcagcgggagagacaaggagaaagatcaagggtggagaatacagaggctgggccgagacgggggcagggaccaggacagagacaggaagagggagatcaagggaagaaggaaggagagagaaggagaaacagaagggatggctggagtgagccgcggaggctgcagggaggggtggcagggaagaagagatgggagtggggcagggggcctggggcaggcaggagcctgaaaatatagctttatatatttatatttatatctcacattccacacgtagacttactagggrgcagaaggatagggagaaaagggaggaggtgctattgagatgaggatctagccagggagagcctctcacttctccgagggaagcttggggcaccccagcctctcacctcctccctattcggcctccatggggtccaggcagggccatgcagagggtgtgtaggtgtgggcttcacctcgggctggggtatggggaagcggagcagggaacaggaccccaggccctaggatccc

SEQ ID NO: 887870 - DNA, 651 bp, Homo sapiens
tctgttctagtgactctgagggaaacttggtgatagtagccagtacctgctctgaggggcttcaagaggagtctgctcctaatagaacctgtgctatctataagtgacagcatcaagagcagggagtaggggctgtgcatggtggctcactcctgtaatcccakccctttgggaggctgaggcgggtagagcacgaggtcaggagtttgagaccagcctgggaaacatggagaaaccccatctccactaaaaatacaaaaagtagatgggcatggtggcaggtgactgtaatcacccctgctcaggaggctgaggcaggagaatcctttgaacccaggaggctgaggttgcagtgagccaagattttgccattgcactccagcctgggcgacagggcaagactgttaaaaaaataatactaataatgataaataaaaataagaataagaagcagaatgtagcttggtgagagtgaagtcctgcttcctggggcacagagtcttgttcctaaagaggaagaaagatcgcacccgagaatgtgtggagatagcagtgcagtgtacagagcagagaccgtgggcctgtctcctgggctccatccaagttgcttgtcttttctgtccctgtttcctcacctgttcagagggtact

SEQ ID NO: 887871 - DNA, 598 bp, Homo sapiens
ttggaactagtgtctgagatgggcgaattcagcaacgaggacatctgccgctacatcgaccgcagcttctccttctggaaggagaaggaggcagagctgtttgacatctgagcagcggaattcggaattcgcagttcaccctcgagcgtcttaacgtgggcctggacgcctgtctgacgccctccagaggcgtgaagcagcgggaagaacccaggactgtggccttgagcagcccggagggcccaggaccaggctgcctcagcctctgaggtcccatcgtgagcaggytgtgtggggcgttggtcggataggcagggcaggcacagaacaaaccaggtgtccccctctggccccgtggtcttgctgagctctgtgtggagccaggcagcagaagaagcccctctgagtgaggggctgcggctcctccctggggcagtgtggcctgctctctggttttccactggagttcacagctacctccttggctgaggtcaagggagccacgtgtgcagtgttctgtgtgaagtgtgcggtgtacagaccctttctcctctgtaatattcaggaaataaaactgtttgctgtaaactgcctatgt

SEQ ID NO: 887872 - DNA, 624 bp, Homo sapiens
tgcagacgaagctagaagtctgcaggcatacggcgagcttccagagcatgctaaaatcaatgaaactgatacatttggtcctggagatgatgatgaaattcagtttgatgacattggagatgatgatgaagatattgatgacatctaaattgaactcaacattttacattccatcttttctgaagattgtcctacaatttggattttgakcatgacaaagaagattaaaatttcattagcatgaatgcaatttgttaaagcagactgatttgtttctaagatatttttggtttttttaaaactgataataatgctgaattatcttaagtgagatgttaagcccactttgttcttttaatgtaatggagcttatgggtagaagaccatgtctactaattacaaaaaaaaaaaaaaaaaaaaccatgcattgctgcttttcctaccacttccagtaagaaaatgggtgttttgaagaaatcatttgccttgtcctcacggaatctgattaagccctggcctcttgattgtatagagtcattgtgtatattccagttacctagatattcccttgagattttgatacaatttgagggaggcagaagtctgcatttgaagaaaaaaaat

SEQ ID NO: 887873 - DNA, 552 bp, Homo sapiens
gctaatagaggcctaagtgggccatgtctatgtgttcctagggcttcccagctgtgctcaagaggccaaggtcactgccccatgcccactgagcctctggctccctgacttttttctcatcccagaataggagaatggggccaagcccctcctgaaggcagatggggatcaaggttgggggcactcaccagggacccctaagcattgagtcagaagcagcaggagtgggagccaccccatccttctggctggaggctgcactgtgacccaccacagccccatccgggaagttgtgaaacctgtccctacgggattgggtggctctggctccgcacgtcagctcagggcctgctggaccctgacctgagacctggtgacaggagccatgaggggccaggcctcaggtcccacagstcagttgcaagggcctagcacagctagccccctgagaggcctccctacttagtggtcaggtgttaggaaggtttggtggggccacttgaggtgccctggggttggggtgaaacccctctgcagcctagtcagcccaag

SEQ ID NO: 887874 - DNA, 556 bp, Homo sapiens
gaaggtaaaaaccagtaggatttgctgacggatggagtataggaggggagaggtagattatcagggatgtatcttagttttcttatacaagatagattcagttgcaatgaaattgttaactgaaattgactttaaataatggcatgacctaaagttatgcaaacatttgccttagataaaatatcaagttttcaaagtttttagctgggtggacggcatggctttacttcctatttcttggtattctaatcctgttgaaaaaaaaagtttttctttttctcaaaggcttatttcagtggaagcccatctgcaaaatctgttaataaatttaaattagaaaataactacaagtgccattgacacrttggttattctttttgagagtgacctaaggccacctctgggagagctgggggctcttctgaagcctgcccgactgcaccgcgtgcccgtgcctggaagtcagattcggggcggtgcggcagcgcgaggcctgcagtcctaagcgcggggtcgctccagccccagagggggtgtgtctcctgcctcttcaacc

SEQ ID NO: 887875 - DNA, 601 bp, Homo sapiens
agacagaggcaaaaattcaaacccaagtcagttgagttcagatctgttgcattttctgccataccaccttagctcttatatgtaaaagctcttctattaaatgactaaaattttagagacagagaactttagagtttctcccttttatcagtatctcacacccccacattttagacaggtagggaaaatgtacagaaaagagtttaggatttaccacaggtctggcctcaaactaggaccagaacttcagaactttgtgatccagtcccagtggtctttgcattacagtgcactacttccatgtttcctgaagctacagggacattttctttctttttttttctgttatactttaagttttagggtacatgtgcacaatgtgcaggttrgttacatatgtatacatgtgccatgctggtgcgctgcacccactaactcgtcatctagcattaggtatatctcccaatgctatcccttccccctccccccaccccacaacagtccccagagggtgatgttccccttcctgtgtccatgtgttctcattgttcaattcccacctatgagtgagaatatgcggtgtttggttttttgttcttgc

SEQ ID NO: 887876 - DNA, 563 bp, Homo sapiens
ttgacccagccatcccattactgggtatatacccaaaggattataaaacatgctgctataaagacacatgcacaggtatatttattgtggcactattcacaatagcaaagacttggaaccaacccaaatgtccaacaacgatagactggattaagaaaatgtggcacatatacaccatggaatactatgcagccataaaaaatgatgakttcatgtcctttgtagggacatggatgaagctggaaaccatcattctcagcaaactcgcaaggatgaaaaacaccacatgttctcactcataggtgggaattgaacaatgagaacacatggacacaggaaagggaacatcacacactggggcctgttgtggggtggggggaggggggagggatagcattaagagatatatctaatgttaaatgacgagttaatgggtgcagcacaccaacatggcacatgtatacatacgtaacctgcacgttgtgcacatgtaccctaaaacttaaaagtataataaaaaagaattcgtgtcccgaaagacacagtcagtagatttttgtttc

SEQ ID NO: 887877 - DNA, 594 bp, Homo sapiens
tcatggctgctgtggggtagctagtgtgagataatttaatttttttctttataaaccaatcaataggtaaaaaagcctataaccattcttccacttggaggcaatatcctcttctgatggagacagtttctctggacggaagccacccaaccayagatcagcctgtttgtccacacctgcgtctagtcaaaggcagaatctctatacagtggccagactaaagagtcagattaacaggatgtaagtcaagcaatggcttaccttcccagccacagcaaatgagggaaacagtgttctaggatgacttaatctattatggcattaaaatgctatatccagatctaaagctagaaaccaaatctccaaagaggaaaagacatcctataaccaaagcaacttatacatagttatagaggaactctattgtcatcagttgcttgatggaaaagaagagaaacccatgtgtgtaggttttttttcccccaaagtccaaattagacccatttggaggaatggcattggggaaaatagcaaggctcaggcaaaaggaattgggtataccaagagaaatacgatgttcagagtaagaaagat

SEQ ID NO: 887878 - DNA, 461 bp, Homo sapiens
atccaagaggcacatggggaacaggtcagggttgataagggtctcagtgggatcagcatgaataggaagtcaggtaggtccctggagcctgggcagggcaaagaaaagtgggtaggcagggtatgaaatatcagaacagtgtcaatatgggcatgaaaaattaatctgttattggcacatcaatttctttatttaactgaaggttactgtttmtattaaagaacatgttgcacattaaaaatgccttttttaggcctttgacaaaattcaacaacccttcatgctaaaaactctcaataaattaggtattgatggaacatatctcaaaataataagagctatttatgacaaacccacagccaatatcatactgaatgggcaaaaactggaagcattccctttaaaaactggcacaagacagggatgccttctctcaccactcctattcaacatagtattgg

SEQ ID NO: 887879 - DNA, 608 bp, Homo sapiens
tggtgatttttaagaagagaagtgacatacttagaattacatttattctgcggtcagaatggactagagggtgggaagctaagtgaatctgagtcatgcagctgttgctgtcacccagatcaaagattatggtagctggggcagtggctctagacatttaggaaagtgaccagaactaaaagatatttaaaaagtaaaacataatagttaccatagcttaacatttatagggctgtctcttatatgtcctttcatatatgctgatagtatcacactaaaatgaacatactatttgctgataacatttgttcctggtttaagagaagggcaaacccgagagaacaattgagstgaataaactgtaggtttatataataaatatactcatttatacatagcagtgagcaactcgtgattttaaaacagtgattcataaaacaaaataatatgattggggatagtctttttgaacattgaagttatatttgaatacatttggcctgtcattccctataatttatatatatgcaatcaaattcaaagtgagcttcagctttcatttgagcggagtgttttttacagtaattgcgaatttggcaggattcgct

SEQ ID NO: 887880 - DNA, 689 bp, Homo sapiens
ctggttccagaaatgttatccaggagtcacggagtagggtaataaaccttagaagtctagttgatgttctattttatagtacctgggtggggagacacagtgctttcccctcttccttcccctttccaaaggcaaggaacttcaccctgtagccaccactaccacaggccacagtgagtgctgccagactactgctggtatttccttaaggcccaaggactttgaagtcagcttgtggtgaatgctgcctagctggaactcacgctgccagacagtgggctcccttctggcccagggctggtccaaagatgccatccaagagacaactcgtggaataggggactccaagagcctggttggtgctctactcttctgtggccatgctggtacataaggtgcaagacaatgtctcctttaattttccctctgcttttgtcaagcagtagaagtttcatcttatagcmaccacagccagtaacatactgagtctcacctgaagacagcaattctcagaggctcacacaaggccatcagtgtagtacctgtgtatcactactggtaattaaaggcccaaaagctctttatttaatagatgatgaatcctgtcaggattgggttgttcccttaaaagcagtggactctcttctgctccaaggtatgtctagaaatgttgtctgggttctggggcc

SEQ ID NO: 887881 - DNA, 646 bp, Homo sapiens
tcagatatttttatcttaaaaacacagaaaccaaaaccagctgttctcaatagattggaagagcacagcagagccgtttaatttctaggcagccatcttaaaggcacatggctcttgaagtggtgtctgttgttctcatcgcatatttgataatgcttacaggaaccacaacaagttcaataagattaaagaaattaaattgtgtccaaaataggcactcctcatttacataatatgtagcacttctgacagaagttaccacctatgaaatctattaatttttcagcatatttttattattaaaagaaaattcaggatgtgtctttaaagaaatgccaaactaaaactctatctgacattctgtagtgttgtatgtccaaaaggattgatttttatatcaaaagtgaacacaaactaataaagtaaaatttctgtgtgatttttccactgaatccaatgatctgactctgacatcrtttcccatagaagagttctaaaggcattttgagcaacgacaccattataaggctatgtgtatattctaccagggggactgcttggaagaataacactcatttagatgtataaatcctgttttgttttcttttaaaatgtccaattatttctattgctgcctcatccatac

SEQ ID NO: 887882 - DNA, 640 bp, Homo sapiens
cgagccagtgtctaagtggtaaatgataacatgtccaatgctcacatattcctcattataagaggaaaagtgaacgcaaagtgaaggcaatatttgtgtgatgttagagaagtgatatcaaaggatccatgtcatcgcatggcactcattcgcacatcctgaacccttaaacccrgaggataataaaatattttaaaagttaagcaacatgacatagccattgaattctacagcttattataccaagcaaataagggaaaaaaaattcaatttgtcttttttgctctttctccccatattctcttgtagccattgtgggcacaagaagtcaggtccccaagactggcctagatcaaatgaccttccagaggaggcataaatttggtacccaaatttgttcagcatttcaacaatttttctaccgtcaacatattttccatgtatattttattcttagatggttagtgtagcttctaagatcctgataataaatatttccaaaaagagattataaattttctccggccacgttacccagacttctatggagtagtgactggctgactccagaagatccccttcttcagaaacagcagtccaggcagactaaggttattgcctgggattgcaaaggtagtac

SEQ ID NO: 887883 - DNA, 656 bp, Homo sapiens
cggttattgacattttttcattactgttactggatgttggtaaaaaaggagaaaaggaattaagtaggaaaagcagctcagggaaaatggaagtatcttaattgaaaaagacatcataaagagatctataaagaccaaatgaggtcacacaaacttttctatgttggaagtgatacgtgattggtattagaaaaatgagtaaggacaggggctaaattctgtaagccaaactgatctattgatgcagactaaaggagacaccaaaacagcccatagcaaaagttttggaaaataggctgaatgtcagaagagtcaggcattaaaactcaggaaggygagtgtcaatatcaagctggtgccacgaggggggcaggtggtacggggctgtgttacaaaaagatacaaacccattataagagccagcatgcaaggctgcagtgggggtaattattaattttaaggcttactcgatgtttagcttgtaagtgatatttgataattgatatttagctggtagcttatataccctaagtaggaatgatttgagggtggagaacaagtgttcctctgtctgggaactggaaggacttagccagagctgacagtcatattccaagtcgttttctaacatggcctcacagcagcatttgcaactg

SEQ ID NO: 887884 - DNA, 636 bp, Homo sapiens
caacaaagcaaggccttgtctctacaaaaataaaaataaaataaattagccaggcatgacggcacatgactgtaagtcctaactacttgggaggctgaggtgggaggatcactcgagcccaggagtttgaggctgcagtgagccatgattacaccattgcayacagactgggtgatagagtgagaccttgtctcaaaaaaaaaaaaaaaaaaaaaacctgtggtagaaatttgagcatttaaatctttcactacattttgggttctggacccattttctcccatgtacatttgaagctgatagttgaataattacttgatacttaatgtgatgctgtacatttttagacatgctattttaaatgtcaaatcaatatgaatttatttgtcagtctttcatacaagcatggatcataataaactcatccgtgattcatgagaatgtaaaatatactctcatgggaactttatcttaattcaatattattggtcttttaaatgaaacattatgttttcccttttgaacagagttcattggtaattgttcatcagaggagaagcatattattttttcacatttttttaagcctttgacaaaatcagggatgaaatctggctatgtgtctgtgatgccaaa

SEQ ID NO: 887885 - DNA, 636 bp, Homo sapiens
caacaaagcaaggccttgtctctacaaaaataaaaataaaataaattagccaggcatgacggcacatgactgtaagtcctaactacttgggaggctgaggtgggaggatcactcgagcccaggagtttgaggctgcagtgagccatgattacaccattgcacacagactgggtgatagagtgagaccttgtctcaaaaaaaaaaaaaaaaaaaaaacctgtggtagaaatttgagcatttaaatctttcactacattttgggttctggacccattttctcccatgtacatttgaagctgatagttgaataattacttgatacttaatgtgatgctgtacatttttagacatgctattttaaatgtcaaatcaatatgaatttatttgtcagtctttcatacaagcatggatcataataaactcatccgtgattcatgagaatgtaaaatatactctcatgggaactttatcttaattcaatattattggtcttttaaatkaaacattatgttttcccttttgaacagagttcattggtaattgttcatcagaggagaagcatattattttttcacatttttttaagcctttgacaaaatcagggatgaaatctggctatgtgtctgtgatgccaaa

SEQ ID NO: 887886 - DNA, 577 bp, Homo sapiens
ttcaggatttatcactgtgttacctaatccctgaggattctacaagagtgtaatgctatacctctgtagcatatatagctaggatgatggtaatattttacttgaaaagtagatatacactatattacactatagctgaaaaactactgaattagcaaaattttaatagctttatccactattcttccagttaaaacgaattsaccatccaatggagaagactcatttagggtaggaacaatggtctgtagagtctgccttcacaatgtcccctcctactacaaccacttggttcagttccttgtcacttgatgactataccactataattgtctccttactgtctcatataccatgctgatatatcccatgcactgtcaacggatgaatcttcctagagtaaaattgtaatcacatcactctactgtccaaaaatctggaaagatgtcctagtacttagaaataaaggaaatatcttaccgtggtagtcaaatcccttcacagtatagcctcaaatagttttccagccttacctcaaatctttcctgtattttatgtcctacctaacgtggaactt

SEQ ID NO: 887887 - DNA, 577 bp, Homo sapiens
ttcaggatttatcactgtgttacctaatccctgaggattctacaagagtgtaatgctatacctctgtagcatatatagctaggatgatggtaatattttacttgaaaagtagatatacactatattacactatagctgaaaaactactgaattagcaaaattttaatagctttatccactattcttccagttaaaacgaattcaccatccaatggagaagactcatttagggtaggaacaatggtctgtagagtctgccttcacaatgtcccctcctactacaaccacttggttcagtyccttgtcacttgatgactataccactataattgtctccttactgtctcatataccatgctgatatatcccatgcactgtcaacggatgaatcttcctagagtaaaattgtaatcacatcactctactgtccaaaaatctggaaagatgtcctagtacttagaaataaaggaaatatcttaccgtggtagtcaaatcccttcacagtatagcctcaaatagttttccagccttacctcaaatctttcctgtattttatgtcctacctaacgtggaactt

SEQ ID NO: 887888 - DNA, 577 bp, Homo sapiens
ttcaggatttatcactgtgttacctaatccctgaggattctacaagagtgtaatgctatacctctgtagcatatatagctaggatgatggtaatattttacttgaaaagtagatatacactatattacactatagctgaaaaactactgaattagcaaaattttaatagctttatccactattcttccagttaaaacgaattcaccatccaatggagaagactcatttagggtaggaacaatggtctgtagagtctgccttcacaatgtcccctcctactacaaccacttggttcagttccttgtcacttgatgrctataccactataattgtctccttactgtctcatataccatgctgatatatcccatgcactgtcaacggatgaatcttcctagagtaaaattgtaatcacatcactctactgtccaaaaatctggaaagatgtcctagtacttagaaataaaggaaatatcttaccgtggtagtcaaatcccttcacagtatagcctcaaatagttttccagccttacctcaaatctttcctgtattttatgtcctacctaacgtggaactt

SEQ ID NO: 887889 - DNA, 568 bp, Homo sapiens
aagcatataggaagaaactcagaaaacccttagtgaccagaaattaaaactgcttttctttcatttgcaaaacacacaaaaacagataatctcctgaaaaacacagacaagcaacatggacccagaggcccttaggctaaggaaattcatttggcatggaacttacagagttcattgttaagatagataacaaaagccatttataacaagagtgttctcattatcatcatctcttgtagcccagttgaagacaagtagtgtcttctaagatcccatctttcatactttgcacacttttcctccacccatggaattttgggcatccagttgcctagttctccttctamccatcaaagctgcctttcaggaaaagatttactagaattttttatgtgtcactgcaaattggttgctgctacctatctcaagggtatctgcattccaagccatatccttattatagactaagaagttttctcctgtgaaataaattcttgacttgaagctggaggtgaaggtgatcttttggggacagagtgatctgccctcttgaaactgcccagtatcc

SEQ ID NO: 887890 - DNA, 568 bp, Homo sapiens
aagcatataggaagaaactcagaaaacccttagtgaccagaaattaaaactgcttttctttcatttgcaaaacacacaaaaacagataatctcctgaaaaacacagacaagcaacatggacccagaggcccttaggctaaggaaattcatttggcatggaacttacagagttcattgttaagatagataacaaaagccatttataacaagagtgttctcattatcatcatctcttgtagcccagttgaagacaagtagtgtcttctaagatcccatctttcatactttgcacacttttcctccacccatggaattttgggcatccagttgcctagttctccttctaaccatcaaagctgcctttcaggaaaagatktactagaattttttatgtgtcactgcaaattggttgctgctacctatctcaagggtatctgcattccaagccatatccttattatagactaagaagttttctcctgtgaaataaattcttgacttgaagctggaggtgaaggtgatcttttggggacagagtgatctgccctcttgaaactgcccagtatcc

SEQ ID NO: 887891 - DNA, 568 bp, Homo sapiens
aagcatataggaagaaactcagaaaacccttagtgaccagaaattaaaactgcttttctttcatttgcaaaacacacaaaaacagataatctcctgaaaaacacagacaagcaacatggacccagaggcccttaggctaaggaaattcatttggcatggaacttacagagttcattgttaagatagataacaaaagccatttataacaagagtgttctcattatcatcatctcttgtagcccagttgaagacaagtagtgtcttctaagatcccatctttcatactttgcacacttttcctccacccatggaattttgggcatccagttgcctagttctccttctaaccatcaaagctgcctttcaggaaaagatttactagaattttttatgtstcactgcaaattggttgctgctacctatctcaagggtatctgcattccaagccatatccttattatagactaagaagttttctcctgtgaaataaattcttgacttgaagctggaggtgaaggtgatcttttggggacagagtgatctgccctcttgaaactgcccagtatcc

SEQ ID NO: 887892 - DNA, 662 bp, Homo sapiens
atagctgttactccatttttattgcctaagaccggggtgaagggtgggatagactgcaaaggtaaacaaggaaacttgggacagtaacagaaatgttctatattttaattgtgacggcagttccatgagtgtagctatcaaagctaatcaaattatattctatatccaatggatcctttaaacagatgcatttttcttttgttaattgtacttcaataaagtttaaaaagaaaaaaacataaaaggaatataaactggatctcacagatacacagatttgtgtgtgtgtatatatatatatatatatatatacaaatttgtgtttttgtggaaaacaaaattcctacatactctgtatatggccaagcagttacaattttactagaaaataagcaatatatttcacatctttgaacaatgtagtatttttagataagagttccttgtaatttttccaattcttcctataagaaagtatatraactagacatggagtaagcaaggcactggaatacttttggtatgaatatactataaatgaacatgagttttagaaaaacgaaattaatcagcagggtttttcttcccactgttagatagcttgacttccattaaatcattattattatccaatttgttacagtagtccaaagcattcatta

SEQ ID NO: 887893 - DNA, 635 bp, Homo sapiens
tctgttttctttccttaaattcacttgcagcttttctccccactctctctcttaatgtcacaagttttgcgtgaaccattccctttgcctctcccttgacttctgctctgcctgctacaatctttggggtttacagcccactaagcagtcccactggctatgctggagaaagcaagcatctttttcatgcctataggtggcatgtacagactgcaccctgcagaggagctgggaggcaaagcttatttcttggaagttttcagtcacttgcaaggagcagctatggacacagtgaagcgcagaggtccaaagagaaattctgtcattcaagaaggaatgaaataaaggcttattaagcaactatctgtttatctatatatacygacactgtcagttgtatacaatgctcttaagtaattgcaaatcataattgtaaaactttttcttttttctgtttggcttcagatattttcttttccatgggcagaccagtttatttgtgtttgaattaatggcttatgaatttgggttctaaaaatacaacttgagctatacattggttatgacaatgcagagccagctaaataattaaaagtgagaggtaatatatccaagagttaagaaaaacaagaact

SEQ ID NO: 887894 - DNA, 572 bp, Homo sapiens
atgttaagggcaaccagagagaaaggccaggtcatctacaaagggaaactcatcagactaacagcagctcagcagaaaccctacaagcaagaagagattgggggccaatattcaacattcttaaagaaaagaacttccaacccagaatttcatctttggccaaactaagcttcataagtgaaggaaaaacaagattctttttagaaaagcaaatgctgagggaatttgtcaccactgtaccagccttgcaagagctcctgaaggaagtactaaatatggaaaggaaaaaccatttccagccactacaaaaacacactgaactacacagactggtgatactrtgaaccaaccatataaacaagtctgcaaaataaccaactagcatcatgacaggatcaaattcacacataacaatactaaccttaaatgtaaatgggctaaatgccccaagtaaaagaaactgaatggcaaactgggaaaagagccaagacccatcaatatgctgtcttcaagagacccatctcacgtgcaaagacacacataggctcaaaataaagggatgaaggaaaatg

SEQ ID NO: 887895 - DNA, 593 bp, Homo sapiens
gttttgattataatagcagcatatgctctggttaaagaatttgccatgtgaaactcaaaaatatttggttatttccattttttattatgagtaacaatgtgatggccatcactgtctgcatatatgttaaagaaattcactgattcttaagaatagatttgaaaagataagattatgtgctaaatgctacatacatttgtaaactctccctatatattacaagatggtttgcttcaaaagcttttttctcaccaacttattcccacaagcagtattaaagasacctcttgccaaacttgtttgtattgagtgccatcattggaaaaaaaaaaaaagtgtttaccattttgaaaagcaaagacacatttagacaaaacaaattgctataaatccatttaaaagttatattgcattctgcaaaaagaaaggaaacacaaattaggttaatgaaagatctgccccatctatgcagacacaggaactaactgctgtaactaactgccgtatatccaaacctgcctggtaagtgtcagtagttcttcaagatatgaagtgaaaacaaaacaaaacaaaaagccatcttccttgggctt

SEQ ID NO: 887896 - DNA, 673 bp, Homo sapiens
catcaacataaacatgagaacaatagacactgcagattccaagaggggtcagtgagggaggggagcatgatttgaaaaactaccactgggtgctgtgcttactacctgagtgcaatatacccatgtaacaaatctgcatatgtacccctgtatttaaaataaaagttgaaattttaaaattaaaaaaataaaagcagttaaaamaatacccaattttcaaatgggcaaagcatctgaacagacatctcaccaaagaagatatatagataacaaatatgcatatgaaaagatgctgatcatatatcattggtaacaaagagttaccaccaaatgttagcaaacacagaataacaaggactcttattaattgctggtataataatgcaaaaatggcacaggcactttggaagacagtttggtgatttcttacaaagctaaatgatatgatttaaccatcacacacctaggtatttatcagaatgattagaaaatttaagtcctgacaagaacctgtgcattaatatatagagcagccttattcataattctcacaaactggaagcaactaaaatatccatgaaaacagtagtttataaacaaactctgatacatccacatagtggaatactattcattgataaaatgatatcaactatcaagccaagacaaagca

SEQ ID NO: 887897 - DNA, 631 bp, Homo sapiens
ttcctttcccttttaatacctgatttggcccctccctcactgtgcttccttagtccctgaacttattttcaacacaaacttctcatgtggtattataatttcctttttttcttatttgattccctcactatattgtaaggtatgtgagagcaggaaacctatttttctctgctgttctgtttctatgcacctactacaatacctaccacattgcagatgctcaaaaattatgaattaataaggtaagaaaatataagttaaatcctttgtcccgctcctgctcccccacttcacagatactatctctatccataaaggccagtttgtaccactgttcattttatccccacggaagcctctgtcaactttcaattgcacttacaaatagagacattgaaacgttatatataaattgaagtaayaggtaaatatgtgattagagttcaaatgggtcagtcaaataatgaaaagggaataaggttttataccaaccagatttgaaaacagaaaatataatgcatattagtcagctcaggctgctgtaataaaatgccatagaccaggtggcttaacaacagatatttgtttatcacagttctggagtcttggaagtccaagatcatggtggcag

SEQ ID NO: 887898 - DNA, 665 bp, Homo sapiens
tttagacagctctgaaactataattttattttttaaagcactgaaactttttaatgtaagttttgccagtttcatcctagctacatcctctaaaacaatgtagaatctttctcccatatttcaaataaagctcaaaataatttattccataaatctattcggcactcagctaaacattttctcagctgagaatggttttgcatcctttcctaatttgttagaataacacttaactttttttaaaaaccactacagtggacataatgaattgtggtmacatagaggttctggtgttacatatactttctaatctcctagacacaacttgacctctttatctcccactagagaggtttattggaaagggaaaaatgtagcattattaaaaccttgaatgtttatcatagctacagataaaaaaaacccaactcaaatcagttttaaaaatgtttaaatgtataagcttgcataataagaaatgtaggagtggggtgggatttcagtattggttaatttggtggtgcaataatgtcataaaggatctggttctttccacatctctgcttggccatctctactgttaactttaattctgattcctttcatgcttatagaagagctgccagtggcaagatggctatatgctttctttaaatgtctgacag

SEQ ID NO: 887899 - DNA, 671 bp, Homo sapiens
gcccagcaacactctcttaggaaagaaatgccatagatcttggactatcctggatattgggtacccttgggtcagagactacctgaggtcaaagcagctatgctctgggatagcaggaatagtacttgtttcatgacataaataaagcctaattgcttgtttcacattaggggcagaaacaatgttgacaatgtccaatgcaaacctcaaaagagtattacctttcctgccacacattcacacagccatacagaacccaaattgaatactggtatgktttagttgtgtccccacccaaatcttatcttgaattgtagatcctgtaattcccaagtgttgcgggagagacccggtgggagatcattgaatcatggagacagtttcctccacactgttctcgtggtagtgaataagtctcaccagatctgatagttttataaggggaaacccctttcgctaggttctcattctctttgcctgccactatgtaagacacaccttttgccttccgccatgattatgaggcctccccagccacgtgtaactgtgagtctattaaacctctttttctttgtaaactacccagtctcaggtatgtctttatcagcagcgtgaggacagactattacaaatactgtgttttgtgattttctttcctttaaggtctgcgt

SEQ ID NO: 887900 - DNA, 660 bp, Homo sapiens
tgctgtggctgcatctggggagctcctgccccaccaacttggaaggggtgaggctcccacttgtccccatttcctgctggcaccatggagtgtgcagtcccagttgtgcctcactgctgcagccagtgtaatagcagtggctgctctagatggactgttgctgccatcaacaggaggagtctggggaagatctgggttgtgagttccaggttgctgtttgctgcaggcagcatgaggcgagatggctgagsatctggcctttccctaatggtcaactctccgtgtccatgttcttggacagctcttggtgacactgccaactctgggtaagatttcttggctgtgtggctctttggaaagaattgtcagaacaaccctgtgggccacctattgggccagccccacacaccatttgataccctgcctcttccgtcttgtacttactggtggttggattgactgatccaggttgactggtagttttggtagtttctcagcccatttctactagttagccctgggaaaagttgggggaagatgtgcattaagttgttcaactaccagccattgctagcacctcccttatgctaggctggtggctcagaaagacctctgccctcaggagttgcagttcagtgtgggagatacgcttgtaccagc

SEQ ID NO: 887901 - DNA, 658 bp, Homo sapiens
gtttctatttatttatttaatctctgtagcttctatgacatgatctgtttcctattattaatgctgtctctttgtgccttctcttgctgtttatgtttttcttttctcatttcagtcatgtgtgggccttctctttatttagtcttttccaagaaccagcttttggcattgttgatcttgtctattgtatgtttgctttaccttctctatgccttagtttccccatctataaaaatagggacagtaacaatatgcattccttatacttgtgaagatgaactgagctaatacataycagaatggtgcttggcacataattgttttatgtgtttactttcacttctatttttgttaataattgatttctctcaaatttctcttcctaaagatctttttttaaagagacagggtgtcactctgttacccaggctggagtgcagtgatgtgatcatagctcactgcatcctcgaactccttgggacaagtaatccttctgcctccgcttcttgagtagctgggactacaggtgcatgccaccacacctggctaatttgtaaattttctgtcaagatggagtcttgttatgttgcccaggctggtctcgaactcctagtcccaaatgatcctcccaccttggcctcccaaagtgcttggatta

SEQ ID NO: 887902 - DNA, 600 bp, Homo sapiens
aaagataatcctcgagaagagcaatcccaagacacataattgtcagattcaccaaggttgaagtgaaggaaaaaatgtcaagggcagccagaaagaaaggtcaggttacccacaaaaggaagcccatcagaccaacagcagatctctctgcagaaaccctagaagccagaagagagtggggatcaatagtcaacattcttaatgagaagaattttcaayccagaatttcatatccagtcaaactaagcttcataagtgaaggagaaataaaatcctttaaagacaagcaaatgctgagaggttttgccaccactaggcctgccttacgaaagttcctgaaggaagcactaaatatggaaaggaaaaactggttccagccactgcaaaaacataccactgtaaagaccattgacactataaagaaactgcatcaactaacgggtaaaataaccagctagcatcataaagatgggatcaaattcacacataacaatattaacctcaaatgtaaatgagctaaatgctccaattaaaagacacagactggcaaactggataaagaatcaagacccatcaatgtgctatattcaggagacccat

SEQ ID NO: 887903 - DNA, 600 bp, Homo sapiens
aaagataatcctcgagaagagcaatcccaagacacataattgtcagattcaccaaggttgaagtgaaggaaaaaatgtcaagggcagccagaaagaaaggtcaggttacccacaaaaggaagcccatcagaccaacagcagatctctctgcagaaaccctagaagccagaagagagtggggatcaatagtcaacattcttaatgagaagaattttcaatccagaatttcatatccagtcaaactaagcttcataagtgaaggagaaataaaatcctttmaagacaagcaaatgctgagaggttttgccaccactaggcctgccttacgaaagttcctgaaggaagcactaaatatggaaaggaaaaactggttccagccactgcaaaaacataccactgtaaagaccattgacactataaagaaactgcatcaactaacgggtaaaataaccagctagcatcataaagatgggatcaaattcacacataacaatattaacctcaaatgtaaatgagctaaatgctccaattaaaagacacagactggcaaactggataaagaatcaagacccatcaatgtgctatattcaggagacccat

SEQ ID NO: 887904 - DNA, 633 bp, Homo sapiens
tttctctctcaaaatatctcaatattttcagaccatggttgaccataggtaactaaaatcattgaaagtgaaatcatggatgaggggagaataaagcattctcatagcggtcacctgctgctccttgtgtttagcataggacttggtgtgctgacgggttttctcggtgtttatgctccactctgttttataagaccctgaacatctgcactacagagataggtctccctccatcctttcatagttctacatcagtagactactaccgtctgttgctctgtgtsaggcttatggtagggcttataggggagcttcttggttctcttggttgaacctcagtattaggcaggttctgtacacctaaactgcaagggtgggactttctttgtattccttcttctctcttctgttagggttctccagagaatcagaaccaataggagagagagagagagattgattttaggaattggctcatgcaattatggaggcttaaaatttttcatgatctaccatttgcaagacggagaaccagaaaagttgacaacataagtcaatacaattccaaaagctcgagaaccaaggatgcagtataagtccggattgagttcaaatggttgagatccaggagca

SEQ ID NO: 887905 - DNA, 633 bp, Homo sapiens
cagatcagggatgtaggagggtagagtgtataggaggtaagaggaacctaagatgacacatgaatcaagggccatgttcatgatttgaaataggaaagaacaatggatggggagtcaggaggtaaaatgtttgtacttctaatttaatcactttatagatacattgttttggactagtcattttaaaatccttgagctcttagtttcttcacgtagaatataaagatctcatttgactaggaaattttagacagaattatgtattggagttgcatgggggattattttgaaagtacttatggaaaggctgtttcagaaaaatttgactcagtagatctagataaagatttatacgttggaaaactctcaggtagttcttttgtactctggtttgagaaccactgtgctcagtgatagttgagtatttttacaaaaacattggattcatttagagttattcaaggatggaacaaaaatattcttaaatattagttaaaattattacactatacagtaattcagtaattatgtacttatgtgaaatgtaatattttaaatcctaacttccacacactgctggttktaagtttagcctaggttatgctcacatgactagaggaaaactctcaaaat

SEQ ID NO: 887906 - DNA, 650 bp, Homo sapiens
attgtcatgaccccacctcattgagatatttgatccacacaatacagtgatttaaggcctgtgtgaatgtaaattactgctgttcatttttgtgctcctgcctgggaccagggaagaaattctccaaacatcctgctttccgagtttgaggacttactttaraaaagtactaccattggctttatacctatcattagctaaaccttctgtaaatggcatcattttgggagcaaggtaattgtcaggtcaggcctggatagacatatacctcctctgttatctgcaaggttgctttcaatctccttcttttccatctgtctacaggcatctcaatggtttatgttaaccttagaaaatagggcttgggtttagccacaggggatggaagatggccttagccacatggctgtggaagggaaggaggtagggatggccctagtcacactgggcctgtgtaaaagggccaaggagcacttgcccctccaagggcacttgtctctggggctgtacttgccacaaacctaatcctctccattacatagctctgcaggctaagttttcaggagacagcacagacggaaaagctccataaagctgttctgatcctcttagcactttgtgcaaggagcacagataagacttttgattct

SEQ ID NO: 887907 - DNA, 657 bp, Homo sapiens
atcagtccaaatgcccatcaatcaatgagtgtataaagaaattgtgagatatatatatatgtatatatacatacacatatacacacatatgtacatatatatatacacacatatacacatatatatatgatagaatacttctcagccataaaaaggaatgaattaatgacatttgaagcaacctggatggaaatggggactgttattcaaagtgaagtaacacaggaatggaaaactaaaccttgtatgttctcactcataagtgggagctaagctatgagratgcaaaggcataagaatgatacaatggactctggagacttgggggaaagggtgggaggtgggtgagggataaaagactactaattgggttcaatgtttactgcttaggtgatgggtgcaccaaaatatctcaaatcaccactaaagcacttactcatgtaaccaaataccacctgttcccccaaaaggtatggaaataattttttaagtggcgtttccttctagctcaacactttcttaagtgacattacacaagaataacctattcttctttttgagaaactctaaaattaggtaggcctttcttatgttgagccaacttgtcttcattctcactcttctgtgttttattccctcttctgctcagaaagtggc

SEQ ID NO: 887908 - DNA, 611 bp, Homo sapiens
aacatcttactcagcatcacaagattcaaactctgctgcagccttttcaatgtaatgaacaagggaaaaccttcaacatggaggcaatgttctttatacataagagggttcatataggacagacctttggtaaatataatgaatatgagaaagcctgtaataactcagctattattgtccaagggataactcaggtaagacagccaacttgctgtagaaagtctgacttcagtaaacatcagcaaacacacacaggagagaaaccccatgaatgtgttgaatgtgagaaaccctccattagcaaatcagacctcatgatacagcacaagatgcctactgaggaaaaaccttatgcctgtaactggtgtgaaaaattgttcagctataagtccagcctcactatccatcagagaattcacacagrggaaaagccctatggatgcaatgaatgtggaaaaaccgttcgctgtaagtcattcctcactttacatcagagaactcacactggggataagccctacaaatgtattgaatgtggaaaaacttcactgtaaatcacttctcactttacatcacagaactcactcaggggaaaagccctatcagtgtag

SEQ ID NO: 887909 - DNA, 611 bp, Homo sapiens
aacatcttactcagcatcacaagattcaaactctgctgcagccttttcaatgtaatgaacaagggaaaaccttcaacatggaggcaatgttctttatacataagagggttcatataggacagacctttggtaaatataatgaatatgagaaagcctgtaataactcagctattattgtccaagggataactcaggtaagacagccaacttgctgtagaaagtctgacttcagtaaacatcagcaaacacacacaggagagaaaccccatgaatgtgttgaatgtgagaaaccctccattagcaaatcagacctcatgatacagcacaagatgcctactgaggaaaaaccttatgcctgtaactggtgtgaaaaattgttcagctataagtccagcctcactatccatcagagaattcacacaggggaaaagccctatggatgcaatgaatgtggaaaaacckttcgctgtaagtcattcctcactttacatcagagaactcacactggggataagccctacaaatgtattgaatgtggaaaaacttcactgtaaatcacttctcactttacatcacagaactcactcaggggaaaagccctatcagtgtag

SEQ ID NO: 887910 - DNA, 571 bp, Homo sapiens
cctttcatcagaaggcaaatcttcggaagcatccagatattcacacaggggagaaaccctatgaatgtagcgaatgtggaaaaaccttcagtcagaagtcagtcctcactgtccatcatagaacccatactggagaaaagccttacgaatgtaatgagtgtgkgaaaaccttttgtcacaagtcaaacctcaatatgcatcagggaattcactcaagagagaaaccctgtgaatgtgatgaatgtaggaaaactttttaccataaggcagttctcaccatacatcagagaattcacacaggtgagaagacatttgaatgtaagaaaaccttctcccaggagtcaaaaccctttgtacagcacagaactcacacagaggaaaaaccctttagatgtaatgaatgtaggaaaattttctcccagaagtcaggcctcagtatacatcagagaacacacacaggagaaaaaccttatgaatgtaaggaatgtgggaaaaccttttgccagaagtcacacctcagcaggcatcaacaaacccatataggagagaaatctgatgtagctgaggcagg

SEQ ID NO: 887911 - DNA, 544 bp, Homo sapiens
tttctttgtttctctataggtaagatgttgtccactccacctttggtctcttttggagttgatgttttatacagttggagaataatatgcctaggtgtaggtttttagcatgtacactgtctggagtgctctgagcttcctggatctttgatttggtgtctgacattaacagtggaagttgtcaaacatgattgttgctgatgtttcttctatttctctctcctccttctggtattctcgtcactctatgttacaccttttatagctgtcccactgttcttggatattatgttccattgttttcagtttttaaagtttctttcacaattccagagctcacagactctttcctttgttrtgttcagcctactagtaagccaatcaaggcaacaggtctgttgcattatttttttatctctactgtttcttttttgttctttccttggacttctgtctccctgcttacattgcctatctgttcttgaatgctgtctcctttgttcatcagagcccttagcatactacttagagatatttttaaaaa

SEQ ID NO: 887912 - DNA, 608 bp, Homo sapiens
accctctaaaacactggcctaaacccctggaattccatgagaggatttataggattttctctactcttgcaagattaatgaaaaacagaacgctcacagggtgcggtgcctcatgcctgtaatcccagcactttcagaggccaaggtgggtgtatcacaaggtcaagagatcaagaccatcctggccaacatggtgaaacctcgtctctattaaaatacaaaaaaaaaaaattagcccggcatggtggcatgtgcctgtagtcccagctactcgagaggctgaggcaggagaatcgtttgaacccgggagagtggaagttgcagtgagccgagattgtgccactgcatgagagcctggtgacagagcaagactccatctaaaaaacaacaaaaaacaagaaacaaaacaaaattgcattctccaacwttaaggcatgctaggttttctgggactccagctggttacatattatgactcatatgtttatcttgctgggaaaattacatcaaggaaaatacagatctccaatagtcattatttgaaaaacctgcaattatagagttaacatgtagagatttctaagttctctgcatacctctctctgttc

SEQ ID NO: 887913 - DNA, 628 bp, Homo sapiens
ctacactttagcaacttctccaaataacatgtctcttactgaaacttgggaggttgaaagttaaaaatataaaatccagtggcatttatgtatcctaggcacttacattcttccaacttgcctttgcttggttagagttttgggtagataagaggtggatttacatgtgctagtgtgagaactttgatacactcatttagacattgacctrctatgttgatatttgaaagctaaaacccaaagaaatttgtctttttagataaaacaaattcagcccttaccttccttatcgattacatcttccactagcagtaataaaaaagtaacaatatgcataagtcaaagtatcttcttaaatcctctgtagtgttttattatttagttgtgttaattaaagtaactgtctcaaaatttcaaggaatgcctgagaataaattcatgttcaaaggctgccctcttgtgacaatgtgttgtatgttttactgtaaaagtaatcttattttaccttataacctctacaatccaattcataacagcataaaaaggaaataaaaccttacataattttgaattttgaaaagtaccttgtttatatggttcctttagctaatgaatagacaatttggta

SEQ ID NO: 887914 - DNA, 628 bp, Homo sapiens
ctacactttagcaacttctccaaataacatgtctcttactgaaacttgggaggttgaaagttaaaaatataaaatccagtggcatttatgtatcctaggcacttacattcttccaacttgcctttgcttggttagagttttgggtagataagaggtggatttacatgtgctagtgtgagaactttgatacactcatttagacattgacctactatgttgatatttgaaagctmaaacccaaagaaatttgtctttttagataaaacaaattcagcccttaccttccttatcgattacatcttccactagcagtaataaaaaagtaacaatatgcataagtcaaagtatcttcttaaatcctctgtagtgttttattatttagttgtgttaattaaagtaactgtctcaaaatttcaaggaatgcctgagaataaattcatgttcaaaggctgccctcttgtgacaatgtgttgtatgttttactgtaaaagtaatcttattttaccttataacctctacaatccaattcataacagcataaaaaggaaataaaaccttacataattttgaattttgaaaagtaccttgtttatatggttcctttagctaatgaatagacaatttggta

SEQ ID NO: 887915 - DNA, 586 bp, Homo sapiens
catcttccatcactgataccctttcttccagttgattgcatcagctcctgaggtttctgcattcttcacttagttctcgagccttggctttcagctccatcagctcctttaagcacttctctgtattggttattctagttatacattcgtctaaagttttttcaaaattttcaacttttttgcctttggtttgaatttcctcctgtagctcggasaagtttgatcgtctgaagccttcttctctcaactcgtcaaagtcattctccatccagctttgttccattgctagtgaggaactgcgttcctttggaggaggagaaacactctgctttttagagtttccagtttttctgctctgttttttccccatctttgtggttttatctacttttggtctttgatgatggtgatgtacagatgggtttttggtgtggatatcctttctgtttgttagttttccttctaacagacagtaccctctactgcatgtctgttggagtttgctagaggcccattccagaccctgtttgcctggatatcagcagtggtgtctgcaaaaccgtggatttcgttatccgcaaatgct

SEQ ID NO: 887916 - DNA, 586 bp, Homo sapiens
catcttccatcactgataccctttcttccagttgattgcatcagctcctgaggtttctgcattcttcacttagttctcgagccttggctttcagctccatcagctcctttaagcacttctctgtattggttattctagttatacattcgtctaaagttttttcaaaattttcaacttttttgcctttggtttgaatttcctcctgtagctcggacaagtttgatcrtctgaagccttcttctctcaactcgtcaaagtcattctccatccagctttgttccattgctagtgaggaactgcgttcctttggaggaggagaaacactctgctttttagagtttccagtttttctgctctgttttttccccatctttgtggttttatctacttttggtctttgatgatggtgatgtacagatgggtttttggtgtggatatcctttctgtttgttagttttccttctaacagacagtaccctctactgcatgtctgttggagtttgctagaggcccattccagaccctgtttgcctggatatcagcagtggtgtctgcaaaaccgtggatttcgttatccgcaaatgct

SEQ ID NO: 887917 - DNA, 586 bp, Homo sapiens
catcttccatcactgataccctttcttccagttgattgcatcagctcctgaggtttctgcattcttcacttagttctcgagccttggctttcagctccatcagctcctttaagcacttctctgtattggttattctagttatacattcgtctaaagttttttcaaaattttcaacttttttgcctttggtttgaatttcctcctgtagctcggacaagtttgatcgtctgaagccttcttctctcaactcgtcaaagtcattctccatccagctttgttccattkctagtgaggaactgcgttcctttggaggaggagaaacactctgctttttagagtttccagtttttctgctctgttttttccccatctttgtggttttatctacttttggtctttgatgatggtgatgtacagatgggtttttggtgtggatatcctttctgtttgttagttttccttctaacagacagtaccctctactgcatgtctgttggagtttgctagaggcccattccagaccctgtttgcctggatatcagcagtggtgtctgcaaaaccgtggatttcgttatccgcaaatgct

SEQ ID NO: 887918 - DNA, 551 bp, Homo sapiens
ctggaatcctatgtgaggaacaaatattcagaccacaacaggagtgttttctaatcctgtctgaaggagaaacattgagacccttgtagctgttttctggaatcgtatgtgaggaacaaacactcagaccacagcaggagtgttctggaatcctgtgtgagggagaaatattcaraccactgcaggagtgttctggaatccaatttgagggacaaacatgcaaaccctcttaggagtgttctgaaatcctatgtgatgaacaaacattcagaccatagcaagagtgttctggaatgctatgcgaggtacaaacattcagaccacagcaggagtgtcctggaatcccatgtgaggtacatacattcagaccctcgtagcagtgttcttgaatgctatgtgagggacaaaaattcacaccacagcaggagtgttctggagtcctatgtgatggacaaacattcagaacacagcaggagtgttttgaaatcctatgtgagggacaaatattcagaccacaggagtgttctggaatcctttgtgaaggacaaacg

SEQ ID NO: 887919 - DNA, 551 bp, Homo sapiens
ctggaatcctatgtgaggaacaaatattcagaccacaacaggagtgttttctaatcctgtctgaaggagaaacattgagacccttgtagctgttttctggaatcgtatgtgaggaacaaacactcagaccacagcaggagtgttctggaatcctgtgtgagggagaaatattcaaaccactgcaggagtgttctggaatccaatttgagggacaaacatgcaraccctcttaggagtgttctgaaatcctatgtgatgaacaaacattcagaccatagcaagagtgttctggaatgctatgcgaggtacaaacattcagaccacagcaggagtgtcctggaatcccatgtgaggtacatacattcagaccctcgtagcagtgttcttgaatgctatgtgagggacaaaaattcacaccacagcaggagtgttctggagtcctatgtgatggacaaacattcagaacacagcaggagtgttttgaaatcctatgtgagggacaaatattcagaccacaggagtgttctggaatcctttgtgaaggacaaacg

SEQ ID NO: 887920 - DNA, 551 bp, Homo sapiens
ctggaatcctatgtgaggaacaaatattcagaccacaacaggagtgttttctaatcctgtctgaaggagaaacattgagacccttgtagctgttttctggaatcgtatgtgaggaacaaacactcagaccacagcaggagtgttctggaatcctgtgtgagggagaaatattcaaaccactgcaggagtgttctggaatccaatttgagggacaaacatgcaaaccctcttaggagtgttctgaaatcctatgtgatgaacaaacattcagaycatagcaagagtgttctggaatgctatgcgaggtacaaacattcagaccacagcaggagtgtcctggaatcccatgtgaggtacatacattcagaccctcgtagcagtgttcttgaatgctatgtgagggacaaaaattcacaccacagcaggagtgttctggagtcctatgtgatggacaaacattcagaacacagcaggagtgttttgaaatcctatgtgagggacaaatattcagaccacaggagtgttctggaatcctttgtgaaggacaaacg

SEQ ID NO: 887921 - DNA, 717 bp, Homo sapiens
cagcagtgttctggaatcttatgtgagggaaaagcattcataccctcgtaggggtgttctagaatcctatgtgagggaaaagaaactcagaatccaggagcactgctctggaatcctttgtgagggacaaatattcagtccacagcagcagtgttctggaatgctatgtgaggggcaaacattcagaccatagcaggagagttctggagtcctatgtgagggacaaacattcagaccwcagcaggagtgttatggaatcctacatgagggacaaatattcagaccacagcaagattgttctggaatgctctctgagggacaaacattgagacctcagcagcagtgttctggaatcctatgtgagggacaaacattcagaccccagcagcagtgttttggaatcttatgtgatgtaccaacattcagacgcttgtagcagtgttctggaatcctatgtaagggacaaacactcagaacccaccaacagtgttctgcaatcctatgtgagggacaaatattcagaccctcgtaggggtgttctggaatcctttttgagggacaaatgctcagaatccagcagctgtgttctggaatcctatgtgagggacaaacattcagaccagtgcagaattgttctggaatcctatgtgagggacaaacattcagactccaacagtagtgttcttgaatgctatgtgagggacaaactttcagacc

SEQ ID NO: 887922 - DNA, 521 bp, Homo sapiens
ttctggaatgctctctgagggacaaacattgagacctcagcagcagtgttctggaatcctatgtgagggacaaacattcagaccccagcagcagtgttttggaatcttatgtgatgtaccaacattcagacgcttgtagcagtgttctggaatcctatgtaagggacaaacactcagaacccaccaacagtgttctgcaatcctatgtgagggacaaatattcagaccctcgtaggggtgttctggaatcctttttgagggacaaatgctcagaatccagcagctgtgttctggaatcctrtgtgagggacaaacattcagaccagtgcagaattgttctggaatcctatgtgagggacaaacattcagactccaacagtagtgttcttgaatgctatgtgagggacaaactttcagaccacagcaggagtgttctggagtcctatgtgagggacaaacattcagaacactgcaggagtgttctgatttcctatatggggaacaaacattctgaccacagc

SEQ ID NO: 887923 - DNA, 707 bp, Homo sapiens
gaccccagaagcagtgttctgtaatcctatgtgagggacaaacattcagaccccagaagcagtgttctggaatcctatgtgagggacagacactgagaacgtagcagcagtgttctggaatcttgtgtgatggacaaacattcagaccacagcaggagtgttctggagtcctttgtgagggagaaacaatcaggccacagcaggagtgttctgatatcctatgagaggggcaaacattcagaccctcctagcagtgttctggaatcctgtgtgagggacagacactcagaacctagcagcagtgttctggaatcctatgtggaggacaaacattcataccacaggagaagtgttctttaatcctatatgaggracaaatattcagaccctcatagcactgttctggaatcctatgtgaggaacaaaccttcagaacacagcagcagagttgtggagtcctatgtgagggacaaacactcagaacccagcagtagtgttctggaatcctctgtgagggacaaacattctgacccttgtagcagtgtttgggaatcctatgtgagggacaaacgctcagaaacccccagcagtgttgtggaatcctgtgtgagggacaaacattgatatcacaggaggtgtgtcctggaatcctttgtgagattcagaccacagcagcagtgttctggaatcttatgtaaggaacaaac

SEQ ID NO: 887924 - DNA, 707 bp, Homo sapiens
gaccccagaagcagtgttctgtaatcctatgtgagggacaaacattcagaccccagaagcagtgttctggaatcctatgtgagggacagacactgagaacgtagcagcagtgttctggaatcttgtgtgatggacaaacattcagaccacagcaggagtgttctggagtcctttgtgagggagaaacaatcaggccacagcaggagtgttctgatatcctatgagaggggcaaacattcagaccctcctagcagtgttctggaatcctgtgtgagggacagacactcagaacctagcagcagtgttctggaatcctatgtggaggacaaacattcataccacaggagaagtgttctttaatcctatatgagggacaaatattcagaccctcatagcactgttctggaatcctatgtgaggaacaaaccttcagaasacagcagcagagttgtggagtcctatgtgagggacaaacactcagaacccagcagtagtgttctggaatcctctgtgagggacaaacattctgacccttgtagcagtgtttgggaatcctatgtgagggacaaacgctcagaaacccccagcagtgttgtggaatcctgtgtgagggacaaacattgatatcacaggaggtgtgtcctggaatcctttgtgagattcagaccacagcagcagtgttctggaatcttatgtaaggaacaaac

SEQ ID NO: 887925 - DNA, 625 bp, Homo sapiens
taccatgacacttagaaatggtgactagaattttttgtaagtgtcacctaataacattattattttttctttatgctacaaactagctctgctattacaatcactactatttgaagtgttactaaattaaatctattttatccttctggactcagaaatgggggtaaatgctaagacaatttcagaatatgatcacatattaaaagcatattatatggggaaaatgtgattttwaaaaaatagaaattggtagagaaacaatttttgggtctttaatttccgcacattttgcaagtatggacgctgactttattgatccaaatgattgttttcaagcatgtttgtatagaaaacagccttggaatagaaaaccagtacctccttctggaacaaaggaaaagtttatttactgtctagtataatgcagataatttctccctcttgggaagcatacagccaagtgaacttccaataacacaagttggggtttcttgagcttgggtttttcttccacagtgtaatgtgcaggtgccacttggctctctttgtgttatcctgggaaagctgatggctgtaggtgcatgtgtttattttggggttctctattctgtttcattggtctttg

SEQ ID NO: 887926 - DNA, 557 bp, Homo sapiens
atatctagaaaacaccatcatctcagcccaaaatctccttaagctggtaagcaacttcagtgaggtctcaggatacaaaatcaatgtgcaaaaatcacaagcattcttatacagcaataacaggcaaactgagagccaaatcatgaatgaactcccattcacagttgcttcaaagagaataaattacctaggaatccaacttacaagggaygtgaaggagctcttcaaggagaactacaaaacactgctcaacaaaataaaagaggacacaaaccaatggaagagcattccatgcttatggataggaagaatcaatatcgtgaaaatgtccatactgcccaaggtaatttatagattcaataccatccccatgaagctaacaatgattttcttcacagaattgaaaaaaaccactttaaagttcatatggaaccaaaaaagagcccacatggccaagtcaatcctaagctaaaagaacaaagctggaggcatcacgctacctgacttcaaactatactacaagactacagtaaccaaagcagcaaggtactggtacc

SEQ ID NO: 887927 - DNA, 557 bp, Homo sapiens
atatctagaaaacaccatcatctcagcccaaaatctccttaagctggtaagcaacttcagtgaggtctcaggatacaaaatcaatgtgcaaaaatcacaagcattcttatacagcaataacaggcaaactgagagccaaatcatgaatgaactcccattcacagttgcttcaaagagaataaattacctaggaatccaacttacaagggacgtgaaggagctcttcaaggagaactacaaaacactgctcaacaaaataaaagaggacacaaaccaatggaagagcattccatgcttatggataggaagaatcaatatcgtgaaaatgkccatactgcccaaggtaatttatagattcaataccatccccatgaagctaacaatgattttcttcacagaattgaaaaaaaccactttaaagttcatatggaaccaaaaaagagcccacatggccaagtcaatcctaagctaaaagaacaaagctggaggcatcacgctacctgacttcaaactatactacaagactacagtaaccaaagcagcaaggtactggtacc

SEQ ID NO: 887928 - DNA, 557 bp, Homo sapiens
atatctagaaaacaccatcatctcagcccaaaatctccttaagctggtaagcaacttcagtgaggtctcaggatacaaaatcaatgtgcaaaaatcacaagcattcttatacagcaataacaggcaaactgagagccaaatcatgaatgaactcccattcacagttgcttcaaagagaataaattacctaggaatccaacttacaagggacgtgaaggagctcttcaaggagaactacaaaacactgctcaacaaaataaaagaggacacaaaccaatggaagagcattccatgcttatggataggaagaatcaatatcgtgaaaatgtccatactgcccaaggtaatttatagattcaataccatccccatgaagctaacaatgattttcttcacagaattgraaaaaaccactttaaagttcatatggaaccaaaaaagagcccacatggccaagtcaatcctaagctaaaagaacaaagctggaggcatcacgctacctgacttcaaactatactacaagactacagtaaccaaagcagcaaggtactggtacc

SEQ ID NO: 887929 - DNA, 650 bp, Homo sapiens
tcactctgtttctcagactcaagtgcagtggcatgattatagttgactgtaacgatgaactcctgggatcaagtgttcctcacagcctagcctcccaagtagctaggactacaggtgtgtgccaccacacctggctaattttttattgtttgtggagatgaggtcttgttctattgcccagactggtctcgaacttctggccttaattgatccttktagactcccacctacacacacacacacaaaatagtagctgagtatggtgacatgggtttttaatcccagtttttatacttgggaggctgaggtggaaggattgcttgagctcaggagcttgaagcttcagtgacctatgatagcaacactgcactccagcctgggtaacagagtaagatcctgtctcagaaagaaattatgaagctgaggagaacccatcatggggcttggataggggtggtgctggacttgggaggagaaccagaagattctgggtctcaagtccaaagaaaccaatgatttcctgttgaagggctcagatttctgtttgagagtggagtttgtagttaccatttgaagatgagaaatgtacaggaaacttcatttttatatatagctgtgtgacatctgaaactccaaaacacaaaataaaa

SEQ ID NO: 887930 - DNA, 650 bp, Homo sapiens
tcactctgtttctcagactcaagtgcagtggcatgattatagttgactgtaacgatgaactcctgggatcaagtgttcctcacagcctagcctcccaagtagctaggactacaggtgtgtgccaccacacctggctaattttttattgtttgtggagatgaggtcttgttctattgcccagactggtctcgaacttctggccttaattgatccttgtagactcccacctacacacacacacacaaaatagtagctgagtatggtgacatgggtttktaatcccagtttttatacttgggaggctgaggtggaaggattgcttgagctcaggagcttgaagcttcagtgacctatgatagcaacactgcactccagcctgggtaacagagtaagatcctgtctcagaaagaaattatgaagctgaggagaacccatcatggggcttggataggggtggtgctggacttgggaggagaaccagaagattctgggtctcaagtccaaagaaaccaatgatttcctgttgaagggctcagatttctgtttgagagtggagtttgtagttaccatttgaagatgagaaatgtacaggaaacttcatttttatatatagctgtgtgacatctgaaactccaaaacacaaaataaaa

SEQ ID NO: 887931 - DNA, 594 bp, Homo sapiens
attttgcccctgccctacagatgtacagaacattgaactcgagagagatgatttagggtatctggcagaagaaatttctaagcagcaaagcattcaagaggtgacttgggtgcagttaaaggcattcagcttcaaaagggaagcagagcataaaagttcagaaaatttgcagcctgacaaagctatagaaaagaaaatcattttctgaggagaacctcaagctggctgcagaaatttgcataagtaacaaggagctgaatgttaagccccaagacaatgaggaaaatgtctccagggtacatcagaggtcttcatggcagcccctcccatcacaaacctggagtcctaggaggaaaaaatggttttgtgggccaggcccagagtccccaagctgtgtgcagcytagggacttcatgccctgtgtcccagctgcttcagctacggctacaaggggccaacatagagctcagaccatggcttcagagggtagaagccccaagccttggcaacttccatatggtgttaagcctgtgagtacatagaagtcaaaattggggtttgggaacctctgcctggattttagaggatgtatgg

SEQ ID NO: 887932 - DNA, 588 bp, Homo sapiens
gcccaaaggttatatagctaattatgtagcagaacaaggccttacatatctgactctgcagtgtagactgaccccgtgctagtgatgtggtctatgcccatttgttcatacaagctagtggctgtcacagatgcatatacagattatgaagcaaggggatttgtgttatgatggaggtaygagaatgttgctccttggtgcaaagagtaaagcagcatctagtgtggaggcggtaagcaagaattcccaaggagagagagcactgtctgaaaaatcataagagttggagtggccgccatggagaatgcacaggcacatagtgctgggatggaacagaagcaactaactggagctagagataggttaggaccaactgggaagagcatgccccctcccagccttctcccaccacatgcacacacacacccctacctcttgcccatttaaataattaattcataaagcaaacaagaaacattctatttctctccttgaaattatcctaggaatttctaggaacccataaacagtagcaaaaagattctttgattgagaccaataaaaatctaccttgtcttagtccccaaa

SEQ ID NO: 887933 - DNA, 579 bp, Homo sapiens
aacctgaatagccttgatatgatatctaaaaataaagtaaatggtgctttgatgtctgtactttctcctccatgtaacagtgggtgtatgtttctcagagtttatctcctgtgtgccaaaaatcagagaggctcaggaacaagtgtccattgcttccaagtcataagaacaattggcaaaaatcacttgtcttgtgtctttgaactttaaatgcagtgaaaaaacttgtcttaaccaagagagggataagaaagagctgccaagtttgaaaaacctgctgataaataacttcataccaactgtacaacaacctgtactatatagtctgtagatgaaaaatcatgtaccattttggcttgtacratactttgtggctaactttaaaaaatacggaatggttaagtctgtgcattaatacgtgctgtgtaacctaacttctcagcattataatgtcacagatatctgggggtggtggggagaagtatatgcagctatgtatagaatatacacagctctccctcctttctcttccttctgccccctggctgtgtggtctactggctggattgcaatagctgg

SEQ ID NO: 887934 - DNA, 634 bp, Homo sapiens
attatggcttggtctgattttagaggattaactatgttaaaattttatcctcaattatacttaactaatttggttctttgtgatcgttttaagaggaagaaaggagggatggaaagagtagatggaatatagacttttttttaatttacaaaatattgatatcattttcactattatcactagatgttcactaaagggactttatgccmaagacttggaagtcaaagtaatatgaaacacaatctgtgtctttgaggggcagaagaagggttttaagaatggtttaatgtatgttcctttctttataaagagcttatacatttagactttaagttgaaaaagaagtgttagaagtgtttattttctagatttttgcaaaatcgttacttaattttgttgttaagattttatgtgtgtgatgatttaatagcttttcctgatccttataaatcctttttatcctctgagtcatgaagataaaatgactttttaatagatacagttgttggttttagcaaattccagaggtcctactttaaaaaacaatgattggaaactggtttctataatagttaaagtgtgctgaaagcctgcttcaaattgataatcatatccttctgcttaatatatcccc

SEQ ID NO: 887935 - DNA, 591 bp, Homo sapiens
tggctgcgtagtattccatgatgtatatggaccacattttctttatccaatctgccattgatgggcatttaggttgattccatgtctttactattgcgaatagtgctgcaatgaacagacacatgcatgtgactttatggtagaatgatttctatttctttgggtatatacccagtaayaggattgctaggtggaatggtagctctgtgtctagctctttgaggaatcaccacgctgcttataaagcatttcttttctctttacacaaggcactaagttgagccctaagtgtgctctttcttttgagactgtagcattgacaattaaatatgtgccagatactctcattttagacataagaaccctgggcccactttaaagccagggaaaaagctcatagaagtacttgcttggggtaaaacagctagtattttattgaagctaagacttgaaaccaggtctgtctgctgccaagtcctgtctcttaatcactgcactattactggctctttcatcccacttccaatagggcatgtgctttgaggtgtttgccccataggtgacagcctgctacctgtccactctctcttg

SEQ ID NO: 887936 - DNA, 611 bp, Homo sapiens
aataattttctctctcaggaggtaccttctgcttctgtttttccacacaagtaattcatattcattgtagaaaaatcagaacacaaacaagaaaaagaaggtaaatcaaccatgattcatcaccccaccccccagagataactttttttttgtattttcagagctatctttgagaatgttatattaatatttatacatattcatgtattttatttttaaaagtggaatcatactcttataaaacatcatgcttttcttgccaggcaatatattatgaatctttccatgaatataaacayttaaaatataattcttacaggctactaggtattttcaacataagaatataccatcatttattccctcagtcccctcatcactggacatttggctttattgttcctttatcccccatcttctgtatttcccctcttttcttccaggtgtttgcagccatcaccacctgttggctttaggtcagccatgctacagtttatggctcctagccccatggatgctctggggggatgctttggttccagaatgccatatttccgcccatatgattaattacttagatctctgggtccttctaatcaggacactggata

SEQ ID NO: 887937 - DNA, 684 bp, Homo sapiens
aaaattatggagaaaggatactgtggtagccagtcagcctttaggatgcacccccctggggctcacacccttctgtagtctctccccatattgtgccagagttacctgtgtgattcataaaacatggaaaaactgatggcatgtcattgccgaggtaggccataaggaatactgtggcttctgccctactctctcttctggatcccacactctggggagatgtagcagccatatcatgagcagccctgtggagaggcccacacggtgagcaactgtggcctccagccaacagccatgtgtgtgagtctgcttgcaagtggatcctctgatgccaatggaaggtctaactgcagcctcagacagaccctgagccagaatcacacagccaagtcactcccaaatgcctgatgccaaaacctrtgaaataataaaagttattttaagctgccaacttgtggggtaatttgttacatggcaaaaagataattaatgcagatttcatttattaatgaagtacattttcattggtaataatcactcataagaacgtcatctctagttaatatacatctctcactcaggaaacacaagcagatgttttactgaaaatactcaaagcaaccataaccaagaataaaatgatcaaatatttaaaagccactttcatgatgcacttgaactcaa

SEQ ID NO: 887938 - DNA, 592 bp, Homo sapiens
tcagaaccatttattaaaatcttgtttaacattatttttaactgtaatataattgaacactgtcaaaattatttcaaagaaccataaaaaatatgtattagcaaatacttcaagcaaatcgatcaatttcccactttatcccactagcaaaattatcaggtggaaaatgtgaaatgagcatgtctagtatgcttaaggaaataccagaaagaatacaatacatagcaaaaagcaatgaaaaaaataaaaagataacaatagaaattataattctaagtaaatacttaacagcagactaaccakgacagaagataaagacactcgcaattttaactatacaaaatttacaaataatgtagcaaagagagataaagaagtggaaatttggaaatagcagttagcatagttcagagttcctgaatgagatcatagggtagacagcagagagtgatgaaattttcttgaaagaaacaacagctgagaattattcagcatagatttagcgacaaagatttttattgtctgttactataagaactacaaacttagaaaataaaaataaatctataccatagccaaacggcaaaataac

SEQ ID NO: 887939 - DNA, 668 bp, Homo sapiens
catttgctttttatttctcaaattgttcagaatccaggctgggaagaggaatgctataatgaggttcccctagagacttcaatacctcacggagtctttactcccaaatctcctttcattacaattcactgctctctgcaaagcttcagaaggaaaatagcagaggtcgtcctatcagagtataagcagaatttgtcttctttcttcttcatattcccttcagtgtcacatgaagctaagtgcatagttgtaactcaatctacttattgaatggaacaagcccagttctggaaaactttctttaaaatgcaagttttttggctgagcacagtggctcacacctgtaatcccagcactttgggaggctgaggctggcggattacttgaggtcaggagttcaagaccagcctggctaacatggtgaaactccatctctactaagattacaaaaattagctgggcgtggtggcatgtgcctgtaatcccagstactcgggaggctgaggcatgagaattgcttgaacccagaaagcggaggttgcagtgagctgagatcacaccatagcacttcagcctggcaacagagcgagactctttctagaaaaaaaagcaagttttaaaagtagagaacaatgaagagaagatgttttgtgagcattaaccacatg

SEQ ID NO: 887940 - DNA, 658 bp, Homo sapiens
ctaacacccagagttattttttgttgaagatggagtgggctgtgtgcaaaactgtgttttaaactacaaagcggagagaggaaggaaatataaagttataggattaagacacctctgtggggagaaaaccatgtagaggtacctgctcaaactattcagaaaatgaactctggggagataatggaacttctctaaattaaaatgaaaaaggacatatctaaaatattactcaaatgtataaggatgatatacaataactttccatatatcaaactcttggcctcaaatgatccacctgccttggcctcctatagtgctgggattacaggtgtgagccattatrcctggccttaaattgaactttcaaaatccctttttagtattttctctagaaaggtgcaagatcttttgttgttatttttgttttttgattgtttatgtttggctgccagaagacacagaaagttgctaccgacaaaagtaaagagcatcttacagagtttcagttctgctgatatgtcctgaaaaagcaactatggctttgtacccttattaccatgtacaaatgcactgtccaaaaaggagttttggattcttttgcatagtgacttcaagggtaaacctttacataacttcattatgaggttgcgcgaaatta

SEQ ID NO: 887941 - DNA, 662 bp, Homo sapiens
tcctttggtgagatgtctgctcatgtcctttgcccatttttaaactgagttgtttcctattgttaagttttgatggttccttgcatattttggacacaggtgcttgtcttctcagtcacatacagtgtctcttgcagaacagaagtttttaatttttgttgttgttgttgttgttgagatggagtctcactctgtcagccaagctaaggcgcagtggcatgaccttggctcactgcagcctctgcctcctgggttcaagtgattcycctgcctcagcctcccaagtaggtgggactacaggcatgcaccacaacatctgattactttttgtatttttagtagggacggggtctcaccatgttaaccaggctggtctcaaactcctgacctcaagtgatctggcctcctcggcctcccaaattgctgggattacaggtgtgagccactgctcccagccagaagtttttaattttaatgaagtccaacttaacaatttttttctttcatggattatgcttttggtgatgtatctaaaagcttaccaccaagtctaagattacctagattttctcctttggtatcccacagatgttttgtgttttgcatttaggtctatgattccctttgagttaatttttgtgaggttctgtgtctagattcat

SEQ ID NO: 887942 - DNA, 600 bp, Homo sapiens
aaacaaaaccataatgagatatcatctcacaccagttagaatggcgattatttaaaagtcaggaaacaacagatgctggcgaggctgtggagaaatagaaacgcttttacattgttagtgggagtgtaaattagttcaaccattgtggaagacagtgtggcgattcttccagggtctagaaccagaaataccatttgatccagcaatcccattactgagaatatatccaaaggattataaatcattctatacagacactgcacacctatgtttattgccgcactatttacaatagcaaagacttagaaacaacccaaatgcccatcagtgacagactgcatgaagaaaatgyggcacatatacaccatggaatattatgcagccataaaaaagaatgagttcatgttctttgtggggacatagatgaagctgaaagccatcattctcagcaaactaacacaggaacaggaaactaaacactgctctcactcataagtgcgagttgaacaatgagaacacatggacacagggaggggaacatcacacacaggggcctgttgggaggtggggggcaaggggaggaagagcgttaggacaaat

SEQ ID NO: 887943 - DNA, 600 bp, Homo sapiens
tcaggttattagatttttttcctgtagagttgtttgagcttcttatgtattgtgatcattaatcccatgtcagatggatagcttacaaatgttttctcccattctgtggtttatctctttattttgtggattgtttcctttgctgtgcagacccttttcaacctgtgattccatttgttcatttttgctttggttgcctgtgstgttgaagtactattcaagaaatgtttgcccagaccaatgtcctggagagtttccccaatctttaattttagtaatttctgagtttcaggttttagatttaagtctttattctattttgatttgatatttgtatatggtgagagataggagtctagtttcattcttctgtgtatgaataggcagctttcccagcacagtttattgaagagacttctttccccattgtgtgttcttggaagctttgtcaaaaatgaattcactataaatgtatggattttatggatttctgatggttgctatattccgttccataactttatatgtttttaatgacagcgccatgttgtttttgttactatagctctgcagtataatctgaagtcaggaaatgtgatt

SEQ ID NO: 887944 - DNA, 608 bp, Homo sapiens
gccggacaagaaaaagtctttttgtgcccatgggaaacaaagattagaataaattttgtccaagctgacaatgagtacatcggaaggcatagattcccagaagccagagcagggtcagaaggacatgccacacacctgatggccagccagttatcaaagttgtaatgctaattttgtctcatgtgggctctagtaggtgagaggacttctggccctgtcatggtactgggatcctgtggcagcaggatgccctaatatatgttgtggcatattaaaaaaaaaattgtcaggtattcacaatgctttcagttatatctcagaagtaaaatttgttttaytttctaatataaaataattgaaatacttattgtaatgtaaaataataaaataatgtaaaataaaataagtgaaataatactttcacgtcatacattaggaagtatgatgtactcattaggatctgtgagtgcatagcaaagaatgccacttaaataaacactggctaatgcttccagcacagccctggggactcgactggagttcccaagtctggcttgatggcagcagctgttaagattgcccaacttgctctccttgcttgactttca

SEQ ID NO: 887945 - DNA, 644 bp, Homo sapiens
catgaagggctgttgaattttgtcgaaggccttttctgcatctattaagataatcatgtagtttttgtctttggttctgtttatatcatggattacatttatttatttgtgtatgttgaaccagccttgcatcccagggatgaagccaacttgatcatggtggataagctttttgatgtgctgctggattcggtttgccagtattttattgaggawttttgcatcgatgttcatcagggatattggtctaaaattctctttttttgttgtatctctgccaggctttggtatcaggatgatgctggcctcataacatgagttagggaggattccctctttttctattgattggaataatttcagaaggaatggtaccagctcctctttgtacctctggtagaattcagctgtgaatgcatctggtcctggactttttttggttggtaggctattaattattgcctcaattttagagcctgttattggtctattcagggattcaacttcttcctggtttagccttgggagggtgtatgtgtccaggaatttatccatttcttctagattttctagtttatttgcatagaggtttttatggtattctctgatggtagtttgtatttctgtgggatcggtggtgatat

SEQ ID NO: 887946 - DNA, 642 bp, Homo sapiens
ttcatgggtgtaacacagagaactttaattcataggactgtataaatgttggtctaacatatatttagaatacccaatatgtgctatgactagtgcaaagtgttaaagatatggcacaaaagaataggagagaagtgctaagatgcttgcctagatgatttgggaccacattgtataatgctatgcttttgaatttgaagcacatcatattttgaagagcaaggtggtaaaagacatttatattgagtggagaacactataaatagtggctatctggagagctggaaggtgaaggtgtccaagactgaaagcagctttagagggtgagcatgccatggaggtgagagcaggagtgacagctcacatgttgagtatttgtcatcctggtcttgtcaaagtcagccactggtgctttctggcaaaggagtggcttcrtttgtgcttaaaaaaggatgtcaatagtgagaaggatgaattcaagagagaacaattagtgtttgatcttaccttatggacagctcgtctggacacaggacgcactagctttctcaatttgggggaaggcaggacaggccactgctgggacaggccactgtgatgagaaattgctgctctgcactgcccgcacatgaagggagaaca

SEQ ID NO: 887947 - DNA, 561 bp, Homo sapiens
atgtgtgtctgttccaacctgcctggggatacctgaaaaactgacttgctcttctctgtcttacataactcagaaaacatgcaagagaagcaatgagtactgttcagaaaaggtacaagggggctacaaacccactgattggctgagtcaagagagtcttgctgaagacatatgatagtccaactaaggcttgaaagagaagctggggtgagactytttgggaaattaggacattcaaaagcagctgtttatatgggggaatctaggaagccatgtacatggctaggtaagatacatgcttaaaaaaattctaaggagaccttagatgttcacccaagactgatatccaggctcagaacaagcctgagtgctaaaggattccccaagcatacagctgggtctgaaaagcctgagaggtgctttgtcctccccacccccaccccgtctctctggtacttttaaaattttgttttagctcctgggactcaaggaaatctatcaaaacatagctgaacataagctagaggaacacatgcttcactgagcacacatgacaagaaa

SEQ ID NO: 887948 - DNA, 695 bp, Homo sapiens
gaccttcctgcttctgcagttttctaaaattctttcagcttaaaatattctggggtagtgtgtcctgaaccccatcaacagtgggaaacacaggaccaaaaagactcagatctgaaattcaacccactgttctttccagcatcccagttctggcagcaccgagcggcagggaacacaaatgggagagctgggctgggcgagcttcctgttcggaggacttggtcctttggtttttgattatatttcttactgagtagaaagaattatttattttcattaggaaatctggaggagtaaaaggcctagaaagcwtcggtggggattgtataatttataacaaactccatggggggcagggcacaggaaaagagaatgactgatgcgatcaaaaattccagaaatgaaagcaacctaaagatcttcataaatatcagaaatcaaagatcctaaagatattcttgcccagtattttcaacattttaaaactgattttctcacacaacactttttcaatgaagcttctatgcatctctacaacccgagataattttcagtaatttcacttcttatagtttgggacataaaaatatgcacccttatagattcttctgtgtccctagaggtacaaggtacttttcttctccacatccgtggaaatctctgtagcacaatccctgtagcagatgaagaaaaat

SEQ ID NO: 887949 - DNA, 697 bp, Homo sapiens
tgttacaaaaacccattcactggttaggtttcctgaaattcttgtctatcagtattcatggcctgactccagaatgcatggggactgatactcaaactccaggaaaaaaagaaattgatcacatggcttaagaaaattcctacatttggaaaattgtagattaaaatatcaacacttaaggatcttagggtatttccatggggatcctttgactcaaatgtcttttttggtatgtgatttgttcccctcctcaccgcagcaacaaaaatgttaaaagaatacttaaaaaaaaaagagtttatctattaacatgttttccccctcttgaggacagaaaccatgaattattttggttccacagacagtaattgactgcctacttgatagtaggtgactgagacttatttttcaaggaaggaaaggaaagaaggacaaagagkgatgggaagaagaaagctcttttttatatctcctttgacactgagtgaatgggggagctgggatgaatttcatcagtcaatatctacaagattttaaaattcacttatacaaagtgttgtgtttacctgcctagaagcttacttctgagcctagattgaaggataaaaattaatgctttgggtattgagaaatggtgacagaaaatggcagtgttgttgaagaaagtttcaaataatatttgaaatacatattttag

SEQ ID NO: 887950 - DNA, 631 bp, Homo sapiens
tattgagaaatatctattcagatcacttgcccatttttaaatggaaattgttgttgttgttgctgctgctgctgtttgagcttgtgtattttggacattaattccttgttggatgaatagtacgcaaatgctttcccccattctgcaggttgtcccttcgctctgttgattgctttctttgttgtgcagaagacttttagtttgataaaattgctgttgtttctttttgcttttgctgtctgtgcttttgaggtcttatccaaaaaatctttacccagaccaatatcttgaaacactttccctatattttcttctagtagtttcatagtttcaggtcttacattcaaacatttaatccattttgagttgatttttgtatatgatgagagacaggtattcatttcattcttctgcatatggatatccaattttcccagcatcatttattaaagaagctatacttyccacattatgtattcgtggtgcctttgtaaaagaaaatcagttcattataaatgcatagatttatttctggattttctattcttttccattcttctatgtgtctgtttttatgccagtgccatgctgttttggttactatagctctgtagtatatttgaagtcaggt

SEQ ID NO: 887951 - DNA, 631 bp, Homo sapiens
tattgagaaatatctattcagatcacttgcccatttttaaatggaaattgttgttgttgttgctgctgctgctgtttgagcttgtgtattttggacattaattccttgttggatgaatagtacgcaaatgctttcccccattctgcaggttgtcccttcgctctgttgattgctttctttgttgtgcagaagacttttagtttgataaaattgctgttgtttctttttgcttttgctgtctgtgcttttgaggtcttatccaaaaaatctttacccagaccaatatcttgaaacactttccctatattttcttctagtagtttcatagtttcaggtcttacattcaaacatttaatccattttgagttgatttttgtatatgatgagagacaggtattcatttcattcttctgcatatggatatccaattttcccagcatcatttattaaagaagctatacttcccacattatgtattcrtggtgcctttgtaaaagaaaatcagttcattataaatgcatagatttatttctggattttctattcttttccattcttctatgtgtctgtttttatgccagtgccatgctgttttggttactatagctctgtagtatatttgaagtcaggt

SEQ ID NO: 887952 - DNA, 684 bp, Homo sapiens
atcacctcaatgtaatcagctaaccaaaatctccttgttcaatttactagtcataaacccaattatttaaaattcaggaaacagataaagtgacctgcatagttaattcagtttttcccccttaaaatacaatcacaattatttattgagcactgacaattggaaaggcactgggctaggtactggaaagaattataaaatgacatggaatctcttcccgtggcacttggttcatgcttcctttaatttttttcccccacttcaaagtacttgaggtgtcctagtccattttgtgctgctataagaaaataactgagactgggtaatttatatagaatagaagtttacttctcacagttctggaggttagagtttcaagatcaagttgactgcaggttygggcatctgatgagggctgctgtctgcttccaagatagctccttgaaaactgcatccttcagagggaggagcactgtgtcctcacatggaggaaggcggaaggcaaagaggaacaaactccctttgtcaagttgttttgtaagggtgcctgatcccattcttgagagaggtgctctcatggcctaatcacttcttaaaggccccaccttctaatactattttaaattttggaggggacatgttcaaactatagcagtcgagtatggtattctgatcaccattgta

SEQ ID NO: 887953 - DNA, 614 bp, Homo sapiens; identical to SEQ ID NO: 871604

SEQ ID NO: 887954 - DNA, 693 bp, Homo sapiens
aaaataagcataagtaggcaagaagatataatgaaatataaaatatttctgatatttaaaatagcatttaacataaatgagctcacaagccagcctatttgtgtaagttcaggaaaaagacggaacaaaagtatgagtatacactacaataaaactagtgttataataagtgatatatacttatttgtatatgatgaagtaatgagggaaatgaccttagctaatgtattgatattgtgccaagactaattacaaactatagactagagtaaatgaggaagtgtgatacaagctgaaaataatctgggccttaggtgtagtgtcaaaagtattctttatattrtgacatagaaaagagtagtgactttcttagatgatttctcctaatgtgaactcccattcaggcagcatacattttagtaactggtacttaaaagatcatggtggacatatcctttgataggcaattataaatagatgatggattggaaaagtaagcatcgatacataacaggttattagaaatgatgatagaccttttgtatagtaacagatatgaaaacaataggcaacccaacaacatttctaatggtcaattttgtaaacaaattttaaaacagtataaaaatatagggtggccataacattatatattttaaaattgcatttgttaatgaaatgcagattcctgta

SEQ ID NO: 887955 - DNA, 597 bp, Homo sapiens
ctatatcctttgtggcttattcaccttgctatgtgctcaagaaagctagactcctgccaataatagtgaataaaattaaaagtccattgtcaataattaaaatttttttttctgtattattgttaaaactaacatttgcttaaattgtagtgccaaaatatttttaatatctctctgaacaatgatgagtgagtgatcttaatttctggaccatctaggtcaataatatttaaatggtaatagaaattttagtctgtttggaataatgtgtacttttataggcttctgttmattgttcaaaatgttcttggtgtggtgccattataatagtcattataattatttcctgggacctttagtacttttgtgtctaaatgtaaaagaaagtgattgactgcaaataaatgaggctccacagtattatcaatcaattttgtcctttcattcgagcttcaaaacactactgcatttcacatgcttcctaatggcaaaaaagagaactctcacctttttggattaggagtatgtcttaattcattcgggctgctgtaataaaataccttagatttggtaaaaaaaaaatggaaatttacttct

SEQ ID NO: 887956 - DNA, 597 bp, Homo sapiens
ctatatcctttgtggcttattcaccttgctatgtgctcaagaaagctagactcctgccaataatagtgaataaaattaaaagtccattgtcaataattaaaatttttttttctgtattattgttaaaactaacatttgcttaaattgtagtgccaaaatatttttaatatctctctgaacaatgatgagtgagtgatcttaatttctggaccatctaggtcaataatatttaaatggtaatagaaattttagtctgtttggaataatgtgtacttttataggcttctgttcattgttcaaaatgttcttggtgtggtgccattataatagtcattataattatttcctgggacctttagtacttttgtgtctaaatgtaaaagaaagtgattgactgcaaataaatgaggctccacagtattatcaatcaattttgtcctttcattcgagcttcaaaacwctactgcatttcacatgcttcctaatggcaaaaaagagaactctcacctttttggattaggagtatgtcttaattcattcgggctgctgtaataaaataccttagatttggtaaaaaaaaaatggaaatttacttct

SEQ ID NO: 887957 - DNA, 639 bp, Homo sapiens
ctcactgcaacctctgtctccagggttcaagcaattctcctgcctcagcctcccgagtagctgggattacaggtgcctgccaccacgctcagctaatttttgtatttttagtagagacagggtttcaccatatttgccaggctggtctcgaactcctgacctcaggtgatctgcccgcctcagcctcccaaagtgctgggattacaggagtgagccactgcatccagcaagttcaaaatatatttctgatcaatgataaactagaataaacttgagtgracagataggtatttgaataaaaagattctggctatacgtcttttaaataatacatttatggttatgttaattcacaggacctggttttattagggaactaaaatatgtcaaaaaaaggagaaaagtttttgcctttataatactaatagcattattaatactcttgtgaaagacttgaaagagagcagtttttcaataaaaacttgaagcagagcaaaaagttaactgagcgtcttcaacggaaaaactaggccttgtctaagtacatcccccgggttacttgattctatgatgtctctgaacctttcactgcaaattattcttgctcatagatatgcaaatgaatatcatctgggtgtg

SEQ ID NO: 887958 - DNA, 616 bp, Homo sapiens
gtaacagcagccccaggaaaccaatacaaatgtgtttaaaattatatgcttggtctgattagttttatgtatttataattttgttatattttttattagaaaatttagccaataaaatctttactattcaatatttaagttttcttcgtagctaagataatggtctttttttttttttttttttaaatgagacagggtttcattctgttactcaggctggattacagtgatgagatcacagctcactgtagccttgacctccaggactcaagccatcctcccacytcagcctcctgagtagctgagactacaggcatgcaccaccatgcctggccaattttctttgtctcgtcttgtctcttgtctcttctctcttttctttttattctcttctctcttttccttttctttctttttttgagacatagtcttgctgtgttgcccaggctggagtgcagtggcatgatctcggctcactgcaacctctgcctcccgcattcaagtgattctcatgcctcagcctcctgagtagccgggattacagacatgcaccaccatgtccagctcatttttgtatttttggtagagatggggttttattgttttggctgggcta

SEQ ID NO: 887959 - DNA, 578 bp, Homo sapiens
tggaatacatgcacggaggattctaagtgccactcattgcaaggaccgaggtaagaagagacaggacagggttgcatgtgggtgagggaagaggtggaaaaatgagctcaaatattgacattttacatttgaaatgcttatgaaaattccaaatggaggtatccagtaggcaatgtgaagtataatccaggagctctagagaatggtctagttagagacacagacttggggcctatcaactataggcagtcagaactgcagaaatacacgagaaggtctgagggagggcttggcttgaagagaggaccaaggatggtcaccttgaaaataacagyggttaaagggcaggtggaagactagcttgcaatgtgggctgtgaaggatggcaatggtgggggaagatggctggaaaggtgggtgagaagggcacccacaagctagcaggggagggaacagtcaacagtgccaaatgccgccacctgcaatgagcggggactcactacggtagggacctacacatgctttgtctcatccttttcatctttgcacaatattagcctctactgtcttccaatatg

SEQ ID NO: 887960 - DNA, 578 bp, Homo sapiens
tggaatacatgcacggaggattctaagtgccactcattgcaaggaccgaggtaagaagagacaggacagggttgcatgtgggtgagggaagaggtggaaaaatgagctcaaatattgacattttacatttgaaatgcttatgaaaattccaaatggaggtatccagtaggcaatgtgaagtataatccaggagctctagagaatggtctagttagagacacagacttggggcctatcaactataggcagtcagaactgcagaaatacacgagaaggtctgagggagggcttggcttgaagagaggaccaaggatggtcaccttgaaaataacagcggttaaagggcaggtggaagactagcttgyaatgtgggctgtgaaggatggcaatggtgggggaagatggctggaaaggtgggtgagaagggcacccacaagctagcaggggagggaacagtcaacagtgccaaatgccgccacctgcaatgagcggggactcactacggtagggacctacacatgctttgtctcatccttttcatctttgcacaatattagcctctactgtcttccaatatg

SEQ ID NO: 887961 - DNA, 641 bp, Homo sapiens
ggattgggaaaactgatggagttggccaattcctatggaagtcacatttcattcctggaaactttgaatctcagattttcttttttaaagaaacttcatctatatatcatttatataatatgaaatatgtcagttttaattgtatactttgatgagttttggcaatatatgcaccactacaatcaggatgtattttataacctttccatgttctgaaaaaggttttytcacgcccatctgcagtcaacaccatcctatgcccacctagcctaaggaaatcattgaacttctttgtgtaactacagtcttggtattggtaatttctcagaaagtgtaaactcatgttcattagcagacaaatagaaaaatgaattaccaaataattaaataatgccttgaagggctccaaagtaagtcacacctcaaattctgacatacaggcccctaaggtctcttatgaatccccagtgaaacgaattagtcaaatgtcaggtaaaaccatcaggcaatacacaagttcctccaccttggcttccccacctgttgcttgctgggtcacttgctcccctttgcttagccagttcgacccacaaaatatctccttggaagccttagctcttcaaggaggtgacaactgcttc

SEQ ID NO: 887962 - DNA, 604 bp, Homo sapiens
tttctgaactttttaagttactgatggttatgaattgtaaatcctctgaagaatgtaaggccttgttccctcttcctgtagcatctgtagcatgggagacttgcaaatgatagcactgtcaaagatttactgagcacttacatatattcttagttctgggttaactgccattttttttttttttttttttttttagatggagtctcactctgtcgcccaagctgcagtgcagtggtgcaatctcaactcactgcaacctccgcctccygggttcaagtgattctcctgcttcagcctcctctagtagctaggattacaggtgcccgttaccatgcccagctaatttttgtttagtggagatggggtttcaccatgtcgggcaggctggttttgaactcctgacctcaaatgatccacccacctctgcctcccaaagtgctaggattacaggcgtgagccaccgcatccggcctggggtaactgtcttaaaatgcatatttcagtcaatcgccatagcaactctgttgtgctcatctagagactaaattcaggatgctaccaggtgaaaaagaaaagttgtcttttcccaaacacagctctattc

SEQ ID NO: 887963 - DNA, 486 bp, Homo sapiens
tactcttaatatattgagaaactgtccttctgttttccatagcagctactccggtttgcattcccacgcactgtgcataagagtccaaatttctccatgtttcctgatacttattattttctggttttctgactagccattctaatggatgtgaaacactttttccttcaactggtaccggatgtgaggattccaattgcttggaatcagttgtcccggagagcctctgggtaaagaaagccagtagctcttggcagtggttacagaacaagacacaagatacactgagctagaaaatgcattgctgtgcrgaagttcattgggatcacacaaaataggctcactgcagtcatttactgtgttttaaataggttcattcaggataaatgggaaccaaaacatcttcagttatggtgctgtgagatacatgaataaaagctgtctatcttggttttgctccagtagttttgcaagaagtcaaaagta

SEQ ID NO: 887964 - DNA, 576 bp, Homo sapiens
tttatttcgtctatttgattcttctctcttttcttctttattagtcttgctagcagtctatcagttttattgatcttttcaaaaaaccagctcctgaattcattgattttttgaagggttttttgtgtctctatctcctttggttctgctctgatcttagttatttcttgccttctgctggcttttgaatgtgtttgctcttgcttctctagttcttttaattgtgatgttagggtgtcaattttagatctttcctgctttctcttgtgggcatttagtgctataaatttccctctacacactgctttaaatgtgtcccagagattctggtatgttgtgtctttgttctcattggtttcaaataacatctttatttctgccttcatttcgttatgtgcccagtagtcattcaggagcaggttgttcagtttcaygtagttgagcggttttgagtgagtttcttaatcctgagttctagtttgattgcactgtggtatgagagagagtttgttataatttctattcttttacatttgctgaggagtgctttacttccaactatgtggtcaattttgg

SEQ ID NO: 887965 - DNA, 615 bp, Homo sapiens
accctcatctgctaagacaagttctcagaatcagaaagttcattaacctgaacttcagtagtaaataacatttaagttttggaaaggtattcttctatttggcaattcaacaccatcgcttgtaacaaaaaccaatagacaagtacaactcaacatcctcaagacagagcaccaaaattaacagaaaaactagaacccctctccaaactagaagaatgttagtataaatatttaacataaataaatgaataatatcagaaatatatgctgacatacttaaaacaaaaattagatrtgtgaaaaggaaggttttcttagaaatgacaaatatccttagaattagggaagaaggaaagaaataagaaaggaagggaaagaggaaggaaagaataagaaaaaaatgaagcagggaagaaggaaggaaaggagagaaggagggaaggagggaggaaggaagaaggaaagaaggaaggaaggaagggaaggaaggtaggcaggtgatctcaggaatttggaagaaaattgatacaggtgaaattcacagtaatgccaagatacaaaaggaagaataatgagagggaaattttataggaaactgatgttgaaagttggttt

SEQ ID NO: 887966 - DNA, 615 bp, Homo sapiens
accctcatctgctaagacaagttctcagaatcagaaagttcattaacctgaacttcagtagtaaataacatttaagttttggaaaggtattcttctatttggcaattcaacaccatcgcttgtaacaaaaaccaatagacaagtacaactcaacatcctcaagacagagcaccaaaattaacagaaaaactagaacccctctccaaactagaagaatgttagtataaatatttaacataaataaatgaataatatcagaaatatatgctgacatacttaaaacaaaaattagatatgtgaaaargaaggttttcttagaaatgacaaatatccttagaattagggaagaaggaaagaaataagaaaggaagggaaagaggaaggaaagaataagaaaaaaatgaagcagggaagaaggaaggaaaggagagaaggagggaaggagggaggaaggaagaaggaaagaaggaaggaaggaagggaaggaaggtaggcaggtgatctcaggaatttggaagaaaattgatacaggtgaaattcacagtaatgccaagatacaaaaggaagaataatgagagggaaattttataggaaactgatgttgaaagttggttt

SEQ ID NO: 887967 - DNA, 612 bp, Homo sapiens
tttaaactcaggaaaagtaactcgatgcacacaaaagaaaaaagaaataatggagtatattcaggggataacttattcatctataattgacgtattcaactttcagtttgattcttgaaagatttaaaacttaagcaccctctattagaaactgattagacctatgggggaaaaacccaaacagaagttctgaatcactggaatttttgttctatttcctgttaacacattgatagtacatcatattcgttccatacatgttttttwaaagcagcagaatccttaaactaactgtaccctaatttagcctatagctcatgtatctaacaattcttcccattgtttctaattaaaatgctcagccaaagcctacaacaaaagaaaagcaagtcttcctttattacaaactgccatggtttcaaaatttacagtttcaaaccgtcaaaagtttaaaatcgtgatttcattgttacaaagaatgtaaagatattttttaaaaggtgtcaatactctgctactgtatgaacagtgtagtaagcagaagtgaaaaaactgaaagcaaatattctattccatgcccactaaaattcccggccaaatctggaattgcat

SEQ ID NO: 887968 - DNA, 628 bp, Homo sapiens
ggtatatacccagtaatgggatcgctgggtcaaatggtatttctagttctagatccttgaggaattgccacactgtcttccacaattgaactagtttacacttctaccaacagtgtaaaagcgttcctgtttctccacatcctctccagcacctgttgtttcctgactttttaatgattgccattctaactggtgtgagatggtatctcattgtggttttgatttgcatttctctgatgaccagtgatgatgagcattttttcacatgtctgttgtctgcataaatgtcttcttttgagaagtatctattcatatcctttgcccactttttggtggggttgtttgattttttcttataaatttgtttgagttctttgtagattctggatattagccctttgtcagakgagtaggttgtgaaaattttctcccattctgtaggtggcctgttcactctgatggtagtttcttttgctgtgcagaagctctttggtttaattagatcccatttgtcaattttggcttttgttgccattgcttttggtgttttagacatgaagtccttgcccatgcctatgtcctgaatggtattgcctaggttttcttttagggtttttatggttttagg

SEQ ID NO: 887969 - DNA, 671 bp, Homo sapiens
tcagggatattggtctaaaattctctttttttgttgttgtgtctctgccaggctttggtatcaggatgatgctggcctcataaaatgagttagggaggattccctctttttctgttgattggaatagtttcagaagaaatggtaccagctcctctttgtacctctggtagaatttggctgtgaatccgtctggtcctggactttttttggttggtaggctattaattattgcctcaatttcagatcctgttattggtctattcagggattcagcttcttcctggtttagtcttgggagggtgtatgtgtccaggatttatccgtttcttctagattttctagtttatttgcttagggggtgtttatagtattctccgatggtggtttgtatttctgtgggatcggtggtgatatcccctttaccattttttattgcatctrtttgattcttctctcttctttattagtcttgctagcagtctatcaattttgttgatcttttcaaaaaaccagctcctggattcattgattttttgaagcgttttttgtgtttgtatctccttcaattctgctctgatcttagttatttcttgccttctgctagcttttgaatgtgtttgctcatgcttctctagttcttttaattgtgatgttagggtgtcgattttaga

SEQ ID NO: 887970 - DNA, 626 bp, Homo sapiens
atgcaggggatacatgtgcgggtttgctacatgggtatattgcacccaggtggtgagcatagtacccaataggtattttttcaaacccaacccccttcttccctccccgctctagcaggccaccatgtctattgctcccatgtttacattcttgattgctcaatgtttagctctcacttataagtgagaacatgatatatttactttgctattcctgcattaatttgcttargattatggcctccagctccatccatgttgctgagaagaacatgacttcattctttgtgtggctgtgtagtattccatggcatatatgtaccacattttctttatccaatccaccagttatgggcacctaggttgattccatctctttgctgttgtaaagcaaagcatgtgtcttttcggtgtagtgatctattttggggggatatatgcccagtaataggattgctgggtcaaatggtatctctgtcttaagtcctttgagaaatctccagaaagctttccacagtggccgaactaatttatatacccaccaacaatgtatacgtgtttcctttttcctgcagcctcattggcatctgctgtgtttttaccttttaataaaagacactctgact

SEQ ID NO: 887971 - DNA, 605 bp, Homo sapiens
ccagccacatggaactgtgagaccgttaaacctctttttctttataaattacccagtctcaggtatgtctttatcagcaaccatgaaaactgactaatacagtggtgttgtgaaaaaagaggtactctaatttatttggagggggtgtaaaaatttttacaatagccatggataagttgtcacgaattaaamcccaagtaaaagacctcatacttgaaaagaccttagagtctttattacagtactctactttcaggaatttatgctaatattactcattacacgttagtaaaattttattcatttaagactattaattgaagcactgtgttgaactggcaaaaatttggaaagtaccctatatgttcagcaatatgactgatgaagtacatttggataggtccttaaaatggaataataagcagattaagtgacaaaaatagcaaggcattaagcagtgctcatgctgcatttcatgtgtctgtatgtagcatgctaccacctgcatataagaatgtttctatctgtgcatgcatttgcttgatatgcacacaatatctctggaaatatgtagtagtttgttcatggaaagggtctggatggat

SEQ ID NO: 887972 - DNA, 615 bp, Homo sapiens
ttaataatagccatcctgactggtgtgagatgttatctcattgtgattttatttgcatttccctgatgattagtaatgatgagcattttttcatatttgttggctacttgtacatcttcttttgagaagtgtctgtacatgtcttttgcccacttcttaatggggttattttgttttttgcttgctgaattaagttccttatagattctggatattaaacctttgtcagaggcattgtttgtgaatattttctcctatcctgtaggttgtttatttagtctattgatagtttcttttgctgtgcagaagctttttagttygattaagtcccatttatcaatttttgtttttgttgcaattgcttttgagaacttagtcacaaattctttctcaaggccaatgtccagaatgatgtttcctaggttttcttctaggattcttatagtttgaggtcttacatttaaatcgataattcatcttgagttaagttttgtatatggcaaatggggtccagtttcatttttccacatatggctagacaactaccacagcaccatttattgaatagggagtcctttccccattgcttagttttgttggctttcttgaagatca

SEQ ID NO: 887973 - DNA, 572 bp, Homo sapiens
cattagattctcttttttttttttttttgagacagagtttcacccttgtggcacaagctgaagtgcagtggcatgatctcggctcactgcaacctctgccccctgggttcaagcgattctcctgcctcagcctcccgagtagctcagattacaggcacccgccaccatgcctggctaattttttgtatttttagtagagatggggtttcaccatgttgggcaggctggtcttgaactcctgacctcaggtgatccacccgcctcagcctcccaaagtgctgggattacaggcgtgagccactgcgcccggccacattagattcttacaaggagtacgcaacctagatccctcgcatgtgcagtgcacaataggttttgtgctcctatgagaatctaatgtcactgctgatctgacaggaggcrgagctctgggggtaatgtgagtgatgaggagcagctgtaaataaagatgaagcttcgctggctagcccactcctcacctcccgctctgcagcccagttcctaacaggccacggaccagtactggtatgtggcccagggggttggggacc

SEQ ID NO: 887974 - DNA, 518 bp, Homo sapiens
agcaagcaggctagagaaggaaataaaaggcatctaaatagaaaaaaaaaaaagaaaagaaaagaagtcaaaccatctctcttcacagatgttaagattctacacctagaaaagcctaaaaagactccaccaagaagttactggaactaataaatgacttcagtaaggtttcaggatgcaaaatcaatgtataaaaattagtagcattttggccgggcgtggtagcttatgcctgtaatcccagcactttgggaggccaaggtgggtggatcacgaggtcaggagatcgagacygtcctggctaacacggtgaaaccccgtctctactaaaaatacaaaaaattgtctgggcattgtggtgggcacctgtagtcccagctactccagaggctgaggcaggagaatggcatgagcccgggaggcagagcttgcagtgagccgagatcgtgccactgcactccagcctgggtgacagagcgagactgcatctcaaaaaaaaaaaaaaaaaatttcagtgg

SEQ ID NO: 887975 - DNA, 632 bp, Homo sapiens
atctcttttttttttcttaatttttaagttcaggggtaggtacacatgtaggtttgttacataggtaagcttgtgtcatgggggtttgttgtacagattatttcattacccaggtattaagcttattacccattagttatttttctggatcctctaccttttcccagtctctgccctccagtaggccccaatgtctgttgttcccctctgtgtgtccatgtgttctcatcatttagctcccacttataagtaagaacatgcagtatttggttttctgttcatgcattagtttgctcaggataatggccttcagttccatccatgttcccgcaaaggacagtatctcattcctttttatggctgcataatattcaatggtgtatatgtaccacgtttttttaatccagtctatcattgatgggcatttgggttgattccatgkctttgctattgtgaatagtgatacaatgaacatatgtgtgcgtgtgtctttataatagtatgatttatattcctttgagtataacccagtaatggaattgctgggtcaaatggtctctaggtgtttggaatcaccacaccatcttccacaatggtggaactaattatactcccaccaacagtgtaaaagt

SEQ ID NO: 887976 - DNA, 702 bp, Homo sapiens
tctaaaatcgacaccctaacatcacaattaaaagaactagagaagcatgagcaaacacattcaaaagctagcagaaggcaagaaataactaagatcagagcagaattgaaggagatacaaacacaaaaaacgcttcaaaaaatcaatgaatccaggagctggttttttgaaaagatcaacaaaattgatagactgctagcaagactaataaagaagagagaagaatcaaayagatgcaataaaaaatggtaaaggggatatcaccaccgatcccacagaaatacaaaccaccatcggagaatactataaacaccccctaagcaaataaactagaaaatctagaagaaacggataaatcctggacacatacaccctcccaagactaaaccaggaagaagctgaatccctgaatagaccaataacaggatctgaaattgaggcaataattaatagcctaccaaccaaaaaaagtccaggaccagacggattcacagccaaattctaccagaggtacaaagaggagctggtaccatttcttctgaaactattccaatcaacagaaaaagagggaatcctccctaactcattttatgaggccagcatcatcctgataccaaagcctggcagagacacaacaacaaaaaaagagaattttagaccaatatccctgatgaacatggatgcaaaataaaatactggcaa

SEQ ID NO: 887977 - DNA, 693 bp, Homo sapiens
tgtgtgtatatatcagcaagcagatctcagcagatatttattaaacacacttgaggtgaaccactcagtagaagtaaggccagcagaacactgctgtgtgtttggagcagttcaaaggtgcttccagatagatcttttggaaaaggatttctctgtgtgtgtgtgtgtgtgtgtgtgtgtgtctttatctatgtgtttattggtactttcaaggaacaacaagggcattcataaattgactgtttagtagaggccacagtgtatttcagtcatgacacacgtatggtctgctttctctttacaaactacgtgaggtaagattttattctcttattttacagataaggaaaagggctcrgggaggttaagaaaaatcctcaatgtcacacagttactaagtagcagaggcataattaaaacctatttcaatttagctccaaagtcagtgtattttctcctcagaatgcagaaagccttctaagagagaattatgattctccatgccatgtaaaataactgattatagacaaataaaaatttgtgttttcctaactacaagtacataggtgtattttcttagattgtagcttgttacgattttgaaattataattattacatatcaaatatcctaagtgtatagcacttactacaatatacatgaatagatgctttgatagtgttgctgctactg

SEQ ID NO: 887978 - DNA, 649 bp, Homo sapiens
ctcccccaaaaatgggtttttcttttctactgcattgtcagcctgcaaattttctgaacttttatgatctgtttcccttttaaaatggaatgcttttaacagcatccaagtcacctttgaatgctttactgcttagaaatttcttccaccagacaccctaaataatctctcttaggttcaaagtctcacaaatgtctagggcaagggaaaaatgccaccagtctctttgctaaaacataacaagaatcacctttkctccagttcccaacaagttcctcagctccatctgagaccacttcagcctggaccttattgttcatatcactatcagcatttttgtcaaagccgtttaacaagtctctaggaggttccaaacttttccatattttcctttcttcttctgagccttccaaactcttccaacctctgcctgttacccagttccaaagtcacttccctattttcagctatcttttcagcgacgccccactctactcgtaccaatttacttactgtattagttcattttcacactgctgataaagatatctgaaaccgggaaaaaaaagagtaagtttaattggacttatagtttcacacggccagagaggcctcagaatcatagcaggaggcaaaaggcacttctttc

SEQ ID NO: 887979 - DNA, 666 bp, Homo sapiens
gcagctggcttgaatttctcccccaaaaatgggtttttcttttctactgcattgtcagcctgcaaattttctgaacttttatgatctgtttcccttttaaaatggaatgcttttaacagcatccaagtcacctttgaatgctttactgcttagaaatttcttccaccagacaccctaaataatctctcttaggttcaaagtctcacaaatgtctagggcaagggaaaaatgccaccagtctctttgctaaaacataacaagaatcacctttgctccagttcccaacaagttcctcagctccatctgagaccacttcagcctggaccttattgttcatatcactatcagcatttttgtcaaagccgtttaacaagtctctaggaggttccaaacttttccrtattttcctttcttcttctgagccttccaaactcttccaacctctgcctgttacccagttccaaagtcacttccctattttcagctatcttttcagcgacgccccactctactcgtaccaatttacttactgtattagttcattttcacactgctgataaagatatctgaaaccgggaaaaaaaagagtaagtttaattggacttatagtttcacacggccagagaggcctcagaatcatagcaggaggcaaaaggcacttctttc

SEQ ID NO: 887980 - DNA, 649 bp, Homo sapiens
ctcccccaaaaatgggtttttcttttctactgcattgtcagcctgcaaattttctgaacttttatgatctgtttcccttttaaaatggaatgcttttaacagcatccaagtcacctttgaatgctttactgcttagaaatttcttccaccagacaccctaaataatctctcttaggttcaaagtctcacaaatgtctagggcaagggaaaaatgccaccagtctctttgctaaaacataacaagaatcacctttgctccagttcccaacaagttcctcagctccatctgagaccacttcagcctggaccttattgttcatatcactatcagcatttttgtcaaagccgtttaacaagtctctaggaggttccaaacttttccatattttcctttcttcttctgagccttccaaactcttcyaacctctgcctgttacccagttccaaagtcacttccctattttcagctatcttttcagcgacgccccactctactcgtaccaatttacttactgtattagttcattttcacactgctgataaagatatctgaaaccgggaaaaaaaagagtaagtttaattggacttatagtttcacacggccagagaggcctcagaatcatagcaggaggcaaaaggcacttctttc

SEQ ID NO: 887981 - DNA, 688 bp, Homo sapiens
ttatattgttgaagaccattagaaaaatatggtatagttgttaaggattgttcaagaagtgtatgtgtgtgtgcctgtgtgcatctgagaacaatgatccacactcagtagactttgatctgtctccaaccattgagaaggccccaagagaargaaactgcactgtgtataccaaagccccagatagactctgctgcttattatcaacatgtcagacttagaggaatgtattgatgtagggagatggagaaatcctgaaaaattctttaggtggagattcccaaaaaggtgaatagaaaatcccattatgtatgtctaaagaaggtgcgcaagaaggggaagaggtagatctcaggttaagtaaggaagtttaggaactattatgttatagaagtatgcttttggtaaaagggacagagccctgcttatgaatattccactcctatttctctcttatctcctgtattcgctcatgtcttaaaagttgttcatgttcagtgtgaaaaaaaatatttttcaaaccttagaaaatgatatcaaaagcatatttttggtttatgatgttattaccagactcttctgaaaagtatctagcatttctgatagattttgatgagtttgagtttttttttttttttttccaaaagggtgggggttgttaggaagctagattttacctatcctgcta

SEQ ID NO: 887982 - DNA, 624 bp, Homo sapiens
ttgatgaataggaagatttaatattattaaaatgatcctattactccatgtaatgtacagattccatacaatctttatcaaaattccaatgacattttttaaagaaataaaaaaatctaaaattcaaatggaagcacaaaggacctgaacagccaaaatgatcttcaagaaaaagatgaaagctgggagtctcatacgtcttcatttcaaaacatattacaaagctacagtaatcaaaccastatggtactaacataaagtcagacatataaaccaacagaaaagaatagagggcccataaatctgtgcatatatggtcaactaatatttgaaaggggatcaagaacacacaatgggtaaagaatagtctcttcaaccagtggtcttggggaaactgtatatccacatgcaaatgaataaaattggaacctagtctttcaccatctacaaaaatcaattcaaaatggattcaagatttaagcctgaggtctggaaatataaaactcctagaagacaacatatggggggaaaagcttcatgatattggtcttggcaattatttcttggatatgaacccaaatgcacaggcagcaaaagtaaaaacagacaagtgagaaaacataa

SEQ ID NO: 887983 - DNA, 598 bp, Homo sapiens
ctgtgttgaataggagtggtgagagaaagcatccttgccttgtgccggttttcaaggggaatgcctccagcttttgcccattcattacgatgttggctgtgggtttcccttagatggctcttattattttgaggtgtgtttcctcgatatctagtttatggagagtttttaacatgaaggggtgttgaattttattgaaagctttttmtgcatatattgagataatcatatggtttttgtcttcagttctggttatgtgaagaatcatgtttattgatttatgtttgttgaaccaaccttgaatcccagggataaagtttacctgatttagtggataagctttttggtgtgttgctggattcagtttgctagcattttgtggaggattttttcactgatgttcatgaatgatattgggatttgttgttgttgttatatctctgctaggttttggcattaagatgatgctggcctcataaaatgggttagggaggagtccttcctcattaatgttttggaatagtttcagtagaaattgtcccggctctcctttgtacatctggtagagttcagctgtaaatgcatctggtgctggtac

SEQ ID NO: 887984 - DNA, 473 bp, Homo sapiens
atctaattaaacttaagagctgcacaacaaaagaaaactatcaatagagggaacagacaacctacgggatgggagacaatttttgcaaaccatccatctgacaaaggtctaatatccagcatctataagaaacttaaacaaatttacaagaaaaaaacaatccaattaaaaagtgggcaaaggggccaggcactgtggctcacacctataatcccagcacttygggaggccgaggcagacagatcacaaagtcaagagatcgaggccatcctggccaacatggtgaaaccctgtctctactaaaaatcaaaaattagctgggcgtggtggcactcacctgtagtcccagctactcaagaggctgaggcaggagaatagcttgaacccaaggagcagagattgcagtgagtcaagatcgcgccactgcactccagcctggtggcagagcgagactcggtctcaaaagaaaaaaa

SEQ ID NO: 887985 - DNA, 583 bp, Homo sapiens
atatttggggactatattgagattgccacagataagttctgaactatttcatggtttcttgtcaagagaaggcatggtcgtttttctctccccacccatattagacctccactgtgaccttgaaatgcaaggattagagggtggtgcagcttgcaaagaaccaagtgacacctaactttcccttttttattattttcacttctaaagaactaccctgatactgtcaagtctccttcagaaaaatgagctttgttgcactatgtcacatgaatagtatagaagactgacaatggctcccaaagatatattccccctaatcccaggcatstgtgaattgtaccttatttggtaaaaggattttccagaggtaattaagtcaaggacgttgagatgagaagagtatcctgcattctctgggtaggctctaactgacattacaagtgtccttataagcaaaaggcagcaggagactagacacatatatacagaggagaaggcaatgtgaacacagaggtaaagatctgagtgatgtggccacaaaccaagggatgtctgcagccaccacacggtgaaaggcatggaa

SEQ ID NO: 887986 - DNA, 589 bp, Homo sapiens
ttagtttaattagatgtcatttatcaattttggcttttgttgcaattgcttttgccatttttgtcatgaagtcattgcccatgcctatgtcctgaatagtattgcctaggttttcttctagggtttttatggttttgggttttacatttaagtctttaatccatcttgagttaatttttgtataagacgtaaggaaggggtccagtttcagatttctgcatatggctagccagttttcccagcaccatttaccgaataggagatcatttccccattgcttgtttttgtcaggtttgtcaaagatgagatggttgtagatgtgtggtgttatttatgaggtctctgttctgctctgttggtctatatgtctgttttggtaccagtaccatgctgtttyggttacggtagccctgtagtgtagtttcaagtcaggtagcatgatgcctccagctttcttcttttttgcttaggattgtcttcttctttgattccatatgaaatttaaaatagtttttttctaattctgtgaaaaatatcaatgatagcttgatgggaacagcactgaatctataaattactttgggcagta

SEQ ID NO: 887987 - DNA, 618 bp, Homo sapiens
tgaggttgagagttctgtagatgtctactaggtccacttgatccagaactgagttcaattcctgaatatccttgttaattttctgtcttgttgatctgtctaatactgactgtgggatgctaaagtctcccactattattgtgtgggagtctaagtcttgttttcgttctctaagaacttctttgatgaatctggatgcatatatattgaatctgatgtattgggtgcatatatattcagaatagttagctcttcttgttgaattgttccttttaccattgtgtaatggcctactttctcttttttgatctttgttggtttaaagtctgttttgtcaaagactagcatttcaaccccygctttttttttttttttttttttttttttgctttccatttgcttggtaagttttcctccatccctttattttgagcctgtgtgtctttgcatgtaagatgggtctcctgtatacagcgcacagatgggtcttgactccttatccaatttgccagtctgtgtcttttaattgaggcatttaacccatttacatataaggagagtattgttatatgtgaatttgattctgtcatcatgatgctattttattattttgcacac

SEQ ID NO: 887988 - DNA, 618 bp, Homo sapiens
tgaggttgagagttctgtagatgtctactaggtccacttgatccagaactgagttcaattcctgaatatccttgttaattttctgtcttgttgatctgtctaatactgactgtgggatgctaaagtctcccactattattgtgtgggagtctaagtcttgttttcgttctctaagaacttctttgatgaatctggatgcatatatattgaatctgatgtattgggtgcatatatattcagaatagttagctcttcttgttgaattgttccttttaccattgtgtaatggcctactttctcttttttgatctttgttggtttaaagtctgttttgtcaaagactagcatttcaacccctgctttttttttttttttttttttttttttgctttccatttgcttggtaagttttcctccatccctttattttgagcctgtgtgtctttgcatgtaagatgggtcycctgtatacagcgcacagatgggtcttgactccttatccaatttgccagtctgtgtcttttaattgaggcatttaacccatttacatataaggagagtattgttatatgtgaatttgattctgtcatcatgatgctattttattattttgcacac

SEQ ID NO: 887989 - DNA, 618 bp, Homo sapiens
tgaggttgagagttctgtagatgtctactaggtccacttgatccagaactgagttcaattcctgaatatccttgttaattttctgtcttgttgatctgtctaatactgactgtgggatgctaaagtctcccactattattgtgtgggagtctaagtcttgttttcgttctctaagaacttctttgatgaatctggatgcatatatattgaatctgatgtattgggtgcatatatattcagaatagttagctcttcttgttgaattgttccttttaccattgtgtaatggcctactttctcttttttgatctttgttggtttaaagtctgttttgtcaaagactagcatttcaacccctgctttttttttttttttttttttttttttgctttccatttgcttggtaagttttcctccatccctttattttgagcctgtgtgtctttgcatgtaagatgggtctcctgtatacagcrcacagatgggtcttgactccttatccaatttgccagtctgtgtcttttaattgaggcatttaacccatttacatataaggagagtattgttatatgtgaatttgattctgtcatcatgatgctattttattattttgcacac

SEQ ID NO: 887990 - DNA, 645 bp, Homo sapiens
taaaaagaaaagtatgaaacaaaaagaagattccagttatctcatattattcacagcctcatgtctaaactacacctccaagaccccacatcactctatagtgttatgatttgaagtctgtctcccacaaaagatatcctgaaatcctgaccctatggtacctcagaatgtaaccttatatggggaatggggttgtwgcagttataatttgctaaattaattcaatatggtgggtgtgcgtgtaagaagacagaaatttagacacagacacagaggtaaaatagccatgtaaagacagaggcagcgattggagatatgcgagcacaagccaaggaatgctgggcctcccagaagctggaagaggcaaggaggaatccttccctagaggctttggagggagcatggacctgcccacatcttgattttggacttctaacctacagaactataagacactaaattgctgttgcatggtactttgttatggcaaccctaggaaactaacatacacgtttcacaagttcactattcttcctgctttctgaccttgggactcatattcctaattatggctttgcctaacccttagacttaaaactgcactacgttttctggctttgtgtttttattttctttcttaactat

SEQ ID NO: 887991 - DNA, 636 bp, Homo sapiens
acattcattcttagattctttatgcattttgaatagaaaaaaaaggcaaatccagctcatacatatggtggtcttaaaaggaagcatataatgaagtataaaaaattacatcacaaataaaaacaatacaataaccatttttacaattttactctgcaatgtattattagacytggagaaacactgcgagtttaggtggttgttggcatggcaaatgctactaatcaaagaaacagaggtagttggagatggaccagaaaagtaggagcaatgagggagtgctactaagagtgatatgactcaagaatttttccctctgtctttcttagttctccctatgttccctctcccagttgttgctgaattcactgctacccccaacccccatcctggactcattactgcaaagtcttctcaactgattccccaactcaagatgtaattagcttctcaggctaagagcaattggtaaaacatctcacacatttttgtccttgttgtttgtgggcatttttgtatgtttattgtttttatttttgtttttgttttttgaggcagtttctcactctgtctcaaagactaaagggcagtggcttgataatagcttactgcaaccccgaacccctggactcaagc

SEQ ID NO: 887992 - DNA, 636 bp, Homo sapiens
acattcattcttagattctttatgcattttgaatagaaaaaaaaggcaaatccagctcatacatatggtggtcttaaaaggaagcatataatgaagtataaaaaattacatcacaaataaaaacaatacaataaccatttttacaattttactctgcaatgtattattagacttggagaaacactgygagtttaggtggttgttggcatggcaaatgctactaatcaaagaaacagaggtagttggagatggaccagaaaagtaggagcaatgagggagtgctactaagagtgatatgactcaagaatttttccctctgtctttcttagttctccctatgttccctctcccagttgttgctgaattcactgctacccccaacccccatcctggactcattactgcaaagtcttctcaactgattccccaactcaagatgtaattagcttctcaggctaagagcaattggtaaaacatctcacacatttttgtccttgttgtttgtgggcatttttgtatgtttattgtttttatttttgtttttgttttttgaggcagtttctcactctgtctcaaagactaaagggcagtggcttgataatagcttactgcaaccccgaacccctggactcaagc

SEQ ID NO: 887993 - DNA, 491 bp, Homo sapiens
tcaacaaaattaaatatcccttcatgataaaaacacttaagaaacagggtatagaagaaacataacataataaaggccatctgacatactcatagctagtatcatattgaataggtaaaaactgatggccttccttctaagatctagaatatggcaagaacgcccactgtcatcactgttattcaacatagtactggatgtccaagctacagtaatcagacaagagaaagaaataaagaacatccaaattgaaaagaaaaagtcaaattattcttctttgcaaatgatatgatcttacatktgaaaaaatctaaagttttcaccaaaagactatcagaactgataaattcagtaaagtttcaggatacaaaataaacctacaaaaatcagaagtatttctatatcacagcagtcaacaacctaaaaagaatttaagaaagtaatcccatttacaatatctacaaataaaataaaatgcctgaaaagtaacc

SEQ ID NO: 887994 - DNA, 631 bp, Homo sapiens
agtaataaaaaaaattccaaacaattagttgacactgagtaaagccttgcttgcgcatatgttttatttaggtccgtattaacctgtaacttttttcaaaggtctgtacaaattcaaattagcatctactgatgcttaacttggttttccttatttcacacaaagtattttaaagctgaggaaagtgaggtataaacaggtaaaattactatcacaagatattcagctagttactaacagagcgtaggttcaaattcaagttttcaaaatccagtgtctttgtataataaattttgatacctccaaatgatgcttgatatatatatatatttaaagtcttcaaaagaatataattayttttatcttataaacttgttattgttaaatttttaccttcaatatagcattgtccatgtctaatgcatcccatctccccaaaaaatgcaaatacatttctctgccctatgatcagagatacttggtatacaaatctaataattatttttaattctctcaccttttagtctcaaaattatatgccatattaacctatttttgatcattttaataactacctgaatgcactgatttgaatatgattcaataaaaaaaatcactatattttggctaa

SEQ ID NO: 887995 - DNA, 604 bp, Homo sapiens
gtcatgatgaccactttatgtttgtttaactagattacttttattacagtaatgagtaaactcaaattaataggtttaggaattaacaaaaccagcttttgttaaacatgcacttctgggaactacatggcaatgttcaagttgtatttatycagttattcacaatgccgtgggtgttagtaaactttttagaggaaatggagactattcagtaacctggcaagtctcttaagtggagttttctttcacctatgaaagaaaggaaagatattccttcaccttgtgtatcttggctgaaaatataattatttcacattgatagcaagttgttaaaggttctccagattttaacttaaaggtcattgatgaaccagaaaaataccttttgaacatttttttctgacattttctttgtttgcaatatgtgtagcataaggtttctcagtaacttgaattgtagtgggaagagaaataccgtaaataaaaaataggaaactaccctgcagcacatttctgataaaatgtggccataaaattataggataggtcaatgtaaacacttgcaaactgcatgaaagctaagctgaaacaattagcctccttc

SEQ ID NO: 887996 - DNA, 591 bp, Homo sapiens
aatgttcaagttgtatttattcagttattcacaatgccgtgggtgttagtaaactttttagaggaaatggagactattcagtaacctggcaagtctcttaagtggagttttctttcacctatgaaagaaaggaaagatattccttcaccttgtgtatcttggctgaaaatataattatttcacattgatagcaagttgttaaaggttctccagattttaacttaaaggtcattgatgaaccagaaaaataccttttgaacatttttttctgacattttctttgtttgcaatatgtgtagcataaggtttctcagtaacttgaattgtagtgggaagagaaataccgtaaataaaaaataggaaactaccctgcagcacatttctgataaaatgtggccataaaattataggataggtcaatgtaaacacttgcaaaytgcatgaaagctaagctgaaacaattagcctccttcttaaatattccttgtacctgcaaatacgttttagaaatcagtgtcataaaacaactgtgaagaagagaaagaaaaattagaaagattaaaaaaatttataaaactgtctgtaaagcaa

SEQ ID NO: 887997 - DNA, 608 bp, Homo sapiens
ccattgaactgggtcatgagtgtaaatggcaagcctgttcttccctagttctgccaggaggatggagtgtcagcagaagtctatggaggttcctcccaattgaccacactgggaaattctcccaacaatgactcttcaaagccatcctggtaaattcttcctcttgagtggttcccaaacagttgcctcattttctccagaactttacaagttcaacgtccatggtttggatcatggtttgggctcaaattcatgtttgtccctatacatttatatattttttaaggaataagaaaagttcgattatgcattgcttatccaaacaggtttgcagcttcgagagttttaaaactagtgsttggattcagggctaattttccctggtaattgagggcagttttgttgctaaaaggctgagttgcttcaaagttccttttatttcccttaatcccaaagcctgtgtgagacagtcattgatgaacattgcaaacatcctcattctccttaactacataattctctacgcctaactaaaatagaataaactagaatggaaagaaagaacccttcaacataaaaaacttctaagccaatagtccatgttttaa

SEQ ID NO: 887998 - DNA, 608 bp, Homo sapiens
atccatgagtccatgttttctcatcattcagctcccactgaaaagtgagaacatgtggtatttgggtttctgttcctgcattagtttgctaaggataatgggcttcaactccaaccatgtccctgcaaaggacatgatctcattcctttttatggctgcatagtttccatggtgtatatgtaycacgtttttttttcatcgagcatatcactgctgcccatttaggttgattccatgtctttgctatggtgaatagtgctgcagtgaacatacatgtccatgtatctttataataggacaatttatagtcctttagatatatacccagtaatgagattgctgagtcaaatggtatttctggctctaggtctttgcagaattgtcacactgtcttccacaatggttgaactgatttacattcccactaacagtgtaaaaatgttcctttttctccacatattgccagcatctgttgctttttgactttttaataatatccattctgactggtgtgagatgatatctcattgtggttttgatttgcatttctctaatgatcagtgatgagctttttttcatatgtttgttggctgcatgtgtgccttctt

SEQ ID NO: 887999 - DNA, 588 bp, Homo sapiens
catgcaaggaggagcaagtaacatctttcatggatagcagcaggcaaagagcttgtgcagagaaattcccatttttaaaaccatcagatctcatataagactcattcactagtacaagaacagcacaggaaagacccaaccccataattcagtcacctcccaccagattcctcccatgacatgtgggaattgtgggagttacaattcaagatgagatttggctgggacatagccaaaccatatctttccacctctggcccctcccatatctcatatcttcacattttaaaaccaatcatgccttcccaacagtcccctaaagtctcaactcatttcagcattaactcaaaagtccacagtccagagtctcatccaagaccaggcaagtctcttctgcctatgagcctgtaaaatcaaaagcaagttagttacttcctagatacaatagrgttacaggcattgggtaagtacagccattccaaatgggagaaattgaccaaaacaaaggggctataggccccacacaagtctgaagtccagcagggcagtcaaatcttaaagctccaaaatgatctcctttgactcctt

SEQ ID NO: 888000 - DNA, 557 bp, Homo sapiens
tcaatgttacgtgaaacagcaacagcaggaagagtacctgaaatgagatactaacatttaaaataaaatgttattattttggaatatctcaaatcctccctctttggcctgcagctaacatacttaattaaatttttaaatgagctaaatatcataaacgttcaataagcaattcttctctcttcctagaacaaacaagaagcaacattaacttcaagataagtatttataatcatcttgtggaacttgcaagaatatcctaaataaggttcaagaagtgattcataacatatgaccataatttaaattacacattttaatakgtaattttgaaaccaagtgaacaatctaaattgaaaacctggagaaacaaacccagacatcactgggaaaagatatcccagttgactgcagctgtatggatttaccccatgtggaactccatgccagtgtgcaacgctgtttgtttttttagcaataacttgtgagtagaggacaatgtccttgccacagaaaaagcacaaaaggggagttttcctttaaagggctaaaaatgc

SEQ ID NO: 888001 - DNA, 631 bp, Homo sapiens
tgcagaataactttagtatggagtaaacaagcctagtaatcagtaatttgttatgaaaaacatcattttggaacactagtttttgttctgcttaagggcaagaaacatgtagtaaatatagcccccttccctcccttccttccctactgcccctacctcctcaattcttccctctcctcctgcacaattcttggcagaaaatatttgaacactcaagacaactgacttcagttatgaacacagtagtccaagaaagcttcctgtaatctcagtttgagcagttattgattggaagttgaggggtttctaagacttgccttgagaactgttagttagtatgcaaatgtttaatttcagcttcataagtattctcattagtccatgtaattcttacctgtagtggttcaaacctgtgattacatgctatttttyacccatcaaaatcaagtcactataggtactggcttactgcatctagtgcttgatatgtctgaatttctctttctcacatttgatttggggacttaatcccattctgagcacgaaggaattttatctagattgaggggagcaataaaactgattcttctcaactataaaaatgaaaagtattcatagacatattggtggg

SEQ ID NO: 888002 - DNA, 594 bp, Homo sapiens
ttatatcaccatgactcttgcaggttgtgttccctggaaaacaaactccaagatagagattaaaatataggaggttcactagaatgtgttcttgggattgatatctatggaggccaattgggagaagagagaagttgggctgcagtgaagtctcaatcaaggtctcagcttatttcactcagacctctaaaaatggcctggtgcttcagaattgtcctgcactgggacaaaaggctcaaaccattataccattatatgaaccagttactccatgcaggttaccatgagaagaaggtacaaccatggaagtcaactctccttargtaagtcaattcccaaaaagtgtggatgctgagcactgcctatgagaagctgcctttcctgcagagggaaaaataagtctttcagtcttgaaaaaggatatgggtggaatgtaataatgtccactataatgacatcatttacagagctcagtactgccaaaagtacttagggggaaaagttgggaagaattgatttctgaaagttaaaaaattataagaacagttacagatttgattattttttaaaataatcaattttgaaaaataaaga

SEQ ID NO: 888003 - DNA, 675 bp, Homo sapiens
atatccaggtcctacctttaagaagggaacttggttccatctctggcttatacatggttggtatttattaggcaccaaaacttcagcttctaggatacatttggtcctcttacttctgtgcacagctaagtcccactttctgatcattattttagatttgagtttccatttcatgtagcattgagcatttctttttatttatttattttttgctttagtgctcagatacgttggtttaaataattgttttgcattcattttttacatatttagaatgaagtcagatttttctcatctacttaacctcctcattgagaaaaagtgttttggctttgcactccaggttgggctatctgatgttaagatctagcctatattgaatgccacatgttccgtcaggtcatgaagaatagtaaataaagtaactaacatttcttatgctattattgagaattctgagtctaaagttccacctctgtgtcctttcatagatggtgyggcatgggggattgcagagtgcagattggagtgtggattcaggagcaaaactgcattatttcaaatcctagctctgatattaaccacatgaccttgggcaaattacaaagcctcttcttttctcatctgtgtaatggggtcaaaatatttacctatttcatgtgcttttgtgtaaaa

SEQ ID NO: 888004 - DNA, 648 bp, Homo sapiens
aacctaccttagataagtgatttctagcctccgtgccacagccctcgagggtctgtagttgttatcagaagttctaaatccttggacacatcaagttctgtctgcaggctaaagtatatacgagtatgtgtgtgttacaacatctattcaacctattttgttgcttttttgatcagcaaaatgtctatttcaaaacacattaccaaattcaaactagctttgaatttatatccttttgtatttttctcaagtcatctgataccaaaagttcaactattatcccatgagggtgctraaacatttttttaaaaatatattcgtaaagattgggaatgactgttctgctgcttaagggattttttaaaaacagccaaagattggaagttacttagtgactgtcgcttccagcctaggtctattcttagaaaatatgtcagcttatcctaaagaaaaatttcatcactgaattgaacccttccgttttccaaatatcttagtactgccttagaagtagcatggagttaaagggaaagatttctagcccatgcctgattgccgttttttggtttgcctaattaatattcactatgggataaattacctgctattctttgaaatttgctgaaagatgcccttcattcctgtctg

SEQ ID NO: 888005 - DNA, 648 bp, Homo sapiens
aacctaccttagataagtgatttctagcctccgtgccacagccctcgagggtctgtagttgttatcagaagttctaaatccttggacacatcaagttctgtctgcaggctaaagtatatacgagtatgtgtgtgttacaacatctattcaacctattttgttgcttttttgatcagcaaaatgtctatttcaaaacacattaccaaattcaaactagctttgaatttatatccttttgtatttttctcaagtcatctgataccaaaagttcaactattatcccatgagggtgctgaaacatttttttaaaaatatattcgtaaagattgggaatgactgttctgctgcttaagggattttttaaaaacagccaaagattggaagttacttagtgactgtygcttccagcctaggtctattcttagaaaatatgtcagcttatcctaaagaaaaatttcatcactgaattgaacccttccgttttccaaatatcttagtactgccttagaagtagcatggagttaaagggaaagatttctagcccatgcctgattgccgttttttggtttgcctaattaatattcactatgggataaattacctgctattctttgaaatttgctgaaagatgcccttcattcctgtctg

SEQ ID NO: 888006 - DNA, 565 bp, Homo sapiens
acccatttatcagaattcgaaaaaaatccacgctttgccagagccaaccccacaccatgcttacatctttcaagattaaacttgaaagagcttctgttcgtcattcaagattcaactcagatgtaatttttgctccgatgctttcttgtacattatggattttttttttttttgctttttttattcccataacattatagaagcttttattttcacttacatttttattaacattttacaagaggctgcatggcctagtgctctttttaaaaagcctaggcttctgaatcggataaacctgtgtttgtagcctgattttttttttttttttttttactgkgaactctgaaaccaggttatttgacttctctgaacctcaatgttctcatatgcaaaggggggaattagaacagtacctttctcagaaggtcgtcatgattatctgagataaaccacacgcaactctcgacacatgaaattaaacattgtacctggctcatgtttgatttgttgttgcaggggtggtattggttatatttgtccttccctcaagattgagttctga

SEQ ID NO: 888007 - DNA, 617 bp, Homo sapiens
tcacctcctttcctcttcctgtgtttataccatggtaggtcatctgtcaggtgaacagttgggcttcctaaggcttctcctgggaagaaatgattgatatgatgagtgagttgttaacgtgtcccctttttccttttctctttggaatctgcccactctcagaaagcacagttggcgccaccctgctactcagcagtgaggagggrgcaagtcttagggcttctagcttggtttatggctgaatggggtagtcatcgcctgctgtgccaccagagctggaagcccgattttgtcatgcagataagccacattcttctacagctttattggtaacaaagataacatattgatgtccatttgccaaacacccttgtccttcaaagatggttcaaaatgtgagtgtgaaaaagatatttattatccttctaacatattaatagctaaggtattactacatcttttctccatgttttgcaaacatgtgtattatatatgtttaaatctatatttatttctttacatatccataaccagtaaaacaggtgagatcacatcaatattccaattcctgtccaacctcacaaaattgaatttccctctgttccatgtttgcagct

SEQ ID NO: 888008 - DNA, 650 bp, Homo sapiens
aacgcagaggagaacaagttttgttttgtattagcatgggcatttgagacaatttcaaacccacatggaggcccagcacggtggctcatgcctgtaatcccagctacttgggaggctgaggcaggagaatcccttgaaccctggaggctgaggttgcaatgagccgagatcacaccactgaactccagcctgggcaacaagagcgaaactccatctaaaaaaagaaaaaaaaatcacatggagttgtgtccttcaattcaatgatcattaaactagctccctcttacatacagtgccccgggctgaaacatgacacaataatgaacacgacagagtctcctctgatagatcatggtctttttgaggctacagctacataaactgatcatttcaatgtaacaggtccagactatgtagtattggaaaattggtggggaggagagaaggcattctagagacagcagagagaagagattggatgacacttccagggaagatgtccctrctttgagagttgcaagattacgtaggaattggtcagagatgtggctaaaaggaacataaatttaagagagtttgatttaaggatgagagatacttacagaggtgtggcacaggaggaagcagaggaaattgatggagtacggttg

SEQ ID NO: 888009 - DNA, 618 bp, Homo sapiens
agctgcaaacatggaacagagggaaattcaattttgtgaggttggacaggaattggaatattgatgtgatctcacctgttttactggttatggatatgtaaagaaataaatatagatttaaacatatataatacacatgtttgcaaaacatggagaaaagatgtagtaataccttagctattaatatgttagaaggataataaatatctttttcacactcacattttgaaccatctttgaaggacaagggtgtttggcaaatggacatcaatatgttatctttgttaccaataaagctgtagaagaatgtggcttatctgcatgacaaaatcgggcttccagctctggtggcacagcaggcgatgactaccccattcagccataaaccaagctagaagccctaagacttgcyccctcctcactgctgagtagcagggtggcgccaactgtgctttctgagagtgggcagattccaaagagaaaaggaaaaaggggacacgttaacaactcactcatcatatcaatcatttcttcccaggagaagccttaggaagcccaactgttcacctgacagatgacctaccatggtataaacacaggaagaggaaaggaggtgac

SEQ ID NO: 888010 - DNA, 595 bp, Homo sapiens
aaatgccatgcagttggaggaaaattaagaaggattgtaattgggtctttcacctgaggtctccgaagaccactgaggcaaatatacatattgcatactcagtttttttgttgacatgtttgcaatataaaattctttttttatttttttgaaacagagtctccttctgttgcccaagctggagtgcagtggtgcaatctcagcttactgcaacctccgcctcctgggttcaagtgattctcctgcctcagcctcccaagtagctgggattacaggtgtgcaccaycacacccagctaatttttgtatttttaatagagacagggttttaccatgttggccagcctggtctcgaactcctgacttcaggtgatcctcctgcctcagcaccccaaatttctgggattacaggtgagtcactgcacctggcctgaaattcttttatttttatatttcttatgaatttattttgtagctaataaaattaagtgacacagacaaggaattacaaaatatccaagtcaccacaccaatttatgtgagaatgagattaaaattctgtcctctttccactaaggtactttgtcctacttata

SEQ ID NO: 888011 - DNA, 594 bp, Homo sapiens
cagccaggtgtggtggtccatgcctataatcccagcactttggaaggccaaggtgggaggattacttgattccacaagttcaagaccagcctgaacaatacagtgagaccccatcactacaaaaaatttttaaaaagccmaggtatggtggcacaaacctatagtcccagctatgtaggaggccaaggtaggaggactgcttgagcccaaggaggtagaagctgcaatgagccataattgtgccactgcactccagtctgcatgacagaatgagacactgtctcaaaaaaataaaagacaaaaactatcctcaactaaacagaccatcaaagacatgcaagaaaaataaaatcatacagtaacatttgcaaaaatggagaataaatgaagttttatagaaatgaatctacattatgaaatactgtgcttcatagctttaaagagtgaagtacgtttccacattcagacatgaaaagatctcaagggcaaataatttaatctctaacagatcagatcccatatattctgtgtgaaacttttttctactacatattacactagaaacatgaaccaaaaaatgctggagctccgagg

SEQ ID NO: 888012 - DNA, 670 bp, Homo sapiens
catcaagagtccaattgatggccccagggagctgcaaagaaggtgcttctcatagattagttgatttcaatttctttgaaaggaatgtggtccactggacaacttcttactgttcctcctgtgctcctgtccctagatctccagaactcatagtttagttttataattttttgttgttgttttctgagacggagtttcactcttgttgcccaggctggagtgcaatggtgagatctcggctcactgcaacctccacctccggggttcaagtgattctcctgcctcagcctcccaagtagttgggattacaggcatgcaccaccacgtccagctaatttttgtttgtatttttagtagagacggggtttctccatgttggtcaggctggtcttgaactcccaacttcaggtgattcacccgcyttggcctcccaaagtgctggaattacaggcgagagccactgtgcccagcctaaacgtgtattataataaatatataatatttacaactttgtaaacatatgtaaataggagttgttttagaaaattgtggaattgttaaaggagtctcccacctcaaaccattttccccagggtctctcagagtacacaaggaaatatgagttcctcttgctttgacatctgggtggggatgaattaaagaacattcc

SEQ ID NO: 888013 - DNA, 626 bp, Homo sapiens
tagtctttagtccatcaacaatatttgatgtattacaagtttgggaacatatcatgcataagacttgtatcctgtcttttcatcttaacacacattaacatgagtgttgttctggaaattttagtctacgtgaactctcattggttatagaatctccactartgctataattctcaaactgtggcctcctgatgaacagcgtcagtatgacctggaagtttagttgaaatgtgcagagtttaagaaccacataccctgacaactaccagagcagaatcactgcttttttttactgtacagctccagtatggcctcaggcaatattatcaaaggactatatgctagaccattgtaaagatggtatgtttttaatatttctattgatttcacctcccctaagaggaagacacttagtcaattagacaatacctcactgccctatctattgtctgctccccagaccccaagaacccatgataattattttcttggttttagcagactcctaagatacaattgacaaaaactatataactggttttatattttttagttttgttataataaaaaatataatttttcatcttttagtcctcatggacgtttgaataagcatgtttaggaaa

SEQ ID NO: 888014 - DNA, 626 bp, Homo sapiens
tagtctttagtccatcaacaatatttgatgtattacaagtttgggaacatatcatgcataagacttgtatcctgtcttttcatcttaacacacattaacatgagtgttgttctggaaattttagtctacgtgaactctcattggttatagaatctccactagtgctataattctcaaactgtggcctcctgatgaacagcgtcagtatgacctggaagtttagttgaaatgtgcagagtttaagaaccacataccctgacaactaccagagcagaatcactgcttttttttactgtacagctccagtatggcctcaggcartattatcaaaggactatatgctagaccattgtaaagatggtatgtttttaatatttctattgatttcacctcccctaagaggaagacacttagtcaattagacaatacctcactgccctatctattgtctgctccccagaccccaagaacccatgataattattttcttggttttagcagactcctaagatacaattgacaaaaactatataactggttttatattttttagttttgttataataaaaaatataatttttcatcttttagtcctcatggacgtttgaataagcatgtttaggaaa

SEQ ID NO: 888015 - DNA, 636 bp, Homo sapiens
tattcatacgcattctccttttttcaaaatggtcctagattaaatgaaaatgacatggtcactgggcctggtccccagataccctgaatcttaatttatctcccattattttagagttcttattagggagaccctaagttcatatgcaggctcaacctgcatataagaagttgtttttgttgttattattgtttttaattttctgattaaggaaaatataggggtataattacactacccatttcttatatgtcttataagctactcaatggyaaggaaaatatttctatagtctagtaacccttattgtccttctttcaaagaagaaaacatctcttgtcccattctgccaaagccagtgtgtgtgtttgtgtgtgtgtgtgtgtgtgtttaatgctgagtttttcacacataatcatagtgttatgaaatttggctctgccgagtaatggctgagttaaggtgtagccaaggcagagggtcgtttcagtaaatggaagagcaggtcactgaagaagatcctaagtgttgaatagacaagggactgtcttgggatgatgaagaacttcaggatagaggaaaatcagaagtctggtatcaacatctttaggaaatgaggactattgatgaaaatct

SEQ ID NO: 888016 - DNA, 619 bp, Homo sapiens
tccatggtagccaccttggttcaactggacaaatattttttcagtcacaggtgactattaaactgaggaaggaaatccacttgtcagggatgattctgagttttgctaagcagtggtttagaatcttaactttgaygtcaaatggacacaggttttaattccttctccaccattaactgactgacttgctgtgtaatattgggcaaatatctcatgaactctccaaatcacaatttgcttggccaggcatgatggctcacgtctgtaatcccagcactttgggaggccaaggctggcagatcacctgaggttaggcgttcgagaccagcctggctaacatggcgaaacctcgtctctactaaaaatacaaaaattagctggatgtggtggcgtgcacctgtaatcccagctacccaggaggctgaggcaggagaattgcttgaacctgagaggcagaggttgcagtgagctgagattgcaccactgcactccagcctgggcaaaggagtaagactccatctcaaaaaaaaaaaaataataaaataaaataaatcacaatttcctcatctgtaaaatgggtccaaggatgatggtgcccaactcagaggctcatgaggat

SEQ ID NO: 888017 - DNA, 619 bp, Homo sapiens
tccatggtagccaccttggttcaactggacaaatattttttcagtcacaggtgactattaaactgaggaaggaaatccacttgtcagggatgattctgagttttgctaagcagtggtttagaatcttaactttgacgtcaaatggacacaggttttaattccttmtccaccattaactgactgacttgctgtgtaatattgggcaaatatctcatgaactctccaaatcacaatttgcttggccaggcatgatggctcacgtctgtaatcccagcactttgggaggccaaggctggcagatcacctgaggttaggcgttcgagaccagcctggctaacatggcgaaacctcgtctctactaaaaatacaaaaattagctggatgtggtggcgtgcacctgtaatcccagctacccaggaggctgaggcaggagaattgcttgaacctgagaggcagaggttgcagtgagctgagattgcaccactgcactccagcctgggcaaaggagtaagactccatctcaaaaaaaaaaaaataataaaataaaataaatcacaatttcctcatctgtaaaatgggtccaaggatgatggtgcccaactcagaggctcatgaggat

SEQ ID NO: 888018 - DNA, 619 bp, Homo sapiens
tccatggtagccaccttggttcaactggacaaatattttttcagtcacaggtgactattaaactgaggaaggaaatccacttgtcagggatgattctgagttttgctaagcagtggtttagaatcttaactttgacgtcaaatggacacaggttttaattccttctccaccaytaactgactgacttgctgtgtaatattgggcaaatatctcatgaactctccaaatcacaatttgcttggccaggcatgatggctcacgtctgtaatcccagcactttgggaggccaaggctggcagatcacctgaggttaggcgttcgagaccagcctggctaacatggcgaaacctcgtctctactaaaaatacaaaaattagctggatgtggtggcgtgcacctgtaatcccagctacccaggaggctgaggcaggagaattgcttgaacctgagaggcagaggttgcagtgagctgagattgcaccactgcactccagcctgggcaaaggagtaagactccatctcaaaaaaaaaaaaataataaaataaaataaatcacaatttcctcatctgtaaaatgggtccaaggatgatggtgcccaactcagaggctcatgaggat

SEQ ID NO: 888019 - DNA, 622 bp, Homo sapiens
gttactttttattgattttttaaaatatatcttcaatacaagattgattgattccaaagatacagagcctggggatacagaacccacagatatgcagggccagttggatatggcattttggaaaataaaaacctatagagaagtaatacatcagtgattrtcaggaggagatgggaggtgttcaacaggtgaagcacaggggatttttaactgaatgaaagtactctgtgtgactctgaaaggtaaatgcatgacattacacatttgttcaaacacaaagaacttcatagccttaatatgtacacatctttaaaaaccacttagggtattaatggctacctggaaggaatgcatattgtccttaatggctaccaagaaggtatgcatcgtgtcacaaaataaatatttcactgtattacaaatgtgtaaaacgacctcagtaaaggggatgcagataaaagttgctgtcctgagtaactttagaaatgattagagtctgcaaaattaaggcaaaaagaacttgatataagcaatgtactctatttgataaagttatttctcatggtggcataggttaatacttctgatactgctatatatgtataccagaattaaacaattg

SEQ ID NO: 888020 - DNA, 622 bp, Homo sapiens
gttactttttattgattttttaaaatatatcttcaatacaagattgattgattccaaagatacagagcctggggatacagaacccacagatatgcagggccagttggatatggcattttggaaaataaaaacctatagagaagtaatacatcagtgattgtcaggaggagatgggaggtgttcaacaggtgaagcacaggggatttttaactgaatgaaagtactctgtgtgactctgaaaggtaaatgcatgacattacacatttgttcaaacacaaagaacttcatagccttaatatgtacacatctttaaaaaccacttagggtattaatggctacctggaaggaatgcatattgtccttaatggctaccaagaaggtatgcatcgtgtcacaaaataaatatttcactgtattacaaatgtgtaaaacgacctcagtaaaggggatgcagrtaaaagttgctgtcctgagtaactttagaaatgattagagtctgcaaaattaaggcaaaaagaacttgatataagcaatgtactctatttgataaagttatttctcatggtggcataggttaatacttctgatactgctatatatgtataccagaattaaacaattg

SEQ ID NO: 888021 - DNA, 619 bp, Homo sapiens
acaaatacacaagatatgtgtgctttaggaaataaacaaagaacatatttgtgttaaagagcaaaggaatgttggtggtgaaaacaccactaaatgtgtgtgttttcaaccattcatgaaaacctccgactcctataggtgctcactaagtaattgggatggaaagaggagttaatctttgatgggcatggaatatacatgcgtgcacgcgcgcgcacacacacacacacacacacccrtgtatgtatatatgtgctcactgttgagagactaccaggaacacacctatggttgtgaatacattgggtttcattcttgttgccactagggagaccacacaatatgagaatcgttgaagcatttcagtgaaaagctgtgagataggacttctttaagactttggccttggttttggtggttttggtaaagatacaaggaagcagagattttctctaaattggaggatatcagaagtcatgagacaattctatgtttgggtatgttaataaatcttttctagaaaaaggcagactagagtgaggttggagccataactaataaataagcatcaatcatattagccaagaagtaggggctgttaggtgctatatggtgtaca

SEQ ID NO: 888022 - DNA, 619 bp, Homo sapiens
acaaatacacaagatatgtgtgctttaggaaataaacaaagaacatatttgtgttaaagagcaaaggaatgttggtggtgaaaacaccactaaatgtgtgtgttttcaaccattcatgaaaacctccgactcctataggtgctcactaagtaattgggatggaaagaggagttaatctttgatgggcatggaatatacatgcgtgcacgcgcgcgcacacacacacacacacacacccgtgtatgtatatatgtgctcactgttgagagactaccaggaacacacctatggttgtgaatacattgggtttcattcttgttgccactagggagaccacacaatatgagaatcgttgaagcatttcagtgaaaagctgtgagataggacttctttaagactttgkccttggttttggtggttttggtaaagatacaaggaagcagagattttctctaaattggaggatatcagaagtcatgagacaattctatgtttgggtatgttaataaatcttttctagaaaaaggcagactagagtgaggttggagccataactaataaataagcatcaatcatattagccaagaagtaggggctgttaggtgctatatggtgtaca

SEQ ID NO: 888023 - DNA, 671 bp, Homo sapiens
agtaattcagataaaaactattaacactatactaaagaaatctatgttccttataatggaaaagcattcaaagaaaatttgaaaagggaattaaccagaagtttcagagatctaaactgaatttcatcactttcagcctcttagaaagcttatcacttatctattaaaagtagagaaattttatctaaaggaggaaatctgagtgatagcttaatacatgccttcaagtctaagttgaatacattgatctccatctgttctctaatgatgttgatgacagaagtaggaaaaaaaaacagatttatgtagcaaaagaaagagattgaacaaagatatcagaaagaacattttgttaaaataaatcatttttaaatatcaaattccatcagtaccccaaatcccttagatgccccttccactctccaacacgacaaggtcaatcaaaaagcttggtytactagagtattgtattgttgaaagaatccaaggtagttcatgccttacctaaaattataagcattgcatctaggcacttttaaaaaatattcccatcttctgaaattatatccaccccctaagaaaaaataaattttgagcctacttttctaggtttcttttgattaatgaggcatttgcttgataatgacagatgactaatgagaataaagcca

SEQ ID NO: 888024 - DNA, 619 bp, Homo sapiens
aggtctggccagaagtaacatggtccattaccccaggagcattgcatttgaatctaacagtcctagaggagttcctgcagttgtaaacactttaatttgcttatattagtgcagaataatagtgcctaacccatgttcttttgaaaatcaaatgaagtattatcataaagtatatatcaccatgacatagttattactgagtaaatggtaataatcataataatgactagaaacacagtcattctcagttagtccagaacactgtaaaaacagtttgctgagcctggtgccatccactcttttgagattaagtacatatttaagtgaggcccaaactgggcaattatatgaygggttgaatggccaagacatataacccttaaatgtatatttaagcaaagcccaaactgagcaattataagatgaattaactggaaaacttacagaaaattttagaaacagaaaaactttagatgcagaaaacatatctaaattctaaaacctcaagttgtagggactatcatacaacagagatcaccagacatctggagggaaaaatacccaaattaagagaaaaggatgaaagaatttcatgagacgaaagcataggaaagggaca

SEQ ID NO: 888025 - DNA, 646 bp, Homo sapiens
ctgctaccactactctctctctttggcaaaatacatatgtatatatatatatatatatatgtaaatatatatgtatatatatatatacacacacatatttgtgtgtgtgtatatatgtatgtatatgtgcatatatgtatatatgtgtatatatgtatatataaatgtttaaaacagaaacatatatatgtatatttctattttaaacatttccagtcattttcagattacagaaatattaaattatttttcagtaaggagataattctagtttttttctgctcctctcartggaacactggggaatatactttaacagatgtgacagtttgtatgatgttgaaggagcacttctccattgaagggaaaaagcagaaaagaacatgttggagaatgaagagaaacgattatgtagagatgtcaaagatgttataaagaatgtagaaagaagaaaataaaagaaatagctttccaagatcttctggtaaatcttattgaagaatattttacttagactatctgtgagaatgagtcaaattagagatgaaagaagttcgcctctctgggctctgatttgccatttagtatcaacgaaaacatgtcatcaattttttaaaaagtataaaccagttattgagttaattca

SEQ ID NO: 888026 - DNA, 660 bp, Homo sapiens
acccaaaggaatataaatccttccactataaagacacatgtacacatatgttaattgcagcactgtttacaatagcaaagacacagaaccaacccaaatgcccatcaatgatagactggataaacaaaatgtggtgcatatacgccatggaatactatgcagccataaaaaagaatgagatcatgtcctttgtagggacatggatgaagctggaagccatcatcctcagcaaactaacacaagaacagaaaaccaaacaccacatgttctcactcataagtgggagttgaacaatgagaacacatggacacaggaaggggaacaacacacaccggggaccgttgtagggggagcaacgggagggagtgcwttaggacaaacacctaatgcatgaggtgcttaaatcctggatgacagtttgataggtgcagcaaaccaccatggcatatgtatacctatgtaacaaacctgcacattctgcccatgcatcctggaacttaaagtaaaataaaataaaataatagtaataataaaagatattcttggcttaaaaaaaatagtaaggggaagagagaatacatgccagaaaggcaacaaaaaatacccttcaaaatgatttccaggcaccatcctatactatgatatcaaaatcactctcta

SEQ ID NO: 888027 - DNA, 693 bp, Homo sapiens
caattttcattggagaatagtcttttcaaaaaatggtgccagaacaattggatatccatataccaagtaagtactcctatccacaatattgaaaaagtaactcaaaatgaataatatacctaaatgttaaaccgaaagctatagaacttcaagaagaaaagataaaagaaaatctctgtgatggtattttagaaaaagaattcctaaatacaataccaaagtcacaatccaaaaaacaaaaagtggtacattggattttatgaaaattaaaaacttcccctcttcgaaaaacactattaagaaagtaaaaaagacaagccacagaccaaaagataatgtttgtaaatcacaaacaaagtgacttgcaaattacttatctgataaaggatgtgtatctacaatatgtaaataactctcaagaygtaatttgaaaaaaatcatttaaaaaatggacaaaagatttaagtagacacttcatcagcaaacatgtgtggatagcaaataagcacataaaaagatattcaacatcatttgtcactaggaaaataaaaattaatcacattgagatactactacatacctattaaagtggttacaatttaaaacactgaccaaatattcacaaggacagaaaaactagaatactactacacaataaaagtaataaactattaatacatgcaacatggataa

SEQ ID NO: 888028 - DNA, 610 bp, Homo sapiens
ctcaggcagtatcaaagctgacagaaaacacagtaagttggaaatcctgcagcaagcaaggaagcgtattgattaggtactgcatatactgaacaagagaataactttaaaggaaaaaaaaagctaatgaatgggccagagaaatacaataggccaaagaagagatataacaaaaagaaaaaggcggagggaaacccctcmagatagaaatacaacaagacaaagcaaaagctcagcaaaaacatagagcaattcaagtcagaaactcagcaagaaatgcaagtcatggcagaaatataagatcaagataagaacatattcaaccttacaccgagttttaaatcagaacaacaaattcagcaacaaatctgccaaatgctaatgattcaaacaaggaggcaataattgaaagtaagaaatacaccacatctcatccagtaatgttcacaatgccatttcccctaattattgctgatatggtgaccttctcctgaagggacacaccaaaaattcagtttaattaagggttaccagtgtaaagaagggtttttcatgtctctgttgtgagactgtggacagtaacacctcatttatctggtgttatttaggt

SEQ ID NO: 888029 - DNA, 610 bp, Homo sapiens
ctcaggcagtatcaaagctgacagaaaacacagtaagttggaaatcctgcagcaagcaaggaagcgtattgattaggtactgcatatactgaacaagagaataactttaaaggaaaaaaaaagctaatgaatgggccagagaaatacaataggccaaagaagagatataacaaaaagaaaaaggcggagggaaacccctccagatagaaatacaacaagacaaagcaaaagctcagcaaaaacatagagcaattcaagtcagaaactcagcaagaaatgcaagtcatrgcagaaatataagatcaagataagaacatattcaaccttacaccgagttttaaatcagaacaacaaattcagcaacaaatctgccaaatgctaatgattcaaacaaggaggcaataattgaaagtaagaaatacaccacatctcatccagtaatgttcacaatgccatttcccctaattattgctgatatggtgaccttctcctgaagggacacaccaaaaattcagtttaattaagggttaccagtgtaaagaagggtttttcatgtctctgttgtgagactgtggacagtaacacctcatttatctggtgttatttaggt

SEQ ID NO: 888030 - DNA, 681 bp, Homo sapiens
ttaaatctcctgatattattccacatgttatcgatctgtttattttttaacctatttttctcttcatttttctttggttacttcataatgatatgtgtttaaattcattaatcttttattctgcactgaccaatttgctattatacttatccaataaagtttttattgtaaatttatacttttcagatctagaatttccattttatttcttcttagagctatcatttatctcttaaaatattttatcttttcatccattatatgaattttacctttaattttttttaaatgtttacaatatttgctttaaattctttgctttctaattacagtaatttggcaatctgtggatacatttctactgacttatgtagaactgaagttgggctttaattgtatttagttcacttgtgtttagctcaaccttcaaccattggtgatgccaccttttggatcttatcctcatttgagctagcgggggacttggctgggactataaatatttttggytcatatttggattaaatttattcataattctggaatccaatcatggcaaaatttcataggaatccacttctagggcctcttcaactgactttatcttagcaaaattcaagtgtggaggataatagtgtaacctggggctgagctacttgctttggcatttagacttttaga

SEQ ID NO: 888031 - DNA, 620 bp, Homo sapiens
tttgtacagtcattcaggccatcctggtgcttaatgggaagggatctgagcagagtcttcctacaagtcaaagccgaggtctctaggaacatctgagcttcttctacttcaccagagggaggtgttttcactatagagggaggtgtcattgttgtgagtctgtgtaatatctaagtagagctctgtatcacctggagcaagtgaatggtagtatgcataccaaccctcttacytcatttgaaacactgaatgaaatatttaacagtaaccaagcataacttttggataaagaatggctccctgcataatttttcggcattatattttctctccacattttgttagaataaacaatatggtccatctttttttcttttaaggaactaattttttcattacatgcttaacattgagatacttttgcgcctgtattttttattttttgacatctactcagctacgcaagatgaaatactggaagtctttcttgatatttctttttcactttaataataataattgtatattatgtttttctcacttttaacactctccttgaaacatttttacttagcctgcttctgcttattcttatctctatcttctgcttctgtgccact

SEQ ID NO: 888032 - DNA, 606 bp, Homo sapiens
ggtccctcccacaacacgtgggcattatgggagccataattcaagatgagatttgagtggacacagccaaaccgtatcactaagcaagataagaaagtaccacaagatggttattaatgtgggttctaaattcaaaaggccttctgtggtactgaccttaatttatttaatttcaatgctttaacaataataactttaataatgataacactaacatacattgataatattgtttaaaataacaattgccataaaacaatactaaatgtttataaggtttttatgarcaacaggtgaattactacagtgaccataataaagtgatccataataaattccaaatatctcttagctggtatgaataactattcatagtattaactaataaagattttgtacttgtttcctattgctgctataacaaattattactaattttgtggcttaaaacaacagaagcttattatcttacagttttggaaatcagaagtctgtgaagcttaaatcaagatgttaacaaggctgcattccatctgcaggctctaggggagaatctattgctttgcttttcattacatttaaaactagatcagttgatttcacaac

SEQ ID NO: 888033 - DNA, 629 bp, Homo sapiens
cctttgttttgcagctaaatattaatttgaagctaacttaaaaggcttcgtcacagtacaaagcaattcaaaaggcaagcggagtgaatgagccattccttaacagggtaaacgggaaactacggtccagtacatttttatccttgtcatctttttctactttattgaactcggtatttgagaatgtgatccactgacatcggatatttatacattgttaacgttttagggtaagaggatttgactatatgaggttttgtcatctttaccgagaggttgtattgcctttgtttcacgtttcattttaatacctgagataaattttgtcttagcacagctttgaccagagagaactgtttttatttgctcatccagtaaataatatatttacaagaaagtggttttttttccttcttcmgttcttatttttcattcttccttgtcctagaatcataactggttaagtcgatttctgttagatccctggctgtagcttattagagtggccatagtcactggtaacttgacatttttcttcctgtttgaaggcaaagctgcagacacgtctttaggacttacccttcgggttgtttgtaggagtggtggtggtaacgtgcagtagacgcact

SEQ ID NO: 888034 - DNA, 634 bp, Homo sapiens
gaggtcacagtccaaaccgctaccccgaaaattagagatacctatagacaaatacagataatcacaacttactggagcaaaaccttcatgaggaccagtgcccaggtatggaaacctgaactgtaaatgatgaattgctggaggctcagtgtatcaagtctgagagagagaaactccagagggacccagtcattaggggacttagacacatttgtgagttttacctcctgtagcataccaggttcttgtgaatatctgagaaaaatccccttttgcttccagaacggggagaaaaggggaacatttgaaacttcctaacagggtctgccrgcaggagaaactatttaaccagagcctaagctgttggggttttgtcagagtctaacagacctagcggaatagaaatatccaactccagccaactctagccatctcgtcccacaaaagggaggtgggtggagaaaaaaaaactagcacgtgtgaaatttacagtccaggggcacaggcttactaaaagactgtacctaatcatagagctatagaatgccacccatccaccccaacacttcaccaccacatcactaacggcccatttaacagcagtttcctctactcactgcatcatgtttcgcta

SEQ ID NO: 888035 - DNA, 659 bp, Homo sapiens
caccttgctggagctcttcacaggtcaggcacagtccaccagcacagaagctatgatgtgggcccccagggcccttgagactgccctgtgagcaggtatggccaggctggagccccaggagaggtcaccagaccaaaggatacatgggttggactagccccatctgatgtgcaagactgctctgcagcaatcaggtccaataatttccctagggctaaagtctcttataggagcaagttgagcccagggagatggccttccctggctgstctctactatagatgctccagcaccaaatcttctggactctacatcagctggcttgctgctgctaccatttctttaaacagctctccctgccacctaaagtgtccatggtggtcaagaggtcccctcttgctgggtttccagaggcctgtagcaagagcaggttgctccttgccagctcaactcacccattaccctggagctgttgtggttcaaaaatgggtcccagtgtgtggtagcccatgcagagttcccagctttctcctgcttcagcccactctctgtgtcttccctctgtccactcttggaaccttccctctgaacatctgttcagagtacaccagttgtctcagtcctgtgtgggagctgttccatttgtctgcatctagtgg

SEQ ID NO: 888036 - DNA, 663 bp, Homo sapiens
ttagagagtgattttgatatcatagtataggatggtgcctggaaatcattttgaagggtattttttgttgcctttctggcatgtattctctcttccccttactattttttttaagccaagaatatcttttattattactattattttattttattttactttaagttccaggatgcatgggcagaatgtgcaggtttgttacataggtatacatatgccatggtggtttgctgcacctatcaaactgtcatccaggatttaagcacctcatgcattaggtgtttgtcctaawgcactccctcccgttgctccccctacaacggtccccggtgtgtgttgttccccttcctgtgtccatgtgttctcattgttcaactcccacttatgagtgagaacatgtggtgtttggttttctgttcttgtgttagtttgctgaggatgatggcttccagcttcatccatgtccctacaaaggacatgatctcattcttttttatggctgcatagtattccatggcgtatatgcaccacattttgtttatccagtctatcattgatgggcatttgggttggttctgtgtctttgctattgtaaacagtgctgcaattaacatatgtgtacatgtgtctttatagtggaaggatttatattcctttgggtat

SEQ ID NO: 888037 - DNA, 635 bp, Homo sapiens
cagctacttggtggcaagttaattatcatcagtgcccttctaacctagagggggaagttattccaggcatgggtttgccttcctttcccacagcatctcagacagtactactatcaaagggacccatgggtccatgacatcctccataatgtgatcttggaactaggcgtccattttatgtcggtggaagtaagataatggtcatgttacatgaccatgggctcattaatgctactatatactcactaatactaccatcaaaagctgctggcctgatataatgttgaaatggctctttaaggcacaactaaagcaccaggttggggatgaytcctttcagtgttggggtgctgtccttctggatgcagtatagactttgaaccaatgccattacatggcactgtttgcctaataggtacaatacatagattcaagaacaaaaggatagaaggaatggtctgtgtcactataactaccccagtgacacacttggggaacttttacaaaatgtttgctttctggatatttttaactcctcattctagtaggtaagcagaatttaaaatgtacttactgggctggcaggggtaattgattatgattatcataagccaatgaggttggtgctacatagc

SEQ ID NO: 888038 - DNA, 584 bp, Homo sapiens
agcccaaaactataaaaacccagaagaaaatttaggcaataccattcaggacatagacatgggcaaagatttcatgatgaaaacaccaaaagcaattgcaacaaaagcaaaaattgacaaatgggatctaattaaactaaagagcttctgcacagcaaaagaaactatcatcagagtgaacagacaacctaccaaatggaaggaaatgtttgcagtctatccatctgacaaaggtctaatatccagaatctattatmcaatgaacgtaaataaatttacaagaaaaaaacaaccacattgaaaagtggacaaaggacatgaacagacacttctcaaaagaagacatttatgcagccaacaaacatattttaaaaaagatcaacatcactgactattagagaaatgcaaatccaaactacaatgagatactatctcacaccagccaaaatggcaattattaaaaagtcaagaaatgactgatgctggcatggctgtgaagaaataggaatacttctacactgttggtgggaatgtaaattagttcaaccattgtgaaagacagtgtggtgattcctcgaagacat

SEQ ID NO: 888039 - DNA, 508 bp, Homo sapiens
cacactgtcttccacaatggttgaactaatttacactcccaccaaatgtgtaaaagcattcctatttctccacatcctctccagtatctgttttttcctgactttttaatgactgccattctaagtggcatgagatggtatctcattgtggttttgatttgcatttctcaataacagtgatgatgatctttttttcacgtgtttgttggctgcataaatgtcctcttttgtgaaatgtctgctcatatcctctgcacactttttgatggggttgtttgtttttctcttgtaaatttgtttaaattccttgtagattctggatattagccctttgtcaggyggatagattgtaaaaaattttctccggttctgtaggttgcctattcactctgattacagtttctttttgctgttcagaagctctttagtttaattagatcccatttgtcaattttggcttttgttgccattgcttttggtgttttcatcatgaagtctttgcccatgt

SEQ ID NO: 888040 - DNA, 638 bp, Homo sapiens
cattcttgcaatcttgcactgctgtgaaaagcgagggctgcctgtattcgttataatgcttatggtaataaatgctaaataaaaattaatcaagataagagaaattagaatgccagggtagacaggagaattgatattatgtacagggtggtttgccaaaggtgcctttaataaagtgacattgagcagaggcttgaaggagggatgaagggagccatgcagctgtgttggggaagaagcagaggagtgatacaatttgacttttccaaaaatcmctgtagctgaaaaatgaaagccaacagaggctacagaagtgttcccggaagagatgatgctggccgggacagggaggggtgatggaggtgagaagtgtgcaggttagggatgtaactcagtgctctcctgcagcaggcttggactggcccctgaaagccaaccgttaagtttcaggaattttgcaatccagttgttaaacttctggtagcttgaaactggccatgttgggggtgattataccacagaaattgtcaagtacaacaaatcagctttttttttcctttaagagagtccatttttaaacacttaccatctcacgagtggacataagtattttgaaggcagaattgaatatggggtgt

SEQ ID NO: 888041 - DNA, 582 bp, Homo sapiens
cctttaataaagtgacattgagcagaggcttgaaggagggatgaagggagccatgcagctgtgttggggaagaagcagaggagtgatacaatttgacttttccaaaaatccctgtagctgaaaaatgaaagccaacagaggctacagaagtgttcccggaagagatgatgctggccgggacagggaggggtgatggaggtgagaagtgtgcaggttagggatgtaactcagygctctcctgcagcaggcttggactggcccctgaaagccaaccgttaagtttcaggaattttgcaatccagttgttaaacttctggtagcttgaaactggccatgttgggggtgattataccacagaaattgtcaagtacaacaaatcagctttttttttcctttaagagagtccatttttaaacacttaccatctcacgagtggacataagtattttgaaggcagaattgaatatggggtgtaaagagacatcagggaggattcgggagtcaaggaggcttttggactgcggcagcatttccgccatgagcagcagggcggggaagcctgcaggatgctagaactagtgt

SEQ ID NO: 888042 - DNA, 647 bp, Homo sapiens
ctaatatttctgctagtagcataacacgactaaaagaatgaactttggagccggtcgacctggacttgaatctcagctgctccactgactgaggtaggggacaatgaatggacaagttcctccctctgcctgagtctttgtttggaaataggggataatagttgcagctttcacacagggatgttgtgaggattagtggagytaaaacaggcaaaatgctaataactgtgtctacatggtaggaagagctcaattgttaaactcttactgctgtcatttgggtacagtgtatgtgtgagaaaaataatttgaaaagtgagacccctgccctctagggcctgtgaggtgacatcacagcagggcccagtggggaattgagaggctgctgtgcccagccctgtggttctggggtcagctccatggcctgagaagggatcaggacaggtaacttgtctgggagctgtgagcagggttctcccaggctgcaccaggaaaggccctccaatcctgcctgtcttgggaaggggaaagaaattatccatgggaaatttaagagaaccaaaggaggttgtagtacctgttatgggctgaatgtgtcccacaaaatgcatgtgttgaagctctaatccccagcacctctgaacgtt

SEQ ID NO: 888043 - DNA, 603 bp, Homo sapiens
ctcacttagtatctgctatctcctagggagtatcggccacatcagagacagaattttggtctttacaatgagctgttttgcttcagttaaaatccacttgtcccagactctttgggactttgtttacaattctaagcagataaaaatattattggcttgaaagagagtatgccttttttttttttttttttttttttttttttttttacagtaagtaacagccacagttaggcactttggggtaacatgtgcaactgaacaaaatacttccaattttgaaaaatctggattctgtatcttgccagggcagagaactttactgctcctgaactcccgtagcagtttgcatggacatcatggcactcatcacatccyactctggctttttgtcactggggcacatgaagtctcctcctacccagagtttaagcacagaagcccgtgcatggaggcaccgtggcgtctggtatgaggccgtgcgctgaggcaccgtggcatagatgctgtgcgcggaggcaccgtggcatctagtatgagacttttcatttttgtggagttgatgctagtgaatcccagtgaaatgaatgagatgaattactattt

SEQ ID NO: 888044 - DNA, 496 bp, Homo sapiens
tcctgagaattctatacagccacatgaagcatttttacttgcagtaattcatttaaacctcccaacaaaccaaggcagtagaaaggatcattcctttttacagatgacaaaactgaggctcagaaaagtagccttggttcaaattacacgacttctcagagtcagctgtcgtggctcacacctgtaatcccagtacttcgggaggccgaggtgggcggatcacctgaggtcaggagttcsagatcagcctagccaacatggtgaaacccccacccctattaaaagtacaaaaattagctgggtgtggtggccacctgtaatcccagctcctcgggtggctgaggcaggagaatcgcttgaacctgaaaggcggaagttacagtgagctgagatctcaccactgcactccagcctgggtgacagagcaagactgcctcaaaaaaaaaaaaaaaaaaaaaagatctaaacccaaaccacttggctccacagccctcat

SEQ ID NO: 888045 - DNA, 653 bp, Homo sapiens
ttttgagtcagagttaggagctggagattaaaagcttttcttcagcattgttagagcagggtgcatcattctcaattgccagcggtcaattctctccagacacagttgatcgctcctcccacatgaaacaatttcttcacttgaattcctccaacctcgctggctgtttcttcccaatctcttttgctggttcccagttgtgtcactccccactcattactgaagagccctaaagttcagtccttgaactccttacctatcaacaatcatccttgcttatctcagctagattccgggctttgtatactgatcaattacaaatttgtatctccagcccagacttgtctgctgaatttccaacttgtacattctgctgcctactcagtatctccacttggatttctagtaaacatctaaaatgtgtcatctccaaaactgactttctaatttatcacracacttactttcaaaaaatacatgcacaccttctgtagtttcctgcctcttaggtcacagcaactctattcttccgcagttcaagccaaaattttcggtgatctccttgactaccctgtttctcttactttctctataaagtctcttagagaaaatcttgttagtgctaccttcaaaatatcatggtgtgagttcaa

SEQ ID NO: 888046 - DNA, 723 bp, Homo sapiens
ttgatccttgaacaacagtggttgtaactgaaagatccacttatatgtggattttctcttgcctctgccaccccgagatagaaagaccaaaccctcctccacttcttcctcctctgcctgttcaatgtgaagctaatgagaatgaagatcttaatatcgatccacttccacttaatgaatagtgaatatattttcctttccctacatttttctcaacaacattttatacctcactttattggaagaatatagtatataatacatgtaatatacaaatatgtgtgawttgactatgtcatgagtaaggcatctggttatgagtaggctattagtaattaacatttcgcagagtcaaaagttatacataaactttggtgccactaatcccatgtaaggacccagtttttcaagggtcagcttcattctatatgtgaaaatgtggcacatataccccatggaatattatggagccataaaaaaggatgagttcatgtcctttgcagggacatggatgatgctggaaaccatcattctcagcaaactaatacaagaacaggaaaccaaacaccacatgttcttacttataagtgggagttgaacaatgagaacacatggacacagggaggggaacatcacacacctggccctgacagtgggtgagggactagggaagggagagcattaggagaaatacctaatatagatgacgggttgatggttgca

SEQ ID NO: 888047 - DNA, 723 bp, Homo sapiens
ttgatccttgaacaacagtggttgtaactgaaagatccacttatatgtggattttctcttgcctctgccaccccgagatagaaagaccaaaccctcctccacttcttcctcctctgcctgttcaatgtgaagctaatgagaatgaagatcttaatatcgatccacttccacttaatgaatagtgaatatattttcctttccctacatttttctcaacaacattttatacctcactttattggaagaatatagtatataatacatgtaatatacaaatatgtgtgaattgactatgtcatgagtaaggcatctggttatgagtaggctattagtaattaacatttygcagagtcaaaagttatacataaactttggtgccactaatcccatgtaaggacccagtttttcaagggtcagcttcattctatatgtgaaaatgtggcacatataccccatggaatattatggagccataaaaaaggatgagttcatgtcctttgcagggacatggatgatgctggaaaccatcattctcagcaaactaatacaagaacaggaaaccaaacaccacatgttcttacttataagtgggagttgaacaatgagaacacatggacacagggaggggaacatcacacacctggccctgacagtgggtgagggactagggaagggagagcattaggagaaatacctaatatagatgacgggttgatggttgca

SEQ ID NO: 888048 - DNA, 723 bp, Homo sapiens
ttgatccttgaacaacagtggttgtaactgaaagatccacttatatgtggattttctcttgcctctgccaccccgagatagaaagaccaaaccctcctccacttcttcctcctctgcctgttcaatgtgaagctaatgagaatgaagatcttaatatcgatccacttccacttaatgaatagtgaatatattttcctttccctacatttttctcaacaacattttatacctcactttattggaagaatatagtatataatacatgtaatatacaaatatgtgtgaattgactatgtcatgagtaaggcatctggttatgagtaggctattagtaattaacatttcgcagagtcaaaagttatacataaactttggtgccactaatcccatgtaaggacccagtttttcaagggtcarcttcattctatatgtgaaaatgtggcacatataccccatggaatattatggagccataaaaaaggatgagttcatgtcctttgcagggacatggatgatgctggaaaccatcattctcagcaaactaatacaagaacaggaaaccaaacaccacatgttcttacttataagtgggagttgaacaatgagaacacatggacacagggaggggaacatcacacacctggccctgacagtgggtgagggactagggaagggagagcattaggagaaatacctaatatagatgacgggttgatggttgca

SEQ ID NO: 888049 - DNA, 611 bp, Homo sapiens
aattgttcaacaataaaaaattatgtataaacttgagactctacctcagctcttaattccttcatacctatttctgtgccaatataatgctgctttaattattgttacttatgttttaatacttgctcaggcagaccccctaccagacattttggttatttttagtttttgctattaaagtaatggcaaaaactgcaatgacttttgcaccaagttagtatgtacattaaaaatcctagagggaggttgccctttaattttgaaaaaaattgacagctttatggccgtgaattttcttatccataacaagatttttaccacctgttttggtattcatacatatctttcacaaatattttaaaaawtattattctataatggttttacttttattacattctttgatatcataaaggtttttctgatattttagatattttttctctatatacttttttctcttattgttgctaactatttcttccattggcctttgcatatcgatctaatttttggcattaataacaaactgtaataacagttccaataatttcttagcagataaacaatcataacatgaaaaaccaaagatagtaataaactttcttgac

SEQ ID NO: 888050 - DNA, 609 bp, Homo sapiens
tgtaggatataaaggtgttcttgttctgctcctcaaaatgtcttaagatataatgatgaaagagaaaagagggcatagtatcatgcaaaggccttttgcttaatcttgtttcttcaagaagctctctgattctcaattttctgattttaaaattggaaataatgaccctgaactcaaagagttaatctgaggattaagagagattatctatgtaaattgcttagtgcagtatctgaaacataattcagtggctcactaaatagtaattcctctttactctyttctgtcacctaggactgaccaagatttacatatattcattgaaataatggaattccatgatttgccctgattctgcatccacaacttagttgcatttaaaaaaattacaatagcactagacttctgtgtcatcaagttaaaattgtattgatcaactagtaaacacttcactgtgctatgtactgaagataataataaaattatgaaatctaggtaatgtatacattgaaggagctaaaaaaatcctgttgaaagacaaggctaccactttctctccactccccacaatcctctctctctcacacacacacacacacacacacacac

SEQ ID NO: 888051 - DNA, 653 bp, Homo sapiens
ggtatttctgaatgtcctttttgatttctgcatttggtactgaatatttagagttctatttgggctttccttggggttggtatctaaacccttttggttgtcttccaccttgtctctcttgtttcatcctgtggctactgtcacttcaggatttggaaacaaagtatctttacatatatacttttttgcctaagatttctatatcagaaactggtcgtgtaaacaccttgaaaatattttcttctaagacttaaaattatagcactaagtcccccccaatgtaagttcttagaaagttcgggttgttggaagmagatagttttgtctttcttatagagtctattttactttactatagttggcaggagctcaagaagacaggattagtcaagggcttaccctagtaaattccattctgttgaccttctttcaaaattaaataagacagaaagaaaatgaaggctttgaacacttggaaggatccaatgggatttctgccttcctagagttatactaaaatatttgacaacctgctgtcgaagtggacttttaatgaaaccattccttctggtagcattttaattctaagtgatatcactgggtcagcaacgagtctctgaggttctataagaagaggtcagcattcatgacag

SEQ ID NO: 888052 - DNA, 637 bp, Homo sapiens
aattaagctgcagttgctggagcttaaatttccatggtgattatttgtaattactctgagagtagtcattgaatccattctgaacaggcccatttatttggagggaactactttcttcatatcccatcttttaaaaatttttattaactaaaaagagcgttaagtacctccataaaatattacgtgttgacttttcagatgctaatagccttggtgtctactttttcctgtccccagtggataagctaaaatgtagtggcatttgtatgttttacttcagtgctacatttacacattaatgtgactgttttaccaattaggactaagctgctggtagtttgtgtgtcayttgctgtactctttcttgctggtattttaaagcctgtgctttggtagttatctttactatttttcaacttgacctctgattttttttatttagaccaattatctaaaaagcctaggttatttttgaacctgaattttactatattgtgcataataaagcactaattattgttcttctataagaatactcgaaggaccatttgtcatatagtatatagtacagcatggttgacaataatggttaacctgttatatttgataaagaatagaataatatgcaaatcatact

SEQ ID NO: 888053 - DNA, 639 bp, Homo sapiens
gtgacccttaacaattgtctgtgcagtgacaggggtgtaccataaggtaaagcatggcgggaaggggattatggtttggagtaactgctgtagttgagcagaagatgacagggccacaccagtacatcagcattgagaatgtggatttgaagacatactggtgaaggagaggagggatggaaacagatggatgtgtaggttagggaatagtaagagcataaaaamaccttccacattccacttctgagcattgagatggataagggtgctcatcagtacacaggttgtagaaaatagattttattttcaagtatgttgatgtttaggtggccaagtaaacacacaggtgtaaagtgggagaggttcctagaaaagccaagtctggcacttaagaaagaggtaagggctggatatttatacttgatatttatattaatatttaatacacacatacacattgcagattgtcatgggaatggaagtgataccataggaaaacacaggaaatccaggaagggctgaactctaaggaaaaacacacttaaatggaagccagggaaggaagaactggcaaatgagatggaaagagatggataagagggaactaggcaagaaataatttggatgtccacaaagaag

SEQ ID NO: 888054 - DNA, 639 bp, Homo sapiens
gtgacccttaacaattgtctgtgcagtgacaggggtgtaccataaggtaaagcatggcgggaaggggattatggtttggagtaactgctgtagttgagcagaagatgacagggccacaccagtacatcagcattgagaatgtggatttgaagacatactggtgaaggagaggagggatggaaacagatggatgtgtaggttagggaatagtaagagcataaaaaaaccttccacattccacttctgagcatkgagatggataagggtgctcatcagtacacaggttgtagaaaatagattttattttcaagtatgttgatgtttaggtggccaagtaaacacacaggtgtaaagtgggagaggttcctagaaaagccaagtctggcacttaagaaagaggtaagggctggatatttatacttgatatttatattaatatttaatacacacatacacattgcagattgtcatgggaatggaagtgataccataggaaaacacaggaaatccaggaagggctgaactctaaggaaaaacacacttaaatggaagccagggaaggaagaactggcaaatgagatggaaagagatggataagagggaactaggcaagaaataatttggatgtccacaaagaag

SEQ ID NO: 888055 - DNA, 660 bp, Homo sapiens
gtcaatggtagcttgatggggagagcattgaatctataaattactttggcagtatggccattttcatgatattgattcttcctatccatgagcatggaatgtttttccatttgtttgtgtcctctcttttttccttgagcagtggtttgtagttcttcttgaagaggtccttcacgtcccttgtaagttgtattcccaggtattttattctctttgtagcaattgtgaatggaagttcgcttatgatttggttctctgtttgtctgttatgggtgtataggaatgcttgtgatttttgcacattgattttgtatcctgagactttgctgaagttgcttatcagcttaaggagattttgggctgagatgatggggttttctaaatatacaatcatgtcatgtgcaaacagagacaatctgacttcttctcttcctatttgaataccctttatttctttctcttgcctgattgccctggccagaacttccaatactaygtcaaataggagtggtgagagagggcatccttgtcttgtgcctgttttcaaagggaatgcttccagcttttgcccattcagtatgatattggctgtgggactgtcataaatagctcttattgagatacgttccatcaatacctagtttattgagagtttttagc

SEQ ID NO: 888056 - DNA, 631 bp, Homo sapiens
catcggtgtctgtattcaggagatgcatctcacgtgcaaagacacacataggctcaaaataaagggatggaggaagatttaccaagcacatggaaggcaaaaaagaaaaaaaaaaaaagcaggggttgcaatcctagtctctgataaaacagactttaaaccaacaaagatcaaaaaagacaaataaagacatgacataatggtaagggatcaatrcaacaagaaggactatcctaaatatatatccacccaatacagaagcacccagattaataaagcaagttcttacgtacctacaaagagacttagactcccacacaataatagtgggagaacttaacaccccactgtcaatattagacagatcaacgagacataaaattaacaaggatattcaggacttgaactcagctctggaccaagtggacctaatagacatttacagaactcttcaccccaaaatcaaatgagtatacattcttctcagcaccacatcgcaatgattctaaaattgaccacataattggaagtaaaatactcctcagcaagtgcaaaagaatggaaatcataacaaatagtctcttggaccacagtgcaatcaaattagaactcaggattaagaaatttactc

SEQ ID NO: 888057 - DNA, 639 bp, Homo sapiens
tcaggtcattaaaaagtgcaagcacggccagccatactaagccacctgttcactgtgttgctggggtttttttttttttttcaatttatttttttgagccagcattcttttgtgaatatcaatttctactgggcaatcaggccatgtggtctctcctctggactggcccctacagccttccacactctgtgacactcagtggccacaggcccctggaaaattggatgtgtgactgagtctttaagaggtggagtgacttactttaattcagtaagtcaatatgttttaaactcagattgtttgttccacaataggaaaaagctgtgaaatttcttgtctcagctctgtctaccactactttggaggggctacaggtatcagtgagataaaccaaagtcaratattcaaactggggcataaaatgttctgcatgagtgtcaagaatggttctttgggtgtggcgaagggttcacacctacatttaattttcgaaatgtgtttcttaaaaatatgccaaaaagatacctagaaaaacacatatcactgattgaaatatgtaatgcatttaaatatacatacatatgtatatacacacacacatatatgttttcataatcacactaatatctgccctgctac

SEQ ID NO: 888058 - DNA, 596 bp, Homo sapiens
tttttcagagctctgcactgtaattcattcagatccagacatttcggctcatttacagcggatgcatgctctcgcataatctctacacccatcttgggcttcaattttctcttaacaatgttcgttctacccttttcagtccaaagatcactctccttgacagagaagacaggactaaatgggaggaaaggagttctgttttcttcatgtcatccatcaacatcacaccactggcctcaggcagcgagcctcttccttccttattcttgctctaaatttaagagccctccrttatccttactttcttttctctaagcctcagctcactctggtctttggcccttctgatctgttactggtccctgcctttcttcaacacaatctttggcagcgtgcctctttccactttttggcacatctttttaaaatccgagtttctcagtgggagtgtgcagccaccttggctccgaatgtcttttccttttgtctgcagcatgaacaacatgtgtgattgcaaagatagaattataattttgaaagcttaccaattcttttgagtttcctcttgagaaatagaattaaaacaatcttttctt

SEQ ID NO: 888059 - DNA, 617 bp, Homo sapiens
caatctcatttgtggtttttaaaaaaaattgccctgatgatttgtgcagaatgtactatagaggagctagaattgaggtagaaaaagcaattaggagtcagcgaatcataatctatggcagggatgaagagggaagaagatggtaaatagtcaaatttcagattttttttttragagtagtgaaatgcagtagtgagaagggaggagtgagttaaaacaaggagtttgatgtctaactaaccatgagcaatcagttgagaataactcactgcctttcgaccaccctcagatttattttgatgttagatagatcagatgatctttctaatggattagatgtgaacagttagggaaagggacgatttaagggtgtatcctgggctttttacctgaataactggagagatggtggtaccgtttactgagatacagaagccttgaggaagaacaggctctgtttgtatgtatgtgttttggggaagtggaaataagaagagtgttcaaataactgttttggctacattaaagatcaggtgcctattagaatttcaagtgaagtgttgagtagacaattggatatgtgagtttagaactcagcgtagctggaccagagattg

SEQ ID NO: 888060 - DNA, 658 bp, Homo sapiens
tagttctattccattaagctacatgtctagccttttctagtgccatgcggtcttaattactatagctttgcattaagatctgaaatagagaaacttgagtcccccaattttgttgtaagattgtttcggctattctggatcccttgcatttttatattaactttagggtcagtttgtcaatttctacatagaagccagatgacatttttgagaggatagtgttgaatctgttcatcratttgggaaatattgccgtcttaatacttaagtcttctgattcatgaacatggcatgtctttccacttatttaggccttctttaatttctttcatgatatcttacaatttttagtgtataagacttgcattttctttgcaagtgccaaatgttgctgattagaagtacactggaaaaacctttcagtcgctatacccttttctggcttttattactgtttttaattgacacataataactgtatatatttatgggatacagtgtgattatgaagccttgcacctatgttgtttatctcaagtattttttcttctagatgctattgtaaattgtttccttgatttcatcttcagattattcatcgctagtatatagaaatacaatcgattttttatatattgacctcatatcctgcaacttt

SEQ ID NO: 888061 - DNA, 582 bp, Homo sapiens
ctcacccttccctcctccaaatactctttccaaatactcaggactagaagctaggggttcgaatcaaaaatgaataagacacagtcctgcctctttttccttccatttccctagaacagtagttgtccctctcctgyaacccacccctgcggaatccttcgtgcagatgtcatgtcactgaggaaaataatgcacaaagcagggaaagtgaaggtgctgtgcttcagttgggcataggagccccaatcccctcctcaccacctcccccagcctgggctcattctggaaatccctggaccttttcaaagcagagtttgcaaatttctgcttcagggcaattcagtaaatgcatgtaaactccttagcaaatctgttgggagatagaacctaaattaggcttgtcataaaaattgctaaactttactgcttgtgtgcttgttggctaataggaatctgtcaggtaatggcaaataatctctattcatgggataaggctttgtagaaaaaaagcaaatgaaataatttgaaattgatttgtaaactataagctcttaaaaaaaatcaaggcttttctcttggtaa

SEQ ID NO: 888062 - DNA, 583 bp, Homo sapiens
gggcccagccccttccttatcatttcttaataacatttatttttcttctagcttactttactgtgagaatatagcatataatacacataaatataaaatatatgttaatcaactgtttacgctattataaggcttttggataacatcaggctactggtagttaagtcttgggggagtcaaaacttatatgtaagttttttactgtgtgggggtgagcagctctaatcctggctttgtccaagggtcagctatagtgtcacagagctatgatttgtgggtgtgcattgggtacatgtgggtgcttccacrtggcttgcagagaatggttgtcacttctcctccaataggagatgtcaggacaaggggatcattttctacaggggccaagtcttctcttttcattcccttaaaatagaaagtcatccaaggtcactcttctccccttccccgtgccttcctaaactgctctccaatgagggtaacacaaactaacacatttgatccctataatatgtaccacacttcaccgattctagaaaaggtaacaattctctgatgatgattattccctccttctttacag

SEQ ID NO: 888063 - DNA, 618 bp, Homo sapiens
ttgatctccttttgtatgagccccgactccatgttctgcacctgggaaggcagccctgttgcatccctgtgcccaggtcccatgagctcagcttgccccgtgccctggctatctcctatggaagatttgggcaaaaggcacagtcactattctgctttcttcaaataacagtagcagtaatgggaatagcaacagtggtagtgacagctaatgatttttatgtgccaggcactgaggtaagcatattctttacacagtatcctttcaccmtcatgaaaacatgatacagtcaatatgattattatttctattttccagatgatggaagtgagtttatgggagacagaggttgctggttggaggtaaaaggtgtggctctaggactatattcctccatgtaatgccaccaggctagcttagctccatgtaagtgccgcccatcccagagaaaggagtaaaccagggaccctactgtagtggctagtttgctcctaacagaagtaaaacattcaatttctggctctatctggggagtgttctgctggagagagactctgctatgaaagcagagaggatgatcctgttttaaaataaacatgcaggtattttctgcaggac

SEQ ID NO: 888064 - DNA, 618 bp, Homo sapiens
ttgatctccttttgtatgagccccgactccatgttctgcacctgggaaggcagccctgttgcatccctgtgcccaggtcccatgagctcagcttgccccgtgccctggctatctcctatggaagatttgggcaaaaggcacagtcactattctgctttcttcaaataacagtagcagtaatgggaatagcaacagtggtagtgacagctaatgatttttatgtgccaggcactgaggtaagcatattctttacacagtatcctttcaccatcatgaaaacatgatacagtcaatatgattattatttctattttccagatgatggaagtgagtttmtgggagacagaggttgctggttggaggtaaaaggtgtggctctaggactatattcctccatgtaatgccaccaggctagcttagctccatgtaagtgccgcccatcccagagaaaggagtaaaccagggaccctactgtagtggctagtttgctcctaacagaagtaaaacattcaatttctggctctatctggggagtgttctgctggagagagactctgctatgaaagcagagaggatgatcctgttttaaaataaacatgcaggtattttctgcaggac

SEQ ID NO: 888065 - DNA, 619 bp, Homo sapiens
atttccagaataatttttaagggtggcatttctgttgggatgggcttaaaaagagtttgctgggtgcgttgcctatattgaagcaaatctccttctaggtagtgggaaaatacagaaaatgacgggaagaccaagcagaagccccagtcggctttgtctggattaacattttaaggtaataagcatctccaggctacctttgcctctaaaaggcattatggcaccatgtacactgcaggcactcaaaatccttcgttgattttatttggttactgactcttatggtatcactgaaggcatttgaaagagattctggagtccttttcccataaaattcaktggtgccataacagggtcattaacctgaaaaggagaaagctagtattgagctctaggctttccacttacgatcttgggtaaataacataacttctcatcattgccaatctctctgtgggtaagaactcaacatttctgcctggtttagaacttgaattatttcttggatccattatttaatatttataccaatatgattagctcttagaataagaaattataagattatgtggtctgggaaggtaagcatattatggtgagttaaatgtggaaattccct

SEQ ID NO: 888066 - DNA, 619 bp, Homo sapiens
atttccagaataatttttaagggtggcatttctgttgggatgggcttaaaaagagtttgctgggtgcgttgcctatattgaagcaaatctccttctaggtagtgggaaaatacagaaaatgacgggaagaccaagcagaagccccagtcggctttgtctggattaacattttaaggtaataagcatctccaggctacctttgcctctaaaaggcattatggcaccatgtacactgcaggcactcaaaatccttcgttgattttatttggttactgactcttatggtatcactgaaggcatttgaaagagattctggagtccttttcccataaaattcattggtgccataacagggtcattaacctgaaaaggagaaagctagtattgagctctaggctttccacttacgatcttgggtaaataacrtaacttctcatcattgccaatctctctgtgggtaagaactcaacatttctgcctggtttagaacttgaattatttcttggatccattatttaatatttataccaatatgattagctcttagaataagaaattataagattatgtggtctgggaaggtaagcatattatggtgagttaaatgtggaaattccct

SEQ ID NO: 888067 - DNA, 581 bp, Homo sapiens
tttagtcatgaaggctttgcccatgcctacgtcctacatggtattgcctaggttttcttctagggcttttatggttttaggtcttacttataagtctttaatccatcttgagttaatttttgtataaggtgtaatgaaggggtccagtttcagttttctgcatatggctagccagttttcccaacaatattttttaaatagggaatcctttccccattgcttgtttgtttcaggtttgtcaaagatcagatggttgtagatgtgtggtattatttctgaggtctccrttctgttccatttgtctatatatcagttttggtaccagtaccatgctgttttgattactgtaggcttgtagtatagtttgaagtcaggtagcatgatgcctccagctctattctttttgcttaggattgtcttggctatacgggctcttttttggttccatatgaaatttaaagtagttttttttctaattcagtgtagaaagtcaaagattgcttgatggggatagcattgaatctataaattactttgggcagtgtggccattttcacaatattgattcttcctatccatga

SEQ ID NO: 888068 - DNA, 652 bp, Homo sapiens
acccctttatcagatggatagattgcaaaaattttctcccattctgtaggctgcctgttcactctgatgttagtttcttttgctgtgcattagctctttagtttattatatcccatttgtcaattttggcttttgttgccattgcttttggtgttttagtcatgaaggctttgcccatgcctacgtcctacatggtattgcctaggttttcttctagggcttttatggttttaggtcttacttataagtctttaatccatcttgagttaatttttgtataaggtgtaatgaaggggtccagtttcagttttctgcatatggctagccagttttcccaacaatattttttaaatagggaatcctttccccattgcttgtttgtttcaggtttgtcaaagatcagatggttgtagatgtgtggtattatttctgaggtctccgttctgttccatttgtctatatatcagttttggtaccagtaccatgctgttttgrttactgtaggcttgtagtatagtttgaagtcaggtagcatgatgcctccagctctattctttttgcttaggattgtcttggctatacgggctcttttttggttccatatgaaatttaaagtagttttttttctaattcagtgtagaaagtcaaagat

SEQ ID NO: 888069 - DNA, 532 bp, Homo sapiens
ctttctgtggtcccatatgaatatagtattctttccgaagttgttgttaatgataagtaacctctttaaaatttttctttgtttcaataagcttaaataaatctattttttttgttggctgtgtcttgcattagtaaggtactaatacatgacaaaacttacyttcaaaaatttataattaatcctttcacttatgatataaaaataaaataaaaaatcatgggtcctgggttaagcacaatatacagaaaaaacaaacctaaaatttatatggaacttcaaaaaacccagaagagccaaagctatcctgagcaaaaagaagaaaactagagaaaccacattacctgacttctaattatgctacaaagctacgccaaaatagcatggtactggcataaaaacagtcacatagaccagtggaacagaatggaaaaccccaaaataaatgcatacatctacagtgaactcattttcaacaaaggtgtcaagaacatacattggggaaaggatagtgtcttcaataaacggtgct

SEQ ID NO: 888070 - DNA, 586 bp, Homo sapiens
ctgtacgaggttaactatgtgatgagaagacttagaaatggagaaaagttttatcagttctacataggacttagtttgggagtttctggaaactacgttggaaatcagtagttgcacactagctgaattcagctgtgtaatttacagtgatttgttatttaccaaataagtagaagagggaattaagaagctaaaatctctgggtacttgtttgatatgaatttgttaattgtttatactcaggtaataagtgttacctcagtcatagcatttaatattttatctgactgtccctaaggctgaaaaccaacgaatatactaacacgaagataatactagattatatttgtgtaatattttagagttttcaaacactttaattttatttatttatttttttgagacagagactcgctctgtagcccgggctggagtgcagtggcgccayctcggctcactgcaacctccgcttccctggttcaagcgattctcgtatctcagcctcccaagtagctgggactacaggcgccggcccgccaccatgtcctgctaattttttttttttttcttgagacacagtcttgct

SEQ ID NO: 888071 - DNA, 625 bp, Homo sapiens
cctttcccaaaatgttttgttcatcctttatttcttttagcacttatggcctggtacacagtagttgctcaataaatgtgaatagtgtaatctagtttaccctttctcctttttttaaaaagggatgatcttaggtcttccaaggaggactttctaaaaatayatttttagctttctggtcttttccaagaattctctccaaaacagaaaataaagctaatgtggtagaacatgaaatgaaagaatgggaaaagaagatgggagatggggaattcttttccttacacataaagaattgtcgaaaaatggtaggtaggagagggaaggggatactgggcttctacttgcctaatttcttggcatctcttgggagaaaagattagcattataggatccagaatcacaggaaagcaaggaggggacatctcccaacccctgcctagaagtgaactagctgcagtcacagctggcttcaggtgatgagtgaccagtagtggatgatcatgtggatggggtgggtgtgccagggcccagacaccgagggacagggaaaacttgtttccactgctagaccttccttatagatgatattacccacagagcacaaatgagttcaggaaggaga

SEQ ID NO: 888072 - DNA, 669 bp, Homo sapiens
tgcattatttttgtagctgctttagattgcattgtaatagaaaattaggagaccggctgtgaagaagtttaagagggtcccctgaagagcttctgctttaaaattgattctttaagaaagcattaaaaagctattggaattgattgcctgctaatataaaggaaaaactctttgccaccatttgagttaaaaaagagcatcttcattcatgcatgttattaaaactactggcctgaaagcccctgtagaaagataaaggatatagatgggatattaaaacggcaatctttaccttatctgggatttagacttaatatgttgcttttattaatttagcaagaaccattagttaggatgtcaaagagtgactatacaattaaaatgctatagaatggtgagatctttaataaacagtagaccaggaattcctcattaatcttccaagcataagccacatccttacaaaaaataaatcctgaatttacagcttttgctttattgytaagtttcctgtgcagcagcggtagaagtcatagctgataacacctctgattagcttttgaagcttcccctgaaataaggtaatgaccaatcggatcccagcagttggccagatagaaaatgacaattactatctttaaaatatgtctatggagctttgaaaggttt

SEQ ID NO: 888073 - DNA, 588 bp, Homo sapiens
catggtatccagctgttgcaccaaaatgctaattcctcttttctctctgttgcaagttcctgattgataaatactttttaaaattaaactgaggatttatctggcgctggtgatgggttagtcaagaaaatgaggggggcacgaagctagaagaagagaggataagttagagcaaattaagrggttattataatagttcagataagaagtaataaacccctgagccacagtggtaacaattaaactggaagacagtgataaatgtgaaaatattatggagctagaatttataaggactgttgactgattggcggtaggaggtggtaggagaggaagtacctctaagattcggatcacgttgccagggagaatgtcaatatctttaatgcagagttgagaagggctggtttgggaggagtgggatgtctttggtttgtgggatgttttgaattcaagggtgtggtggaatactcaggcatgtaaatcataagattcttaattcagcatggagacactgtaccttttgggtcattcagatagaggtgttagatttggtgaaattttaggaaggattgtgtatgtcaaata

SEQ ID NO: 888074 - DNA, 667 bp, Homo sapiens
tgaattttgcaggtgataaagtttttaaaagcggaataagaaggaaagtcacttcaggaggagggaaaagtgtgaaccaaatgcagttataatttggagggcaactaggggcttatggaggcttttcatagattttggagtggtgagttagaaaaactatcttgacagtgatatggaagacgaagttcagacaaacatgtcagcagatcccataggattctatgggtctggtctggtcttttcttttcttttcttcttttctcttctcttctcttctctctttctctctcttctcctttctttcttttcttttcttcttttctgttctcttttctcttcttttttttttcttttttggcttaggtgaaatataacaaaggcttaatataaatctctttaaacaacaaaagggaagttaccactgatcccacagaaataaaaacaaccatcagaractactatgaacaactctatgcacacaaactagaaaatctagaagaaatggagaaatttctggacacatacagcctcccaagacgtaaccaggaagaaattgattccctgaacagaccaatgacaagatctgaaattgagtcattaataaatagcctacgaatcaaataaaagcccagaaccagatggattcacatctgaattttaccagaag

SEQ ID NO: 888075 - DNA, 659 bp, Homo sapiens
gtttgagttaagacctaaaaaagaaaagggagagtgtacaactatctgggagaaattaattccaagcagaaagaactccaagcacagaggtcctgaggcaggagttacatggagcagttagggaaaggccctgagcaagattggctggaggtgatggctggacacgacagaaacagtaggaactgaagtcagagatagaagaagaggaggaaaggtgcaagaccttgagaaccatggttttttggctcaaaacaaaatcattggtgagtaacattctttaaaatatcgtactcatctctaagcattaacctttttttagaatgaaagataattacactactcttacagtgcttaaaattgcatattggggctgggcatggtggctcatgcctgtagtctcaacagcttgagaggccgaggcgggagsattgcttgagtccaggagtttgagaacagaatgggaaacatagcaagaccacatctctacaaaaaataaaataaaataattagctgggcatgatggcatgcacctgtagttccagctattcaggcagctgaggtgggaggatcactgcaggccaggagttcaaggctgcagtgccccaggactgtgccactgctctccatcctgggcaacagaaggacaccctgtctcagga

SEQ ID NO: 888076 - DNA, 659 bp, Homo sapiens
gtttgagttaagacctaaaaaagaaaagggagagtgtacaactatctgggagaaattaattccaagcagaaagaactccaagcacagaggtcctgaggcaggagttacatggagcagttagggaaaggccctgagcaagattggctggaggtgatggctggacacgacagaaacagtaggaactgaagtcagagatagaagaagaggaggaaaggtgcaagaccttgagaaccatggttttttggctcaaaacaaaatcattggtgagtaacattctttaaaatatcgtactcatctctaagcattaacctttttttagaatgaaagataattacactactcttacagtgcttaaaattgcatattggggctgggcatggtggctcatgcctgtagtctcaacagcttgagaggccgaggcgggagcattgcttgagtccaggagtttgagaacagamtgggaaacatagcaagaccacatctctacaaaaaataaaataaaataattagctgggcatgatggcatgcacctgtagttccagctattcaggcagctgaggtgggaggatcactgcaggccaggagttcaaggctgcagtgccccaggactgtgccactgctctccatcctgggcaacagaaggacaccctgtctcagga

SEQ ID NO: 888077 - DNA, 602 bp, Homo sapiens
cctgggacagagttcatataattatctttgtctctgtcattcattcacttaacattcattgaactgatacacactgaaccaatatatttaatatgtatcaggcattgttctcagggtacaaaaatgaaaggatttagtctgcaagaagctcatagtccatgggaagagagaaatccaaatagtccattacaatacagtgagacaagtacattgctagaatgtattggagcctggaggaaaaaaccctgcctagggaaatggggaagtctttcacagagcaggtaagacttaaaggatgagcagaaagctgttgcctgtaacaaagtgctacrgtcagtacttttatagatagaaaaattttatagactttttcccactctggagaacagaattattcaaggttctttgtaacacagtatatcagctttacgtggaaactctgtgtaaatgtcttacactcttggaatgcatggagaaagtgctcattttctactgtactgtggagaatgttttcattctgagtactatctattatcccaataatgttgtatagtaaaccatcccaaaactccatagcttaaaacagtaacaatttattattt

SEQ ID NO: 888078 - DNA, 598 bp, Homo sapiens; identical to SEQ ID NO: 871403

SEQ ID NO: 888079 - DNA, 592 bp, Homo sapiens
aaaaaaaaagccagtgatgatggcacatgcctgtagttccagctacttggaaggcagaaggatcacttaagcccaggagtttgaggctgtagtgagctatgatcgtgccactgaactccaatctgggagacaaagtgagactccatctsttaactaaataaataaataagtaaataagaataatgaatacatcagacagaaaatcaatggagaaatactggacttcaaaaacactatacaccaaatggacctaacatacctatacagaacattccaaccaacaggggcagaatatacattcttcttaagcacacacaaaatgttctccagaatctatcatgttcggtcacaaaataagtcttaacaaaattaagacaactgaaatcataccaagcatcttttctgaacacaatggaataaaagtagaaatcaacagaagactagaaaataaacaaattgtagaaattaacacacttttgaacaaccaatgggtcaaagaaaagaatcaaaggataaattagaaggtatcttgaaacaaacaaaaacaacaatacaatataccaaaacttatgggatgtagcaaaagcagaac

SEQ ID NO: 888080 - DNA, 370 bp, Homo sapiens
caactcgtcctcacccctggtgattagctgatgttttctgggcacatagatttcttgtgagaaaatacggatggagagagaggaatatgttgttggggcaatgcagagattagcacgagtggtcagaattagacaggctacagrtaaacaagtccaggaaagtatggtctgtagttgaagtttagcaaggaaacagtcaattttagcaagttcgatgagtatatgccatgattttgggtttagcaagataactgagttcaagagctttcaaaagtattgcagaaaatatctgaagcagttttttttttttccccccacaaagggttgtagggaaagaagggaaagtccgacatcatcaccaaggatgtaa

SEQ ID NO: 888081 - DNA, 680 bp, Homo sapiens
tagctgtgcagggtggtgcatgcctgcggtccagctactcaggaggctgaggtgagaggattgcttgagcccaggagtttgggggaaaagtgagctatgatcatgccactgtgctccaacctgggcaacaagcaagatcctgtctctaaaaaaatttaaaaattttaaagtgagatgatggacaccagctacagaagtcaggtcttccacacttcttcttaattgcattatgggaatctccccaaactacctcactacaccattagtaaaaataggtcctggaaaaatctttacaagagacatgtcttcatcttaaatgaatgaggactgtgagtgacagaacgtttactcagcagagtgacaggaaargtagtgtgcatttgcccacgaagttatagctacagcatagacttctggtggcaaagcaagcactgacatcctaggggtggtttttgcagagttcatgcaaatgaaacatgagcagtgactgttgtagggctttgaatcaacaaagtgatatgccagtaattaggtttcaactgactcagatcccattctaggcattaattgggagaaaatatgcagattgctagttaagaatagaacagttatagttccatagtcattttctttctgttcatcaatttgtttgatttcttgtgtggcaaacacttgctctt

SEQ ID NO: 888082 - DNA, 680 bp, Homo sapiens
tagctgtgcagggtggtgcatgcctgcggtccagctactcaggaggctgaggtgagaggattgcttgagcccaggagtttgggggaaaagtgagctatgatcatgccactgtgctccaacctgggcaacaagcaagatcctgtctctaaaaaaatttaaaaattttaaagtgagatgatggacaccagctacagaagtcaggtcttccacacttcttcttaattgcattatgggaatctccccaaactacctcactacaccattagtaaaaataggtcctggaaaaatctttacaagagacatgtcttcatcttaaatgaatgaggactgtgagtgacagaacgtttactcagcagagtgacaggaaaggtrgtgtgcatttgcccacgaagttatagctacagcatagacttctggtggcaaagcaagcactgacatcctaggggtggtttttgcagagttcatgcaaatgaaacatgagcagtgactgttgtagggctttgaatcaacaaagtgatatgccagtaattaggtttcaactgactcagatcccattctaggcattaattgggagaaaatatgcagattgctagttaagaatagaacagttatagttccatagtcattttctttctgttcatcaatttgtttgatttcttgtgtggcaaacacttgctctt

SEQ ID NO: 888083 - DNA, 602 bp, Homo sapiens
gcaaaaatctatcacgtgacatagctggaattaatatcttggtttgctttctactactttaatattgtaagagattgcattatactgttccctctccttatatgctcatgattttgagatctcctggaagcatttcttcccccacctccctctctatctatcagcaacatagcaatccccacaaaacatgctgagcaacaggttctattgactgtatcctgagagaaaatctacaagctagtgaaagcttgcctagttaaagcaagtatataggcaattgmcccaggagtgcagatagtgctatcatgagacctggtacaggttttaagtctctgatatttcctgaaaacatataggggctgtagttttgagatataactcttattcacatccataaatattggtttcactaaaaatctttcttggtatactcaaagcatcattattccctttaggatatagttgaccacaagtaacattaaacttgaccaaacgtggcttaaaatgagaagtcagccagttgaaaacaagatgcctggaggtgaatggtctagggcaggttcagccacttggtgatgccacccaggacccaggctgtttct

SEQ ID NO: 888084 - DNA, 542 bp, Homo sapiens
ttatgctgttctttctgtggtcccatatgaatatagtattctttccgaagttgttgttaatgataagtaacctctttaaaatttttctttgtttcaataagcttaaataaatctattttttttgttggctgtgtcttgcattagtaaggtactaatacatgacaaaacttacyttcaaaaatttataattaatcctttcacttatgatataaaaataaaataaaaaatcatgggtcctgggttaagcacaatatacagaaaaaacaaacctaaaatttatatggaacttcaaaaaacccagaagagccaaagctatcctgagcaaaaagaagaaaactagagaaaccacattacctgacttctaattatgctacaaagctacgccaaaatagcatggtactggcataaaaacagtcacatagaccagtggaacagaatggaaaaccccaaaataaatgcatacatctacagtgaactcattttcaacaaaggtgtcaagaacatacattggggaaaggatagtgtcttcaataaacggtgct

SEQ ID NO: 888085 - DNA, 609 bp, Homo sapiens
gctcccacttatgagtgagaacacacagtatttggtttcctgttcctgtgttagtttgctaaggataatggcctccagctccatccatgtcgctgcaaaggacaggatcacattcctttttatggctgaacagtattccatgatgtatatgtaccacattttcttccttcagtctatcactgatgggcatttaagttgattctatgtcttttctattgtgaatagtgctgcaatgaacatatgcgtgcatgtgtctttatagtagaatgatttatattcctttgggtatatacccagtgatggaattgctgggtcaaatgatatttctgcctytaggtctttaaggaatctccacactgtcttccacaatggttgaattaatttacacttccaccaacagtgtataagccttctttttctccaccagcatctgttgttttttgactctttagtaatagccattctcatcagtgtgagatagtatatcattatagttttgatctgcaattctctaatgatcagtgatcttgggctttttttcatacctctgttggtctcatacatgtcttctttcgaaaagtgtctgttcatgtcctttgcccacttttt

SEQ ID NO: 888086 - DNA, 622 bp, Homo sapiens
ttgattcaagtattaaatgtattagtgattgcaaagcacttagaacatttcatggcatttagtatagccccaataaatgtctgcaattattatgcaaatatttattcatgaggcttggggctggacctcaccaccttttcataacaagcttactgggcctgggctggtgggtagagggaaataaatgaactaatggagatattagaattgaaaaagttctgtcattccaaataatagaatagagtaaatggtcaaacattttctctttgatattcagggagagcaagtgtaattgaaaatgatgacaacaccaaaaatgcttctgtttcaggattttctagttgaaagttcaggagttgaggataagaattatgctaatgaagattcttcactttttttcatttccccagtatcccaacctgtttactcttctgattgctgcaggacattcagtgtgagaaaaataattctatagataaactaccracaaaccattgatttcaaagctctttaagaactgagtgattgatgcctgtcattaattcatatcctgatcacaataaggacgttttggctgccatatggagtgtgggtggggctcaacaaatcctccccacagcac

SEQ ID NO: 888087 - DNA, 638 bp, Homo sapiens
tttccaaggaccctttaatacaattccctacttatgagcatctatacccttgataagtcacctttatctggtatcttttgactaaatgaactgtttagaatatagaatgagccttttctttgacattagaaaggtctggatttgaatttcaggcatgtttttactatataagtgatccctttraagtcctatttctcatctataaaatggtgattgtaacatcaaactgggttgtattgcatattaaataagattatgcatgaacctgataaaaaggcagtcattaataattttaaaaaatgctgagttcttactctatgtaggcacaacttaacactctagaatagagcagtaagcaagaaagacatggtcatagcccttgtagtgtttaccacaagtgaaatgagtcacataataatcaagtaaattagttatttcagatataaattactctgcataaaattcaacagtgtgttaggaacgagagtgattatcaagaaaggcattatcataagtgatcaaagataatttctaccatcctaagaagaaggtgtccaacaaagagtgtctcatgcaaagagaccaatttaaatgtttctgaaagcataatgtgtgtgaagaacaaaaatcaggccagt

SEQ ID NO: 888088 - DNA, 638 bp, Homo sapiens
tttccaaggaccctttaatacaattccctacttatgagcatctatacccttgataagtcacctttatctggtatcttttgactaaatgaactgtttagaatatagaatgagccttttctttgacattagaaaggtctggatttgaatttcaggcatgtttttactatataagtgatccctttgaagtcctatttctcatctataaaatggtgattgtaacatcaaactgggttgtattgcatattaaataagattatgcatgaacctgataaaaaggcagtcattaataatttwaaaaaatgctgagttcttactctatgtaggcacaacttaacactctagaatagagcagtaagcaagaaagacatggtcatagcccttgtagtgtttaccacaagtgaaatgagtcacataataatcaagtaaattagttatttcagatataaattactctgcataaaattcaacagtgtgttaggaacgagagtgattatcaagaaaggcattatcataagtgatcaaagataatttctaccatcctaagaagaaggtgtccaacaaagagtgtctcatgcaaagagaccaatttaaatgtttctgaaagcataatgtgtgtgaagaacaaaaatcaggccagt

SEQ ID NO: 888089 - DNA, 660 bp, Homo sapiens
tcacaatagcaaagacttggaaccaacccaaatgtccaacaatgatagactggattaagaaaatgtggcacatatacaccatggaatactatgcagccataaaaaatgatgagttcatgttctttgtaggggcatggatgaagctggaaaccatcattctcagcaaactatcgcaaggacaaaaaaccaaacaccgcgtgttctcactcataggtgggacttgaacaatgagaacacatggacacaggaaggggagcatcacacactggggcctgtttggggtgaggggagcagggagagatagcattaggagatatacctaatattaaatggtgagttaatgggtgcagcacaccaacatggtacatgtatacatatataacaaacctgcatgttgtgcacatgtaccctaaaacttmaagtattattaaaaaaaattttagagtagggacaagaattctaatgctgatataaacagaagaaagaaagcttatactaaaatagaacagaaaaggtatagttagaatgtaatagatgtggcagacatttgaaaggcattttgaaagttgtaagaaggggctgtgaatcatttaacatgcttagaatattagtgtgtagtttttattaaaatatccaaagtattttatgactgtgcataaa

SEQ ID NO: 888090 - DNA, 587 bp, Homo sapiens
tggggaaaacagtttgggcatctctaaaggttatttttattttaccagcatattcctgagagtcctcaggccttcaagggcaaagaaataaaattttaataatagaatttcaggcactccaacagatgttggagatattttggacaaccatccttattcaaaccataccatataagttaaagcttctactcaaaagatatcctggtttctgaacattctgaataacacttaaacaagaatcttgactatgtaaaaaaacaggaagagttaagataaaaaacaaaamaaaaaaaaaaaaaaacttctacatctttttaccactaagacttttgttcttttcccctttggtcctaatgtttaaaaaatgttgtcaaccaaattgtttttactaaattgcaataagttgattttaataactcccagctatagtgtatatccatgactgtttatcctgcctttctccttcttcttccttctggtaatagtacttccaagttgtctttagaaaaactgtccctctcccctcttcttaactatttgatgtgagtggttcttttagtcagggttctctagagaaatagaaccaa

SEQ ID NO: 888091 - DNA, 649 bp, Homo sapiens
agggttctaattctggctctgaccctgaatagctgtgtggccttgtgccagtcacctgccctctctgggcctcaggttgtccacttgtaaaacaaggagtgggactatatgaccctgacctctcagtttactggccacctctgcatggctctcccttaaccccgagctgaractctcctctcatacctcttggaaggtgctgctattcttgacagtactggccatagaagcctatggttatggtcagattcatgtctattttctccctcctacttcctgccctggccagccctgcctaagctgaatgtggactcctggagggcagagctggggtcttacccatctctgtccccagcaccatacacagtaaatcatccaggacagtaaataaagcttcctggagcctccctgccctgagatgcagagattctgcttccttcttttctgggaatagtacgtgaacactccagtcccgagggacaagagggactgctgtgctttcccatctccagctggcctgtgatgtggcttctgggggataaagggatccaaagaggtgtccccagctctccctcctgtccagagccctggtaggcaggcagatggatgagtgggtgctcctggctgtttctctgttgagtccattaca

SEQ ID NO: 888092 - DNA, 590 bp, Homo sapiens
aaagttcgctcctgggggtttcagtttcgacccctccgcgtccattctggcttctgcgggctccgcccagggcgtccgcttcgcccgagctccggacccaggtcctgccctgtggagaccccggagtgggtgcgccgctgccggccgatacccccgggcctccgggtccacagcgtccggaaaaaaacggcctttcgaagacctgggatgactcgctggtcgcggcaagggacccttggttcccgtgtcagaaggatcaaggaaatgcggggcctgttgaggtgaggagcacgaggtccctcctycatcctcgcggggactttgtcaccggctcagtgtgtagacctcaccgtcccactcgaatctgtggggctccgacagtgtgggccccgcgaggacccccatcctccttgccctggggccgctacaggagggcgccgggacgcactaggtcctgagtgtccagggtccggcaggggcgtcaggttgtcgcctcccggatcccgccgctcgcggtccagggctcctggtttctacgctgggctggggacccggagcatgcatgtcgtggggcggagaaaaccttggga

SEQ ID NO: 888093 - DNA, 657 bp, Homo sapiens
aaatacaaaaattagccgggcatggtctgggcatggtggcgcacacctgtaatcccagctacttaagaggctgaggcaggagaattgcttgaacgcagaaggtagaggttgcagtaggtggagatcacgccactgtgctccagcctgggcaacagtgcaagactccatctcaaaaaataaataaaaataaataaaaacaaaaatcatattaaataattaaaagcctttgcaagctccaaattaactactctagaattcttctgggaaagacaatggggacagccccatgctgcagctcagtagctaaagttttgcactttcacagtggyggtctggttttgattctccacctaggaagtaagttctttctggtttaatatgtgcgtgaccttgtctattctcttctccatggactgtcttaaattttcctttctctaagcacctcggtggttgtctttggtgaagttcagaagctagaaatattgactgcttggcatggataaagtagggtaataagagatctgaaaggattttttttaaagagcactgtgtttaaaagtcagtttaattaaaagtggataaacaagctttagatatatttaaaatgcctttacgtttttctcttcttggaacttgtttttctggaaaaaggttttt

SEQ ID NO: 888094 - DNA, 657 bp, Homo sapiens
aaatacaaaaattagccgggcatggtctgggcatggtggcgcacacctgtaatcccagctacttaagaggctgaggcaggagaattgcttgaacgcagaaggtagaggttgcagtaggtggagatcacgccactgtgctccagcctgggcaacagtgcaagactccatctcaaaaaataaataaaaataaataaaaacaaaaatcatattaaataattaaaagcctttgcaagctccaaattaactactctagaattcttctgggaaagacaatggggacagccccatgctgcagctcagtagctaaagttttgcactttcacagtggcggtctggttttgattctccacctaggaagtaagtyctttctggtttaatatgtgcgtgaccttgtctattctcttctccatggactgtcttaaattttcctttctctaagcacctcggtggttgtctttggtgaagttcagaagctagaaatattgactgcttggcatggataaagtagggtaataagagatctgaaaggattttttttaaagagcactgtgtttaaaagtcagtttaattaaaagtggataaacaagctttagatatatttaaaatgcctttacgtttttctcttcttggaacttgtttttctggaaaaaggttttt

SEQ ID NO: 888095 - DNA, 589 bp, Homo sapiens
actccttcaataagttaattataaaatgaattattgagttaatgtgcactttactttcatgcaggacaattttcctttagtatttcctaatgattcaaaaaaaattgaaaagggcagattttaatgttagcatttttactaatagattctatttttcaagcaaaggcttcatgtaaatgtggatggtaaggcttttctacctaaaagattttcttagattaaaaactaaggtgtgagccgttttagttatttaaaaaggtcccgtccctctgctctactgatctccattgcatttacaaactttgcatttataaatggcaatatattcatttgttccattttcttttctcattaggtctttamattcattaacaaaatgatgtagtatttagcgcttttacatgactttttacaaagctgtgagacctgttcaatattctttagtttattttactggcggctcaactcaaatacagttattttgaaagaatctggtagctttagggtttgagttacacaactatgattttattaaggccaaagagaaatttaaaaaataagaccagtttttaagtaataaagttaatat

SEQ ID NO: 888096 - DNA, 620 bp, Homo sapiens
gggatagcattgaatgtataaattactttgggcagtatggccattttcacgatattgattcttcctatccatgagcatggaatgtttttccatttgtttgtgtcctctcttatttccttaagcagtggtttatagttctccttgaagaggtccttcacatcccctgtaagttgtattcctagatattttattctttttgtagtaattgtgaatgggagttcactcatgatttagctctstctttatctattattggtgtataggaatgcttgtgatttttgcacattgattttgtatcctgagactttgctaaagttgcttatcagcttaaggagattttgggctaagacgatggagttttctaaatatacaatcatgtcatctgcaaacaaagacaatttgacttcctctctttctatttggatatcctttatttcttctctagcctgattggtctggccagaacttccagtactatgttgaataggagtggtgagagagggcaactacttgtcttgtgccacttttcaaagggaatgcttccagtttttgcccattcagtatgatattgggtgtgggtttgtcattaatagctcttattattttcagaacaaagctgg

SEQ ID NO: 888097 - DNA, 647 bp, Homo sapiens
cccatgctattagcataaccgtgcaaaatctatggactcactgttacttaagtttatttgaatttagtactcttttaattcagatttggtatactttatgtgtccgtgttctcatcaaacatcatttcccagtatgaagtatataacacttataaatatctactttgtaccaaagtagatgcgtatcacaaattatccaaaacaaggcttgggccaggcrcagtggctcacacctgtaatcccagcactttgggaggctgaggtgggagaatcggttgaggccaggagtttgggaccagcctaggcaacatagcaagactctgtctctataaaaaatagaaaaaattcaccaggtggggtggtgcatgcctgtagttctacctactcaggagcctgagggaggaggattgttcgatcccaggagttcaagattacagtgagctgtttattgtgatagtgccagtgcactccagcctgggcaacagtgtgagaccctatctctaaaaaatctaaagcaaaaaagacgtttggagaccaagtggcagctgggcaactagacaatgctagagagtaaagagaacagaatatggggggtgaggggcacgtgggagaagaggcttagaggaggaaggtaggctttgctgtga

SEQ ID NO: 888098 - DNA, 434 bp, Homo sapiens
aaaatcatgtatgcggttatttcgttaacatctgtctctctcactgtgctgtatgggctctaggagagagaagatgggcacctttctgctattcttgtatcccagcatccaggacagggtctggtacacagtgagagctcagtaaatatctgctgggtgaatagaggcatctgcatgataggaaagaaagatytgaagagtgttaggagtgctgaagatctttctgccaattctaagacatgcacagacctttggtggaactcctccccaacaaggaaaggcatggaacccatgcccactcatgtcaagacaccactccccatcccacccctagcatgcactattttccaagcacaccatgcttgggaggaatgctggtggcttttaataaagagggcctcagctgtcagaggcaaccgggctatgtctttctc

SEQ ID NO: 888099 - DNA, 650 bp, Homo sapiens
gggcatccctgtcttgtgtcagttttcaaagggaatgcttccagtttttgcccattcagtatgatattggctatgggtttgtcatagatagctcttattattttgagatatgtcccgtgaatacctaatttattgagagtttttagcatgaagggttgttgaattttgtcaaaggccttttctgcatctattgagataatcatgtggtttttgtctttggttctgtttatatgctggattacatttattgattttcacatgttgaaccagccttgcatcccagggatgaagcccacttgattacggtggataagctttttgatatgctgctggattcggtttgccagtattttattgaggatttttgcatcratattcattaaggatattggtctaaaattctcttttttgcttgtgtctctgcccgactttggtatcaggatgatgctggcctcataaaatgagttagggaggattccctcttttctattgattggaatagtttcagaaggaatggtaccagctcctccttgtacctctggtagaattcggctgtgaatccatctggtcctggactttttttggttggtaagctattatttattgcctaaatttcagtgcctgttattggtctactgagagattcaact

SEQ ID NO: 888100 - DNA, 657 bp, Homo sapiens
tctgcacagcaaaagaaactatcatcagagtgaacatgcaacctacagaatgggaaaaaatttttgcaatctatccatctgacaaagggctaacattcagaatctacaaggaacttaaaaaaattcacaagtaaaaaacaaacaacctcatcaaaaagtgggcaaaggacatgaacagacacttctcaatagaagacatttatgcagcaggcggacaaatgaaaaaatgctcatcatcactggtcatcagagaaatgcaaattaaaaccacaatgagataccatctcacaccagttagaatggtgatcattataaagtctggaaacaacagatgctggagaggatgtggagaaataggaatgcttttacactgttggtgggagtgtaaattagttcaaccattgtggaagacagtgtggtgattcctcaaggatctagacctagaaataccatttgatccagtgatcccattactgggtatatacccaaaggattataaatcatrctagtataaagacacatgcacaggtatgtttatttggcactattcacaataataaatgcttggaaccaactcaaatgtccatcaataatagactggataagggaaatgtggcacatgtacaccatggaatactatgcagccataaaaaagga

SEQ ID NO: 888101 - DNA, 668 bp, Homo sapiens
gtcccttaatcccccactttcaggaatcagcaactctagattcttaggaactgacttgtctttctatctcttagcagggaattgggtagagaagaattaaacattggcactcttaagaagaaatgatgaaaacttgttaactaaaatgaccagaaatgtttaaaagctgtttaaaccatcctatacaatatgctttaagccttattcatagttaaaagaaagaagattctgaaaaatggatggctttgataatattgatgacttgatcgttcactgaattggcacctggcaaattggctcacttctgccccatagtgcctctaaaacaggcgtgtcaaacccaaaagtccttgctccatagctgtcagggatatatctgactttcaagcagaggtatgggattctatttttgtggtaaccacttgcaattgttcattagcaatactgcagtaaatgctcaytatggtagcaaacacccagggtataagttttttgttctgtgattctaataataactggataatatgcattgagtggaaatttcaattatgctgaaatgttaatttttttcaggtgaagaaaacaatttcacagatctattagttgttacctggaaaccttttgattaagaataaggttaactatcttgaactagtaaacaaagactt

SEQ ID NO: 888102 - DNA, 668 bp, Homo sapiens
gtcccttaatcccccactttcaggaatcagcaactctagattcttaggaactgacttgtctttctatctcttagcagggaattgggtagagaagaattaaacattggcactcttaagaagaaatgatgaaaacttgttaactaaaatgaccagaaatgtttaaaagctgtttaaaccatcctatacaatatgctttaagccttattcatagttaaaagaaagaagattctgaaaaatggatggctttgataatattgatgacttgatcgttcactgaattggcacctggcaaattggctcacttctgccccatagtgcctctaaaacaggcgtgtcaaacccaaaagtccttgctccatagctgtcagggatatatctgactttcaagcagaggtatgggattctatttttgtggtaaccacttgcaattgttcattagcaatactgcagtaaatgctcattatggtagcaaacacccagggtataagttttttgttctgtgattctaataataastggataatatgcattgagtggaaatttcaattatgctgaaatgttaatttttttcaggtgaagaaaacaatttcacagatctattagttgttacctggaaaccttttgattaagaataaggttaactatcttgaactagtaaacaaagactt

SEQ ID NO: 888103 - DNA, 668 bp, Homo sapiens
gtcccttaatcccccactttcaggaatcagcaactctagattcttaggaactgacttgtctttctatctcttagcagggaattgggtagagaagaattaaacattggcactcttaagaagaaatgatgaaaacttgttaactaaaatgaccagaaatgtttaaaagctgtttaaaccatcctatacaatatgctttaagccttattcatagttaaaagaaagaagattctgaaaaatggatggctttgataatattgatgacttgatcgttcactgaattggcacctggcaaattggctcacttctgccccatagtgcctctaaaacaggcgtgtcaaacccaaaagtccttgctccatagctgtcagggatatatctgactttcaagcagaggtatgggattctatttttgtggtaaccacttgcaattgttcattagcaatactgcagtaaatgctcattatggtagcaaacacccagggtataagttttttgttctgtgattctaataataactrgataatatgcattgagtggaaatttcaattatgctgaaatgttaatttttttcaggtgaagaaaacaatttcacagatctattagttgttacctggaaaccttttgattaagaataaggttaactatcttgaactagtaaacaaagactt

SEQ ID NO: 888104 - DNA, 586 bp, Homo sapiens
cctaggaatctaatgcaggaactcaggaaaggtggtaatatagtttaactctttgtcccctctaaatcacatgttgaaattagatccccagtgttggaggtgggccctggtggccttccttgtgtcttggtgccatccttgtggtagtgagtgagttcttgctctgytagttcctgtgagaactgaatgtgaaaaacaagctgacagctccctcacttctctcttgctccctctcttgccatgtgatgtctgctgcatttcaccttctgccataagtgaaagctttctgaggccctcaccagaagcacatgctgatgccatgcttcttgcacagcctgaagaagcatgaatcaaataaacctcttctcttcataaactacccagcctcaggtattcatttatagccacacagatggacaaagacggtggcaccaaaggattacaggttaactctttcaggggttcctggagagtcagggctgggcccttggccagcaagtcacatgaggcacaagctctggagtgggacaatttgggttcaatcccagatccaccatatttactggctgagtgatctttaccaagt

SEQ ID NO: 888105 - DNA, 586 bp, Homo sapiens
cctaggaatctaatgcaggaactcaggaaaggtggtaatatagtttaactctttgtcccctctaaatcacatgttgaaattagatccccagtgttggaggtgggccctggtggccttccttgtgtcttggtgccatccttgtggtagtgagtgagttcttgctctgttagttcctgtgagaactgaatgtgaaaaacaagctgacagctccctcacttctctcttgctccctctcttgccatgtgatgtctgctgcatttcaccttctgccataagtgaaagctttctgaggccctcaccagaagcacatgctgatgccatgcttcttgcacagcctgaagaagcatgaatcaaataaacctcttctcttcataaactacccagcctcaggtattcatttatagccacacagatggacaaagacggtggcaccaaaggattacakgttaactctttcaggggttcctggagagtcagggctgggcccttggccagcaagtcacatgaggcacaagctctggagtgggacaatttgggttcaatcccagatccaccatatttactggctgagtgatctttaccaagt

SEQ ID NO: 888106 - DNA, 530 bp, Homo sapiens
aagctacaaaaaaactatcagagctttggaaaaatagcaaaaatcagaaatagaaaaagcttaaagagtaatagtttaaaaaacacagcaggctgggcacggtggctcacatctgtaatcccagcactttgggaggccaaggcaggcggatcatgaggtcaggagttcgagatcagcctgaccaacatggtgaaaccctgtctytaaaaaaaaaaaaaaaaaaaaaaattagccaggcgtggtggcacacacctgtaatcccagctactcaggaggctgaggcaggaaaatcacttgaacctgggaggtggaggttgcagtgagctgagatcacaccattgcactccagcctgggagacagagggagaccccatctcaaaaaaaaaaaaaaaaaaaaaaaaaggcacagcaagaaaagtaaaagaaagcaagtgaaaactatcaaacaaataatagcaaaaaatatctgaaagaaagtaattgatcaaaaatacatcatttaaattataatgacaaattgtttgcagatg

SEQ ID NO: 888107 - DNA, 649 bp, Homo sapiens
gggaggagtcagggaagagaagcacatcaggattacctgagcaacctgttcaagcagatctcccattaccctcccctccccaacccccttcacgcgtgttagtcaatgttatcagcagaatgtgtctgactcataaacgtactgggctggggaaaaacaacaacaacaacgttgcaacctcgttttgtgtattttcacatcaatgaatgtttttctttttttgtttttttgttttgttttktttttttttttgagatggagtctctctctgctgcccaggctggagtacagtggtgcaatcttggctcactgcaacctccatctcccaggttcaagtgattctcctgcctcagccttccgagtagctgggattacaggcacgcaccaccacgcccagccttttttttttttttttggcttctttattatcctattttaagtaaaggaatttctagataatttttctcacattatttaggttttcgtatgttttgatagttcattttcaacttctgcctcccacaattttacatgtaaccaatattctcacaaaaatatgaatgactgacatcttccatttacttaactgacttactctgtacatatgcatacacacagcttcattaatgtactgacttctgatcagatt

SEQ ID NO: 888108 - DNA, 649 bp, Homo sapiens
gggaggagtcagggaagagaagcacatcaggattacctgagcaacctgttcaagcagatctcccattaccctcccctccccaacccccttcacgcgtgttagtcaatgttatcagcagaatgtgtctgactcataaacgtactgggctggggaaaaacaacaacaacaacgttgcaacctcgttttgtgtattttcacatcaatgaatgtttttctttttttgtttttttgttttgttttttttttttttttgagatggagtctctctctgctgcccaggctggagtacagtggtgcaatcttggctcactgcaacctccatctcccaggttcaagtgattctcctgcctcagccttccgagtagctgggattacaggcacgcaycaccacgcccagccttttttttttttttttggcttctttattatcctattttaagtaaaggaatttctagataatttttctcacattatttaggttttcgtatgttttgatagttcattttcaacttctgcctcccacaattttacatgtaaccaatattctcacaaaaatatgaatgactgacatcttccatttacttaactgacttactctgtacatatgcatacacacagcttcattaatgtactgacttctgatcagatt

SEQ ID NO: 888109 - DNA, 617 bp, Homo sapiens
gctgaattttataagctgattgtgtatcctgaaactttacttaatatgtttcttagttctaacatttttttgtggaatatttaggattttatatacataatatgtgaccagtaacagaaacaatttcacttttccttttctattttgatgccttatatttcttttcctcatctaactactctgactagaaattccaggcctatgttgaacagaaatgataagaatggrcattcttgtcttattccttatctgagaggaaaagccttcaagttttcatcattcaatatgatgttagcagttggcttgccatatatggtcttctataccaaatttacattgccaactcaatcctaagccaaaagaacatagctggaggaatcacgctacctgacttcaaactatactacaaggctacagtaactaaaacagcatggtactagtaccaaaacagagatatagaccaatggaacagaacagagccctcagaaaaaatgccacatatctacaaccatctgatctttgacaaacctgaaaaaaacaagaaatgtggaaaggattccctatttaataaatagtgctgggaaaactggctagccatatgtagaaagctgaaactg

SEQ ID NO: 888110 - DNA, 610 bp, Homo sapiens
ccatctgatctttgacaaacctgacaaaaacaagaaatggggaaaggattgcctatttaataaatggtgctgggaaaactggatagccatatgtagaaatctgaaactggatcccttccttacacattatacaaaaattaattcaagatagattgaagacttaaatgttagacttaaaaccacattttctttagcctgtctatcattgatggtcatttgggttggttccatgtctttgttattgtaaatagtgctgcaataaacatacgtgtgcatgagtctttatagtagaatgatttatattcctttgggtatatacccagttcctgggtcaaatagtattattggttctagatccttcargaattgctgcactgtcttccacagtggctgaactaatttacattcccaccagcagtgtaaaaacattccaatttctccacagcctcaccagcatttactgtttcttgactttttaataattgctattctgactggcatgagatggtatctcattgtggttttgatttgcatttctctgatgatcagtgatgatgagcctttttttttgtttttgtatgtttgttggccacataaatgtcttgagaag

SEQ ID NO: 888111 - DNA, 680 bp, Homo sapiens
gataaaatctatgtgtaagaaaatgcactatagcttttacagggagtgaaaaaatacaaattccaagttatgattagcattgtgttgtgacttaattgacagcattttaaattttgtagtcatacattaagtaataatgaatcttacaactggtagtatttaggatttgacttaataattacatctcctaactggttttcctaaccctatccccgtgcttcagaaatttttctcctttattcattgaagaacagtccttttctagactytatttctcctgggccttcccaggagattagtcaaattagacattgatataagccatgatagcttcaaaggaagtaacagcttcgtgtactaatgaatcaaattaatacatttgcatttatcaatgatttttggatctcagtagttcaagagaataattttaattatacgtacctcaggtgccatgattagcatatgcttataccaacaattgcttgttactaacagctgttctcagattcttcccatgagccctatatgggctcagtgaaggacactgtttttattatttaaaaaataaaatgtaggtttatatttgtatataacagcatatgttcatgtagaaaatgtggaaaatacataaatctggaaaaatggcagaatatccataatcttacagagaaggaacctac

SEQ ID NO: 888112 - DNA, 632 bp, Homo sapiens
ggagaagagtaggcattcaaagccattttaccaaccacctattatatgctttcaatatagcaggtattaatctagaccctagaaccccgatctgatttaaggaacgagaaaccttaaaatagggatctgtggagaaatcctagtttcagatgttagtggaagttaactattaacccaagatatttggaacaagttgatgactacattaagcagatagcttccacccagacccattggaataattagtctattaatggttagcaacatttttctataaagaaacaggtaataaatattttaggctttcagtcytttaagtctctaccaaaactattcaactcttgcaatgtagtgcaaaagcagccataaactatacataaacaaaatgagcatggctgtataccaataaaactttatttataaacgcagttaataagccagatttgtcctacaagctgtaatttgccaaccgttggcccagatactttaaagtactgatttctaaactctcatgtaaatggtttcgtctgttttccttttagtcataatgtttctctttgctattttaacttatatgcttctaccttagtccataatgccttcttatgaataattcttgcttaagtctaggc

SEQ ID NO: 888113 - DNA, 559 bp, Homo sapiens
acaacaccttcaactgaaatatccaggtactcactttgggactaatcaaggaaacaacttggcccacagagaatgaagaaaagcaagacaggacaatagcccactggggagcaatacagagccagaggaacctccccagaccagggaagcagtgagtgaaggtgcaaccctggaaaaccatgcttctcccatggatctttgaaatgcttgggtcaagagatgcccttgcraacttactccaccaggccttcagtctgacagagctatgtggaaactcagcagagcggccactcaggcattcttggagaccctggagacttaaatactcgggctttccagcaaaaaagctgcatctccggccacatggaagattagactcctgtacatacccctaggaaagaggttgaatccagagggctgagcagcgacagcctgcaagcctcactgccattgcacatcacaagataagacccactggcttggaattccaggcagcaaatgataggggcattgcatctcccagggggagaagtgggtcaccatctttgctgtttggatg

SEQ ID NO: 888114 - DNA, 559 bp, Homo sapiens
acaacaccttcaactgaaatatccaggtactcactttgggactaatcaaggaaacaacttggcccacagagaatgaagaaaagcaagacaggacaatagcccactggggagcaatacagagccagaggaacctccccagaccagggaagcagtgagtgaaggtgcaaccctggaaaaccatgcttctcccatggatctttgaaatgcttgggtcaagagatgcccttgcaaacttactccaccaggccttcagtctgacagagctatgtggaaactcagcagagcggccactcaggcattcttggagaccctggagacttaaatactcgggctttccagcaaaaaagctgcatctccggccacrtggaagattagactcctgtacatacccctaggaaagaggttgaatccagagggctgagcagcgacagcctgcaagcctcactgccattgcacatcacaagataagacccactggcttggaattccaggcagcaaatgataggggcattgcatctcccagggggagaagtgggtcaccatctttgctgtttggatg

SEQ ID NO: 888115 - DNA, 597 bp, Homo sapiens
aacttctctgagctaaagtggcatgttctaacctgtatcaaggcagctaaaaaccttgaaaaaaaggtcagatgaatggctaactagaaaaaacagagtagagaaaaccttaaatgacctgatggagctgaaaaccattgcacraaaacttcgtgacgcatgcacaagattcaatagccaattcaatcaagtggaagaaaggatatcagtgattgaaaatcaaattaatgaaataaagttagaagacaagattagagaaaaaagagtgaaaagaaatgaacaaagcctccaagaaatatgagactatgtgaaaagaccaaatatacatttgattggtgtaccggaaagtgacagggagaatggaaccaagttggaaaacattcttcaagatattatccaggagaatttccctaacccagcaaggcaggccaacattcaaattcaggaaaaacagagaacaccacaaagatactcctcaagaagagcaaccccaagacacacaattgtcagattcacaaaggttgaaatgaaggaaaaaatgttaagggcagccagaaagaaaggttgggtaacccacaaagggaggcatatcagact

SEQ ID NO: 888116 - DNA, 597 bp, Homo sapiens
aacttctctgagctaaagtggcatgttctaacctgtatcaaggcagctaaaaaccttgaaaaaaaggtcagatgaatggctaactagaaaaaacagagtagagaaaaccttaaatgacctgatggagctgaaaaccattgcacaaaaacttcgtgacrcatgcacaagattcaatagccaattcaatcaagtggaagaaaggatatcagtgattgaaaatcaaattaatgaaataaagttagaagacaagattagagaaaaaagagtgaaaagaaatgaacaaagcctccaagaaatatgagactatgtgaaaagaccaaatatacatttgattggtgtaccggaaagtgacagggagaatggaaccaagttggaaaacattcttcaagatattatccaggagaatttccctaacccagcaaggcaggccaacattcaaattcaggaaaaacagagaacaccacaaagatactcctcaagaagagcaaccccaagacacacaattgtcagattcacaaaggttgaaatgaaggaaaaaatgttaagggcagccagaaagaaaggttgggtaacccacaaagggaggcatatcagact

SEQ ID NO: 888117 - DNA, 616 bp, Homo sapiens
ttagaagacaagattagagaaaaaagagtgaaaagaaatgaacaaagcctccaagaaatatgagactatgtgaaaagaccaaatatacatttgattggtgtaccggaaagtgacagggagaatggaaccaagttggaaaacattcttcaagatattatccaggagaatttccctaacccagcaaggcaggccaacattcaaattcaggaaaaacagagaacaccacaaagatactcctcaagaagagcaaccccaagacacacaattgtcagattcacaaaggttgaaatgaaggaaaaaatgttaagggcagccagaaagaaaggttgggtaacccacaaagggaggcatatcagactaacagcagatctcttggcagaaaccctacaagccagaagagagtgggggccaatattcaacatttttaaagaaaagaattttcaacccagaatttcatatccagccaaactaagctwcataagtgaaggagaaataaaatcctttacagacaggcaagtgctgagagatcttgtcactacaaggtgtgccttacaagagctcctgaaggaagcactaaccatggaaaggaaaactggtaccagccactgcaaaaaca

SEQ ID NO: 888118 - DNA, 646 bp, Homo sapiens
ctactgtgaagacctctgacatcccctggatacattttccctcattgtcttgtggattaacattaggctcctcgttacttatgcaaatttctgcagctggcttgaatttctcctcagaaaatgggattttcttctctatcgcattgtccagctacaaattttatgaacttttatgctctgcttcccttctgaaactgaatgcctttaacagcacccaagtaacttcttaaatgcttttctacttagaaatttcttccactagatactctaaatcacctccctcaagttgaaagtttcacaratctctagggtaggaacaaaatgccaccagactctttgctaaaacataacaagagtcacctttgctccagttcccaagaagttcctcatttccatctgagaccacctcagtgtggactttattgtccatatcactgtcagcattttcagcaaagccattcaactagtctctaggaaggtctaaattttcccacattttcctgtcttcttctgagccccccaaactgttccaacctctctgcctgttacccagcttcaaagtcacttccacatttttgcttatcttttcggcaatgccccactctactggtaccaatttaccgtattagtccgttttcatgctgct

SEQ ID NO: 888119 - DNA, 651 bp, Homo sapiens
tgctgagaagaatatatattccgttgatttggggtggagagttctgtagatgtctattaggtcagcttggtgcagagctgagttcaggtcctggatatccttgttaaccttctgtctcattgatctgcctaatactgacagtggggtgttaaaatctcccrttattattgtgtgggagtccaagtctctttgtgggtctctaaggacttgctttatgaatctgggtgctcctgtatttggtacctatatatttaagatagttagctcttcttgttgaattgcttcctttaccattatgtagtggccttctttgtctcttttgatctttgttggtttaaagtctgttttaccaaagactaggattgcaacccctgctttttcttgctttccatttgcttggtagatcttcctccatccctgtgttttgagcctatgtacatctctgcatgtgagatgggtctcctgaatacagcacactgatgggtcttgactctatccaatttgccagtctgtgtcttttaattggggcatgtagcccatttacatttaaagttaatattcttatgtgtgaatttgatgctgtcattatgatgttagctggttattttgcccattaattgatgcagtttcttaatagcaacgatggtcttt

SEQ ID NO: 888120 - DNA, 637 bp, Homo sapiens
aatataatctatcctggagaatgctctgtgtgcagttgagaagactctgtgttctgcagctgttggattgagtgttctgtaaatgtctgttaggttcatttggtctagaatgcagtttaaattaaatctttctatattaattttctgtccagatgatctttccattgctgaaaactgggtcttaaagtcccctactgttattgtattgcagtctatctctccctttaaatatattaataatcacatatatttcagtgctccagtgttggctgcatatatgtttacaattgtatccttttgctgaatttgcccctttattataaatatgatgacctacttcttctctttttacagattttgacttgaagtctatcttatgttatatatgtatagctacccctgctttgtttwgattttcatttgcatagaatatcttcccatcttttcactttcagtctatgtattttcttacaagtgaagtgagtcccttgtaggcagcatatagttgagtgctcttgttatttataccatcagtcactctcttttaattaaaaatttcaattcatttacatttaaaataatttttaatttgtaagagcatactactgccattttgttcattgttttctagttgttt

SEQ ID NO: 888121 - DNA, 580 bp, Homo sapiens
gaaattagccaagcgtggtggtgggcacctgtaatcccagctactcgggaggctgaggcaggagaatcacttgaacccgggaggcagaggttgcagtgagccgagattatgccactgcattccagcctgggcaacagaacaagaatytgcctcagaaaaaaaaaaaaaaaaaaaaaaaaaaaggctactcttgcaggagtaaggtggtgtctcattgtggttttaatttgcatttccctgatgattaacagcattgagctttttttttttcatgtttgttagccatttgtatgccttcttttgataaatgtctattcgtgtcatttgcccactttttatgggattatttgtttttttcttgctgatttgtttaagttcttgtagattccttgtagatattaggcctttgttggatgcatagtttgcaaatgttttctcccattatgtaggtttactctgatgattatttcttttgctaagcagaagctttttagtttaattagacgtcatttatttatttttgttgcatttgcttttggggtctttgtcataaattctttacctaggtcaatgttgagaa

SEQ ID NO: 888122 - DNA, 681 bp, Homo sapiens
tctaaaagtctaaatgccaaagcaagtagctcagccccaggttacactattatcctccacacttgaattttgctaagataaagtcagttgaagaggccctagaagtggattcctatgaaattttgccatgattggattccagaattatgaataaatttaatccaaatatgarccaaaaatatttatagtcccagccaagtcccccgctagctcaaatgaggataagatccaaaaggtggcatcaccaatggttgaaggttgagctaaacacaagtgaactaaatacaattaaagcccaacttcagttctacataagtcagtagaaatgtatccacagattgccaaattactgtaattagaaagcaaagaatttaaagcaaatattgtaaacatttaaaaaaaattaaaggtaaaattcatataatggatgaaaagataaaatattttaagagataaatgatagctctaagaagaaataaaatggaaattctagatctgaaaagtataaatttacaataaaaactttattggataagtataatagcaaattggtcagtgcagaataaaagattaatgaatttaaacacatatcattatgaagtaaccaaagaaaaatgaagagaaaaataggttaaaaaataaacagatcgataacatgtggaataatatcaggagatttaa

SEQ ID NO: 888123 - DNA, 580 bp, Homo sapiens
actgtccacagtctcacaacagagacatgaaaaacccttctttacactggtaacccttaattaaactgaatttttggtgtgtcccttcaggagaaggtcaccatatcagcaataattaggggaaatggcattgtgaacattactggatgagatgtggtgtatttcttactttcaattattgcctccttgtttgaatcattagcatttggcagatttgttgctgaatttgttgttctgatttaaaactcggtgtaaggttgaatatgttcttatcttgatcttatatttctgcyatgacttgcatttcttgctgagtttctgacttgaattgctctatgtttttgctgagcttttgctttgtcttgttgtatttctatctggaggggtttccctccgcctttttctttttgttatatctcttctttggcctattgtatttctctggcccattcattagctttttttttcctttaaagttattctcttgttcagtatatgcagtacctaatcaatacgcttccttgcttgctgcaggatttccaacttactgtgttttctgtcagctttgatactgcctgag

SEQ ID NO: 888124 - DNA, 580 bp, Homo sapiens
actgtccacagtctcacaacagagacatgaaaaacccttctttacactggtaacccttaattaaactgaatttttggtgtgtcccttcaggagaaggtcaccatatcagcaataattaggggaaatggcattgtgaacattactggatgagatgtggtgtatttcttactttcaattattgcctccttgtttgaatcattagcatttggcagatttgttgctgaatttgttgttctgatttaaaactcggtgtaaggttgaatatgttcttatcttgatcttatatttctgccatgacttgcatttcttgctgagtttctgacttgaattgctctatgtttttgctgagcttttgctttgtcttgttgtatttctatctkgaggggtttccctccgcctttttctttttgttatatctcttctttggcctattgtatttctctggcccattcattagctttttttttcctttaaagttattctcttgttcagtatatgcagtacctaatcaatacgcttccttgcttgctgcaggatttccaacttactgtgttttctgtcagctttgatactgcctgag

SEQ ID NO: 888125 - DNA, 542 bp, Homo sapiens
agaacaacagccatgatgatgatgataggagcttagaagacgaattgaccacttaccacatgccagaaaatgtgcttagtcctgtaagaagattatctcagttagatacttctttgtggggagttcctcctctagattttctatcatctaggccctcctagaattacctcacttcggattgggaaatctccaartgtgtgtgtgtgtgtgtgtgtgtgtgtgtgtgtgtgtgtgtttgtatgtgtgtgtctagtgcttttttattcttatagagctgaactagtaagtgctaggcagggaaatatttatttcctactcaacatgtttccatggtgaggaatttttattagaagaagatgtgagcttcttcctttccccccaccccctccactgagggcaggagagtgacttatctgattgaagagtttggaagagggaattgggcatttgtggattagccactcttgtacattttgggcatgactgcttgcagagaggatacattctggtttgcagtctccaccatgctacgacttagcaaa

SEQ ID NO: 888126 - DNA, 654 bp, Homo sapiens
gtcattttaaaattattaagctataggtaaggcctttctttgctacatatatatataatcttgacttctttaaaatctagcctagaaaacatttttgtttctttttctctttttcctggtcccttctttagctcccaagaatttcagaaaactgttgcattttagattattttgccagctgcatacttttctgtctaatttgcagatgtcacttacttgataacacttcacacagctgtctaacccaagcttaaatgattttctgatttctgaagaagtggctacacaaataatggcttcagaccaaggtytttggcaggataattttatcaccaggcctggcacagagaaaagtgaaaaaaaaaaaaaaaaaaaaaaaggagaggggttaatttttattaagagtttgaatttttgttttatcaaatgttgaagaatacaattcaaaacttgcttatagcatgccacacaaatatcttagtgtctttttttatctacatcttcctttggagtttatcatacttagaggtaagttttttatttattttttttagtgtttcttattttctccagtagagtatcaccatgattctggcaacactttacactcccttttgttacaaccaaaatacatctagcccttcaagcagctat

SEQ ID NO: 888127 - DNA, 687 bp, Homo sapiens
ttaccagtggattctcagccatgatccgtctgtgccaggtgataaagcattttcatcaaaatgctctctggtgaatagctcttttaacttgtagaatcatcatgaagagcagctcttttaacttgtagaatcatcaaaatgggggaaaagagaatgagtggaacactaatcatcaagatctagattcaaatggccytgataagttgaagaagaagttgaaatttaatagaatgcaattgaatggacaaactcttaggaaagaggaccagaaagcataaagaaatacaacaaagccagtgatagactagttgagtggttcttgaacttttggtatcaggaccccttcactctcttaaaaaatattttggctgtacaaaactataatttatatgaattttatctgttggtacttaacagattataaactaaaattgagaaattttgaaatgtatttttaatttatttaaatatagcaaaaaaattccattttatactaacttaagtaacatatttttatgaaaaataaaatagcagctgacaagcctggcattattttactttttgcaaatctccttaatgtctggctcactagaagacagctggagtctcatatctgattctacgttcagtatgttaaaatatcacgtatcacgtgccctctggcaaactctacacttgtgaaagcat

SEQ ID NO: 888128 - DNA, 635 bp, Homo sapiens
caggaatttgagttttccattactcaaggacagtagctgtgtttgtttgtgctgccttgtgcagttcctataaagtaccccctgcactaggtctttcttgaatgtgtaggtaatgttgagagctggatctgaaaggaccctccccatctgtcagcctagctctcttccagtccccacacagtgcctttgcattaagttttatcttcagtatgtctgtattcaaatgcaaataggaagtatttagtgggcaactatctgcaaggctcaatttacaggaactagagggacacaatgctgagaaaataaaaagcagaatctgtgctccaaggacacagtctggtgaagagtataagcatgtatacaaatactttgaatttcaacagagactctggtgagtgctaaaataaaaactattgcaaagtgcaatgaaaacaacgggagtaataagagtctcatttcaggacatgaggaagagatgtgaaagagaggtgagtgyttcaggaagagggaagaatgtatccttccccctggaaggatggcaaattattcccttttaaatttagcatatttcatttaatcataccgtcagagaaacaagaagggttcaaatcatatctgcttaacttgaatccata

SEQ ID NO: 888129 - DNA, 587 bp, Homo sapiens
tttcacaaaaaatttggcatactctagtaatgttggaaatgtatgacatatcacttcctgttgcacatatgtgtaccagcagacatgaacaaaaaagtaatgtaacattataaaattatgttatatatattctgtgatagaaagtaacctacatatccatcaactttaagtggaaacaaattgaacatyatactgcactgaaaattaataaatcccagctattttcaacaatgtaaataaatctcagaagatataaatacatatgaaacctatcaaaaccataatttagttttgtaaatgtatttttattattttaaagtggataaaagtaaattttattattgatatggcttggctctgtgtcctcacccaaatctcatgttgaattgtaattcccagtgttaaggcagacacctggtgggaggtgactggatcatggaggtggattttccccttgctgttcttatgatagtgagtgagttctcacaagatctgatggtttaaaagtgtctagcacttcccacttctctctctctctctctctcctgctgccatgtgaagactgtgccttgcttccccttagtctt

SEQ ID NO: 888130 - DNA, 638 bp, Homo sapiens
cttattaatatggtagcaatatggaaaattaatgtttgagactttcttttttctttcttttagaaaagggaaagcattcagtgttcaggtgacttgtgctaaagataaaaggatgaaaaaaatggaagctgtggaaatttcctcatgtcttatcattggaaattatattgcatcaccaagttttctggtttacaaaacaatagcatagtaaaactatgttttaaatgctgtaccagctaacctaattagcctactttacagatagggaatctgaggcccagagaatgaagttactcaactaaagtcacataggtatttaatggtagatctagggttctattcagcgtatcacgattacaatgtctgatttcttttccttaatatggtccatatcctctcattaggccattcctcttagcagctacaaatktgtagatgatgtatttcataattaagtgtggttaaacaaattaaaatttccacctagaccagaaggtcctacaaacaaaatgtttccaattagcattgtctgtgcagccagtaaaggtgtgaaaatggacaaggttaaaactggcataataactatttgaagaatggttaaatagaccaaagctgttgcccttttcctatctcccaaa

SEQ ID NO: 888131 - DNA, 638 bp, Homo sapiens
cttattaatatggtagcaatatggaaaattaatgtttgagactttcttttttctttcttttagaaaagggaaagcattcagtgttcaggtgacttgtgctaaagataaaaggatgaaaaaaatggaagctgtggaaatttcctcatgtcttatcattggaaattatattgcatcaccaagttttctggtttacaaaacaatagcatagtaaaactatgttttaaatgctgtaccagctaacctaattagcctactttacagatagggaatctgaggcccagagaatgaagttactcaactaaagtcacataggtatttaatggtagatctagggttctattcagcgtatcacgattacaatgtctgatttcttttccttaatatggtccatatcctctcattaggccattcctcttagcagctacaaatttgtagatgatgtatttcataattaagtgtggttaaacaaattaaaatttccacctagaccrgaaggtcctacaaacaaaatgtttccaattagcattgtctgtgcagccagtaaaggtgtgaaaatggacaaggttaaaactggcataataactatttgaagaatggttaaatagaccaaagctgttgcccttttcctatctcccaaa

SEQ ID NO: 888132 - DNA, 560 bp, Homo sapiens
ggggcagagaaagtgaccgattattaatcatttccctaaaatcagcagggtttcctgcagagagacactgattatcttggaatgttttgaatataggatccattagaataacaaaaagcacttgaaaaaaaaaagcttgtgtaaagatgctctaagtttttctctggttttgtttcatttttccaaaataaaatttgtgactatagactgcttcacttttggggggatgagctcctgtatatttctgacatagaaatacagaaacgrgtcacctttatctgagcctatgaattctctgattctgttagggagctgagtccttcattcttttctgctgttccttaaaatttcttacactttcccaggagtaactgctgatgtcctatcagtgactgcactacacctttgctatcctgctgattattcatcaatgtcctttctccgtgattaagaggtgtcacatcatcgcatatgatcaacttcctgacttttactcaggggtttaatggaagggattgttttttggtttgttggtttgtttctttggcctctctagctca

SEQ ID NO: 888133 - DNA, 661 bp, Homo sapiens
ctttatttgtcccacttagtgtggatcttcatatgttttgcttaagaaagattaacggggtgttgccccagatcccactgcagaagttatataatattgttgattatgcaccagatttctttcctaaaatccccacaattcagaattctaaaacataccgggtgccaaggggttgggattagggtctttagacctgtaattcttcaaaacttctttctctggagaagaccctactttgagggcacctgatatcttctgggatgaggacgtaggctatgttgtctctgcttgctacaaagaacttcagtaagtagtggcctcaacccggctttctctagaactaaggtcttcttttttctccagctagaatcctaaaatttccttaggttttttttgaataatttactttcttcactgaaagtattaccttgccaaggatttattccrttttcctattagagagattagtacctcccaagtttctccttatagatattgtttaatcttggcatagtttggttgttttttcttttcagagttttaattagtctgtgtcctacttaagctgtaggggactccatttgaaatattaggtatggtggtacccaggagtctgcccccaacccagggaggttcctgttttcagataaaattgctttct

SEQ ID NO: 888134 - DNA, 627 bp, Homo sapiens
ttattaaaaagtccagaaacaacagatgctggtaaggatgcagagaaaaaggaatgattttacactgttggtgggagtgtcaattagttcaaccattgtggaagacagtgtggcaattcctcaaagacctagaggcagaaatacaatttgtcccagcaatcccattagtgggtatatacccaaaggaatataaatcattctattataaagatacatgcacacatatgttcactgcagcactattcacaatagcaaagacatgggattaacccaaatgcccatcaatgatagactggataaagaaaatgtggtacatatacaccatrgaatactatgcagccataacagggaatgtcctttgcagggacatggatggagctggaagctgttatccttagcaaactaacacacaaacagaaaaccaaataccgcatgttctcacttttataagtgggagctgaatgatgagaacacatggacacatgacgggggacaacacacactggggcctgtttggggtgggggtgggggagtgagagcatcacgaagaatagctgaggaacgctgggcttaatacctaggtgatgggttgatctgtgcagcaaaccaccatgatacacatttacc

SEQ ID NO: 888135 - DNA, 624 bp, Homo sapiens
ccgcacatctacaaccatctgatctttgacaaaactaacaaaaacaagcaatggggaaaggattccctatttaataaatggtgctgagaaaactggctagccatatgcagaaaactgaaactagaccccttccttacaccttatacaaaaattaactcaggatggattaaagacttaaacataaaacctagaaccataaaaaccctagaggaaaacctaggcaaaaccattcaggacataggcatgggcaaagacttcatgactaaacaccaaaagcwatggcaacaaaagccaaaattgacaaatgggatctaattaaactaacgagcttctgcacaacaaaagaaactatcatcagagtgaagaggcaacctacagaatgggagaaaatttttgcaatctacccatctgacaaagggctaatatccagaatctaacaaatttacaagaaaaaaacaaacagccccatcaaaaagtgggcaaaggatatgaacagacacttctcaaaagaagacatttatgtggccaacacacatgtgaaaagaagctcatcatcactggtcattagagaaatgcaaatcaaaaccacaatgagataccatctcacgccagttagaatggtga

SEQ ID NO: 888136 - DNA, 645 bp, Homo sapiens
acaggtgacatagcaaaacccaactttttcttcctttctaaggaatattgcttaaaaaccattccatgaaccacagacttagttataactttttcacataatatttcaaattacttgagtaggaaaatgtatacacagaattctcattagctctgcctagtagatttactagagctgattatgtcaatgctcacttgttttagtctcctcttatgatcaacgtattctattttttttctttttctttgtttctttcttttttttttttttgagacatagtcttgctctgtcacccagactatagtgcagtggcgcaatctcagctcactgcaaccaacctcccccacgacaagcctcaccccaggtttaagtgattcttgtgactcagctacccaagtaattgggaatataggcatgtgccatcamgctcagctaatttttgtgtttttagtagacatggggttttgccatgttggccaggctggtctcgaactcctggcctcaagtgatctgcctgcctcagcctcccaaaatgctgagattacaggcgtgagctaccactcctgagacattacttttaaggactttgccacactggacaggactcaaaggtaggtgatgaggatagtaaggaacacaacttgg

SEQ ID NO: 888137 - DNA, 591 bp, Homo sapiens
gttttaattatcattaccttgttaaagagaaggtaattattgaaaggttccaaaaagcaaggaaggggggtctcatttaaacttgtgatattaggagctaataatgagtaattctggatcagagaagttggcaagtcagggtgtcaagaagcacaaagatttgaatgtttaggaatttcactgttagcttcttggatgaactttcaaagggaaacctcaggtctcagttcagttaggatcaacacatctttaatgaatttcctgttccatctactgtattacgtgctgagattctgagttaaatgagacatcattcctgccttttagaagataacaggctaagagaggagccaacaaaacagaccattttgatgtaccatrgtagtgttagaatgcaggtacattcatggtgctcaccagctgtctctagatctccaaatccaacagggatttttcagtccttatcttacaggaatgctttgctgattttgaaccttgatactccattcttcttgaaagctgaggaccttcatcagttttcatctccttcatgaattctcttacgccgtcttacccttaaacactggtgat

SEQ ID NO: 888138 - DNA, 577 bp, Homo sapiens
ttcccagtcgtctcccaaagtcttaattcatttcagcattaactcaaaagtccacagtccaaagtctcgtctgagacaaggcaagtcccttctacctataagcttgtaaaatcaaaagcaagttagttacttcctagatgcaatgggggtacaggcatttgataaatacacccattccaaatgggagaaattggccaaaacacgggggctaaagtccccattcaagttcaaaatccrgtgaggagtcaaatcttaaagctccaaaatgatctcctttgactccaggtctcacatccaggtcacaccaatgcaagaggtgggttcccatgatattgggcagctccacccctgtggctttgcagggtacagcctccctcccagctgctttcatgggctggcgttgagtgtctgtggcttttccaggcacacagtgcaagctgtcagtggatctaccattctggggtctggaggatggtgaccttcttctcacagttccactaggcagtgccccagtggggactctgtgtgggagtttcaaccccacatttcccttctgcactgtcctagcagaggttct

SEQ ID NO: 888139 - DNA, 603 bp, Homo sapiens
cccctttatcattttttatagtttctattttattcttctctcttttttttttctttattagtctagctagcagtcaattttgttaatcttttcaaaaaaccagctcctggattcattgattttttagagtttttttgtgtctctgtctccttcagttctgctctgatcttagttatttcttgtcttctgctagcttttgactttgtctgctctttcttctctagttcttttaattstgatgttaggatgttaattttagatctttctcaccctctcctgtgggcatttagtgctataaatttcccgctaaacactgctttagctgtgtcccagaggttctggtacattgtgtgtttgttctcattggttccaaagaacttatttctgcctaaatttcattacttacccatagtcattcaggagcacattgttcagtttccatgcagttttgcggttttgagtgagtttcttaaatcctaagttctaatttgatttcactgtagtctgagagactgttatgatttctgttcttttacatttgctgaggagtgttttacttccaattatgtggtcagttttagaataagtgtgatgtggtgctgt

SEQ ID NO: 888140 - DNA, 603 bp, Homo sapiens
cccctttatcattttttatagtttctattttattcttctctcttttttttttctttattagtctagctagcagtcaattttgttaatcttttcaaaaaaccagctcctggattcattgattttttagagtttttttgtgtctctgtctccttcagttctgctctgatcttagttatttcttgtcttctgctagcttttgactttgtctgctctttcttctctagttcttttaattgtgatgttaggatgttaattttagatctttctcaccctctcctgtgggcatttagtgctataaatttcccgctaaacactgctttagctgtgtcccagaggttctggtacattgtgtgtttgttctcattggttccaaagaacttatttctgcctaaatttcrttacttacccatagtcattcaggagcacattgttcagtttccatgcagttttgcggttttgagtgagtttcttaaatcctaagttctaatttgatttcactgtagtctgagagactgttatgatttctgttcttttacatttgctgaggagtgttttacttccaattatgtggtcagttttagaataagtgtgatgtggtgctgt

SEQ ID NO: 888141 - DNA, 594 bp, Homo sapiens
attcatcacatgaacagaactaaagacaaaaaccacaagattagctcaatagatgcagaaaaggcttttgaaaaaattcaacatctattcatgttaaaaagtctcaataaactagttattgaaagaacataccacaaaataataagagccatatatggcaracccatagccaacatcatactgaattggcaaaagctgaaatcgttccccttgaaaaccagcaaaagacaaggatgccctttctcaccactcctattcaacatagtattggaagttctggccagggcaattaggcaagagaaagaaataaaaggcatctaaatagaaagagagaaagtcaaactcttactgtttgtaaatgacatgatactatctgtagaaaatgctgtagtctcagctcaaccacttcttaagctgataaacaacttcagcaaagtctcagtatgcacaaatcaatgtgcaaaaaccatgagcattcctgtatactaacaacagtcaagctgaaagccaagtcaggtatgaactcacattgacactgccacaaaaagaataaaatacctaggaatacagctaactaaggaggtgaaagatctc

SEQ ID NO: 888142 - DNA, 681 bp, Homo sapiens
tgcacaggaaaataaactattatcagagtgaacagacaacctagagaatgggggaaattttttgcaatgtatccatctaacaaaggtctagtatccagtgtctaggggaaacttaaataaatttacaagaaaaaaaaaaccataggcaaaggacatgaacagacacttctcaaaagaagacattcatatggccaacaaacatgaaaaaaagctcaacatcaytgatcattagagatatgcaaatcaaaaccacaatgagatactaatatggtttggctgtgtccccacccaaatctcatcttgaattatagctcccataatctccacgtgttgtgggcggaacccggtgggaagcaattgaatcatggggtgggtttttttccatgctgtcctcatgttggcgaataagtttcatgagatctgatggttttataaaggcagtttccctgcacttgctctctcacattgcctgccaccgtgtaagacaagcctttgctcctcctttgccttccaccctgattgtgaggcctcccaagccattcagaactgtaagtccattaaacctttttttctttatagattatccagtctcatttatttcttcatagtagtatgaaaatggactaatacagataccatttcacaccaggcagaatagctgttatcaaaatgtcaaaacaa

SEQ ID NO: 888143 - DNA, 681 bp, Homo sapiens
tgcacaggaaaataaactattatcagagtgaacagacaacctagagaatgggggaaattttttgcaatgtatccatctaacaaaggtctagtatccagtgtctaggggaaacttaaataaatttacaagaaaaaaaaaaccataggcaaaggacatgaacagacacttctcaaaagaagacattcatatggccaacaaacatgaaaaaaagctcaacatcactgatcattagagatatgcaaatcaaaaccacaatgagatactaatatggtttggctgtgtccccacccaaatctcatcttgaattatagctcccataatctccacgtgttgtgggcggaacccggtgggaagcaattgaatcatggggtgggtttttttccatgctgtcctcatgttggcgaataagtttcatgagatctgatggttttataaaggcagtttccctgcacttgctctctcacattgcctgccaccgtgtaagacaagcctttgctcctcctttkccttccaccctgattgtgaggcctcccaagccattcagaactgtaagtccattaaacctttttttctttatagattatccagtctcatttatttcttcatagtagtatgaaaatggactaatacagataccatttcacaccaggcagaatagctgttatcaaaatgtcaaaacaa

SEQ ID NO: 888144 - DNA, 625 bp, Homo sapiens
actaaagatttgatgggtcatgagatgaggtggtataattaatacattcacccaggtgcattgacttcagtgtgggatttctttccttcatcaaccacatttattcaattagcaaatcccttttcttcaaaattgaccttaattctctccttaattctctctctctctatgttcctctatgtacagggctaccttaatgagcagccaggatgccatcatctccgacctgaatgacaataacctccaaaccagcctttgtatactccttcctgctgctctgcagtccacttccacagaccagccaactgaatctccttataggtaaagccctgtcacacctctccattttaaaatttcctatcagacttagaattctaactaaatttgtttctgtggccaatcctgtctctaatatcagatttcaatttcctgatcattcaacattttatcagacacatcgacctctgccatttgycaaatactagattcttctctgcccaagagtgtcttcttatgtaggtatctgcccaaaacatcctttgctgttctccgtatggtgggctacttctcaccttctaggaaatattgtgctttaagccatcaaataatctattattagaaagga

SEQ ID NO: 888145 - DNA, 665 bp, Homo sapiens
gtagtagtaacagtgaagagaccttgtaaggctatgacagtagtccatgcagaagggaaaaaagatagacttgtggaagtaaaatgaagaggtggaaaatgagttcagagcagtaggttggatccagaggatagagaaaccatgaatactactaggccccccaaaaagcaaaacaaaaatcaaacaagtggggcacttcaacaacccactgatagtgttagatcatcaaggtagaaaactaacaaagaaattctggacttgaattcaatacttgaccaattggacataacagaaagaacactctgcccatcaaccatagaatatacattcttctcatctgcacatgaaacatactctaagattgaccacatgttcagccataaagcaagtctcaataaattcaagaaaattgaaatcatctctgccatactctctacccacagtgcaaaatagaaatcaataccaagaagakctcccaaaaccacacaattacgtaaaaattaaataacttgctcctgaatgacttttgggtaaacaatgaaattaaggcaaaaatttaaaaaaaatcttcaaagtagattaaaacagagacacaacataccaaaatctttggcatgtagcaaaagcatgttaaatgttaagaggaaagcttacagtgctaaatg

SEQ ID NO: 888146 - DNA, 624 bp, Homo sapiens
aagtaaagagaactgattaccacagaaataaggatcttgttattatgtaaatggtaagactgaaggagaaaaactaaaacacaaaaccaaggatagactgtggaaggaaaattgaatccaactacagtgtttatcaaaatttcatctgccagttttaagttctataggataatatggttttaaattttcaggtcatctttggctgggcacggtggctagcactttgggaggccgaggcaggcagatcacaaagtcaggagatcgagaccatcctggctaacacggtgaaatcgtgtctctactaaagatacaaaaaattagctgggcatagtggtgggtgcctatagtcccagctacttgggaggctgaggcaggagaatggcgtgaacctgggaggtggagcttgcagtgagccaagatcgcgcaactgcactcyagcctgggagacagagtgagactctgtttcaaaaaaacaaaaaaaatttcaggtcatcctctagttataatttccttcttcatattcatattaacatttgggtatcttaaacatgtaaatgaaaatcatcaataagcctcaactaaattataagagcaaatacttgatcctagattgaagttccttat

SEQ ID NO: 888147 - DNA, 615 bp, Homo sapiens
ttaggcttatttttcattcggagacagtgcttggtgcattgtagatttatggttccttataaggagtcctccttctgtctttgaagtcttagacacacagcttgggaatggtcctaatagactgtttcctttaaaaaaagaaagaaagargagcctgtagtgtgattgaatctctatctgacaaggcttaacagtctaaatgaaaacatctaggttgaaagtgtgtttgtgtttgcagtacatttgtgtatgagggtttttgtggatgttttcaaggactgatgaggaagccacacatgggttatttctctactgaaagggtagaggccaggtcatctgacctactgattaaacttgaaaagggagagtgtgtcttttgccatctcaaaggccagctgtttattgaatttctccaccctgcaattgtcttacatacggaatagttcctggagaaagatctaacatctgcgcaggtctatcctgttctgtggctgtgtttactaaagtgagttctgcgcttacattcacacactgcaaactgcacgtacgatgtaagtgtacttgtcatgtagagttttaccaaaactatattagattatactctgaagcatgttt

SEQ ID NO: 888148 - DNA, 615 bp, Homo sapiens
ttaggcttatttttcattcggagacagtgcttggtgcattgtagatttatggttccttataaggagtcctccttctgtctttgaagtcttagacacacagcttgggaatggtcctaatagactgtttcctttaaaaaaagaaagaaagaggagcctgtagtgtgattgaatctctatctgacaaggcttaacagtctaaatgaaaacatctaggttgaaagtgtgtttgtgtttgcagtacatttgtgtatgagggtttttgtggatgttttcaaggactgatgaggaagccacacaygggttatttctctactgaaagggtagaggccaggtcatctgacctactgattaaacttgaaaagggagagtgtgtcttttgccatctcaaaggccagctgtttattgaatttctccaccctgcaattgtcttacatacggaatagttcctggagaaagatctaacatctgcgcaggtctatcctgttctgtggctgtgtttactaaagtgagttctgcgcttacattcacacactgcaaactgcacgtacgatgtaagtgtacttgtcatgtagagttttaccaaaactatattagattatactctgaagcatgttt

SEQ ID NO: 888149 - DNA, 615 bp, Homo sapiens
ttaggcttatttttcattcggagacagtgcttggtgcattgtagatttatggttccttataaggagtcctccttctgtctttgaagtcttagacacacagcttgggaatggtcctaatagactgtttcctttaaaaaaagaaagaaagaggagcctgtagtgtgattgaatctctatctgacaaggcttaacagtctaaatgaaaacatctaggttgaaagtgtgtttgtgtttgcagtacatttgtgtatgagggtttttgtggatgttttcaaggactgatgaggaagccacacatgggttatttctctrctgaaagggtagaggccaggtcatctgacctactgattaaacttgaaaagggagagtgtgtcttttgccatctcaaaggccagctgtttattgaatttctccaccctgcaattgtcttacatacggaatagttcctggagaaagatctaacatctgcgcaggtctatcctgttctgtggctgtgtttactaaagtgagttctgcgcttacattcacacactgcaaactgcacgtacgatgtaagtgtacttgtcatgtagagttttaccaaaactatattagattatactctgaagcatgttt

SEQ ID NO: 888150 - DNA, 587 bp, Homo sapiens
gactagtagatgtggcagtcagcgacccttcaaatgggctacccaatgatccagggtctccattttgccaccctgttctcacaggcaggacagtaagtctctgatgtttcaacctgagataatcttgtatctctttctggtcataaattgtcttgtacttgatgcacctttgcctgtgctgtgagctgagcctcagtgtctgtttggagtgtagtcaggagcagccacccgttgtggctgccaaaacttgggcatctaaccttgcttagatagatatgccccctgccacagctcttccagacctctcagcattttcagggggttatcatactcactcatttggcctcatccattaaggatagtggctataaggcccacatagacatggacagccagcccagggtctctcccrtggatgtccccttccctgatcataggcatggacagctggcccaggttttcctccgtggatcttcctttcctgatcacaggcatggacagccagcccagggtctcccccgcggatctccccttccctgatcataggcatggacagccggcccagggtctcccccgcggatctcccc

SEQ ID NO: 888151 - DNA, 573 bp, Homo sapiens
atctaggttattttgaaatacatagtaaaatcactcaatctagtgcctaccacataccaattttcaaaaactgtagttttcctcccctggtacagtgcttctgtaactgttgtaccattacaatctgcaccaaaagcaattggagtttgtttaaaatrtgggtatccaggcccaccacacagtggtcagttatattacttttatctcttataatccatttttcttgattatattattttaaaatatatgtgacaccaactagaatggctaagatggaaaatacagacagtattaattgttggctaggatgtggagcagttgggactctcctactctgctcctgggggtgtgcactgctgtatttactaaagctgggcataactgaacccaagaattccaatcctaggcatattcccaatggaaatgtgtgcatgtgatcaccaaaagatagatattattaaaatgtttatagcagcactctttgcaatagctcccaactggaaactactaggtgcccatcaacagcagagtggactttttttgaagctgggatacaatgcagcaatgagcatg

SEQ ID NO: 888152 - DNA, 695 bp, Homo sapiens
taaccaggaccataaatacacttggaaataataaattataaattatttggaataaataaaataaaagttatttctaagttccgtattatcagaaacaggctagtttcgttgctctgctgaatcaactccttcacagcagagctatgctgtttctggatctgatactttacttcaggattccctggaaaccgcctgggatgggcattcttgaagctccttgtggtcggtttttcctgttcataaaatgttcttctaatctggaaaaccagaatgctactaaagtctgttttggtgcaggcctggatataatgatatcccattatccattccayctctaaaatatttctcaaatattaactaattaaatcaattacatgggtaacttgcttaaaggtagcgactatatttttttaagaatgacatgagcccactgcagactattaagaatcctgatgtcgcctgataaatgttaccaatctacagcattacaagtattcgtatattttatggcattctgtttctaacctatagggaaactaagtcacagggctttacagccctgtaaaagatccgaggtgtcattcattccaacactaaaattaaaggctctccagattctacttataagtcttatccaccagaccataaattctacttttgaaaatcattaaatccccctttatttcaaatgagaa

SEQ ID NO: 888153 - DNA, 571 bp, Homo sapiens
aactagaacatctagaagaaatggataaattcctggacacatccaccctcccaagactaaaccaggaagaagtggaatatctgagtagaccaatcataggctctgaaatttaggcaataattaatagcctaccaaccaaaaaatgtccaggaccagatggattcacagccgaactctaccaaggtacaaagaggagctgttaccattacttctgaaactattccaatcaatagaaaaagagggaatcctccctaactcattttatgaggccaacatcatcctgataccacagcctggcagagacacaacaataaaagagaattttagaccaatatccctgatgaacatcgatgcgaaaatcctcaataaaataccagcaaacygaatccagcaacacatcaaaaagcttatccaccacgatcaaggtggcttcatccctgggatgcaaggctggttcaacatatgcaaatcaataaacataatacatcacataaacagatccaaccgcaaaaaccatatgattatctcaatagatgcagaaaaggccttcgacaaaattcaacttcccttc

SEQ ID NO: 888154 - DNA, 644 bp, Homo sapiens
accatcctgaacttcccaggaccccggttctaatcctacctttccaaatgcccagaagcctctcccaaggagatattcttgtggacatctaattcaatattctaaatcagaatttataaatttttctttccattctacttatcctcatgcatacctgattatgattaaagaaattggtatctctacaggcccctgatgtgaaacattttatctttagcttttaccttttactgctcccttcatccaattaatctattgacaatccttgtaatagcaactactatggcttgaatgtgtcccccaaggttcatgtgtcagtcagaaactctacctcaaatgtggaagtgttgagaggtgargcttcatggaaggtgcttgggccatggggacatttctctcatgggtggatgaatgccattatcatggtagtgtgtttgttatcataggagtggcttccttataaaaggacaagttcagccatctttgcccaccccctcccccactctctctctcatcctctctttgctcttccaccttctgccatgggatggcaaagcaagaagactctcaccagatgctaatgtcttgatcttgcccagatcaagtttccagtgtccagaattttgagaaataaatttctattc

SEQ ID NO: 888155 - DNA, 587 bp, Homo sapiens
agtgcacaggcagagatagcttccaagaggaaaaatgctgtccaaagagccaataaaattgagataaaaagcgaaagctttaatttaaacatgagagaattaccaaaaagtgaatagacatgtgtagtaatcatcctgattaagaaataggaaattacaagtaacccacaatggttcccttgtaaatcactcttctcaatatcacaacaattctattcaaagaaaaccattgttacaacatttgaatgttacataaatggcatccaaaagcatgyatgcttttgtgtcagttttctttcattcaccattatatttgctatatcaatctctgtttttcatgaacctatagtttattgattcttatagttctttcattttcattgctgtgtggtattctattatatgaatatactacagttttatatccatgtttctgaacataaaagttttttccagtttttggctattaagaattatggtgccaagaatatactagtacacatcttgttggacacatgcacacattataattcgaggcatacttttaaataaaattgatagtaaaggatgcaagtgttcagtttcaa

SEQ ID NO: 888156 - DNA, 566 bp, Homo sapiens
taatttcattaggacaaatctgtggagagatgaaaggagcagatcactaacagattgctagtgaaatggagagtgtgttgaagtcgttgaatgtgataacagttacagaaatgaaagttgaaatgcttcagaggaacgaacagaaaaacgaaagcggtattttctatctgtcttagcacatcaggaaaagggaaaatgcatattttgtcaattccatctagtcattgatctcttttgtatgctcagtctaatgaggcaggtaggggaaatgcataatggttcttacatgtgtgctttaytggattcagattattgtgcagaactaaattgtgtttcacaaaagaaggcgtatttaaatggatacatcctttattacagtaaagataaaaaatttaacttatcagaattttgaaaaaggagttgttacaatagctaactctgaactgcttctaaaaccttactgcaagttattatagctaaaccaataacaaaagaaaacaaacaaaaaataccccaaacatctattttaccagtgctgtttctgtaacactgaactctacattttg

SEQ ID NO: 888157 - DNA, 590 bp, Homo sapiens
tcccttggaagtgtcatatttcattgcttttttccttacattgatatctgtacacctggtctaatagtctcttcttccagttttcaaatttgctttcataggagaggactttttcctgaagatttgtcaatggtgttgtttagatagactcttttagttttgattatgggtgcatgtggtagtgtagtctctgtatgatttttttggctataaacaacagcatcagtggtatttgtgatttcctctgtggtttaacaagtggttactagtggaggctctggtgaagttttactggggacagggktgccaggtgggccagtctttgggccccaggggtggcatcactgggctgagcaaggctgatgcctgatcttgagccctaaggcgctgtatgttgacaccaatgttagcagaaccagaaggccgaattcttgggctatgaggtgacttgctaagatgccagtagtggcagcagtggtccaggtgggtgagaatattctcggagccctggaaagccaaaatgatgtaggcaatggcagtagcagtggtgggaaaaccctctgagtcccatgtgttgtgcacaggtagtg

SEQ ID NO: 888158 - DNA, 590 bp, Homo sapiens
tcccttggaagtgtcatatttcattgcttttttccttacattgatatctgtacacctggtctaatagtctcttcttccagttttcaaatttgctttcataggagaggactttttcctgaagatttgtcaatggtgttgtttagatagactcttttagttttgattatgggtgcatgtggtagtgtagtctctgtatgatttttttggctataaacaacagcatcagtggtatttgtgatttcctctgtggtttaacaagtggttactagtggaggctctggtgaagttttactggggacaggggtgccaggtgggccagtctttgggccccaggggtggcatcactgggctgagcaaggctgatgcctgatcttgagccctaaggcrctgtatgttgacaccaatgttagcagaaccagaaggccgaattcttgggctatgaggtgacttgctaagatgccagtagtggcagcagtggtccaggtgggtgagaatattctcggagccctggaaagccaaaatgatgtaggcaatggcagtagcagtggtgggaaaaccctctgagtcccatgtgttgtgcacaggtagtg

SEQ ID NO: 888159 - DNA, 691 bp, Homo sapiens
atcaatttcattcaaatggccatactgcccaaagcaattttctagctcaatggtattcctatcaatttactaatgacattcttcacagaaccagaaaaaaaatatattttaaaattcataaggaaccaaaaaagawtcagaatagctgaggtaatactaagccaaaagaacaaagctggaagcagcatgttacctaacttccatctatactacagggctacagtaagcaaaaaaaaaagcatggtacttgtataaaaacaggcacacaaacaaatggaacagaatacagagcccagaaataaggtcacacttctatgaccatctgatcttcctcaacgaagctgacaaaaacaagcaatagagaaaatactaataattgatgctgggccatatgcagaagattgaagctggaccccttcctcacacaatatacaaatatacaaaaatgaactcacgatggattaaagacttaaatgtaaaaactaaaacaataaaaatccaggacgacaaccaagataataccatcttggacatagggacaggcaaagattccatgacaaagatgccaaaagcaatttcaataaaagcaaaaatttttaagtgggagggatctaattaaacttaagagcttcttcacagcaaaagaaactataaacaaaccacctacagaataggagaaaatatttgcaag

SEQ ID NO: 888160 - DNA, 691 bp, Homo sapiens
atcaatttcattcaaatggccatactgcccaaagcaattttctagctcaatggtattcctatcaatttactaatgacattcttcacagaaccagaaaaaaaatatattttaaaattcataaggaaccaaaaaagaatcagaatagctgaggtaatactaagccaaaagaacaaagctggaagcagcatgttacctaacttccatctatactacagggctacagtaagcaaaaaaaaaagcatggtacttgtataaaaacaggcacayaaacaaatggaacagaatacagagcccagaaataaggtcacacttctatgaccatctgatcttcctcaacgaagctgacaaaaacaagcaatagagaaaatactaataattgatgctgggccatatgcagaagattgaagctggaccccttcctcacacaatatacaaatatacaaaaatgaactcacgatggattaaagacttaaatgtaaaaactaaaacaataaaaatccaggacgacaaccaagataataccatcttggacatagggacaggcaaagattccatgacaaagatgccaaaagcaatttcaataaaagcaaaaatttttaagtgggagggatctaattaaacttaagagcttcttcacagcaaaagaaactataaacaaaccacctacagaataggagaaaatatttgcaag

SEQ ID NO: 888161 - DNA, 636 bp, Homo sapiens
aaagggaacacttataaactgttgatgggagtgtatattaagtcaaccattgtggtaagcagcatggagattcctcaaagagctaaaatgagaactatcatttgatccagcaatcccattactgggtatacttcatataccctgaggaatataaatcattctaccataaagacgcatgtacctgaatgttcactgaagcactattcacaatagcaaacacatggaatcaatctaaatgaccgtccatgacagattggataaagaaaatgtggtacatatacaccaggaaatactatgcagccataaaaaagaattagattacatcttttgcaggaacatggatggcactggaggccatatctttagcaaactaacaccggagcagaaaaccaaatacyatgtgttttcacttataagtgggagcaaaatgataacttaagaacacaaaataggaaacaaccaacactggcttctacttgagggtggagtgtgggaggagagagagaagcagaaaagataaaaattggatactgggttatgacctgggtaatgaaataatctatccaaaaaccactgtgacacaagtttacctttgtaacaaaccttcatgtgtacctccaaaactaaaataaaagc

SEQ ID NO: 888162 - DNA, 509 bp, Homo sapiens
gagagtgctttctaagaattaaacagggattaagtgttgtgacctaggcctgtggtcactgcagctgtttcagcactaggggataccctaagcccagggaaactataactcttgcaagctcctggatatgcagccttggtgaacttgggagcaataaaaaattccctgggttaccagtgaaggtctcttactctctttgctcttttcctccttccagaaagagtctctgtgtttggctgcctgaagatcgggtaggggtgacatgaataatcctatggccaccacagctagcactgcactgtgtctcacctcatgcctatgaccttccggaccagcataacagtggggcttgcctaagacctgtggcmactactgcctggctgcctctgacatttattcaaggcccaaggtcacttaagtcagtctgtagtgaatcctacatggattgaccatcacatcacagaagtggattctttcatggcccaggttgggtataaaagcatcatcca

SEQ ID NO: 888163 - DNA, 679 bp, Homo sapiens
acatataggtcaatctgaaaaggtggaagagaagtgaaaagcaattcttgtgctctagtcagtagtgtgtttatctttgacagccattacgtgtcaaaaattactgacccttacttaatgatatctctattgttttgggaagcctaagcagtggtaataaataggcccaataggtatcatgaatcctacatcatcgatgatcattcttgcttgcttcaccacacaggcacgtgttcccaatttgcagcaattctttgcagctattccggtgtccatgcttcttgctttttgtaaccctactatttctataatccctataatctgcactcattcataggggaggaaagaagacacagacggggcaaggccactttttgaacgcctcagcctagaaatgcgctatgccactcattctcacattctttcttctagaaatggccacacctaacagcaagggaggaaggaacacatagtctggtatgtccaggatgaagagaacataaatttaaataaacagtttgcagtctccatcacattattcrgagattaaaaatatttttctcaagtaaagatctttcttagagattagctttgaaaataaagatggtacaatatcctaaatttatttgctgcaagataattttacaatgtggccacatctgatcaggcttaataacca

SEQ ID NO: 888164 - DNA, 620 bp, Homo sapiens
aaagtatacctaacatttggaacttgtgatttcatgggatgaataagtccaaaattctatctccttgaaatttgtttccagaatgttaactgcaaagcaagttatatatagcagtaaatgcatgcttaatttgtgcagaaatcatggtgtgatgaatacaattaagagcctcggagggaataattatattactgcataaagctagtggttctcaaattgcttggtgcctggactttaaattggcctgatttcctgttgtgaaagtcatccatcgcagcaacacaactgcagcagraatggcgtagtttcaaagtcacaaagaaagcatattctttctgatcaattgccatatattcttgtttaaaggcaaagaaattggcaacaggcataccaaagttgattaaactgataaattaaaattcattagatcaagtacattgttttgtctgttattcagaagagagtttttttttttaacaagattgactaagctgcttataattgtaggtttttaagtacctacacataaaaaatttacctggattgtttaaagtaaataacatttatttcatgatccctagattattagtgccttgaaataaatagatggaattttaggg

SEQ ID NO: 888165 - DNA, 633 bp, Homo sapiens
ccaaatgcctgatttcaaaattcacttttaaaccgtttagtgctttatcatttctctttattttctaccattctgcttctcttctagacagatttataacagccattttaggtagataccatttaaggtagatactyatttcttctcgggtgatttttcttccctacatttttttttaacctggatttctcaccctccgttattccaaatgataaatatttctttaactccatagacatttctcttcataaataaaggtattacctttatcctgttcttgtcattgccatatagtgtcacatgtaaagaacacatgtataagaacacacacacaatcacacataagaatgcctatataaaatatacatgtacttatgttttatttatttactttttttgtatattttatacttatgtacgtaggtatacgtatgcttacttatacatgcatacacagtagaaagcccttaaaacaaaagtttttaagtgtttcttcttacattttgaatcattgctgattaccaatgtgacctgtatccctgagaatatttcgacttttgtctgtttttaatctgtgtagtctctgtttcagaattagtagtgaaaactattgaatatttgctattatttcta

SEQ ID NO: 888166 - DNA, 633 bp, Homo sapiens
ccaaatgcctgatttcaaaattcacttttaaaccgtttagtgctttatcatttctctttattttctaccattctgcttctcttctagacagatttataacagccattttaggtagataccatttaaggtagatactcatttcttctcgggtgatttttcttccytacatttttttttaacctggatttctcaccctccgttattccaaatgataaatatttctttaactccatagacatttctcttcataaataaaggtattacctttatcctgttcttgtcattgccatatagtgtcacatgtaaagaacacatgtataagaacacacacacaatcacacataagaatgcctatataaaatatacatgtacttatgttttatttatttactttttttgtatattttatacttatgtacgtaggtatacgtatgcttacttatacatgcatacacagtagaaagcccttaaaacaaaagtttttaagtgtttcttcttacattttgaatcattgctgattaccaatgtgacctgtatccctgagaatatttcgacttttgtctgtttttaatctgtgtagtctctgtttcagaattagtagtgaaaactattgaatatttgctattatttcta

SEQ ID NO: 888167 - DNA, 633 bp, Homo sapiens
ccaaatgcctgatttcaaaattcacttttaaaccgtttagtgctttatcatttctctttattttctaccattctgcttctcttctagacagatttataacagccattttaggtagataccatttaaggtagatactcatttcttctcgggtgatttttcttccctacatttttttttaacctggatttctcaccctccgttattccaaatgataaatatttctttaactccatagacatttctcttcataaataaaggtattacctttatcctgttcttgtcattgccatatagtgtcacatgtaaagaacacatgtataagaacacacacacaatcacacataagaatgcctatataaaatatacatgtacttatgttttatttatttactttttttgtatattttatacttatgtacgtaggtatacgtatgcttacttatacatgcatacacagtagaaagcccttaaaacaaaagtttttaagtgtttcttcttacattttgaatcattgctgattaccaatgtgacctgtatccctgagaatatttcracttttgtctgtttttaatctgtgtagtctctgtttcagaattagtagtgaaaactattgaatatttgctattatttcta

SEQ ID NO: 888168 - DNA, 630 bp, Homo sapiens
aactgacagctcttctgctgccaccactgcagcggttctgcctttgctgcccttagactggagaagatacaaaaagtctgagggatttactcttgcttccagcacactacagtatcatgcagagaggagctcagtccctcctccctgtgaaccctttccctcctgttcttcaccaagcaggtcccctggcacagtccagcaatgcaaccaccccatcccttggctgaacattgccattagctgtgtccattaactgtttctctgagggagagtttccagaagcaaccaaaagcccctctgccattgccactgcagtgatacttcccttgccactctggtacaggggaaggaacaaaggccttgagggctttacccacacctccagcaagccatagrcatcctaataagaagaggccagtccgtctcccccaccagctcccctgctcaccaccaggcagaggcccctggcttgggcccacaacgccagtgccccactttgggccaattgcaaatattggtagtggctctgcttttctccaaggtgaagccccaagagacaagggacaggccctctgccacagaacttccaaggtcccttctacggcttctaagctggggagggaacataaa

SEQ ID NO: 888169 - DNA, 626 bp, Homo sapiens
ccccctaactcattttataaggccagcatcatcctgataccaaagcctggcagagacacaacaaaaaaaagagtattgtagaccaatatccctgatgaactttgatgcaaaaatcctcaataaaatactggcaaagcgaatccagcagcacatgaaaaaccttattgaccatgatcaagtgggcttcatcctgctggttcaacacacacaaatcaataaatgtaatccagcatataaacagaaccaaagacaaaaaccacatgattatcacaatagatgcagaaaaggcctttgacaaaattcaacagcccttcatgctaaaaactctcaacaaattaggtattgatgggacatatctcaaaatcataagagctatttatgacaaactcacagccagtatcatactgaatgggcaaaaaactggaagcattmcgtttgaaaactggcacaagaaagggatgccctctctcaccactcctattcaacatagtgttggaagttctggccagggcaatcaggcaggagaaagaaataaagggtattcaattaagaaaagaggaagtcaaattgtccctgtttgcagatgacatgattgtatatttagaaaaccccattgtctcaaccca

SEQ ID NO: 888170 - DNA, 614 bp, Homo sapiens
taacaaggcagcacctcaaagtcttgttcactagctctatcagtagaaacatgataggtcaactatgtaaaatcctcaagacttcagagtggcttatttctattcctttgggagttggagataatcggaacagtttttggagatataggtagattggcyctgattaccacctgcctgtaggaaaatggtaaataaacagaattggactggcctactgcactgacaactagtccataaaaacagaagaaacctggagaaaggctgtgaacatttagagagctctgttatctttcctctaaggagaaagaatttttctgttattgggcagtatccattttaaatgcacacatctgaaaatctgacataaaacagataagcattctacaaaaactcacaattcttctgtcaattaaatattgcaaagggacagaattgatcatttttattgcctaggaatttaacagtaatgcaatatatgagccaatgaatttgagtgctttagttgaagcctttactgacatggttatgcctttagatccacagaagaaatacacaccagaggataccatcatacattccagactatttgtaacaaaaccctttgctggtaccta

SEQ ID NO: 888171 - DNA, 614 bp, Homo sapiens
taacaaggcagcacctcaaagtcttgttcactagctctatcagtagaaacatgataggtcaactatgtaaaatcctcaagacttcagagtggcttatttctattcctttgggagttggagataatcggaacagtttttggagatataggtagattggccctgattaccacctgcctgtaggaaaatggtaaataaacaraattggactggcctactgcactgacaactagtccataaaaacagaagaaacctggagaaaggctgtgaacatttagagagctctgttatctttcctctaaggagaaagaatttttctgttattgggcagtatccattttaaatgcacacatctgaaaatctgacataaaacagataagcattctacaaaaactcacaattcttctgtcaattaaatattgcaaagggacagaattgatcatttttattgcctaggaatttaacagtaatgcaatatatgagccaatgaatttgagtgctttagttgaagcctttactgacatggttatgcctttagatccacagaagaaatacacaccagaggataccatcatacattccagactatttgtaacaaaaccctttgctggtaccta

SEQ ID NO: 888172 - DNA, 614 bp, Homo sapiens
taacaaggcagcacctcaaagtcttgttcactagctctatcagtagaaacatgataggtcaactatgtaaaatcctcaagacttcagagtggcttatttctattcctttgggagttggagataatcggaacagtttttggagatataggtagattggccctgattaccacctgcctgtaggaaaatggtaaataaacagaattggactggcctactgcactgacaactagtccataaaaacagaagaaacctggagaaaggctgtgaacatttagagagctctgttatctttcctctaaggagaaagaatttttctgttattgggcagtatccattttaaatgcacacatctgaaaatctgacatmaaacagataagcattctacaaaaactcacaattcttctgtcaattaaatattgcaaagggacagaattgatcatttttattgcctaggaatttaacagtaatgcaatatatgagccaatgaatttgagtgctttagttgaagcctttactgacatggttatgcctttagatccacagaagaaatacacaccagaggataccatcatacattccagactatttgtaacaaaaccctttgctggtaccta

SEQ ID NO: 888173 - DNA, 614 bp, Homo sapiens
taacaaggcagcacctcaaagtcttgttcactagctctatcagtagaaacatgataggtcaactatgtaaaatcctcaagacttcagagtggcttatttctattcctttgggagttggagataatcggaacagtttttggagatataggtagattggccctgattaccacctgcctgtaggaaaatggtaaataaacagaattggactggcctactgcactgacaactagtccataaaaacagaagaaacctggagaaaggctgtgaacatttagagagctctgttatctttcctctaaggagaaagaatttttctgttattgggcagtatccattttaaatgcacacatctgaaaatctgacataraacagataagcattctacaaaaactcacaattcttctgtcaattaaatattgcaaagggacagaattgatcatttttattgcctaggaatttaacagtaatgcaatatatgagccaatgaatttgagtgctttagttgaagcctttactgacatggttatgcctttagatccacagaagaaatacacaccagaggataccatcatacattccagactatttgtaacaaaaccctttgctggtaccta

SEQ ID NO: 888174 - DNA, 583 bp, Homo sapiens
gagagtcactgctaccagagtctatttgggattgtagagtaaggatagattttgttattttttgcgaactgtctgagaaatcctttgagagcatgtggtagtaggataatacatgttacactgttaacttttagcaaactttactattgttgaaaaccttgtaagtttgggatttcaattattctttgctattaataagacctcgttcagtccatattaacttagaattggtatagatggctccttcctgattctgtaagtactwtaaggtttggctgagtgcaaacaactggcacgtttgagcagaccagttattaggcaattttcctaaatctgcttctacaagagtttctttatcacttgctgaatacccattgtgtctttttcccttaatcacctgggaggaaccatctatcatccacttctgaagggagtacttcctaggtctgataggacctttgtatagtaattaagatttagatcccctgttaggaaacctgctgggttaaggatttttgataggaaggctacggttttgataggaaggctatgggttgtcagtggcctcagtgtttttgggcta

SEQ ID NO: 888175 - DNA, 626 bp, Homo sapiens
ttcgaaacgggtatatcttcacataaaatctagacagaagccttctcagaaacttctctgtgatgattgcatgcaactcacagagttgaacattccttttgatagagcagttttgaaactctctttttgtagaatccgcaagtggatatgtggacctctgtgaagatttctttggaaacgggaatatcttcacataaaaagtaaaccgaagcattctcagaaacttctttgtgaggcttgtgttcaactcccagagtttaacattgcttttcagagagcagttttgaaacattcctttcgtagagtctgcaagtggacatttggagcgctttcaggcctgatatcttcacataaaatctagagagaagcattgtcagaaacttctttggattgattgcattcaactcacggagctgaagattccttttgatacagcagtttggaatcactctttcggtggaatctgcaagyggatatttggacctctttgaagatttcgatggaaaaaggataatcttcccataaaagctaaacggaagcattctcagaaacttctttgtgatgtttgcattcaactcacagagttgtactttccttttcatagagcagctatgaaaccctctctt

SEQ ID NO: 888176 - DNA, 598 bp, Homo sapiens
tcacctcccaccaggcccctactccaatactggattacaatttgacatgagatttgggtggggacacagagccaaaccatatcattcatctgataagcaaagtagattgaatatactaaggatggtacaactggggttggtactaacagctttgattacaccctgttgtgatatgaaggagctctctgcagttctactgaagtagaagaacctcagcttccatgttttgcagtcatctgataagcagagtagattgaatttactaagtgcaatgcacctgggggttggcactaacggccccaattccgtcctgctgtgatatgaggaagctctctccagttctattgagggagaggaayctcagcttccacattttctgaatggtcctattgccttcaagttccagcaggtgtttgacactcttttccttttgctacctctgtttcatttctctctctgtttttccctacttgccattcttggtgcttcttttaatctctgccattgtagagattggctgcttactgatttctttcctcttctctcttttttgtcttttttcttctttgctgtcttctctttcccttttttgccactt

SEQ ID NO: 888177 - DNA, 602 bp, Homo sapiens
ttaactagccagaaatacagtataactgtcacagatagtgatctgtgggtagcaatttctcaagggagcctcatccttgagatagactaagactcttaaaagaaagggacttgtaggaaaacacttggtaaattgtagagtgctttataaatgaaataatttgttatgtcccacttaagactttaaaatacaacaaataatcaaagaatgtaatttttttacacattctttatagcattttacacagggctgatttcaaccgttgtctgcatagggctagtttttttttttttttttccctgtggaaaagtagaaaaacactttaaatctcagccrttattctgggttactgggccctttcttgagttgaacaaattttatagtcttttttaggacatgattttttgaaacaaatgataaatgtcattttttttacctgtacatacttatttaatgaggtaatagcagaatcttctattgacaagaccttttaataagtagaaccacttttacatttgaagtagttttaaatatgtaacctatattgcttcaattttaaagtaaatttaaacttctctgattttagctaatttagagtggaa

SEQ ID NO: 888178 - DNA, 589 bp, Homo sapiens
aaaaattagccaggtgtggtggtgcgcacctgtgatcccagctactcaggagactgaggtgggaggatcagctaagtctgggaagttaaggctgcagtgagccatgattatgccaccgcactccagcctgcatgaytagagtgagtgagaccctgtctcaaaaaaaaaaaaaaaaaaaaaaaaaaaagaaataggctgtaatgagtgagccttgtaatcgatttgtaccataatcttggattttctccttttttccccccttctttgttcttgcaacccacccctgctagctgggttttatacttgttgatatacacagaatttctgattttaaaaaccatttgcagatgggaggagtacagaaagaaaacggggtggggctgggtggtgaagtgtaaagaggcagtggaagaaagactgattccttggccctatattttaaagagcttcataagatgaagaatgaattccccaacaggagagactgagcagtggttttccttcctgcagcgagatgttatataatgttcctgaaaaggcctgtgcgaatctcatctctggcagtccatgagcaggaggactttctctg

SEQ ID NO: 888179 - DNA, 605 bp, Homo sapiens
ctgctttacattcccaccagcagtgtagaaatgttcccttttcactgcatccatgccaacatctattataaaaaatgctgagcatcactaatgatggaggaaatgcaaatcaaaaccacaatgcaataccatcttactcctgcaagaatggtcataattgagcaattacttttgaaggaagaccccaaagcagaaacacaagaacacagaggagaagtgagtagtcgatgaaaaatrtgaaacgtgctgaaattcaggaaatatgtaattccagaatgatgacacaactgaaagaagcatgaagaagagagatgtgataaaaacacagtgatggaaataatgaacataagagaaaagaaaaggagatcccagatacatgcaattgaagttgtagatgagaaacacaatcaatgaaacaaaacccaaatgtttaaagatatgattcaggaaaaacttctgataataaagtatgtgactctacacactgcaaaggcactgtgtgtcccagggaaaagtgacccagatcatcatcaacaaggaataccctagcgaaattattgaactctaagaaatgaaggaagaattctttgggcagtaaaaggatg

SEQ ID NO: 888180 - DNA, 662 bp, Homo sapiens
tacttttattgtgtagtagtattctagtttttctgtccttgtgaatatttggtcagtgttttaaattgtaaccactttaataggtatgtagtagtatctcaatgtgattaatttttattttcctagtgacaaatgatgttgaatatctttttatgtgcttatttgctatccacacatgtttgctgatgaagtgtctacttaaatcttttgtccattttttaaatgatttttttcaaattacrtcttgagagttatttacatattgtagatacacatcctttatcagataagtaatttgcaagtcactttgtttgtgatttacaaacattatcttttggtctgtggcttgtcttttttactttcttaatagtgtttttcgaagaggggaagtttttaattttcataaaatccaatgtaccactttttgttttttggattgtgactttggtattgtatttaggaattctttttctaaaataccatcacagagattttcttttatcttttcttcttgaagttctatagctttcggtttaacatttaggtatattattcattttgagttactttttcaatattgtggataggagtacttacttggtatatggatatccaattgttctggcaccattttttgaaaagactattctccaatgaaaatt

SEQ ID NO: 888181 - DNA, 665 bp, Homo sapiens
ttagagagtgattttgatatcatagtataggatggtgcctggaaatcattttgaagggtattttttgttgcctttctggcatgtattctctcttccccttactattttttttaagccaagaatatcttttattattactattattttattttattttactttaagttccaggatgcatgggcagaatgtgcaggtttgttacataggtatacatatgccatggtggtttgctgcacctatcaaactgtcatccaggatttaagcacctcatgcattaggtgtttgtcctaawgcactccctcccgttgctccccctacaacggtccccggtgtgtgttgttccccttcctgtgtccatgtgttctcattgttcaactcccacttatgagtgagaacatgtggtgtttggttttctgttcttgtgttagtttgctgaggatgatggcttccagcttcatccatgtccctacaaaggacatgatctcattcttttttatggctgcatagtattccatggcgtatatgcaccacattttgtttatccagtctatcattgatgggcatttgggttggttctgtgtctttgctattgtaaacagtgctgcaattaacatatgtgtacatgtgtctttatagtggaaggatttatattcctttgggtatac

SEQ ID NO: 888182 - DNA, 542 bp, Homo sapiens
ctatcttctctctggtaaagtcctttagaaatctgcacttgtacatttcccccattttttaatgcttttgggactgggatggagggaagataaaccactaaggccagacatggaggagggcaaacccaagatcacccgatggacctctgggagaaagacactcaccttgatgtggtacactaagcgccagaaactggagtctgaggatcggtatcgtccatcagggtagagctgccacatgataggcagcaggcttgggcctatctgggtgggggtcataggcctccccaggacgacgtcttcccgacgcaagagcacccgtaactgtaacctatcctttatctgaggagaagaaaaggacagggcatactttcaggttccgcttgccakggcttctccaggcgcagaaaaccggaatccctcctgccagccatccacccatctgggcaggggtccgagtgtgaaatgatggtcatcactgttccctgaagctcacttccttaggccatgcatgctcctctcagggactctggctgggccag

SEQ ID NO: 888183 - DNA, 584 bp, Homo sapiens
gcctgtaaaaccaaaagcaacttagttacttcctagatacaatgggggtacaggcattgggtaatacagccattcccaatgggagaaattggcccccataaaggggctacagcccctatgcaagtgtgaaatccagcggggcagtcaaattttaaggctccaaaatgatctcctttgactccatgtctcacatccaggtcatgctgatgcaagaggtgggttgccatggccttgggcagctccacccttgtggcttagcagggtagagtctccctgccagctgccctcatgggctggtgttgagtgtctgtggcttttcctggtgcatggtgcaagctgtaggtggatctaccattctggggtctaaaggatggcggcactcttctcatagctccaccaggtagtgtcccagtagggactctrtgtgggggctcccaccccacatttcctgtccacactaccctagcagaggttctccatgaggacactgcccctatagcaaacttctacctggacatccaggaatttccatacatcttctgaaatctaagtggaggttcccaaacctcaattattgacttttg

SEQ ID NO: 888184 - DNA, 604 bp, Homo sapiens
tttatttatttatgtaaatagatctcagattttttattattgtcataaaatatacataacataatttaccattttaacaatttttacgtgtacaattcagtggcattaagtacattccttaggtttggcaacactaagtgaaaaattaataactattatatattttatttattgtcaacaatcttttaaaacacttggagtcatcgctcctattttctcaattcataaaatctatttagtttattagataccttaagatttttttaaaaaagcaacgtcaatttatgtcaaaggcaggaactcaggatgttccatatttttatatatactttaatcatggataagtcattgagcctttctggttctgtacttcctcacttgtaatttagaatattaaactacrtaatcagtaaaattctgtttatacacaaacagggcatgtgatcatgcagtcatacagagccccaagcttaccagagcactgtgcttagatttaagccatcctaaaattcttagtaagttttgaataagtagtttcaaatttttattttccactgggctctgtatttaattgtataattggctctgtgtgaaaataactggt

SEQ ID NO: 888185 - DNA, 665 bp, Homo sapiens
tttcactgatagtttgactttgggtttatgaatttcagagtttggtgaaaacagatctcttcttcagaaacttcaaggaaataaattatcaagtagcagagctcaaaatgagtcatcttcagatctttaaaactagagttactgtttctcttggagaccttggattttacttcaaccaatactttcatacaaactcacttttcccattaggctattttgaagtgcttagcagctctatttggcagtatagcctgaggaatgtttgagataaagtgacattgctaaagcattctgggatgaaatagtgatgtagatctgacctgaagatacattaaacttgaaattttgttttcctttcatctgaatagcatggagttattcattctttgaaataataacactttataacattacttctatcatttatggaattaaaaccatcctttaaaatgtcattatgttgctttttatagctgtaacacttttcatgggatcctttcttattttcaaayaggagtttaccttggcaatctgtacttacgtgctgactgtgacactgagaagctactatttttgtggattttactgaaactttgttacatgattacaataaaatagaacacaaaataacatggcgccatacttgtacttcatcaaatggaagt

SEQ ID NO: 888186 - DNA, 565 bp, Homo sapiens
aagcactgatgttaggagcagtttagggggatcagaatcttgcagcctccagctgcgtgactcctaaaccataatttctaatcttctaagagaagataagtaaattgggtgtgttctgtgagatacctagattttttgcataacggcagtttccagactgaagcacattatttgggaacctgaggacagtccagtagtcttgctgagaagaggaaagaggaataagaaataagagaggccaagataacagaaatctgtgaattcaagtgtcagaggtaagcagaaaaaacccagtgaaagagttccaaaaatgtacaaatgtaattcamtgaaatatttgaagagaatattaatctgaacataaatagagtaaaactctgttaggtcaggcatcgaaacagtgcttggtagtgacttgtttgattattttagagagttcatgcagacctggtgatgtggtttggctgtgtctgcacccaaatctcatcttgaattgtgccataatttccatgtgtcatgagagggaccaggtaggaggtaagtgaatcagggggtgagtctttct

SEQ ID NO: 888187 - DNA, 605 bp, Homo sapiens
aatatctgaatcaatcaagtggaagagagaatataggagatggaagactatctcgctgaaataaggccggcagacaagattagagaaaaaagaatggaaaggaatgaacgaaacctctgagaaatatgggactatgtaaaaagaccaaacctatgactgattggaatacctgaaagagacagggagaatrgaaacaagttagaaaatgcacttcagaatattatccaggagaacttcccagacctagcaggagagaataacaataaaattcaggaaatttagagaaccccactaagatactccataagaagatcaagcccaagacttataatcatcagattctccaaggtcaaaatggaggaaaaaatgttagaggcagccagagagaaagactacatcacctacaaaaggaagcccattggactaacagtggatctttcagaagaaaccctataagccagaagagagtggaggccaatgttcaacattcttaaagaaaagacttttcaacccaaaatttcatatccagccaaactaagtcataagtgaagaagaaataaaatcctttcaagacaagtaaatgctgagagaattcataaccaaca

SEQ ID NO: 888188 - DNA, 578 bp, Homo sapiens
gaggaaagatggaatattatggcttcatttcatgtactggtttttcagtgctcattggagtctaaagagagatatagagtaggtaattcaatatgtaaatatggagtcagtaaggggagagtgataatttgagttgcagctaaagttggtttttcaaacaataagaatagttggcattcagctgggaaggtgtatagatgcagatttgtgattagtgggtcgtggcatattggtatgctgcaaaaggcttcaaagtggccttgaatatatttcccattatttttcatgaaggcctggaagagcttattgtktcaggggttaggacactgtgtacctcaacgctttcacaccagtcccctacaatacaacactaatatatagacttcaggcactttatcagacagaagcaattgtaatgaaacaattaaagaaatgatgtcctagaagccaagaaaaaagatttatcagttgaatgagctaaaatatctaatttccagcaatgccaagtgattgcttggcatggtagaagctatctcaattataaacctagagatcagatgtaaatacattgaggaggt

SEQ ID NO: 888189 - DNA, 543 bp, Homo sapiens
aaaggaatgtgggagtcattgaaaagggaagaatgcaggatgtttcagaagattctgccttgaatgaagacagatgaatagaggagggtgagaaggttgagagctagcgagtgaattttcctgttcagggggcagttgaaagaaatgcctctgggctgggtgtggctcattcctgtaatcccaacactttgggaggctgagggcaggtggatcacttgaggtccagagttcaagaccggcctgggaaacatagtgagaccccatctttacaaaagtamaaaaattagccaagcatggtggtgtgcacctgtagccccagctagttgggaggctgaagtggtaagatcagttgtaacccatcagggtgacactgaagggcagtggtgaaagaaaattctgaagctgggtgcggtggctcacgcctgtaatcccagcaccctgggaagctgaggcaggcagatcacttgaggccaggagttcgagaccagcctggccaacatggcaaaactcagtctttactacaaatacaaaaattagctgggc

SEQ ID NO: 888190 - DNA, 634 bp, Homo sapiens
ctgaaatgtgaatgacaaagctataaagttaattggaaaaaatataggagaatatttttgtgtactagaagcagtaaataatttccaaaagaaacctttaaaagcataaaacataaacctcctactgcccaaaaaaagatgaatctgattgcatcaaagttgaaagacatcatggacaaagttaatcaacagtgactgtgggagaagatatttgcaatatctgaaattaacaagcaatggtgttccaggaactcctgcaaatatgtacaagaaaaagagagaaatttgaatagcatgaataagcaatgtacagaagwggaaaccccaaaggctaacaagtaaaggaagagattttccaattcattagcatccagagaaatgttaattatataacactgagatgccaatttacacctattacactagcaaacatggaaaagctggatagggccaggttggaagagagatggaaatgcaggaaccctcgtgcactgatggtggaagtgtaggtgagtgcagcctttctggagaaagtctcaggacttagtcaaatcatgtatatacatactttctggtgcagaaatccactctggggcatatacccaaagaaatctcacgaagatccagaagagga

SEQ ID NO: 888191 - DNA, 615 bp, Homo sapiens
atgtatacctatgtaacctgcatgttctgcacatgtatgccagaacttaaagtataattttaaaaaattaaaaataaaggtgaaaatccatatgattatttcaatagatatagacaaagcatttgaggaaatttaacatgaaattctcagcaaagtagaactagaaaaacttcctcaatctcataaatggcatctacccacatatacatgtatgtatgtttaacctgtcratctattaaaatgagggacccaaagaccaggcagtagccatagcttcatggtcagtggaactcctgccctaagaaacagaacctttaaactagcacagcctaagtttatgggaaaagaaagattagtgggactctggaaataacggtgagaaaagccaattctactttcacccttggttactggacctgtgtataatagctactggggatagagaacaatttgttaggcaatagcttcaatatatgtaccacaacttggacaagagcaccctaaccctgaatggtgtcattcctaaactggtgccttagatgagtcttcgtttttttgagacagggtctcattctgttgcccaggctggagggcagtggtgcaatcacagctcac

SEQ ID NO: 888192 - DNA, 606 bp, Homo sapiens
tgtagacaccttttctcaaccagaagaagaaatgtagcagtcattcttttttttttttttttttttttttttttgagatggagtctcactctgtcgcccaggctggagtgcagtggcgcggtctcggctcactgcaacctctgcctcccgggtgcattccattctcctgcctcagcctcccttagtagctgaaactacaggkgcccgccaccacgcctggctaattttttgtatttttagtagagacggggtttcactgtgttagccaggatggtctcgatctggtgacctcatgatctgcccgcctcggcctcccaaagtgctgggattacaggcttgagccactgtgcccggccctagtcattcttagaagtagtggtgcatgatgcagcattctcttggtttttactctgaaaatggtgctaactccttcctttggtcaccttttcagttttcaccccaatctttgcagatgaactgagacacaatttaggtacagaggagcaaggagctccaaagacacgaacctgccccgcctctgacagtgccacagtgctgatgggtttactctcagtttctgtgagacgtgctcatacgtgtgtaagc

SEQ ID NO: 888193 - DNA, 616 bp, Homo sapiens
aaaactctggggttgagaaaagagattgtgagttgggaatcatctacctgtagaagatttggtcttgcttgagccctccactgtccagggtacctgtggcctgagctactgccagcaaggcggcagagctgaaggtgagagtgtacatggaaatgagcccacagactcagactgcaggtwtaatacatctacacagagcaagggatggggccttcccagcaagaggtgataatttccttggttttcaaatccttatgaatgcacccagcttctagttaccaccttctaatcaagtgaggagcccatcaagacctttgagaaactcccttttacattagtaggagattaacaaattttttattgataaattacatatatacatattccctatgtagagacaaattatacatatatttattccctatatatagtccatacattatatatatattaatatatatttatgggataaaaagtgatattctgattttgtaaccgaaaattgtaataccacttagtgggagatttttgtaccttccagctctctctcagcattctggagtttcacgccacatgcctgcctacccctggatgtgagtaactcgtaatgaaccca

SEQ ID NO: 888194 - DNA, 701 bp, Homo sapiens
ctggtgctggggatgcagcaacaggacagacaagtttcctgttcacagggagctctgctggtaaccagcaaggtgcaatgaagagggagaggtgacatgagagatgtggttgtagggacagcaagcacctagaaggagtgtgccgttccacctcggagggtgggtcctgggaggctttgcagaggtggtgacttgggaatgatcacgagagctgagggaaggtaaggccactcaaggtcaaagagcagaactagtagacacagaggcagtcacactgctacggagcaaatgccagtggtttcttgaatgtaggcactactggacgcgggacggaggatggagaccattatgcccaaataggaagtttggactttactccacaggtagtagttagtaattgtcagtaggagaagagatgtgttttaggaagaccactccactgtgtggtaggcagaatattctgcccaccmccgccaagatgaacgtaacctaattcctggaacccgtgactatgtgactatgttgcattacatgacaaaaggtactttgcacacatgctcacattaaagacctcgagatagggagatccttttggataatctgggtggatcaagtataatcacgatggtccttaaactggcagagtgaggcacaagatgacagctagagatgacacgaaaaacggtcagggagatgcaacg

SEQ ID NO: 888195 - DNA, 567 bp, Homo sapiens
taagtgtacacttcagtggcattaagtactctcatacggtgtgaccatgaccaccatctagttccagaactttttcatcaccccacatggaaaccccatgcccaataagcagccacttcccagaatcctttcccccagctcttaagcagccactttctgtctcttggatttgtctattccgaacgtttcatagaaatggaatcgtacagtatgtggtcttttgtgactgtcctccttcgcttaggaaaatgttttcaaggttcattcatgttgtgtcatgtatcagatgctccacatcctacttgttaggaaaatgaaaatctaaaccacaggaaataccatttcacrcacattagcatggccacaatgaagactacagaaaataacaagtgttgacgagaatgtggagtgactggagccctcatacatggctggtgggaatataaaatggtacagctattctggaaagcagtttggcagtttcccatacaacacagcatttgcactcctaggtatatattcaaaggaattgaaaccaggtgttcaaacaaaaacttgtccagtaat

SEQ ID NO: 888196 - DNA, 621 bp, Homo sapiens
ccttgtcttgttccagatcttagaggaaatgctttcagtttttcctcatttagtatgaaactagatgtggtctctattctgttccattggtctatatgtcagttcttgtaccaatactacgctgtttaggttactgtagacttgtggtgtagtttgaagttcagtagcgtgatgtctccagctttgttttttgcttaggattgtcttggytatttgggctctttcttggttccatatgagctttaaaatagtttttttctaattccgtgaaccatgtcaatggtagtttaatgggaatagaattgaatctataaattactttgggcagtatagtcatttttatgatattgattcttcatatccatgagcatgggatgtttctccacttgtttgtataagaccgcacagctacaaccattggatctttgaaaaacttgacaaaaacaagcaatggggaaaggcctttctatttaataaatggtgctgggagtgctgactagccataggcagaaaactgaaactaatgtgaagattccttaaagaactaaaagtggaactaacatttgatccagcaatcccactactgggtatctacccagagaaaaagaagtcattacatga

SEQ ID NO: 888197 - DNA, 678 bp, Homo sapiens
ggaaaccctatctcagacttaaacaagttatgttttgctattgccccctacattttctcctagaagcctacctgcacagttgacctcagtgggcagcctttccggtccttatagatttcatggcaccttattcctagaattccctctccaaaataatctagtcacaacattccactcctggggaaagccactccattcctccttttccaaragtccagcaaaagcctccactggggtttgatggaaaggtgtgtaatctatcacacatcctatattgttccctttttccagctcccagccctgaaggatgcagggcccggcggggccccctggccactgagggaacaggagtcacccagtcgccgtgttctgacagcttgtcacattatttttccctgtgggggctctgctccctccatctaaccttcttctctgtcccctgagaccagaggcctctatacaaggctcctgaggcgaggcaaagcaaagcaagattgatgccttacgaacggccatgcccgggagggctcgcggttcaatgcatagagcagcccattcttccccatttcaggttcccacactggacaccaaagcaggagctcagagccagggcagcaagaattcaacctttgttcatcctccgaacacaaataatccaccacattccccaatctctcc

SEQ ID NO: 888198 - DNA, 638 bp, Homo sapiens
actttatcccttatctcaagacgtgctagtgccttaaacactgctaaacacttgattaccagctgtggccattccattctaaaagatacaaaaatgggggaagctgggtgagtgtgtctctgactaaagcactcctctcagtaggcagtaagggccacaggcatagctgtggagaagttcaacatgtaaacgggcctcagctacaaccagacatctggtttaccctgcttcctcagcacagacactaaggagagaaagctaagagaacacaaaggctaccatctgccaagagagatggagaatactgaaaaaagcatattttggtttctatatatttgcctggtcatttaaaattgtaccctatcaaaaayttcataagacacgtgactaagatcactctttgccaaaattactttcattattgaaccattttctggcatcatgagctaaaaacgatcactagcatctggatgccaacccagtggccttatccactaagaataaatactggggtagttaaattctggatggctcagtttcctcaccccacccctacagctttacttctaacttggaagttcacagctaatattttataaggaatgacaagagactattcttgctgtctttaaacaagc

SEQ ID NO: 888199 - DNA, 638 bp, Homo sapiens
actttatcccttatctcaagacgtgctagtgccttaaacactgctaaacacttgattaccagctgtggccattccattctaaaagatacaaaaatgggggaagctgggtgagtgtgtctctgactaaagcactcctctcagtaggcagtaagggccacaggcatagctgtggagaagttcaacatgtaaacgggcctcagctacaaccagacatctggtttaccctgcttcctcagcacagacactaaggagagaaagctaagagaacacaaaggctaccatctgccaagagagatggagaatactgaaaaaagcatattttggtttctatatatttgcctggtcatttaaaattgtaccctatcaaaaacttcataagacacgtgrctaagatcactctttgccaaaattactttcattattgaaccattttctggcatcatgagctaaaaacgatcactagcatctggatgccaacccagtggccttatccactaagaataaatactggggtagttaaattctggatggctcagtttcctcaccccacccctacagctttacttctaacttggaagttcacagctaatattttataaggaatgacaagagactattcttgctgtctttaaacaagc

SEQ ID NO: 888200 - DNA, 592 bp, Homo sapiens
tttgcttcaacctcagagtgtgctaatgtaaaattaagtgagcactgaaagcaagctgcacttttttttttctaaatggaaaaggggttaagaagtatttatcctttgtaattaaaaaaaaaacactgttatgaaccagctctttataaccctacacaattctgacaaagcagcttcagatttaatagcaattaattgagactcctagggcatatcttccgatcactgacatgaatacactgtctgaagactgacagaatgaaagtacaaaagatttaggggtgccttcaaagtatataaaaaaaggaacatttttggaaaaatgcaaggagtaatagaataagatttggctttatsacagtacagaagtgaatctttgaagaaagacttgaggcacccaggtagaacaacccttagaataaagataattacatttttttaaagcttggggtaggttaactgaaacagaagaattagatatattagaaacccaagataataatactttatctcaatgtttgggatatcaattttggtaagggctcaaaggccaaagataaatagaaaagtgtcatcatttcatttatgtatg

SEQ ID NO: 888201 - DNA, 584 bp, Homo sapiens
gggcatccttgtcttgtgctggttttcaaaggaaatgcttccagtttttgcccattcactatgatattggctgtgggtttgtcatagatagctcttattattttgagatatgttccatcaatacctagtttattgaaagtttttagcatgaagcggtgttaaattttattgaaggccttttctgcctctattgagataatcatgtgtttttgtcattggttctgtttaggtaatggattatgttgattgatttgtgtatgttgtaccagccttgtatcccagggatgaagctgacttgatygttgtggataagctttttgatatgctgctgcattcagtttgccagtattttattgaggatttttgcatcgatgttcatcagggatattggcctgaaattttctttttttgttgtgtctctgccaggttttagtatcaggatgatgctggtctcataaaatgagttagagaggagtccctctttttgtattgtttggaatagttacagaaagaatggtaccagctcctctttgtacctctggtagaatttggctgtgaatccgtctggtcctgggctttttttg

SEQ ID NO: 888202 - DNA, 591 bp, Homo sapiens
aacaagagggaaaaacacaagtgcctgaatgactttgtagacaaccaattatatgagaaaaataaacttctttctcatttaaactactgcatttggtctatttgttatagatctttgccacccacctaacaaatacaaagaataactatgtttccagtctaaaaggaatcatattttttagcttatactaaatgtctttctcaagaataattgcttcctctgtcacgtgcgtgcgtgtgtgtgtgttgcttcctctgtcacgtgcgtgcrtgtgtgtgtgtgtgtgtgtgtgtgtgagagagagagagagagacagacagacagaaagataggtagggagagaaaagacccaataaaagcctataacaccctagaacgaattattccccaaattcaacaatttacccaaacagaggacaaaagaaaaaataaattttaggggaagaccaaatgacacaagaaaactgggtattctttcccctaccatatgaactcctaatacaagaacctaacccaaactaccttttgaatatatatattcaaagtgtgtgtgtgtgtgtttgtgtgtgtcattcagaaattttatatcta

SEQ ID NO: 888203 - DNA, 595 bp, Homo sapiens
ccatggctaaaagggaccaaggtacagcatgagccattgcttcagagggtgcaggccccaagccttggcagcttccatgtggtgttgacactgcagatgcacagaagtcaagaactgaggtttgggaacctccacytagacttcagaggatgtatggaaatgcctggatgcccaggcagaaatttgctgcaggggcagggtcctggtggaaaacctctgcttgggcagtgaggaagggaaatgtggggttggagcccccagagtccctactggggtactgcctagcagagctgtgagaagaaggtcacagtcctccaaaccccagaatggtatatctaccgatagcttgcaccatgcacctggaaaaaccacagacactcaatgccagactgtgaaagcaatcgagagggaggctgtaccctgcaaagctacagaagcagagctgcccaagaccatgggaacccccttcttgcatcagcatgacctggatgtaagacatggagtaaaaggagagcattttggagctttaagatttgactgcaccgctggatttcagacttgcatagggcctttacccccttcgttttggtcaatt

SEQ ID NO: 888204 - DNA, 589 bp, Homo sapiens
caaaatcaattgcaacaaaagcaaaaattgacaaatgggagctaatcaagctaaagagcttctgcatagcaaaggcaactaccatcagagtgaacaggtaacttacaaacaaccccattaaaaagtgggcaagggacatgaacagacacttctcaaaaagacattcatgtggccaaaaaatatatgaacaaaagctcaacasatttatcattagagaagtgcaaataaaagcctcaatgagataccatctcacaccagtcaggatggcgattattaaaaagtgaagaaacaacagatgctggcaaggttgcggggaacctcgttggtgggaatgtaaattagttcaaccattgtggaagacagtgtggcgtttcctcaaagatctagaaccagaactaccatttgacctagcaatcctattactgggtatatacccaaaggattgttaatcattttattacaaagatacacgcacatgtatgttcactgcagcactattcacagtagcaaatacatagaatcaacccaactgtccatcaatgatagactgcataaagaaattgtatacacaacggaatgctatttagtc

SEQ ID NO: 888205 - DNA, 548 bp, Homo sapiens
ttttacatttgtaagatctggcatttcttctccatgacctagttacttgtcctgagtataagtaagtttgctgtctgtttgcttaaatttcagacattttacaagcaaaatttggtgaaaagtcattttaatttcttctccacttaccattctctgccttgaggtgctttattaccaggagtacaaaagctagttcagggaaacagtaacagtattataagaattgctattgtttattgcaggtattactatattatgctagatacttcacagattttttttcttttatcactcccttcttattcagatawacaaggaattgaagctcagagagatgtgcaatttcctgtacttatacagctaataagtgccagggctcaaatataaacccagacttccagctcagtgctcttcatatgttccacacgacatattctgaagggactgtaaaggcaaaattatgtataaaatataattgaagcagacgtctccaaatttttggtgagcccaaagatttccagtcagaggataaggcctggtcccaggct

SEQ ID NO: 888206 - DNA, 625 bp, Homo sapiens
tattcacttgacatgaacaaactgctttgtgtttgggattcaggtaaaaggtgatttttgcattttctagtaatagtttagaaatcttttcatgtcagcatcttgaaatctacctcattatttatttatttatttatttatttgggagacagagtctcgctctgtctcacccaggctggagtgcagtggtgcgatyatggctcactgcagcctcaacctcccagactcaagcgatcatcccaccttagcctctggagtagctaggaccacaggtgcatgctaccactcccggctaatttttgtattttttgtagagatgagttttgccatgttgcctaggctggtctcgaacttctgggctcaaacaatccacctgccttggcctcctaaagtgctggaattataagcatgagccactgtgcccagcctaatttttttcataatttactttttctctggagcatagattcaaaatgccctgaatatatgctctctacttcattcttttaataactatacagtttgctaatgttacgctggagtatcccagtgcttaaaaatataatacacttggctgggtgcagtggctcacgcccgtaatcccagcactttggtaggccaaggt

SEQ ID NO: 888207 - DNA, 625 bp, Homo sapiens
tattcacttgacatgaacaaactgctttgtgtttgggattcaggtaaaaggtgatttttgcattttctagtaatagtttagaaatcttttcatgtcagcatcttgaaatctacctcattatttatttatttatttatttatttgggagacagagtctcgctctgtctcacccaggctggagtgcagtggtgcgatcatggctcactgcagcctcaacctcccagactcaagcgatcmtcccaccttagcctctggagtagctaggaccacaggtgcatgctaccactcccggctaatttttgtattttttgtagagatgagttttgccatgttgcctaggctggtctcgaacttctgggctcaaacaatccacctgccttggcctcctaaagtgctggaattataagcatgagccactgtgcccagcctaatttttttcataatttactttttctctggagcatagattcaaaatgccctgaatatatgctctctacttcattcttttaataactatacagtttgctaatgttacgctggagtatcccagtgcttaaaaatataatacacttggctgggtgcagtggctcacgcccgtaatcccagcactttggtaggccaaggt

SEQ ID NO: 888208 - DNA, 706 bp, Homo sapiens
gaaaactaaccctatacttttgtcttggacaattgttcttcatttgctaattcagtgtttgtaatgactttatagaatataactaccataaataataataatgaactctataaatattttatatataaccatctgtatctatattaaattaaacatgagttctttaccaggatcattctagtctactcccttgtttatctgtaaactcccattcctacagtgagaaaccaccattctttatttatttacttactttactttattatttgcttaattgttcaattcctgtccacatgtttagcagtatcagaactgatcattcatatcctcaggagaaataactttatcaactatagtacaatgcttatatacagcttatatgcttgtaaaccatattycccttttaggtctctctgcctgtaacgggagcggctgctttggagacctctgacatgccctggatacatttccccgttgtcttggggattaacattcagctttttgttacttatgcaaatttttgcagccagctttagtctctcctcagaaactaagattttcttttctatcacattgtcaggctgcaaattttctgaacttttatgctctgcttcccttataaaactgaatgcctttaacagcacccaggtaacctcttgaatgctttgctggttagaaatttcttccaccagataccctaaatcat

SEQ ID NO: 888209 - DNA, 626 bp, Homo sapiens
tactcccttgtttatctgtaaactcccattcctacagtgagaaaccaccattctttatttatttacttactttactttattatttgcttaattgttcaattcctgtccacatgtttagcagtatcagaactgatcattcatatcctcaggagaaataactttatcaactatagtacaatgcttatatacagcttatatgcttgtaaaccatattccccttttaggtctctctgcctgtaacgggagcggctgctttggagacctctgacatgccctggatacatttccccrttgtcttggggattaacattcagctttttgttacttatgcaaatttttgcagccagctttagtctctcctcagaaactaagattttcttttctatcacattgtcaggctgcaaattttctgaacttttatgctctgcttcccttataaaactgaatgcctttaacagcacccaggtaacctcttgaatgctttgctggttagaaatttcttccaccagataccctaaatcatctctctaaagcttaaagttccacaaatctctagggcagaggcaaaatgccaccagtctctttgctaaaacataacaagaatcacctttgcttcagttcctaac

SEQ ID NO: 888210 - DNA, 642 bp, Homo sapiens
aatgggactactgcatcaattctctttgatctccagcttgctgactgcagatcttgggacttcttagcctccataatctcatgaacaaatatcttatagtaaatctctttataaatacatatatttgtgtatgtatatacatacataaaattttctttctactaaaaactcctactacattctgtttctctggagaaccagactaatacagattttgatacaaagatggaggtactgctgtaacaaatatcaaaaaatgtggaagcagctttggaactgggtaatgggtagaggttgaaagagttttgwggtacaggctagaaatgtttacactaagggtgattcctgtgaggtctgaaatgaaaataaaaatatattttgggaaatgaaaaaggtgatccctgttataaaatgacaaagacatggctaaactgtgttttagtgctttgtggaaggtagaacttataagcaataaaattgggtatttagccaaggagatttctaagaaaagtgttgaaagagggtcttgattcctcctgactgcttatagtaaaaggcaagaagggagagatgattgaaacccctgaggctgttacataagaaagaataataagcttccatttttgctggaagaactgtatt

SEQ ID NO: 888211 - DNA, 423 bp, Homo sapiens
ggggcaaaccaagaggtgagaattgaaaagcaaaggcaaataatgctggattaaaatgactggtggaaatgtcagagcaggagctaaagaaccagcaacaatcagaccagaagaaagaaaagtgggtattagagaaaagcaagagctgaaataagcaagttgaagtataagrgaataagagaaactctgaaagtgccagacaaaatttggccagactgtcatatgctatcccagctagattttgttttatgttgttccatgtgccacatacatctagtttctgacattatcatctaatataaccattttgttgattcctagataattttcaatgactctctttattaaaaatgaattttaaaccagacactttaagtgtttaaattacctaagtatcccaagactgacaagtaagcagttgtc

SEQ ID NO: 888212 - DNA, 637 bp, Homo sapiens
ctccaacaccccacatacctggtctgctgtcaggagcattgaactgcaggctggtggggcttaggtttgggggactaggctgcctggggttggtttcccatttactagccatgtgactttgggcatgccactggcctctctgtgcctcagtctcctcatctgtaaagtagcaatcatattctctaccccaaagggttgtgccttactatgtgtaaagcacttagaactgsggttggcatataagttttgctattaatagtattactttagctattactttatgatcctgcctgcccctcccaggtctgtcttaggccctgggccaggaagggaggaccctcaggagagccagtccggctggggataaagtctgctgaggctgacagtggggaaaagctgagatgggtgcatccactctctgtcttcccatcagtacctgctcctctgaggtagtctcatctccaacggccctctgagctctgatcgcctgtgatatatgatcaagagtccttcattaagtgtctgccatcctgtactgggatctgaccaggcctgcctttaaggacaaatccagaccctcagataggggcagaaaagcaaagaatcacagattcttagagctaacatcttaaagggt

SEQ ID NO: 888213 - DNA, 643 bp, Homo sapiens
gattggattatggtgggtggtttcccccatgctgttcttgtgatagtgagggagttctcacatggtttgatgatttaaaagtgtgtggcagtttcccccttgctctctctctctttctcttgcctccatgtaagacatgccttacttccccttcagcttctgccatgattgtaagtttcctgaggcctccctagccatggggaactgtgagtcaattaagcctccttcctttataaattacccagtctcaggcagttctttatagcagtgtgaaaacagactaatacacccggtaaccaatctttcttgattctcccttccctctacccttcccagcctcttgtaaccactattttattcmttgcctccacgagatcaacttttaaagctcccacatgaatgagaacatgcaatatttgtcttcccatgcctgacttattttactttacataatgacctccagttccataaatgttgctacaaatgacagcatttcattatttcattttttatggctgaatagtattttattgtatatatatgccacattttctttatccatttatccactgagttcacttacgtggattctgtatgttggcttttgtgaatagtgctgcagtaaacatgggtgtgtaggggt

SEQ ID NO: 888214 - DNA, 507 bp, Homo sapiens; identical to SEQ ID NO: 873764

SEQ ID NO: 888215 - DNA, 468 bp, Homo sapiens
atgataaaaacacttaagaaacagggtatagaagaaacataacataataaaggccatctgacatactcatagctagtatcatattgaataggtaaaaactgatggccttccttctaagatctagaatatggcaagaacgcccactgtcatcactgttattcaacatagtactggatgtccaagctacagtaatcagacaagagaaagaaataaagaacatccaaattgaaaagaaaaagtcaaattattcttctttgcaaatgatatgatcttacatktgaaaaaatctaaagttttcaccaaaagactatcagaactgataaattcagtaaagtttcaggatacaaaataaacctacaaaaatcagaagtatttctatatcacagcagtcaacaacctaaaaagaatttaagaaagtaatcccatttacaatatctacaaataaaataaaatgcctgaaaagtaacc

SEQ ID NO: 888216 - DNA, 614 bp, Homo sapiens
tactaggtcagaatcaggggatggaaatgaaagaactaagtgaaatataaagccaacttgcccagcaggcctcaccagccattgaataaaatgagttttagaaaaaccgaacaggggtagtaaaatacctcatataattgtcactgcagctataatgccttgtagccaaagacctaaccttgcatagctcataatgcatggtgtaagatatttatatgtgcattttcagggcctagtgcttccttgaaggttgtgatactaaatgaagcaagaacacyccctaaagagggaaggatcttaccctttctgtcattcctgaagttgtatcagatggccttgatagcctaaaacaaacctgaaacaagtaatgtcaattatcaaggttcatttaattacagggatttttcaccctcctcaaaggtaaatggtagttaataattctgtcttgatgtgtataccaagttcattctagcatctaatgttctggagcaaatgtgtgtgtaggtgtgtgcatgcacaccggtgtgtttctgagagtttgtgtacatttatacattcaatgttttacaaggttcattacaggatttataaagtctacaatggtaacgttgatt

SEQ ID NO: 888217 - DNA, 608 bp, Homo sapiens
ttgaagtcaatggaaagtcctctggcttgtaagacaaaatacctgttctcatgatttgtccccacctgccctcctggtcaccagatctataaccatttcacaacaaaactgagctaagaaaatgttggctttctaagggaaagggggaagggcttataccttatatggagctgcaggatctagcttaaattcactgtcatgaactaagacatgtacaattaaactggatactgarggtgctggatcaagggaatggaatgtaatgcatattacagcaaagactgcaagagacagtgctaatactttgcaaggatagcccataggaaacttggagcaagagatggtccacattaagtgacttataaattctgaaattgttatagtagatggggaagaaagaaagaagcagaccaaaaagttgggtttgcaaaactagacaatattatataaagccagaacatccacaaactgacaaaaatggatactttttattagagaaatgagaaatgtactaatagtggggaatagtagttattgaaaagcttagtggtagctctcctccacaggccagcaatcacagcaggcgataccatttcagaattaggttc

SEQ ID NO: 888218 - DNA, 569 bp, Homo sapiens
ttggttttctgtccttgtgacagtttgctgagaatgatggtttccagcttcatccatgtccctgcagaggacatgaactcagcctttttttgtctacacagcattccatggtgtatatgtgccacattttctttatccagtctattactgatggacatttgggttggttccaagtttttgctattgtgaatagtgctgcaataaacatmcatgtgcaagtgtccttatagcagaatgatttataatcctttgggtatatactcagtaatgggattgctgggtcaaatggtatttctagttctagatccttgaggaatcaccacactgttttccaaaatggttgaactaatttacactcccaccaagagtgtaaaagcattcctacttctccacatcctctccagcatctgttgtttcctgactttttaatgatcgtcattctaactggcatgagatggtatctcattgtggtttttatttgtatttctctgatgaccagtgatgatgagcattttttcatatgtctgttggctgcataaatgtctatgaacagacatttctcaatagat

SEQ ID NO: 888219 - DNA, 569 bp, Homo sapiens
ttggttttctgtccttgtgacagtttgctgagaatgatggtttccagcttcatccatgtccctgcagaggacatgaactcagcctttttttgtctacacagcattccatggtgtatatgtgccacattttctttatccagtctattactgatggacatttgggttggttccaagtttttgctattgtgaatagtgctgcaataaacatccatgtgcaagtgtccttatagyagaatgatttataatcctttgggtatatactcagtaatgggattgctgggtcaaatggtatttctagttctagatccttgaggaatcaccacactgttttccaaaatggttgaactaatttacactcccaccaagagtgtaaaagcattcctacttctccacatcctctccagcatctgttgtttcctgactttttaatgatcgtcattctaactggcatgagatggtatctcattgtggtttttatttgtatttctctgatgaccagtgatgatgagcattttttcatatgtctgttggctgcataaatgtctatgaacagacatttctcaatagat

SEQ ID NO: 888220 - DNA, 663 bp, Homo sapiens
gagttttgtggttagtaatttgttactaataatgtcactttttaatgatgtcactcttacttggattccagtgatctctctcaaatggggagagaaaggagtagagtttcagctggaatgctctgagcaacacgtatccctgagtgcacccataatgtctccttcatggtgtgatgggaaaggaggaggcgtggagcattgtgctaagacacacccccccggtgtggggatgtaagaagggccagagcyccaaacaagatgagctttgaagacatctttttccttagtctgaaattcagtgatgacaagcttcctctgagttacatgtttgcaatatatagttccaagcttatattcattaaaggtaatgaccaagaagattaacagcaaaaaaaatacattggagcaatcacagcattctaataaccttgtttatttttgttttttaacacgttgtttgtcagttgggctttctgaaaacataagataatgctttaaatcaaagcagcttggggacagatggattaactcttctgagtcagcaggggactattaaaaacatcactcttggacctgcctgtatctcgctgccagacagaccttcccaggacacggttttcatcatgtctctgtgattgtttattgagctgttcttgttcagga

SEQ ID NO: 888221 - DNA, 676 bp, Homo sapiens
cagttgggctttctgaaaacataagataatgctttaaatcaaagcagcttggggacagatggattaactcttctgagtcagcaggggactattaaaaacatcactcttggacctgcctgtatctcgctgccagacagaccttcccaggacacggttttcatcatgtctctgtgattgtttattgagctgttcttgttcaggagtctcagtactttaagtgggtgtgtatgcattattaatagttgtagtttcttaacttcagtgacagaaaagttaagaatttgaaaatattttagtttttcatwtgcctttttaatatttcttttatgttaccactgtgagttacccattttcaagtgggtgtgtaattcatctacttatttatctaatttatttatttacttacttatgtggagattgaggtctcactctattgtccaggctggagtgtagtagctcagtcatagctcactatcacctcaaacttctgggctcaagtgattctcctgcctcagcctctcaagtagctaggactaccagcacacaccaccatgcctgcctaatttttattatttatttgatatttgaggtccaatttctttctttttttaaacttgtatcttaacttcaggggtacacgtgcacgtttgttacataggtagacacgtgtcatggg

SEQ ID NO: 888222 - DNA, 677 bp, Homo sapiens
ctgggatattggaataaatgaattatgaagcacagttgactgtcagtgtctaatgtactaaaacttctctaatacaaaaagtaggaggaaaaattcttccttttccctaaatcatcagatactcatatgtaaccaacatttgtcacatgcatttacttttatgcaaagagcaattctagatgctgtggggcagaaatgagaccaagactggaggcttgtcctctggaacctcacagtcttagtgtaagttacacacagtctgaggagaggagcccagaaggcttcacagctaattcctcctggaaaatccagctaactgatgagatgtggaagtgtgagcgggatcacaggcttaaacgtctgccctgtgagggtgggctttcgagaacgcaggacagacagctgtaaagtcatccaagcttgaactgcaatagcatraaccagtacacattcctaaaatgcttaaataagatataatttgaatatagaaagtactgtgcacaaattccattctactggttgtaagtgcctattcttacgatatttgtgagcaaaaatcactgaagaagatataactcagttttctttacatattctgatgccttacgggggagcaaaaactgaatcgatgttgtccaatagaaataggatgcaagccacatatgtaattttgaatt

SEQ ID NO: 888223 - DNA, 662 bp, Homo sapiens
acatttacttgttaaagtgttgcttgtcactgctaccgaaatgcagtgacgcagtgacttgagcacaggattgtttgtacactgcaaagagcccaattctattcttttattgcacttttcataatatttactttatgcaacttatgatttgttcactatactgcctttttccattattactctcctattttacattcttcacatagcagccagttccatccattaaagatgtaattcacatcttgtcactcctctgcttgtaactctccactggcttccattgcactgagaattatcctcagacttgttcctgcctcggggtctttgcacaggtgtttcttctgcctggaacactcttctccagctcctgttaatgtctgctgctcctcatcactccaccttcagtcagatgccgtctccctgtacagtcctttcctgccccsacccctattgaaaatagtttctcctcatccctctcatacctccttatattatttcctatcaacatttggaattatcttctaatttatctttttgtttattgttttcacatcactcccatttctcatatagaacgtaatctccagaagggtagaatcttgtctgtcttatttactattcgtaataatggaagtagtgccctcagtaaatatttattgaat

SEQ ID NO: 888224 - DNA, 570 bp, Homo sapiens
tatttcaagcatacaactgtctgctggggccatcaggctatttgccctgtggctttaggctccttggataccttacattgaagtaggaggtagattgggaacacctgtcactgtcttttcagcttaagatgaggtctcctgaaccccccagggagtataggtcagtccagttccaccaaagactgaagatatctttgtgttttgaaacatgatakcaaagaacacttggcacagtgcctgacacttagtagggactcaagaaatattatgcaccttcctttcctggggtactgcagctcaacctagggcatctcagatgctaacccagcagttcctccctgggcaaggtctttagaaatcccactgcaggacccttcttacaataaggatatattatttaccaccaccctctatttgctctgaaaacctgagaaagcaaaggctgatgatgttagtacactgagggttgtgtatttttcagatttcacaaactgttttatgcccctgagggggacagttgcctgctttgccagggcactctgtgagacctgtgttggcaccttgcagcac

SEQ ID NO: 888225 - DNA, 629 bp, Homo sapiens
tcatagtactcttaataatcttatttacttgtgtagatcagaatgaatatccccactttttatttctgattttagtaatttgtgtcttttctctctgtttttttctagttcagctagctaaatgtttgtcaattttgttgatcttttccaagaacaaacttttaattttttccatcaattaaagacatccttggctcttgataggtgatgaaggggcaagtgtatttttagctgttggttgccatttcaacgaaatagccgtcaactgtaattttctccaaaagtgggaaaayagagaaaaaaactaacatttttctgtacttcattttccatctgtaaaatggagaaacaaaacccatctgttgtgttttgcaaggctggatgatgtgtacgcattatatatgtagtagataacttctgaaattatagttataggatgaaatctggttatggtcttcagtttttcaggtatttcagggctctttctaagtttctggaccagatagtagcaattaatgaatactactacaaattattcggcatttgtcctgctcaagatctctgctcctttgggtaatgaggcttggtttctataagacagatagggatgacaaaggaattaggtcact

SEQ ID NO: 888226 - DNA, 625 bp, Homo sapiens
taaaatggagaaacaaaacccatctgttgtgttttgcaaggctggatgatgtgtacgcattatatatgtagtagataacttctgaaattatagttataggatgaaatctggttatggtcttcagtttttcaggtatttcagggctctttctaagtttctggaccagatagtagcaattaatgaatactactacaaattattcggcatttgtcctgctcaagatctctgctcctttgggtaatgaggcttggtttctataagacagatagggatgacaaaggaattaggtcactaaaagcagtgaaagacttcagaaaccatgtttcatgtctttggtcttccctgatggatgctaaagccattaggtttcccccaacagtcagaacayaaagatgtgacttggagtactgtggccacctgttctgcccaagtgcatcagctgtgttcatcaactcacaccaagggtgggggttggattctcttcttccctgttgtgatagacagatgccctgtcattatgtttttatgtgaaatttcacagtgaaagaaggaagccactcttgagaatacagcaatttaaatcaggttgtaatttttaaaaagtgatttacaaaaggtctttccc

SEQ ID NO: 888227 - DNA, 570 bp, Homo sapiens
tcagattctccaggtacctagaatggcctttcccaggtctctccctttacggttcactctttcagaaagcccagctcgagcatcatctgttcattagccttcccagccttactctttcaggtggaatttgttactgtgtcttctgcagtgtaaatattaatacattacagcctcacccacactctgcctcacascagtgagtgagcactctgactctccacctggataataagctttttaagagcagaggctgcacctcacttctttcagagtccccctagacatagcacttgcacattataggtgcttcatgaatatttcttttgctcactttatcacagagaaaatcttttaaaaatagatttttggtaaatgactatattcaaccaggcagtgaaacttcacatttcttctgtatagggaatgcataattgtttccagtgtaacctccttattgattttaatcaatttaatcttttttaaactccttggtgtgggactcgtgatttggtgtaggactcatgatttagcttgggaactctctttttcggggaaaataagagccttttt

SEQ ID NO: 888228 - DNA, 570 bp, Homo sapiens
tcagattctccaggtacctagaatggcctttcccaggtctctccctttacggttcactctttcagaaagcccagctcgagcatcatctgttcattagccttcccagccttactctttcaggtggaatttgttactgtgtcttctgcagtgtaaatattaatacattacagcctcacccacactctgcctcacagcagtgagtgagcactctgactctccacctggataataagctttttaagagcagaggctgcacctcacttctttcagagtccccctagacatagcacttgcacattataggtgcttcatgaatatttcttttgctcactttatcacagagaaaatcttttaaaaatagatttttggtaaatgactrtattcaaccaggcagtgaaacttcacatttcttctgtatagggaatgcataattgtttccagtgtaacctccttattgattttaatcaatttaatcttttttaaactccttggtgtgggactcgtgatttggtgtaggactcatgatttagcttgggaactctctttttcggggaaaataagagccttttt

SEQ ID NO: 888229 - DNA, 663 bp, Homo sapiens
gtcccatcactagtttttgaaacgactgttctttcctcattcaatattcttggcatccttgtccgtcaacaatcagatgcccaaaaatttatggatttgtcatttgtcttttgagattgcttatgattttttttggccatgctcaagtttgaatatttgtgtagctaaatttatcaacattttgcttatcttaattttgagctaaagaaagttttttcctacacttaagttatgggggaattcacccatgttttccccttataattctgtcattttcaaaatggctgttcttttrtctcagaaccatttattttattttattactttagaagcagggtctcattttgttgcccaggctggagtgcagtggcacaatcgtagctcactgcaacctcaaagtcctggactctggtgatcctcctacctcagcctcctgagtagccaggactacaggtgcatgccaccatgcccaagtagtttttaaaatttttaatagagatgaggttttgctatgttgcctaggctggtctcaaactcctgggctcaagcagtacccctgccttggcatccgagagggctgggattacacaggtgagtcaccatgcctggccagaatcatttattaaaaatccatttcactcagtgatttcaggtgccacctgt

SEQ ID NO: 888230 - DNA, 663 bp, Homo sapiens
gtcccatcactagtttttgaaacgactgttctttcctcattcaatattcttggcatccttgtccgtcaacaatcagatgcccaaaaatttatggatttgtcatttgtcttttgagattgcttatgattttttttggccatgctcaagtttgaatatttgtgtagctaaatttatcaacattttgcttatcttaattttgagctaaagaaagttttttcctacacttaagttatgggggaattcacccatgttttccccttataattctgtcattttcaaaatggctgttcttttgtctcagaaccatttattttattttattactttagaagcagggtctcattttgttgcccaggctggagtgcagtggcacaatcgtagctcactgcaacctcaaagtcctggactctggtgatcctcctrcctcagcctcctgagtagccaggactacaggtgcatgccaccatgcccaagtagtttttaaaatttttaatagagatgaggttttgctatgttgcctaggctggtctcaaactcctgggctcaagcagtacccctgccttggcatccgagagggctgggattacacaggtgagtcaccatgcctggccagaatcatttattaaaaatccatttcactcagtgatttcaggtgccacctgt

SEQ ID NO: 888231 - DNA, 615 bp, Homo sapiens
tgccaaggggtgactgagtgtttttcattgtttatttcctgttccagttgttgctttatagctttttccagttttcttctttctctttgagacataaattggtcttttaattcctactaaccctaattctacttttattttatctatcagaaaatattgccacagttatcaataaaaacattggaaagatgtgttttgtktgtctcttttaaatttgttggacagataatagaaaattagatagtaatatattgcttagaaaaacgtacttaggacatttcttgctaaccttaattttttgggcggcctacaaacaaatccctatctaattgatttttgtcagggtttataacgttctaagcctgatcttcagttgatttgcgtatgactcccacatgttgaaaccaaaacactcagtttattgaacatatgaaataagactggatttttaaaaatctgcaaattgagttgctttcttctagctctcaaaaaattgatgggatttgcagtcagagaagattttacactaacatagttggtattttattaaaagctaatttgtactattcactaacaatatagattatagatttccttatttttcctggaactttg

SEQ ID NO: 888232 - DNA, 640 bp, Homo sapiens
cagaaaaggcttttaatacaattcagcatccgttcatgttaaaaacccttgacaaactagacatcaaaggaatatacctcaaaataataagagccatttatgacaagcccacagccagcatcatactgaatgatgaaagcattcccctggaaaactggaagaagacaaggatgccctctttcaccactcctattctacatagtattggaagtcctagccagagcagtcagcaagaggtataaaaagcattcagataggcagagaggaagtcaaactatctgtctttgtagaccatatggttctatacctagaaaatcccatagtctctgccagaaagctccttgatctgataaataacttcagtgaaatttcaggatacaaaattaatgtacaaaaatcagtggcatttctgtacaycaacatcatccaagctgagagccaaaccaagaacacactcccattcacaatagccacaaaaagaataaaacaactaggaaaacagctaaccagggaggtgaaagatatctacaatgagaattacaaaacactgctcaaagaaatcggagataactcaaagaaatggaaaatattttatgctcacagataggaagaatcaatattgttaaaacagttatactct

SEQ ID NO: 888233 - DNA, 667 bp, Homo sapiens
tgaatccttagaggaaggagtggtccttatgattggagtggaattgtctgggaaggacttgctatgttgaagagtctgagtttcaccctaaaatcagttagggaactgatatggtttggctgtgtccccacccaaatctcatcttgaattgtagttaccattcaattgtgagtgagttctcacaagatctcatggtttaaaaagaggctttcctcccttttgctctgcatttcttcttgctgctgccatgtgaagaaggatgtgtttgcatccctttctgtcatgactgtaagtttcctgaggcctccccagccctgcagaactgagtcaattaaacctctttcctttataaattatccagtcttgggtatgtccttataacagcatgagaacggactaatacagggaccattaaggaattytaagccttggagtgttatggtcaggtattccttctagaaagttgatactgtggactgcaatttaggaatgagaagctagaggaatttttcaacaaattaaaacaatgaattactatatgatgcaggaattctacttctagatgtagactcaaaagaactgaaagcagagacttgagcagatatttgtacatccatgttcacagcaacattattcatgatagtcaaaaggtggaaaaacccaaatg

SEQ ID NO: 888234 - DNA, 747 bp, Homo sapiens
ttctttcttttcttttttttttttttagatgggttctcactttgttgctcaggctggtcacaaaattgctttgttgtccaggctggttatgaatatgatttcctttgatgtaatttgcctagtgtttcttgtgtttaggattcattgagcttcttggattcatcagtttgttgttttactgaagtttggacattttcagccattactttttcaaaattttttttgtctctctccaattcttctctccctcatgaacttcacttactcttctgttaactcactcgatattgtcctatatctcactgattattttctttctttttttgattcattttctccatgtgtttcatttttggattgattttattgctaggctttaaatttcactaatcatttttcctgcaagacctcccgtggttaataccatccagcatattatttatctcagacattgtatttttttatgtctgggaattatacctcatarttatgtgtatatataagcagctgttcctcaactcataatgggcatcgcattatgtccagataaacctatcataagttgaaaatatcgtaaattgataatgcatttcatacacctaatataccaaacattatagcttagcctagcctaccttaaacatgctcagaacccttacattagcctgtagatgagcaagttcatctaacacaaagcctattttgtaagaaagtggtgaatatctcatgcagtttattgaatactgt

SEQ ID NO: 888235 - DNA, 640 bp, Homo sapiens
gaacacgatgcagcagttaagatgaatagtctgcctctacagagagcaacatatataagtttgatgggtaacaagttacagaaggttgtataaggttgtatgcggtatagtattttatactgtttatgtaagttaaaatacagcaaataagtttttgttgtttatggataccatagcacaggtgtcaactatgtaaagtgtgtaggctgtttttgaacagctcacaagctaagaatgacgtttacattttaaaagtgtaaaaacaaccaaaacatgttacatagactccacctgaccctcaagttttaaaatatttctatttgctcctttactaaaaaagttttctggtttctgcagtacagatgatctgtgtgcccagggccatgccctccatgccctccagcccaagcttggtagacagctccctgaaggccacctctgactttcctgccccaggagttattcytgtgccttggaacttcagttcttcctgggggcagcctgaaacatcagggattaacacactggaggcaaccacagccactgggaatgtgaatcagtggatgacgatttccatatcttcctcttcaaccaaggagcagtgctgaggcatgttcttcatggtccctcacagggaccc

SEQ ID NO: 888236 - DNA, 631 bp, Homo sapiens
cggcatagggtggaagcaaagtggagcatctgtcagtgcatagccttcttaagcaatgatgagctgcttagcattcaggacattcagcccaagattataaatgaaatgtgtttgtgtgtttatatgtgtgtgtatgtatgtatggatatgtatgtctgccctgtcactggaaggctttttaaattttttgatttagatcatagaatttctagagatactaattttcaaattttatacctcagacaggaatccatctttctgagttttgtgtagttatatktttggtcctaatttgtcagtaaacaggacttttatttcctccatagagaagtcagtgatttttctgtctggggtgtcttcttgcatgccccctggttgtccatccactttcatgactacctctgcagtctcttcatatctctttcttattgttacctaaggtaaagcttacgatttattattgtatctgtgagcatggtgccagtagcttcctttggcttaggaaggaagaacatttatctcaggatagagcttcactgccacatttggtgacataaaatgctatatggagaactgactatactgaggtgtgaaatacatgtaggaagtctctcaaatacattcagatatc

SEQ ID NO: 888237 - DNA, 678 bp, Homo sapiens
aatgttctatatagttctctgggtacacatattaaatgataaattgaaagtatgtgtcagtgatacaaatttaataacctttcactttgaatcattgccctttatctacctaagattgtattatgtcaaggaaaattgccagcttcttcttaaagtatgaaataacagttaaataaactgatgggagaaactgtggtatggtaaacagatatacactttattggtgagagataggaactaggatttattgtataccatgtaggttcagacatatgctcttayaattcttatgccatttaattttcataaccgctctgtgtacctatcaaggaatggaggggtcagtccatgtcatgctcttccactgcgccatatttctcctatttctactgatgggatggaatgggtgacatctggtatgcagggccagagtgatgatagaattccaacttgtggctgtcctaagagtggtctcttctgagtgttttcccgatggcaggaagtgggagtgaaggacagatagagggggtaagcaacacagctcaggtcccccaacaaggagatatcagagcattcctggccaggagatggagcagggtatccaggggccctttggaatgaggtaaaccaggttgttgctgagcttactgtgggttggtcatggtaggaatcttctta

SEQ ID NO: 888238 - DNA, 679 bp, Homo sapiens
gacctgtccatgtggatattgttttctgctgcctttttaagacagcaaacaaaaaacacaaaaaacacttccactataatttgatataattgaagggtgtaacaaatttaatcaaacccaggtaccttcttcaaaagccacaatagaaactaacaaacagaagccaccaaggaacaagcaagaygtgaacaccaagtgcttgggttgaaatagcaaccactcactacattcactaaaagagaaatagaatggggctagaaaagcagtataaatgtcagatgttttgaaacactaataaatttaccctcaaacaagttagaagttatgttaaatggagtacagaggtacctgcccagtgcaatagtgcatgagtaaataagattagcatgtaacacacatatttctaatatgcaaagcaactgtgattttctcagtcccacttcccatgtgcttgcctggccagctccatttgtctgcctcatagcccctccagatctcaatacatgtagtaaaatttagaggtaaaactttcactttacctctaaatcactatttctgcacacacaccccctccccgtatcatcaactgtaccacatccctcatctgagatctccacccaggtgttcccactggttcttcctctccctcaacaatcagaccttatgagtcatcatgttc

SEQ ID NO: 888239 - DNA, 615 bp, Homo sapiens
tattcagtaaatgaagacataaatgaaaggcattgggacataaacaatagcaattaggtagatatatgtgtgtaaggtgaaagagggtataaggtctgtggaaaggaaaaggaagagggtgagatggagcaaatagcagctgactctatgtccccattccagaatgttcccaggtaggtattttatttacttcttatagaggagaaggtcactgagggagattttggagtatgttcatcttttagagtgaaaactatagaattattggtggtcatctttcctcacttyattttatttttgtttatatgtttttaggactttgcacattcataagctggagatgaattaccaaatgtatatgaaactttttcagcctgtgctttgcttttatgtccagttctagtatccagcttaaagctcccaagattacctctcacgtgtcattctccaaatttaagaattttccaagtttgtgtagctgtcagaatgtatttatttttgtgtatttgaacatttttattgtttggattttctatcatgaaataaattgtcgcttgccatgcactttagaaataatctaattgcatgaacttctgttttgttttgtttcttctt

SEQ ID NO: 888240 - DNA, 559 bp, Homo sapiens
  misc_feature 96: n = A,T,C or G
caggcactggtctgttgcaaggagttgctaagtgaagccaggcagaagatttaaaaagatgctgcctccagagcagggaacacttgatttggcccntgcccactcctccagcccccaccccctcactcatcacattccagccccaccacttctctcccagcttctccaattcagctgtgctctgtctgccctaggacattggcacaagctcttcctcatgcctgaaaggtcttcccctgccctttgcaagagcatctttctgaactcactcttaaggttatctttgtaggaaggtctttyttgagcctgaacccaaaatattcctcttccctaattttcatcacttcttgtttctatttttttgcgcatctatcacaaatcatatttaacagatatgtcttcttattttttcaatgtctgtctcccccataggaatgccagctccatgagcaggggctttgtcttttctccaccatctatctgaatgtcttgcacttaataggtgcctcataaatatttgtgagtaaatgaatagatccgcccattgtgtagaaacaaa

SEQ ID NO: 888241 - DNA, 639 bp, Homo sapiens
ttggaatgggtaaggattggtaaggactggggactccatattttctacacttttattagagaaagtgataactagttgtcattattattagtaataaatgttttcctacaatatgttgtattgacaaaagtacttaagctagatttatttgtacttttccttgactcatgataatagaatctgttcaagtcttacacaaaatttgaacccccaaatttacacttcacttccaccttatcaataggaggtgcaagtttactatggtcaagaatttgctgraaaaaaaaaaaagcagctccaagatggagagaaaacattcaagtgtttcagcaaaggtgatgcctggtgagaaatatttgctacttcaataattctgattaaattcaccgaactaaaagaggagaatgagctctgaaaaaaaaatgttgcatgcttccctgctgccttcttttttgaccaggagtgaagtttaacaactggagctccaaacacttcataatcattcagtacaattgtcaaaacttggaaagatgttataagactgctttggatgaatgagaaattattgtttgcactataccaaccccaatactgcaatgaataagctaacctagagaacagaggctacatctctagaaa

SEQ ID NO: 888242 - DNA, 639 bp, Homo sapiens
ttggaatgggtaaggattggtaaggactggggactccatattttctacacttttattagagaaagtgataactagttgtcattattattagtaataaatgttttcctacaatatgttgtattgacaaaagtacttaagctagatttatttgtacttttccttgactcatgataatagaatctgttcaagtcttacacaaaatttgaacccccaaatttacacttcacttccaccttatcaataggaggtgcaagtttactatggtcaagaatttgctgaaaaaaaaaaaaarcagctccaagatggagagaaaacattcaagtgtttcagcaaaggtgatgcctggtgagaaatatttgctacttcaataattctgattaaattcaccgaactaaaagaggagaatgagctctgaaaaaaaaatgttgcatgcttccctgctgccttcttttttgaccaggagtgaagtttaacaactggagctccaaacacttcataatcattcagtacaattgtcaaaacttggaaagatgttataagactgctttggatgaatgagaaattattgtttgcactataccaaccccaatactgcaatgaataagctaacctagagaacagaggctacatctctagaaa

SEQ ID NO: 888243 - DNA, 576 bp, Homo sapiens
ttttttcttttaaaattctataatgagactttaatttgcctgaggggagtatgctctgctctagcaaatttaataatgtattattttctaaaaattcaagcctaatttatcccccaattttggaaatataaaccatgccttccagtaatacttttcgactgaatagcaaacttttacaatcattatgtatgtgcgtgtgtgtgtgtgtgtgtgtgtgtgtgcrccattctgaataaaactaatgcagttatttaggcactacattttggattttatctatttatttttagtcttaatttgaaaatctagaatttcatttacagtcacaaaggaagctgcatggtatttatttgagataatgtaatacttttttttttttttttttgagacagagttttactcttgttgtccaggctggagtgcaatggcgcaatctcagctcactgcaacctctgcctcccaggttcaagcgatttccctgtctcagcctcccaagtagctgggattacaggctcctgccaccatgcctgactaatttttgtatttttagtagagacgggatttcatcatgttggt

SEQ ID NO: 888244 - DNA, 569 bp, Homo sapiens
tccctctaaacactgctttagctgtgtctcagagattctggtacattgtgtctttgttctcattgatttcaaagaacttatttatttctgccttaatttcgttatttacctattagtcattcaggaccaggttgttcagtttccatgtagttgtgcggttttgagtgaatttcttaatcctgaattctaatttgattgcactgtggtctgagagactgttttgatttccgttcttttgcgtttgctgaggaatgttttacttccaattatgtggtcaattttagaataagtgcaatgtggtgctgagaagaatgtgtattctgctgatttggggtagagagttctatagatgtctattaggtctgcttagtcgagagctgagttcaaatcctgaatatctttgttaattttctgtctygttgatctatctaatattgacaatggggtgttacaatctcccactattattgtgtgggagtctaaatctctttgtaggtctcttagaacttgctttatgaatctgggtgctcctctattgggtgcatatatacttaggatagttagctctt

SEQ ID NO: 888245 - DNA, 540 bp, Homo sapiens
ggtcagcctgttgcctgtttttttctcagctccgacctcctttgtctgcccctcctctgtgttgtggagactgtttcccagactcctttgcttctgacttctgggagaatccagccaacgtgaggcattggtgggacacaggaatgtgggggagaaggaggaggaggccagagcatttctctctctctctagccctcccgcagtacatagctcctgcagagtagtccctctgggcccatctcttgcgagktccacctcctcctccctttgtcctcctggtgagtgtttggctcctgtagtagtccattttcacatcgctataaagaactacctggtgcctgtaattccagcttgggagaatgaggcaggaaaatcgcttgaacctgggaggtggaggttgcattgagccaagattgcgccattgcactccagcctgagtgacagaatgagactccatcatttccaaaaaaaaaaaaaaacaaacaaacaaaaaacacacacatacacacacaaaaactacctgagactggataatttata

SEQ ID NO: 888246 - DNA, 540 bp, Homo sapiens
ggtcagcctgttgcctgtttttttctcagctccgacctcctttgtctgcccctcctctgtgttgtggagactgtttcccagactcctttgcttctgacttctgggagaatccagccaacgtgaggcattggtgggacacaggaatgtgggggagaaggaggaggaggccagagcatttctctctctctctagccctcccgcagtacatagctcctgcagagtagtccctctgggcccatctcttgcgaggtccacctcctcctccckttgtcctcctggtgagtgtttggctcctgtagtagtccattttcacatcgctataaagaactacctggtgcctgtaattccagcttgggagaatgaggcaggaaaatcgcttgaacctgggaggtggaggttgcattgagccaagattgcgccattgcactccagcctgagtgacagaatgagactccatcatttccaaaaaaaaaaaaaaacaaacaaacaaaaaacacacacatacacacacaaaaactacctgagactggataatttata

SEQ ID NO: 888247 - DNA, 540 bp, Homo sapiens
ggtcagcctgttgcctgtttttttctcagctccgacctcctttgtctgcccctcctctgtgttgtggagactgtttcccagactcctttgcttctgacttctgggagaatccagccaacgtgaggcattggtgggacacaggaatgtgggggagaaggaggaggaggccagagcatttctctctctctctagccctcccgcagtacatagctcctgcagagtagtccctctgggcccatctcttgcgaggtccacctcctcctccctttgtcctcctggtgagtgkttggctcctgtagtagtccattttcacatcgctataaagaactacctggtgcctgtaattccagcttgggagaatgaggcaggaaaatcgcttgaacctgggaggtggaggttgcattgagccaagattgcgccattgcactccagcctgagtgacagaatgagactccatcatttccaaaaaaaaaaaaaaacaaacaaacaaaaaacacacacatacacacacaaaaactacctgagactggataatttata

SEQ ID NO: 888248 - DNA, 614 bp, Homo sapiens
agatgacatgatcctatatctagaaaacaccatcgtctcagcccaaaagcttcttaagctgataaacaacttcagcaaagtctcagaatacaaaatcaacatgcaaaaattccaagcatccctactcaccaacaacagacaagcagagagccaaatcttgaatgaaatcccattcacaatagctacaaagagaataaaatatctaagaatacagctaacaaggaaagtgaaagacctcttcaaggagaactacgaaccaccactcaaaagaacyagagaagacacaaacaaatagaaaaacattccatgctcactgataaaaagaatcaatattgtgaaaatgaccatacttcccaaagtaatttatagaaccaatgctattcccgctaaactaccattgacattcttcacagaattacatgaaacaatttaaaaattcatatgaaatcaaaaaagagctcatatagccatgacaatcctaagcaaaaagaataaagctgaagtcatcatgctacccaacttcaaacgatactgtatacagtaagaaaaacagcatggtcctggtacaaaaacagacacataaaccaatggaacagaatagagaactcagaaat

SEQ ID NO: 888249 - DNA, 690 bp, Homo sapiens
tcccatatactctgttttcatgcacatgcagcctccctctctaccaatatccctaccacattggtacatttgttgcaagtgatgaacctacattgacacattattataacccaaaatccatattaaggtttatattagggctcattctggtattgctcatattttgattttgaaaaatgtgaaatgatatgtagctaccattgtgtatcatacagagtagtttcacttccctaaaatcctctgtgctccacctattcatctcccccactgtgccccccagcaaccactgatctttttactgtctctatatttttgccttttccaagatatcatataggtagaatcataaagtaggcagtcttttcacattggcttatttcccttagtgawatgcatttaaagttcctccaagtcttttcatgacttgatagctcatctttttagcactgaataatattccatgtctggatgtaccacagtttatttaaccattttactgaagtaaatcttggttgctttcaagttttggcaattatgaataaagctgctataaacattcacgtgtaggtttttgtgcgaacataagtttttaattcatttgggtaaatatcagggagcctgatttctggatcatatggtacaaacatgcttacttttgtattgaggaacaaatattaattataactgaaa

SEQ ID NO: 888250 - DNA, 609 bp, Homo sapiens
tttcctcttcctgtgtttataccatggtaggtcatctgtcaggtgaacagttgggcttcctaaggcttctcctgggaagaaatgattgatatgatgagtgagttgttaacgtgtcccctttttccttttctctttggaatctgcccactctcagaaagcacagttggcgccaccctgctactcagcagtgaggagggrgcaagtcttagggcttctagcttggtttatggctgaatggggtagtcatcgcctgctgtgccaccagagctggaagcccgattttgtcatgcagataagccacattcttctacagctttattggtaacaaagataacatattgatgtccatttgccaaacacccttgtccttcaaagatggttcaaaatgtgagtgtgaaaaagatatttattatccttctaacatattaatagctaaggtattactacatcttttctccatgttttgcaaacatgtgtattatatatgtttaaatctatatttatttctttacatatccataaccagtaaaacaggtgagatcacatcaatattccaattcctgtccaacctcacaaaattgaatttccctctgttccatgtttgcagct

SEQ ID NO: 888251 - DNA, 612 bp, Homo sapiens
gttcccacatttattaaagaagagattataatactacctacctcacaggattatgcagagagataaacaaatgtacaaaagtaaatgtaaacaaaagcaaaatgccaagaacaatctgggcacatagagagtgtgttacgaagtgtctgctagctctattgtggactaaatcaaaggctacacacagaggagatacaattaagtcatcctgaggagaataaggacttctgaaagaagtttgagaagggtttggaggaataactagaaaatgggctgggcaccgtggctcctgcctgtaattgcaacactttgggaggtggaggtgggaggatagcttgagcccaggagttcagggctgcagtaagytattatagcgccactgcactccagcatggggagaagagcaagactctgtctcaaaaaaaaaaaaaaaaaaaaaaaaaaagaagaagaagaaaaaaaggaaatgggcaggtgcagacttaggagaaaggatgtaatgcattttggatagaagacagtgtgtgcaaaggcagactttgaataatgtagtgtaaagcaatagcaaataattccatggttttggagcataggaagctcagtgcaagaggt

SEQ ID NO: 888252 - DNA, 634 bp, Homo sapiens
gatgttttgaagaaagcaagaaatacaaataacgtgtgtgcttagatatttctttgtttataatttgacaggaagaaagaaggatagaggtttattgttgcataaagcctggaaaaaagctgaaagcaatacctacaatgattatttcagaggttttatttmgatggactctaaaacaatccaaatgtacctttgcagaagagattcgaatgaatgcattcgaatgaatttgtgaccagtggtaaaagttaataaaaaatatatttaaaaaatccacacaaggactatgggctcagatcttaaaaagtaaagaatttacttgtctctcaagataaaaaacactgacaacatgaggcattttctgaaggcaaatggatcgtgaaataattagtggagaagcatgaatatcaactacagcctttgatcagttgcagaaattaggactgtagtagctacctaatatccttttgataaattcattttcctggtgaataacaaataataagctgaagccaactgaaaacatcaaatcaatgtaatcataaagaaacaaatttttagatggaaaagactttcttggtgctgagtagaattttatcataaaattgtatcatatgaatacaaaatagaaagt

SEQ ID NO: 888253 - DNA, 608 bp, Homo sapiens
cccagggtgttaggggacttttctctggggagagaatattactgggtctcttgccttggaaggtcagaattcttcttagaatcccaataatatcccttccattgtaatctcagtccatttctcaccccctgtcctccaatgctacagcccacagcccaggaggactcttccactcaccatgtatgtcaagtccaggcagagaaagcgccaagtagggggaaggggcaaactgctggtgggtgagggctgaaamatgtgaaaagggagataaggtgataatgaaccatgctgcccaaccctccacactctcacctcacctccatcccccacagcccaggcgcctccaggcctcggatcccctccatctggagatcccagccgcagagatggggcatatgggaggcccattcagtatgaggcgtggtgtggtaggacgcattgatgtagtttgggtcacataagttatttgcagtacatatgatatcgtgcattcataaagcacttgtagattataaagaaactttgatgaatagaatttcatttagatctcacaacaactgaatgagaagggcattcaaaagactggaaaacagggtcagtgacatgcc

SEQ ID NO: 888254 - DNA, 706 bp, Homo sapiens
ttcccctgccgttgctacccctgcttctcaggccttcagatctggactgcaatctataccatcggccctctggctctcaggttatacgaccagctttcctgggtcctcggcttgcagacagcagattgtgggacttctcaacctccatattcacgtgagccaataccttctcataagtccctttctagagatatatgtatacatagatcctattggttctgtttctctagagaaccttgactgatacagatttaatgctatggaatgagtgtgtccccacaaactcataacttaatggtatatcatgaacaacttctacattattacatatttttactacaacattttcttaaatcacaacatttttaaaagatctttggggccgggcatggtggctgacgcctgcaatcctagcactttgggaggctgaggcgggaggatcacctgaggtcaggagtttgagaccaacctggccaacatagtgaaaccccgcttctactaaaaataaaaaaattagccaggcgtgatggtgggcacccataatcccagctactcrggaggctgaggcatgaaaatcgcttgaacctgggaggtggagtttgcagtgagctgagattgtaccattgtactccagcctgggcgacagagtgaaactcagtttcaaaaaaaaagatctttggtattccatgctgaggttatactgagg

SEQ ID NO: 888255 - DNA, 598 bp, Homo sapiens
ttttccatctctctagttagttgtattcctgagtattttattcttttttggctattgtgaatgagattgtgttcctgatttggctttcaacttggctgtcattggtgtataggaatgctactaatttctgtacattgattttgtattctgaaactatgctgaagctgtttatcagatcaaggagcttttgggcagagrctattctcttctaggcatagaatcatatcatctgcaaacagggatagtttgacttcctctcttcctatttggatgtcttttatttccttctcttgcctgactgctctggttaggacttccagtatgatgctaaatgggtgtattgagaggccatcccttgttttgttctgattttcaagggaagtgcttccagcttttttccattcagtatgaggttggctgtgggtttgtcatagatagctcttattattttgaagtatgtaccttcagtgcctactttattgagggcttttttaacacaaaggaatgataaattttatctttagtcttttctatgtctattgaaataatcatttggattttttatttctagttctgtttatgtgaagaataacattga

SEQ ID NO: 888256 - DNA, 641 bp, Homo sapiens
atttgatagtgtttgctcctgagattctgtaacttataatttattttttattatttattttttttttgagacagggtctcactctgttacccaggctggagtgcagtggcatgatcactacgtgctgcaatgctgaacttctgggctcaaacagtcttcctgactcagcctctagaggcgctaagactacaggtgtgtaccaccatgcctgactaatttttttttwaaatttttgtacagatggtttctcattatattgcccaggctagtcttgaatcctagccccaaatggtcctctggccttggcttctcaaaatgctgagattactggcgtaagccaacactcatggccaattctttaccctctatttttttttttctcaattacatgactgtgtaagcatatactatattcggggtccatgaaatatagtcatattctgatttttctgaagaccagaaaggacataatatgtattacatacatattatatgttctataccaatacttaatataatacctgacatatagaatatactcaaaatatctattttcacatggagcagaagaatgggttaaaatttactaaatttattagcccactatattgaagccttaccacattgctacttccagctct

SEQ ID NO: 888257 - DNA, 615 bp, Homo sapiens
cctgttattggtctattcagagattcaactaaactcagattcctggtttagtcttgggagagtgtatgtgtcgaggaatttatccatttcttctagattttctagtttatttgcgtagaggtgtttgtagtattctctgatggtagtttgtatgtctgtgggatcrgtggtgatatcccctttatcattttttattgtgtctatttgattcttctctctttttttctttattagtcttgctagtggtctatcaattttgttgatcctttcaaaaaaccagctcctggattcattgattttttgaagggttttttgtgtctctatttccttcagttctgctctgattttagttatttcttgccttctgctagcttttgaatgtgtttgctctggcttttctagttctagggtgtcaattttggatctttcctgctttctcttgtgggcatttagtgctataaatttccgtctacacactgctttgaatgcgtcccagagattctggtatgttgtgtctttgttctcgttggtttcaaagaacatctttatttctgccttcatttcgttatgtacccagtagtcattcaggagcaggttgttcagtttccatgtagt

SEQ ID NO: 888258 - DNA, 616 bp, Homo sapiens
tttctaagaataggaaatttctttaaataatatgtaaaagttatatatatctgagatattgctccatattagccatgcgtggcttagtctagcagttataatgtgtatgtttctgtgtgtcttcatgagactcacagacacctcaactatactagtgaacaagcatgagagcttagctgtattacaagtcgacattaacagatggatggccctaagcaaggcaaaatcaccacaacaaaacctagggaaagtgggggactgaagctttttgttgttaagccctattaaaaccctggcacacgcatatgcacacacacacccacccacccacacatacacatgtgcgcgcgtgcacacacacacacacacatatatatacacacatatatatacatatatacacatatatacatatatatacatatatacatatacacacacacacacacacacacacacayatatatatatatatatatatatatatatatatatatatcactcttaactatttcatgtcgggaaaaatagcaatatttttagattttcaacctccagttaattatgtaaaaacagcatgagaaaatgagtggaaagttatttttcatttgcagtg

SEQ ID NO: 888259 - DNA, 614 bp, Homo sapiens
tttattgtgtgggttcagattatttttctctatcatagtcatttacatttcaggtcctgcatagttaatatgcatgtttttaataatgatatgtctgtgatttgttaacctagatgaagatgtactgttactggctgggtattggcacccttaagaatacacaatatgttttctgcagtctaaacttacttactaccatttccccacaaaagacctttatttttaagattgtgaccaggccttttttccctgtgttgttatgttccgaacatggggaaaactgtcctttatttcccctgaaagcactgtgcttcagagtcgcaacccaccagaacaccatcagctgctgagcttgtatggacccagattatctmtactgctattcttctctgtcttaaatgtcgattacattatgattatctttctccttaattttttctctttttttgtgaccttaacacaattatgtagaagtcatcaagcaattgacatattctatcacctgtttggacgttgttatttcttatatataaactgcagttcctaatgcaggttgatatatattcaatgactattaattagaagaagcttatttcatatatgtatataatttt

SEQ ID NO: 888260 - DNA, 703 bp, Homo sapiens
ccagaaaccatttatgtagccttcaccaattatcaactcatggccaatcttatttcagtcacagcctcacctattctctttctccaccattaaattattttgaaataaatacccaaaagcatatcatttaatctgggaatatttcaagttatagctctaaaagataaggactattttaaaaacataatcatggtgtatttcaaagatggaacaatttgaacatcaagaagaagaattgtggtgggttgaacaacatcaagtatctactaataatgggaatttaaaaaaaagaccctcatgacttgcctttaragattgttaggacactagcttagctcatcactctcaaaattgttaaaaggaaagaaatcaaggatttgtcctgcctgtcccatacattgtattttggaatagtcaaatagttgataaggtaaagctcttctttatagaatgccagcaaataaatatagaaggaatgctctagaaaagcataattctttagcccctaatgaaatagtggatttagccagtcgttatcatggaatgctaaaaccttcaggtcaaaagttgataatgaaatgtataatggatcgcttgacgaatcatacctgaagtcattaatgaatcttagtaccaccaaaaatgagatatttaaacattatgtgcctatacatgttacagtaaaaatgcacatatcaatacc

SEQ ID NO: 888261 - DNA, 675 bp, Homo sapiens; identical to SEQ ID NO: 866969

SEQ ID NO: 888262 - DNA, 591 bp, Homo sapiens
aacttttatcttcttctcacgagcctctgcagacaaagaaacatagttttaaacttctgaaatgccccattcagctgatctgagcttaatctgaaaaatgggaatcacacctctattgcacaggcacattatgataacattattggaaaatgcttaactacaagtaagcacacaatacatagcatctattgttactattcagataagatgaagtgttagtaggacaaatgacaagcagcagtaacgtttaaatggtttccacactcctacctcctactttatctgccagacaaaccaaataggtaactactttcctcctatcctccttcccatctgtcttataatgtgtttgtaaaataagcargttttgtgcagagaaagataattttttcatgtcattcccataactctgaattgcctcatgatggtggtcccatccaactaaagaatttaattcattcatctgtaataaaacaaacggtacataccagttgtatgtcctcagtgaaattgtcagaaataaatcaaaaggtctcaggtctctcagacctccaaacaactaatgatagagattttttttagttatacatt

SEQ ID NO: 888263 - DNA, 601 bp, Homo sapiens
tgctgatacccaggcaaacagggtctggagtggacctctagcaaactccaacagacctgcagctgagggtcatgtctgttagaaggaaaactaacaaacggaaaggacatccacaccaaaaacccttctgtatgtcaccataatcaaagaccaaaagtagataaaccacaaagatggggaaaaaacagaacagaaaaactggaaactctaaaaagcagagtgcctctcctcctccaaaggaatgcacctcctcaccrgcaacagaacaaagctggatggagaatgactttgacgagtcgagagaaggctccaaatgatcaaactactctgaactacaggaggaaattcaaaccaatggcaaacaagtttaaaactgtgaaaaaaaattagacgaatggataactagaataaccaatgcagataagtccttaaaggagctgatggagctgaaagccaaggctccagaactacatgaagaatgcagaagccccaggagctaatgtgatcaactggaagaaagggtatcagcgatggaagatgaaatgaatgaaatgaagtgagaagggaagtttagagaaaaaagaataaaaagaaatgaaca

SEQ ID NO: 888264 - DNA, 602 bp, Homo sapiens
taacttgatgatatagacattattagccccagtttatagatcaggaaacttaaccatgcctcctgactttagcttataacctagttggaactataccacacagaacaatgaaatttgttacctatattttggggaaattttaggatattatcagtagcttaaagaaacagtggaatcttcaaattgcagatgattatactaataatattatgaacagaaaatatttgtagatatttcatggataatattttttcctacattttcttccttacaactgtggaggcagtggctttcattgcagaaggtgaggataaatatagccgagracaaagaagctattgctcaggcttgaatttcaaaatagagtgtttaatgtcattctctgacataatagaaagccaaacacttgctgagagatttttcttgaaatttcaaaagctggacattatgtatcaagctaggagaaataggtatagattgtgattattagccacagactacaaaagagtggttgatgtagtatctgatttcccaccccaagggaaacaagtgtttcaccatctagaaaaagagaatgattcaaagtaagccaaactatagtg

SEQ ID NO: 888265 - DNA, 606 bp, Homo sapiens
gaggtcatactatgctgctaataagagaaccaatttttttccaagcctagactgatattcttgagattgcattcctctctctacaattccccttcaactccctgctctctagaacagagaccaacatctttttatttttttcatgcttgcaacatcttatgtacaattttctattagaaaaactcctgcctctcgtggtggctcacgcctgtaatcccagcactttgggaggccgaggcgggtggatcacgaggtcaggagatcgagaccatcctggctaacacggtgaaaccctgtctctactaaaaacgcaaaaaatcagccgggtgtggtggcgggcgcctgtagtcccagctactccagaggctgaggcaggagaatggcgtgaacccrggaggcggagcttgcggtgagccgagatcgcgccactgcactccagcctgggcgacacagcgagactctgtctcaaaaaaaaaaaaaaaaaaaaactacctcacagctttgggccttccagcaggaaacagcaaaggaagaaaatgagcccagggtcaacaggaagaggaaaggaaaggaagtgaggagaccatgtgtctacagtcctcaagt

SEQ ID NO: 888266 - DNA, 568 bp, Homo sapiens
ctggtcctaaaactgtgtccagtaggtaccattgtattcaatatagcattttggtttaatcttgatcttctaaagtctgaatatgttctttagtttgtctagtttctgcagtcttgtgtactaaaagggtagtaattttcagttagctaattactatgctttacacagttatarggacgaagcattttagaatggcacttcattaaagcagtaaaaatactgtgggctcagtaatctcatttactgggtcaatagcccataatatctagaagaagatttaaagtagtttaaaaataattattcaaacgagaaagggatttcaaactataattaccatagcagtaaaggaatgaatgactccaaaggaaatataaatattatatttaaatcttaatatctgattgctgtaactcaaagggtttagctcttccaatactaaagatcacaagatcttagacctgaaataaacttcagcaagcagccagtcttggtgtagaaattaaattttttcctgaaaaaccacttgtagttaaatatccagactgacaggctttttgcagctcattct

SEQ ID NO: 888267 - DNA, 568 bp, Homo sapiens
ctggtcctaaaactgtgtccagtaggtaccattgtattcaatatagcattttggtttaatcttgatcttctaaagtctgaatatgttctttagtttgtctagtttctgcagtcttgtgtactaaaagggtagtaattttcagttagctaattactatgctttacacagttataaggacgaagcattttagaatggcacttcattaaagcagtaaaaatactgtgggctcagtaatctcatttactgggtcaatagcccataatatctagaagaagatttaaagtagtttaaaaataattattcaaacgagaaagggatttcaaactataattaccatagcagtaaaggaatgaatgactccaaagsaaatataaatattatatttaaatcttaatatctgattgctgtaactcaaagggtttagctcttccaatactaaagatcacaagatcttagacctgaaataaacttcagcaagcagccagtcttggtgtagaaattaaattttttcctgaaaaaccacttgtagttaaatatccagactgacaggctttttgcagctcattct

SEQ ID NO: 888268 - DNA, 541 bp, Homo sapiens
atctgcttttgccccaggggcattagtaattctggaaggaataggtgagctctgtttctggaagcatgttgggcctagaagaatagaaatcagaatccagagcccaagggtaaacaaacattcactttgaactaggattcctagagttattgtaagattaagtctgaactgaaaataaaccagtcttataaaatctgtcaacctattttatgtcaatttgttgtgtctgataacctcagttttgaaaattttattgtgtgttcctgaacttctattgactttagacacctagaacaaccaaagaaaaatctcctctggaggaagataatatcatcctaggtctcaaatcactgttacaaataaagttttaagcacaatgccccatacacaattaaaaacttcrgatataaaaagaaacaaaccaccattaaagaaaaccaacaaaaatactcacataaaatctccacatacggaattacaggatatagactaaaacaatgtttacgatgttcaatgagattggagtctagtgaaaaatttt

SEQ ID NO: 888269 - DNA, 600 bp, Homo sapiens
tgtgtgcaggtgtctttttcatataatgacttatcttcctttaggtacatacccagtagtgggattgctggatagaatggtagatctacttttagttctttaagaaatctcaggctgggcgtggtggctcatgcctttaatcccagcactttgggaggccaaggtgggaggatcacctcaggttgggagttcgagaccagcctgaccaacatggagaaaccccgtgtctactaaaaatacaaaattagctgagtgtagtggtgggcgcctgtaatcccagctactcaggaggctgaggygggagaatcgcttgagcccgggaggtggaggttgttgtgagccaagatcgtgccattgcactccagcccgggcaacaagagtgaaactctgtctcaaaaaaaaaaaaaaaaaagaaaaaaaaaaaagaaaaagaaaaaaggaagaaaaaaaaagaaatctccatactgctttccatataggtaatactaatttacattcccacccgcagtgtataagcgttcccttttcaccacatccatgccaacatctattgttttttgactttttaataatagccattcttgcaggagtaaggtggta

SEQ ID NO: 888270 - DNA, 684 bp, Homo sapiens
tgtattttgttttccattgacttacattataaaattggtaatgtgttttcattagaaaaagaatatcataattttaattgaatatttgatatggaaaagtgagtggagaggaatgagagcatgtaggactgggaatgaggatgcytgggattcagttctaaaactgtcactgcataactaggaaactgggcttttgtcatgattttgcctctgtgaaagctgggatgagtccgaaagctttgagcctcagtttcttcatctgtataatgacaggctggggctaaatcagggacatcaaatatgtatcacatatactgtcacttgtgatttctatgcctatagcagacattactaatcaaaagcagttttctttctgataaagccaaaatacagtcccaggccacccataaatgagggcaatgttctgataagagttaaaacctaaaatgcttgaattctatgctcacgcaggtcctttccagcccagacaccccagatcctgaattagtggtcagcctcctgcagttttatgccaggagcttcccatatattaaactaatctttcaaaaaactccctcaattcatttcaaagaggaaagtcatggatacatttcagaaagaaggttatttatgcaagacaaaaatattattatgaaaaaactgaattgttttttctaaagcaaa

SEQ ID NO: 888271 - DNA, 597 bp, Homo sapiens; identical to SEQ ID NO: 887820

SEQ ID NO: 888272 - DNA, 597 bp, Homo sapiens; identical to SEQ ID NO: 887821

SEQ ID NO: 888273 - DNA, 477 bp, Homo sapiens
tctagaacactgttttgagaaggtgcattagtctgggtcctctgaggaacaaatgccaatcagaattagatgtgccaaaaagttattagggaagcaatagtgatagaaaatggggagggtgggctgggcacagtggcttacacctgtaatcccagcacattgggaggccgaggcaggyggatcacttgaggtcaggagtttgagaccagcctggccaacatggtgaaacccatctctactaaaaataaaaaagactagccaggcatggtggtgcatgcctgtagtcccagatacttgggaggctgaggcaggggaatcacttgaacccaggaggcagagattgcagtgagccaagattgtgccactgtactccagcctgggtgacagagtgagactccgtctcaaaaaaaagaaaatgggagggtgccaagagaggctggaatatagtttgaaccccaaatgaaggagaaaaagaag

SEQ ID NO: 888274 - DNA, 647 bp, Homo sapiens
cgaggcggctggatcacctgaggtcaggagttcaagaccagcctggccaacaaggtgaaactccatatctactaaaaatacaaaaattagctgggcgtggtggtgggcacctgtaatcccagctacttgaacgacaggagaattgttcgaattcgggaggcagaggttacagtcagccgagattgtgccattgcactccagcgtgggtgacagagtaaaactccgtttcaaatacatacatacatacataaatggaagctagaagaaacaggagtctctattcacccttttaaataattcatcattgcctatgatcaaacaatgtaaagagtataaaaattatcttaatactatgaaaaacaaaatataccctttttcaatccttcttttcttcagaattttggctagtttattcagtccacggagactagtggtaatatcatcattcatgtttgctgaatcaattctcaactgagcttcagcataygtcagagatgcctaaaaaagaaaatgtatgttatataattcttataaatgatagaaaaatggttttcaatatgtcctcctactttcactacataaaatccatgatttcagaaaacctaaaatcagtaacaaaatagaaattcttagctatgatattatac

SEQ ID NO: 888275 - DNA, 661 bp, Homo sapiens
aatgccacagatccaggaatctataaaaaccccaagcatgggcccggcgtggtggctcacgtctgtaatcccagcactttgggaggctgaggtgggcggactacaaggtcaggagtttgacaccagcctggccaacatggtgaaacctcacctctactacaaacatacaaaaatcagccaggtgtggtggtgggcgcctgtagtcccagctrccagggaggctgaggcaggagaatcacttgaaaccaggaggcggaggttgcagtgagccaagatcacaccattgcactccagcctgggggacagagcaagactccgtcccccactccccaaaaaaacaaaaaacaaaataacacacacacaaaaaaacaaaaaagccaccaagcatgataaatgccatacgcacacacatgccagcctcacctaggcatatcatatcccaatttcagaaaacaaagcaaaaaatgaaaaagccagaggaaaaaatataccttacttatagtggatcaaagataacacacttagaccaatctaattcttgaaaagtgtgctaacaagaagagaaataaagtatttgaaatgttgagagataaaaaccaacctagaactctgtaccctgcaaaattatgttttaaaagtaaaaaagaaataatttctcagc

SEQ ID NO: 888276 - DNA, 645 bp, Homo sapiens
tatgcacctaacttggaaaaacaactggtattcaagtggatataagtctaatgttaattaagcatggagtcatggagaaccagcatggccaccttgcccttcctgagtcctaaaagcttttattattaaaagttctgaattccatgactcatcatggaaaaaataaaatcatccaarttaaatattttggtgtggtgacttacaaattactaaaatagtttataatcaatgtttggccccatattcctgggaaaacaattaatgcttcaggtacatttggtcatctagtgggtcatttaaatattttataaagggatttcattcaattgttattttcaatgcatgttttctgtttgtataaaagctttcccatgcaagaggcctgatgttataacagtagattattatgctacagtgtattttcaccaggtaaagaaagcttgttatggtttggatcttttgggaatgttggagaaagactgtccttaccatccacactacaagaaaacctcgggaccttgaactttgggttcatagtctcatatctgagaagggtccttccacactcttggaactgtacacccacacccattgcaacccttagaataaaactaaccagggaggtttctccccagaggaggatgg

SEQ ID NO: 888277 - DNA, 652 bp, Homo sapiens
atctcaatcgttgatttaaatcataaagagaaagtgagctcacttcccattgcatcaggagaattggtgctgtgaactctgcaagtgaggttcattgcatgatgtcttaggaaagtgatcgagattatgaattttattcatgcttgtgcctttaaacatgaccagtttactggatatactgaagaagttgaagcagaaaatggagatctggtttgctttaatgcaagcagatggmtaggtcatggaaattctgaagagctatactcagctgcttttgttactgttgttaatgttttctacataaaaactaacaattttatgaaaatgaaaacttttctaattgaatgtatgcatcaaattttgtgctaggcaaggatctttttagcatggtaaatataaatatcagaaaggttaccatttaaccaaatttcagcgtacaattcagtggcattaagcacattcacaatattgtgcaaccattgctactgttcatctccagaactttctcatcctcccaaatggaaatactgaacccattaaacaataactccctgaaccttcctgtcccccagtcccttgtaacctcagttctactctctaactccatgaatgttcgtattctaggtacctcatagaagtagaatcatactat

SEQ ID NO: 888278 - DNA, 458 bp, Homo sapiens
actacaaaacactactcaaggaaatcagagatgacacaaacaaatggaaaaatattccatactcatggattggaagaatcactatccgtaaaatgaccatactgcccaaagcaatctataaattcaatgccattcctatcaaactaccaacatcattttttcacagaaccagaaaaaamtattctaaaattcatatggagccaaaaaagaacccaaatagccaaagcaatcctaagcaaaaagaacaaagctagaggcatcacattacctaacttcaaacgatactataaggccaaagtaaccaaaacagcaggtacaggtacaaaaacagacacatagaccaaaaaacagaatagagaatccagaaataaagctacacacctacagccatctggtcttcaacaaagttgaccaaaacaagcaatggggaaaggactccctgttcaaaaactggtgct

SEQ ID NO: 888279 - DNA, 579 bp, Homo sapiens
tgtagtcccagctccttgggaggctgaggcaggagaatggtatgaacccgggaggtggagcttgcagtgagccgagatcgtaccactgcactccagcctgggtgacagagcgagagtccatctcaaaaaaaaaaaaaaaaaaaagatattaaaaaatrtggaagctactttggaactgggtaacatgcagaagttggaacagtttggagggctcagaagaaaacaagataatgtgagaaggtttggaactccctagggacatgttgaatggcgttgaccaaaatgctgatagtgacatgaacagtaaggtccaggctgaggtggtctcagatggagatgaagaacttgttggaaacttgagcaaagatgacacttgttatgttttaacaaagggactggcagcattttgcctctgccctagagatttgtggaactttaaacttgagagagatgatttagggtatctggcagaaggaatttctaagcagcaaagcattcaagaggtgatttgggtgctgttaaaggcattctgttttaaaagagaaacagcataaaagtttggaaaatttgcagtccggc

SEQ ID NO: 888280 - DNA, 579 bp, Homo sapiens
tgtagtcccagctccttgggaggctgaggcaggagaatggtatgaacccgggaggtggagcttgcagtgagccgagatcgtaccactgcactccagcctgggtgacagagcgagagtccatctcaaaaaaaaaaaaaaaaaaaagatattaaaaaatatggaagctactttggaactgggtaacatgcagaagttggaacagtttggagggctcagaagaaracaagataatgtgagaaggtttggaactccctagggacatgttgaatggcgttgaccaaaatgctgatagtgacatgaacagtaaggtccaggctgaggtggtctcagatggagatgaagaacttgttggaaacttgagcaaagatgacacttgttatgttttaacaaagggactggcagcattttgcctctgccctagagatttgtggaactttaaacttgagagagatgatttagggtatctggcagaaggaatttctaagcagcaaagcattcaagaggtgatttgggtgctgttaaaggcattctgttttaaaagagaaacagcataaaagtttggaaaatttgcagtccggc

SEQ ID NO: 888281 - DNA, 557 bp, Homo sapiens
cctctttgatatgagttctaatcttctctggataacgaaatgtcagggaagggattgaaggcaatcgcgtttctctctgggggacctggttttaggtgcataagggaatttcagagaacagcctcatcttgtggcttgggagaggaagaggattgagagagaaaattgggaggatgtcagagagaccttgaagctgctactttagttcagcacatcaaagcaccatattttcggggtttattttttgagccccaacagccaaaataacccactttacacttgacctttatcacacttttraatctttataaaggttaaagtttaagcatgtcatgaaataaactatgaaaaagaaacaaacatcacaatgagagtaatgagaaatttattatatgctcaaatttcaaatgatttgcttattgtaaggaagtaaatcagattgaacccatcacttttgtattaatgctgtttgtgagactaaaacacacagtctgacataagccagtagaaataagactcactggtgaagttttctctagaattaaaataaaacaata

SEQ ID NO: 888282 - DNA, 529 bp, Homo sapiens
ccactgcactccagcctgggcgacagacagggagagactccatttaaaaaaaaaaaaaaaagacgatgctcttgcttaaaaatacaaatatactggtattattacatcagcttttatttatcttttattcagccgagacattttgataaatatatatttcatcttcctcagagaagtagtggataatgctttagatgtagactcgaaatcaattttggtaataactgtgggtatagctcacagctccccaaatggaaatcaggggacatgaaaagagaaagaaggtctgtgatcagctaaacactccaacaagaccctgatgtctcacatcgttcctcatttacagcttatggatgtgaatragggaaaactatttgaaatttcaaagagtttggggttttgaatttgtctttatttaaaatgttccttttctctctttgtacttcatagttcttttcagaactttcatccactgcacgtagtaaacactgtgttctgtaaatgaaaatgagggagaaatggaaggatt

SEQ ID NO: 888283 - DNA, 502 bp, Homo sapiens
taaaggctgggttgataggctgtcccagtgggaaacaaaatgtatttgaacaccatacagaaaaatcaatttctgatagatttcagatccaactgggaaaagcaaacaataaagcttttagaggaaaatataaaggaaatttttgtgaccttggagtaggaaaagatttcttaaacggtaagtagttaggttctaacaataaagaaaactgataaattgttctacgttaaagttaagaaggtcagaagtcaccattcagatagtgaaaaggccaggcagacagtgcgagaagagattcaaaaatacatatatttgawaaaagacttcatatccacaatatataaagaactcctacaaatcaatagaaaaaaatatacagttgtcacttggtattaggaagtgattggttccaggacttccagtagataccaaaatttgcagatgctcaagtccctggtataaaatggagtggtatttacatataactacacaatcctcctgt

SEQ ID NO: 888284 - DNA, 634 bp, Homo sapiens
tcagtagtcagggacccacttgaggaggcagtctgcccgttctcagatctccagctgcatgctgggagaaccactgctctcttcaaagctgtcagacagggacatttaagtctgcagaggttactgctgtctttttgtttgtctgtaccctgcccccagaggtggagcctacagaggcaggcaggcctccttgagctgtggtgggctccacccagtttgagcttcccagctgcattgtttacytaagcaagcctgggcaatggtgggcgcccctcccctagcctggctgccaccttgctgtttgacctcagactgctgtgctagcaatcagggagactccgtgggcataggaccctccaaggaaggtgtgggatataatctcctggtgcaccgtttttacagcccgtccgaaaagcacagtattatggtgggagtgacccgattttccaggtgccgtctgccacccatttcttggactaggaaagggaactccctgacctcttgcacttcccaagtgaggcaatgcttcatcctgcttcggctcacgcatggtgcactgcacccactgtcccttgcccactgtctggcactccctagtgagatgaacctggtacctcagatggaaatgcagaaa

SEQ ID NO: 888285 - DNA, 623 bp, Homo sapiens
agtttatcatgaaaaataattgacgtataattaaatacacttgaataatacttttttccatgccgtatatacatacaaaacactcatacaacatgtatatacatatacatgtaaagggaaatagatgaaaaactagagaaaaggttgaatcaatcagaatacayctacagataggacactatatggctacttacaatagaattttctgacaagagtcacaggaaaactttcttggttaaatttaattaccactttcaagctgcaaatcattccaacatacgatctcagttaaaagatatttgtattcacatattttgatggaggaaaatggtaggaaatacatatgcattgtatcagtgtctatccctaaatgaacagcttttttttggatgctttaaaaaattgttcttataaactcatagattatgaagtactttaagaagccgacattaaaattgttaaagaaagttaataaaatatcgataggctagtaacatagtcagggccttgctttctgaacatcttgaacttttgcttcaattaatgacaaccctatcaaatgtatgctttgttaacttttttagtttttatttagaacttataaggtctttcaggatatgtat

SEQ ID NO: 888286 - DNA, 724 bp, Homo sapiens
agagcgaaatcatgaatgaactcacattcacaattgccacaaaaagaataaaatacctaggaatacagctaacaagtaaagtgaaggacctcttcaagaagaactacaaaccactgctcaaagaaatcagaaatgacacaaacaaatggaaaaacattccacactcatggataggaagaatcaatatcgtggaaatggccaaacagcccaaagtaacttatagattcaatgctattcccatcaaactatcactgacattctttacagaattagaagaaactattttaaaattcatgtggaactgaataagagtttgcatagccaagacaatcctaagcaaaaagaacaaagctggaggcatcaygctacccaacttcaaactatccttcaaggctactgtaaccaaaatagcatggtactggtactaaaacagacacataaaccaatggaacagaatagagaacccagaaataagaccacacacctacaaccatttgatccttgacaaaggttatttcacaccgtgtttatccattcacctgtggatgaacatttgagttatttcagattttggccattaacaaataaaggtactataaatgcttgtgtacaactatttatgtatcaggataaaaacaagcagtggggaaaggattctttattctcccaatgctgggagaactggctagtcatatgcagaaaatttaactggacgccttcctta

SEQ ID NO: 888287 - DNA, 596 bp, Homo sapiens
caatgtgggctcttttttggttccatatgaacttaaagtagttttttccaattctttgaagaaagtcattggtagcttgatggggatggcattgaatctataaatttccttgggcagtatggccattttcaagatattgattcttcctatccatgagcatggaatgttcttccatttgtttgtgtcctcttagttcatttrtagttctccttgaagaggtccttcacataccttgtaagttgtattcctaggtattttattctctttgtagcaattgtgaatgggagtttactcatgatttggctctctgtttgtctgttattggtgtataggaatgcttgtgatttttgcacattgattttgtattctgagactttgctgaagttgcttatcagcttaaggagattttgggttgagacgatggggttttctaaatatacaatcatgtcatctgcaaacagtgacaatttgacttcctcaattcctaattgaatacactttatttctttctcttgcctgattgctctggccataacttccaacactatattgaataggagtggtgagagagggcatccttgtcttgtgccagtttt

SEQ ID NO: 888288 - DNA, 596 bp, Homo sapiens
caatgtgggctcttttttggttccatatgaacttaaagtagttttttccaattctttgaagaaagtcattggtagcttgatggggatggcattgaatctataaatttccttgggcagtatggccattttcaagatattgattcttcctatccatgagcatggaatgttcttccatttgtttgtgtcctcttagttcatttatagttctccttgaagaggtccttcacataccttgtaagttgtattcctaggtattttattctctttgtagcaattgtgaatgggagttyactcatgatttggctctctgtttgtctgttattggtgtataggaatgcttgtgatttttgcacattgattttgtattctgagactttgctgaagttgcttatcagcttaaggagattttgggttgagacgatggggttttctaaatatacaatcatgtcatctgcaaacagtgacaatttgacttcctcaattcctaattgaatacactttatttctttctcttgcctgattgctctggccataacttccaacactatattgaataggagtggtgagagagggcatccttgtcttgtgccagtttt

SEQ ID NO: 888289 - DNA, 603 bp, Homo sapiens
ggacttcccagcctccagaaccatgagaaacaaatgtctgttgtttaactcacccatctgtgataatatattacagtagcctgaactcactaagacaatcactgaagcagaccactgcaatccaaggtgttgagtgtttaaagagggcaatactgaaccctgtgggcatacagataggaaagcaaaagactgttagactgacaaagtcatattccaattgaagcaggcaaaacatgacttgtgtcctgaaggatagaagttatttargctaggaggagtaataaaaagggaatggtacttgatgcaagggaaaagaatgtgcaagatatagcagctagggtatatggtttgtatagggatatgcaaattatttaatttacttgtttattaaacagaagtttgactgcttatcatgtctcaggtactatgctaaatacagctgagaacaaaggcccagactcatgacaccagaatctctaagggtgggatccgatgaaatgtattataaaactttctagatgattatgatgcacagcagggttgaaaaccactggtctagatgaattcactttgctggcttccacagaaaagaagtaaagggac

SEQ ID NO: 888290 - DNA, 693 bp, Homo sapiens
ggaggcattatgctacctgacttcaaactacactacaaggctacagtaaccaaaacagcatggtactggtaccaaaacagacatatagaccagtggaacagaacagaggcctcagaaataacaccacacatctacaacaatctgatctttgacaaacctgaaacaaataagcaatggggaaaagatgccctatttaataaatggtgctgggaaaactggctagtcatgtgcagaaaactgaaacaggaccccttccttacaccttatataaaaatcaactcaagatggatcaaagactcaaacgtagaccccagaaccataaaatcctagaagaaaacctggccaataccattgaggacacaggcaccggaaaagacttcatgtctagaacaccaaaagcaatggcaacaaaagccmaaattgacaaatgggatctaattaaactaaacagcttctgcaaagcaaaagaaactatcatcagagtcaacaggcaacctacaaaatgggagaaaaattttgcaatctatccgtctgacaaagggctaatatccagaatccacaaagaacttaaacaaatttacaagaaaaaaacaaacaaccccatcaaaaaatgggcaaaggatatgaacagacacttctcaaaagaagacatttatgcagccagcagacatatgaaaaatgctcatcatcact

SEQ ID NO: 888291 - DNA, 652 bp, Homo sapiens
acaaaatgactgctgcctcccttctgccctccacatctcccacagtaagtcctttggggccaaccttaaccagaaaaatacaggaaatggaattctgggaaatgtagtttaacctagccaagttgacgcatcacaaagtcatcaaagaaggattcaagtccaaggactttatttgcgagctgatcccaggaaacactggtaggcaagtagggaagtakgacagggatggaaaagaggccaagggtggggcatggtggctcatgcctgtaatcccagcactttgggaggctggggtggatcatttgaggccaggagtttgagaccagcctggccaacatggtgaaaccctgtctctaccaaaaatgcaaaaattagctggcgcggtggcacactcaagaggctgaggcaggagaatcatttgaacccgggaggtggagattgcaataagctgagattgcaccactgcgctccagcctgggtgacagagtgagactctgtctcaaaagaaaaaagaggctgggcactgtggctcacacctgtaatcccagcactttgggaggccgaggcaggaggatcacctgaagtcaggagttcgagaccagcctggccaacatggcagaagcctgtctctactgaaaatacaaaaattagt

SEQ ID NO: 888292 - DNA, 644 bp, Homo sapiens
tgaatgagatcaatataaacagggttcattgtattttaaatagcaggatttaagtaggcttttattcataacagagatggacagtcctctaaattacgctgaggcatcaggggacgaaaggagagaggggagtaagtgacggcccggaaagcatatctgtgggatcctaaatgaagcaaaattaaaatgcatttttccagaaagccaaacaaattataagtaggaacaattaggtgacgacaattcctctagtagaaatatatatgtttctgttttcctatttataatggagctagaaggtatcagagtcctcctgytactggtttgacgctaagccttaatttagaataaaaatattcaggaaagaaatgggggcaaggactttggtctagatagaactgtaacccacacttaagagtttccagctagttagtaccagattttgactatgaacccacaagagaataaacagttcatcctgagaacgctggggttctgaattgtccaggaatccttcttattgtctaaaaacacgaatatcttatgtcatccaaaggcaccctcagagatatgttattttcttagggaataaatagttcatagttcactctggactttgagcccaagtttaccaagtaacactc

SEQ ID NO: 888293 - DNA, 644 bp, Homo sapiens
tgaatgagatcaatataaacagggttcattgtattttaaatagcaggatttaagtaggcttttattcataacagagatggacagtcctctaaattacgctgaggcatcaggggacgaaaggagagaggggagtaagtgacggcccggaaagcatatctgtgggatcctaaatgaagcaaaattaaaatgcatttttccagaaagccaaacaaattataagtaggaacaattaggtgacgacaattcctctagtagaaatatatatgtttctgttttcctatttataatggagctagaaggtatcagagtcctcctgctactggtttgamgctaagccttaatttagaataaaaatattcaggaaagaaatgggggcaaggactttggtctagatagaactgtaacccacacttaagagtttccagctagttagtaccagattttgactatgaacccacaagagaataaacagttcatcctgagaacgctggggttctgaattgtccaggaatccttcttattgtctaaaaacacgaatatcttatgtcatccaaaggcaccctcagagatatgttattttcttagggaataaatagttcatagttcactctggactttgagcccaagtttaccaagtaacactc

SEQ ID NO: 888294 - DNA, 644 bp, Homo sapiens
tgaatgagatcaatataaacagggttcattgtattttaaatagcaggatttaagtaggcttttattcataacagagatggacagtcctctaaattacgctgaggcatcaggggacgaaaggagagaggggagtaagtgacggcccggaaagcatatctgtgggatcctaaatgaagcaaaattaaaatgcatttttccagaaagccaaacaaattataagtaggaacaattaggtgacgacaattcctctagtagaaatatatatgtttctgttttcctatttataatggagctagaaggtatcagagtcctcctgctactggtttgacgctaagccttaatttagaataaaaatattcaggaaagaaatgggggcaaggactttggtctagatagaactgtaacccacacttaagagtttccagctagttagtaccagattttgactatgaacccacaagagaataaacagttcatcctgagaacgctggggttctgaatygtccaggaatccttcttattgtctaaaaacacgaatatcttatgtcatccaaaggcaccctcagagatatgttattttcttagggaataaatagttcatagttcactctggactttgagcccaagtttaccaagtaacactc

SEQ ID NO: 888295 - DNA, 637 bp, Homo sapiens
gagaaaactgggtaccattatatttttgtgcaaatccattctgttccctctcactcatttttcagtctttgcaaaatatctcgagcttcccttctgcttccaccataatcctgcaatgccctactctccaccatgcattaaattcatatccttatacatctaggtatcacctgagttgcttcaaaatcaaatcttatcaagaagagatttggcaatctctcaagaaccattcagtcaaacacattactacaacttgctctctcccttgagtatccacataacaagtgacatgctatctttcctctttctttctgcctcaatrttcttcattgtaagtttccagagcagacaggctttttttccccctttacttaattcattttgcattacatttaactcagtgatatgcacagtctggtgctaattcttactgtgaataatagaaaatacactgaaattctatttcctatagggtctcaatttgggtctgttttctcggtaatacattttttaatagcaattcaatagtgagctaaagaattcctttgagttcaggaacatcccatttgtcaatttagagtaaaatacctgagctcttttttcccccttttctatgagcttttctttactgctgcat

SEQ ID NO: 888296 - DNA, 637 bp, Homo sapiens
gagaaaactgggtaccattatatttttgtgcaaatccattctgttccctctcactcatttttcagtctttgcaaaatatctcgagcttcccttctgcttccaccataatcctgcaatgccctactctccaccatgcattaaattcatatccttatacatctaggtatcacctgagttgcttcaaaatcaaatcttatcaagaagagatttggcaatctctcaagaaccattcagtcaaacacattactacaacttgctctctcccttgagtatccacataacaagtgacatgctatctttcctctttctttctgcctcaatattcttcattgtaagtttccagagcagacaggctttttttccccctttayttaattcattttgcattacatttaactcagtgatatgcacagtctggtgctaattcttactgtgaataatagaaaatacactgaaattctatttcctatagggtctcaatttgggtctgttttctcggtaatacattttttaatagcaattcaatagtgagctaaagaattcctttgagttcaggaacatcccatttgtcaatttagagtaaaatacctgagctcttttttcccccttttctatgagcttttctttactgctgcat

SEQ ID NO: 888297 - DNA, 613 bp, Homo sapiens
accctttttcttgtggtagagaagggataaagcagaatggtgtgagatttcatttgctactcagaattgcatgcaatttaaaacttatgaactgtttatttctggaatttcccatttaatatcatcagactgcaattgaccatgaaaaccattgaaaccacagaaagcaaaactgtggataatggggaaagtgcttagctaatggtaaactctrcaaatgtcaatgttgatattattctagttacagtggtaataggagagaggggtacacaagggagcgttttaaagcctattccaaacatcaatcatccatttttttcttcattcaaaggaagtatacagattgtcatattgcatgcctactgtattgaggtagacataactgctttgggaacaacacaagatcttggtgagattctcaatagggatatttgcatctaaaagctcttcgctctgtcagcttccctcctctagagcagcagtccccatggtgtggggatgattcaagcacattccattatcattagagtctcatataggagcacggaacctagattcctcacatgcagcaattcacaataggggttgccctcctctgataatctaatgcctg

SEQ ID NO: 888298 - DNA, 618 bp, Homo sapiens
atttacccaatgcctgtactcccagtgtacgtaggaagtaactaacttgcttttgattttataggctcataggcagaagggacttgccttgtcttgcatgaaactttggactgtggacttttgagttaatgatgaaatgagatgagactttggtggactgttgggaaggcatgattggttttgaaatgcaaagatataagatttgggaggggccaggggcagaatgataaggtttagctccatgtccccacccaaatctcatcttgtagctcccataattcctatgtgttgtgggaggaacctggtggaakatgattgaattatggggtcaggtctttcccatgctgttctcatgatagtgaatgggtctcacgagatatgatggttttaaaaatgggagtttctctgcacaagctctctttttttgactgttgccatccatgtaagatgtgacttgctcctccttgccttctgccatgattatgaggcctcccagccacgtggaactataagtccaataaacctctttcttttgtaaattgcccagtcttgggtatgtctttatcagtagcatgaaaatggactaatacacattattattattgattctatgataat

SEQ ID NO: 888299 - DNA, 565 bp, Homo sapiens
atattgaggctctcactcccaatgtgatggggttaggagatggggccgtttggggggtaattaggtttagatgaggttgtgagagtagagcttccatgattggactagtggctttagaagaggaagagacagcagagctctctgtttctctgccatgtgaggacacagcaagaaaacagccttctgaaagccgggaagacagtctttatcagaaaccagccacagacaccctgatcttagaatttccatgctccagaaatgtctggggtttaagcctctcagtctatgatattttgttgtagcagtgtaagacatgyagaattagaggagtgattaagacaaatgtcagtaaagattgttttcttaaagagaagagacagccataaaaggtgatgtcaccccctacagcaagcataatgagtcaaggtcttggtgaaagccaacctgctcttaagatggtgatggaatccatgtcaattctcagtctaggcagcttccttaatgccttccaggtgattttaaaagagccaccagggatataggcttgtgcattaattaacaaagt

SEQ ID NO: 888300 - DNA, 636 bp, Homo sapiens
aagctttcctatacaccaataatacacagagagccaaatcatgaatggactcccattcacaattgctactaagagatcaaaatacctacaatacaacttacaagggaatttaaagacctcttcaaggagaactacaaaccagtactcaaggaaataagagaggacaaaaacaaatggaaaatcattccatgctcatggataggaagaatgaatatcgtgaaaatgaccatactgcccaaggtaatttatagattcaatgctatgtccatcatactagcaatgactttcttcacagaattagaataaactactttaaactttatatggaaccagaaaagagcctgcatagccaggtcaatcctaagcaaaaagaacaaagttggaggcatcatgctacctgacttcaaactayactacaaggcaacagtaaccaaaacagcatggtctggtaccaaaacagctgtatagaccagtggaacagaacagaggcctgagaaataacaacacacatctacaaccatctgatctttgacaaacctgacacaaacaagcaatggggaaaggatttcctatttaataaatggtgttgggaaaactggctagacttatgcagaaaattgaaactggacctcttcc

SEQ ID NO: 888301 - DNA, 654 bp, Homo sapiens
tttccctgtaatacccattgtcaccatcaggacttataaagaactctcatgctgtccagagtctgtcagacagaatctctgcatgtcaggatcattcatttaccaagtcaacatttattggagactttctttatgtcagttagtactaaatgctggggttaaaagatccagtggaatagttccttgctttcaagaaacccgccatctgataaacaaaattttattctgtggttaatgtgagaaaggcaagaaattatggtgctacttttttkaaattcagaagaaaaacttaaacaaaatataaatttttaaaatatatttgtatatatagatcaaatttccaaacatatatgattgaaacatatattttatgtatatatatatacatgaaatatatatatatagtaaagatatggggtttgcttggttttgcaagtaacataggcatggagaagctgcgttaaatgtcagtgatgaatctattggtaataaaagtgtagtttggcctcacatggacctatgagaaaaagtaagttacaaaggaaggtacttttttgtagctctcaaggtaacatggtcttttatctttgtttctgtctgtgttattcttaattatgtatgcttactactagttcttctgcttcactatatact

SEQ ID NO: 888302 - DNA, 648 bp, Homo sapiens
tttaactgtggaccaaaaaccctgaccaaaaagagtgctgggatatgtgtgctgtcattttattcaccacaatgttaaatagaactgtgacatgctagactgattctggataaattgtcttttactggcttgataaaaggatgctctgaaggaaaaattgtgagacaaggaataactttcagaaaagtctgaataaagaagtttctctaattcttaatagagtcagtataattccaagggctaaacaaatgctacttttatgcaaatttattgcttcaaatgttattgtaataatgtggcacatcaattgatattttgaggatctggaaactttttttaatttgaaaaatgtatagctatatccttggtcatcccttatgcctcaaaatggtaaacattcatgggttccctggtaagtctctagtagtctgcattttattttctcygataatcataaccatggacttggtaagtgtcaggtgctatgcaaagctttttacctctattattgaaagacacattttattttcttagttgtatgttgagaaatttgagattcaggaagtctagggagcttgtcaaaagtcacaattagtactaaagctgggattcagttatgcctgaccaaaagtgttctgtcctttttaa

SEQ ID NO: 888303 - DNA, 619 bp, Homo sapiens
ataatttctttatttggctttcatgtgtgtactgccagtcagatatctttactttcatataaacgtgatgctgtatgagtcttttgctgcaatgtataatgtcaattgagtgttcaggaaaattaaagcatttttgagatttgcataagaagggaatgcatgtgcttgcatacaaatgctctttttttttcttttaggaaacattttctaaatarcaaaaatgtgttttgctgatttattctagaaattagaattaattctttacaaccactggcatgatctttcatttataccattattaaagatttttaatgctgaaaatgatttcattttttccaattaaagaatggagttaaataaaaaaagctacatctcatatttaacatttatgactattcaagcaaatgaattattagcaatattttaattgcatgcatagtatatacaaaaaaagtttctagacattacttaaatgctttccatcttttttgtgattctgccaaaatgaccattgtctggttgaagatcttaatgttgaatatggaactacagtatttaagcgagcatatatgctagatttagggacaggcttgaaatttgtatcatcagactctgatag

SEQ ID NO: 888304 - DNA, 543 bp, Homo sapiens
tcagccatatattacaagaatgtttttactattttttatccagcattttaggtagtcctctcaaatggatgaaaatggaattatagctgcagtgaatatcattccataactatttgttgtaaaaatagctacctagcactacttattaatatggtttatactttaagattcattaaggaagcatctttttttcagattgaattgatatgggaaactgtattttttctaaatagattcaatatttataacatattttaccaagggattgtaaaatagtcagtactytggggttatctgctaaatgaatggtttgcctctgataaaggcaatttatgtttaatgtgagcatttacattgcatcagcattttagaatataacattaaatgaccaaccgcctattactaatgaacacaaattgagtcatttattttagtcctgaaaataaattatgacattttatattcttaaatattttttgaggtgggaaaaatcttttgtaaactcttaagattactgtttttaatttttcttgtattattgat

SEQ ID NO: 888305 - DNA, 588 bp, Homo sapiens
atgctgtactggatcccagcccaaagccagcccaggcagcctccagcatagctacatcattggtctatgctcatgtcctgtccatggggccatgtctccaactatagcaacacagcagaacctggctctcctgggcctttgagagacccattaataataactcggccaaggtcacacagtgagttattgccagakcaaacctggaatgatgaagtgctctttttctcactgctataacaggagtcctatggtcaaatgtgcctaaggacgagtcatgcagtatacaaaggtcaattaggcacaccattagagactattcagaattggagtgctggctgggcacagtggctcttgcctgtaatcccagcactttgggaggctgaggcaggtggatcagctgaggtcgggagtttgagaccagcctgaccaatgtggagaaaccccgtctctactaaaaatacaaaattagccaggcatggtggcgcatgcctgtaatcccagctacttgggaggctgaggaagaagaatcgcttgaatccaggaggcagaggttgcggtgagccgagattgcaccattgcactccagcc

SEQ ID NO: 888306 - DNA, 572 bp, Homo sapiens
tgtaggtaacaatagagatagttcaatatttgctttagaactcataagggacagtaatctttatcctatatatactaaaatgtattcttttttaactggaaaagttagagcattatcgagtttaattcagactcctgtcttcaaaagctattcacagctaccacatagtcaacatcactggactttttaagtacatggtcttgcttgcaagacaagagaatgagtttgttgaccagattaggaaattactcattggyctcagcatgaataaactgttactcttctgctcatattgagacagtagagcggattccgtagtcaagtacacaaatactatttcaaaggaggtcccagagaactgtgaagtcacctgagaaagattgacatttagctgctagttactgcaatgcaaacaaacaacttggtaaaattacacctatctatgacctacctagatcatgccagacatgagcaagtctaggccatggtgctaacaggatcattcaacactgtgtgttcaacaaccacattttgactctggcttgagcctcccattctctaacttttctctt

SEQ ID NO: 888307 - DNA, 667 bp, Homo sapiens
tggccccttgccctcacaaaaacactaagtttctgattccatttcaagccccctgaattcaaagtctaaaagcatgacagggcatgaaatagccctctctcctaagtgaaaggatttcctttccccagcaccaatgactccggctgttttccgtattttccctattataaattctgtcaccatctttcacagaagctccacttatggggttaaatgtggaactgctggcttaatatcttctgattgaaaagtgggtatgtgtttctcacttcgggctcactgagtttggacacagctccccatgaggaaatgcawctccgtgtctgatgccttttacagctgtaagaaggcgtggaacccagtaaggacccacaggattaaggaggaagcaggggatgtcccttaaagcatgttgagatgttcccagctgcatatgtcatgtgggtggaacggggaagttattatacaggaaaacatgggcacgcttgaagcattgctctacagaggagccaaaactctggggattatgttgggattcaagacctctacaccaacctatcagaacataagtccatgagaagaaatgcagagaaagaatgtgttgacaaattaaccattatgttcattgttctttacacttaaaaaataaaataaaataaagttctta

SEQ ID NO: 888308 - DNA, 596 bp, Homo sapiens
gcaaaggaaacaattaacaaactgaaaaggcaactaatggagtgggagaaaatatttgcgagccacatatcagataagggctaaaatccctatggagttcatacaactcaatagcaaaaaaaacaaacaacctaattaaaaaatgggcaaatggcctgaaaagatattcctccaaagaagacaaaaaaaatggccaacgggtttaagaaaaggtactcaacatcaccagtcattggggaaatgcatattaaaaccacaatgaagtatcatcctacacctattaggatggctattgtaaaaatgacaagagataaccagtgttgatgaaggcacagagagaagggaatccttgtaccctgttggtgggaatgtagatttgtgcagccattatggaaaacagtatggaggttcctaaagaaaataaaaatagaacttccatacgacccagcaatcccayttttgggtatatactcaaatgaaatcaccacgttgtaaagatatctgtactaccatgttcatggcaccattactcacaatagtcaagatatggaaacaagccgtgtcaatcaaaggataactggataaagaaaatgtgg

SEQ ID NO: 888309 - DNA, 719 bp, Homo sapiens
cccagcaggcaatggttaatgtctcagatttccatggttacatttgtccaaagatcagctaacttttaatctcaagagtcatcatcaacaagcaaagcacattggcagccctttgatattgacagggaaaaatgcagacttgggagaaagagaggaggagaaagagaaaggaagggcaaggggcccaaaggaaggctcgggctggagtggctgccctgtccccacaggctggctccttctttacagtagtgattgtcaaggggctgggaggggatggagcatcaaaacacctgagagctttgccaatctactcttccctggctcccaagtcccctgaccccaggarttctagaagctcctcctcccccagttgagaagcctcactttcaagggtgaatacactcttggattggagctgggatggtacaggcatcgttggccaaaaaaggtgcctatcaacatgtgacttctgctgctgcttgaagacatatcagtgttaagaagggagtgaccatataatttgtcacccaaatgagggcacttttgacatgggggggaaaggaaagcaaaccaactgagactgtcctgggcaaactctggtattaagaccaccagcagagctccaaatgtgactgagaaattccagtatcagcatcacctagagatatggttttaaaaataaatctctgagctcatctccagatgtactggctcaaaat

SEQ ID NO: 888310 - DNA, 689 bp, Homo sapiens
gcacagaaatcaggaaggcaagggttaaaataagaggggtagccaacagtgtcagatgctttcaagggtcaaaaaggccaaggactggaaaaagcaagtgtatttggcaatttggaagccactgataaccttcaagaaagctgtttccttagagaggagaggagaggagagctagactgaggagggtgcatgggagtggatggggccacagtgtggatgggtcatttaggacaaaaagtgctctgaaagtcctaagatatgtgctgggggacacgtggttaagcaagggtttcaccaagctttgggactgtgcatgtttgtgagcaagaggaaaagacctwggagaggcagtggatgctgcaggcatctaggcagggtgtgcagtaggtcagcagaacagagtgtcatgtaccagctgatgggttgggcctggaattaagaggaaaggaagccaggatgggcaagaagatagaatgaggtggaagagagcaactagacagtaatatcctgtattagttcattctcatgctgctataaagaactgcccgagactgggtaatttacgaaggaaagaggttgaattgactcacagttccgcatggcttgggaggcctcaggaaacttacaattatggaggaaggggaagcaaacacttccttcttcacatggcgtcaggagagataagtgca

SEQ ID NO: 888311 - DNA, 606 bp, Homo sapiens
ttatttgttttagtgttcgctggtcggtgtctttatgtctgttgtacattgtgataatcagtataaaaatcatagacttagataacatgaggtggaagaagctgtgcctatgtgaaaacagaaagtcaaagacgatgttctagacttctaatgatgtaaaatgggcttggggttctgtaacatggaggttactgatttctttttggctcatgccaaacatagaacaacaaaccccactcagtatctcactaagggctttttgaaaagaagaggtagttgccattttagagtttacaaagtacttttcacatttcgtcctcccaattaccatgagcagtcaatagtacacatctgtgttacatatgagaaacttcaaattcagaaaagccaggaaatgtacctgtgatgacttgattagcaagtgtcaaaggaacttgaatttaggtcttaatttctaaggcccrtattctaccatgcctggctgtgatatttccctcaaatgcaaaagaatcataaattattgttatttagattttattggtagtattaagtatccaaaatcatcaccaacttttggaggctaaaagaatttgggtccaattctgt

SEQ ID NO: 888312 - DNA, 610 bp, Homo sapiens
tcttcaatttgaccatttttgtatcccggtactattattatactgttttaattgttatagctttataagttttttggattggtgtttcagttatttattgctgcaaaacaaaacagtggaggttttctaaaaaatcattattttccatgattttgtgggcagccacaaaattccgtttcccatggtatcagcccaggcactggacratcatgaggtccaaaatagcctcattcgcatggttgactaccacagtgctagctgacaaatgggagctcagctggggttttcaactaaagcctttgtttttctccatgtgggtatctctatgtggctatttgagctttggaaagcatgataggtgggatccaagaagaaatattacaaaaagcaaaggcagaaattgcagatgtcttaaagtctagcctcagacatcactcaaagccacctctgccttattctattcctacaagttgattaaaagaaggtaaagtagactgcacctcttgatgggggagtggcaatgtcactttgctaaaaagtacctgggaaggaaaatagtgttgtgatcatctttggaaataacaatctattgcattctggcaggacaagc

SEQ ID NO: 888313 - DNA, 624 bp, Homo sapiens
ggctggaaagtgaccaagggctgactcagcagctttcaaactcttctgttgagtttaaaaaataaaatgcgaaagtagagagagaaaataggaaggaatagtccaagaaaggacgataaaaattaaataggccaggtgcagtggctcatgcctgtaatcccagcactttgggaggccgaggtgggtggatcatgaggtcaggagatcgagaccatcctggccaacatgatgaaaccctgtctctactaaaaatacaaaaattagctaggggtggtggtgtgtgcctgtaatcccagctactcgggagggtgaggcaggagaatcgcttgaaccagggactcggaggttgcagtgagccgagatggagccactgcactccagcctgacgacagagtgagactctgtctaaaaaaaaaaaaaagaaaaaaaaagaraaaaaaattaaataaactaataataaaatcataaaatctgggctgtgagttcacttctagaatgctaggtactcatggaaatttacctaaaaccaaaaaggtgaagtaggagctgaagacaggggtgggggacagaaggatggggaaatgggaatggggggcacagacaggtggaaaatttagaggaata

SEQ ID NO: 888314 - DNA, 548 bp, Homo sapiens
gtgtagtctgtgtcagaaaagcctcagagacggtaacacttaggcagagatctgaaggtgaagacagccagtgaagaccatttagaggaaagagaataataaaaacaaagtcccttgggtaggaaagtacatggatttttctaggaactgacagaaggtcagaacagcaatgatatagagaatgtgggtgaacatggcagaagacaaggtgggagacatcagcaggggccacagcattgagaccatgggaatagtctcgactttgggagatgcaagtatcagaaacccagtgtaaactggttcaaggaaaaaagggaatgtattggctcagttgtccaaaaagatcaagtgtggacaaaaacttgctcagatagtgtcactggcaatccatgtctstctcacctgtctgttttcctctggcttgcttcatttccagaaaggcaaaatgtggcaagaatgtcacaagttagtaaagaatataaaattcagccacatagtctagcagtttagcaatcctaaaagattgcactggttttcttttttttttt

SEQ ID NO: 888315 - DNA, 571 bp, Homo sapiens
cagcactataaaaactccactgcagataggtgcagcccataacacggggctccttctccccttaactccaagttggaagcctacagtatcttctcaggaagaacaggacataagcatttctcatcctgtccaagcttactgttgcagatgctaagttttaggtgagtatagctgagagataggggatcccttcttcttcccagccctcaccagtgagatggccactctaacttgggtgtggcaagctgacaaatcctaggtccccaactactctcaccctggctcattcataaagcagaggttccacaccaggagaggcaagctgagaagaccagaggttacagccagcccccacttcagcaagcacccaactcytaaagtaagggtcttactgagagaaaagcatgccactgtccccatccctagctccagatatttcacccatggggagagacagaccatgaaacagagagttctgaagcttgtctaaaagaactgacttcatttgcaacagcatgtggggaagttaaagtctaagggcactctcaaaaacaatagaggttgtggtgaa

SEQ ID NO: 888316 - DNA, 656 bp, Homo sapiens
caaactaccatcagagaacactataaacacctctacacaaatatactggaaaatctagagaaaatggataaattcctggacacatacaccctcccaagactaaaccaggaagaatttgaatctctgaatagaccaaaaacaggctctgaaattgagggaatgattaatagcctaccaaccaaaaaaagtccaggaccagatggrttcacagccaaattctaccagaggtacaaagaggagctggtaccattccttctgaaactattcccaccaatagaaaaagaatgaggccagcatcatcctaataccaaagcctggcagagacacaacaaaaaaggagaattttagatggatattcctgacggatatcaatgcaaaaatcctcaataaaatactggcaaactgaatccagcagcacatcaaaaagcttatccaccacgatcaagttggcttcatccctgggatgcagagctgattcaacatatgcaaatcaataaacataatctgtcacataaacagaaccaacgacaaaaaccacatgattatttcatgctgaaaactctcaataaactaggtgttgatggaacgtatctcaaaataataagagctatttatgacagacccacagccagtatcatactgaatgggcaaagact

SEQ ID NO: 888317 - DNA, 615 bp, Homo sapiens
ccctttgaaaagtggcacaagacaaggatgccctctctcaccactcctagtcaacatagtgttggaagttctggccagggcaattaggcaggagaaggaaataaagggtattcaattaggaaaagaggaaatcagattgtgcctgtttgcagatgacatgattgtatatctagaaaaccccatygtctcagcccaaaatctccttcagcaaagtctcaggatacaaaatcaatgtgcaaaaatcacaagcattcctatacaccaataacagacaaacagagagccaaatcatgattgaactcccattcacaattgctacaaagagaataaaatacctaggaatacaacttacaagggatgtggaggacctcttcaaggagaactacaaaccactgctcagcaaaataaaagagaacacagacaaatggaagaacatcccatgatcatggatatgaagaatcaatcttgtgaaaatggccatactgcccaaggtaatttatagattcaatgtcatccccatcaagctaccaatgactttcttcacagaactggaaaaaactactttaaagttcatatggaaccaaaaaagagcctgcattgccaatacaatcctaa

SEQ ID NO: 888318 - DNA, 644 bp, Homo sapiens
aaatcagagaaaacacaaacgaatggaaacacatttcatgttcatagataggaagaatcaatgtcattaaaatggccacactgcccaaagcaatgtacagattcaatgctgttcctatcaaactaccaacaacattcttcacgaactagaaaaaaaaaattttaattcttatggaacaaaaatgagcctgaatagccaaggtaatccaaagcaagaagaaaaaaagctggaggcatcacactacctgacttcaaactacactacagggctgcagtaaccacaagagcatggtactggtagaaaaaccggcacatagaccaatgaaacagaatagatagcccagaaataaagcaacatacctacaactacctgatattcaataaagctgacaaaaacaagcaatggggaaaagactccctattcaataagtggtgctgggataactggctacccatatacagaaggctgaagctggaccccttccttatagcatatacaaaaactaagtcaagatggattaaagacttaatgcaaaactataaaaamcctggaagacaacctaggcaatatcatcctggacacaggaatgggcaaagatttcatgacaaagacactaaaagcaatcacaacaaaagcaaaaattg

SEQ ID NO: 888319 - DNA, 596 bp, Homo sapiens
tgcagtcagttctgcctgaaagaattgcttttcacccagaccttcctcccatagctggctcattttcatcattcaagtctcatctcagaagcctctggctgggcgcggtggctcatgcctataatcccagcactttgggaggctgaggtgggcagatcacttgaggccaggagtttgagactagcctggtcaacatggtaaaaccccatctctactaaaaatacaaaacattaaccaggtatggtggtgtgtgcctrtagtcccagctactcagaggctgaggcaggagaatcacttgaacccgggaggcagaggttgcagtgagctgagattgcaccgctacactccaacctgggcaacagagcaaaactctgtctcaaaaataaataaataaatacataagaagcccctgctcagagaggctgcccaaaccattccagttgaaatagacacgtacacccagtaagagaaaattaaaaaaatctcaggacccccaaactcattatgccaaagaaaaagttaagcctcggagactgagtgacccaacactgccatcttttccccagatgaatagctgtcactccacaaccttgtgt

SEQ ID NO: 888320 - DNA, 596 bp, Homo sapiens
tgcagtcagttctgcctgaaagaattgcttttcacccagaccttcctcccatagctggctcattttcatcattcaagtctcatctcagaagcctctggctgggcgcggtggctcatgcctataatcccagcactttgggaggctgaggtgggcagatcacttgaggccaggagtttgagactagcctggtcaacatggtaaaaccccatctctactaaaaatacaaaacattaaccaggtatggtggtgtgtgcctgtagtcccagctactcagaggctgaggcaggagaatcacttgaacccgggaggcagaggttgcagtgagctgagattgcaccgctacactccaacctgggcaacagagcaaaactctgtctcaaaaataaataaataaatacataagaagcccctgctcagagaggctgcccaaaccatkccagttgaaatagacacgtacacccagtaagagaaaattaaaaaaatctcaggacccccaaactcattatgccaaagaaaaagttaagcctcggagactgagtgacccaacactgccatcttttccccagatgaatagctgtcactccacaaccttgtgt

SEQ ID NO: 888321 - DNA, 628 bp, Homo sapiens
tgtgctctttcagactttttgatataggcgtttagggctatgaactttcctcttagcattgcctttgctgtatcccccaggttttgataggttgagtcactattgttcttcagttcaaagaattttttaatttccatcttggtttcatttttgacccaatcatcattcaggagcaggttatttaatttccatggttttgatggattcttttggagttgatttccagttttattccactgtggtctgagagtgcttgatataatttcaattttcttaaatttattgaggctcgttttgtggtctatcatatggtctatcttggagaaatttccatgaaytgatgaatggaattctgtggttgttgggtaggatgttctgtaaatatctgttaagttcatttgttccagggtatagtttaaatccattgtttctttgttgactttccgtcttgataacctgtctagtgctgtcagtggagtactgaagtcccccactattgttgtgttgctgtctatctcatttcttaggtctatttgtaattgtcttataaatttgggagctccagtgttaggtgcatatatgtttaggattgtggtattttcttgttggacaaggccttttatcatta

SEQ ID NO: 888322 - DNA, 591 bp, Homo sapiens
ttcagggtacatgtgtacaatgtacaggtttgttacatgtgccatgttggtgtgctgcacccattaacttgtcatttaacattagatatatcttctaatgctatccctcaccattccccccaccccacaacaggccccagggtgtgatgttccccttcctgtgtccacgtgttctcattgttcgactcccacctatgagtgagaacatgtggtgtttggttttttgttcttgagatagtttgctgagaatgatggtttccagcttcatccatgtccctacaaaggacatgaacccatccttttttatggctgcatagtatttcatggtgcatgaaatccagtctaccattgttggacatttgggttggttccaagtctttgctattgtgratagtgccgcaataaacatacttgggcatgtgtctttatagcagcatgattcataattctttgagtatacactcagtaatgggatggctgggtaaaatggtatttctagttctagatccctgaggaatcgccacactgacttccacaatggtggaactagtttccagtcccaccaacagtgtaaaagtgttcctatttctc

SEQ ID NO: 888323 - DNA, 591 bp, Homo sapiens
ttcagggtacatgtgtacaatgtacaggtttgttacatgtgccatgttggtgtgctgcacccattaacttgtcatttaacattagatatatcttctaatgctatccctcaccattccccccaccccacaacaggccccagggtgtgatgttccccttcctgtgtccacgtgttctcattgttcgactcccacctatgagtgagaacatgtggtgtttggttttttgttcttgagatagtttgctgagaatgatggtttccagcttcatccatgtccctacaaaggacatgaacccatccttttttatggctgcatagtatttcatggtgcatgaaatccagtctaccattgttggacatttgggttggttccaagtctttgctattgtggatagtgccgcaataaacatacwtgggcatgtgtctttatagcagcatgattcataattctttgagtatacactcagtaatgggatggctgggtaaaatggtatttctagttctagatccctgaggaatcgccacactgacttccacaatggtggaactagtttccagtcccaccaacagtgtaaaagtgttcctatttctc

SEQ ID NO: 888324 - DNA, 591 bp, Homo sapiens
ttcagggtacatgtgtacaatgtacaggtttgttacatgtgccatgttggtgtgctgcacccattaacttgtcatttaacattagatatatcttctaatgctatccctcaccattccccccaccccacaacaggccccagggtgtgatgttccccttcctgtgtccacgtgttctcattgttcgactcccacctatgagtgagaacatgtggtgtttggttttttgttcttgagatagtttgctgagaatgatggtttccagcttcatccatgtccctacaaaggacatgaacccatccttttttatggctgcatagtatttcatggtgcatgaaatccagtctaccattgttggacatttgggttggttccaagtctttgctattgtggatagtgccgcaataaacatacttgkgcatgtgtctttatagcagcatgattcataattctttgagtatacactcagtaatgggatggctgggtaaaatggtatttctagttctagatccctgaggaatcgccacactgacttccacaatggtggaactagtttccagtcccaccaacagtgtaaaagtgttcctatttctc

SEQ ID NO: 888325 - DNA, 606 bp, Homo sapiens
tgatctttgacaatcctgacaaaaacaatcaatggggaagaattccttatttaataaatggtgctgggagaatgggctagttatgtgcagaaaattgaaactggaccccttccttacaccatatacaaaaatcaactcaagatggattaaagacttacatgtaaaatctaaaactttaaaaactgtagaagaaaatctaggcaataccattcaaaacataggcacaggcaaagatttcctgatgaaaatggcaaaagcaatgaaagcaaaaattgacaaatgggatctaattaaactaaagagcttctgcacagcaraagaaactataatcagggtgaacaacaacctatagaatgggagaaaatattttcaaactatgcatctgaccaagttcgaatatccagcatctataagaaacttaaacttacaagagaaaaaacaaacaaccccattaaaaaatgggcaaaagacataaacatacacttctgaaaacaagacatacatgtggccaacaagcatatgaaaagaaagctgaatatcactgattgttagagaaatgcaaatcaaaaccgcaatgacataccatcttacaccggtcagaatgcc

SEQ ID NO: 888326 - DNA, 673 bp, Homo sapiens
cattctcatgcctttatcccctctcttcgctgttgaaattctacacattttttcccttatttctcataacttcacttattgcattctgaataaacagcaaagataaattttctttgacctgtaccaccaacatcaacacctaaagtgacctctttcccattataggggactcttctactgtgcttaatggagactaggatgtgttcccctcaaaggaattctagtttttataggtaaacttgttaaatgtcttgtatggacactgccttatgaaacctcatttgctttcaaagcttcaactaacatctacagcaggtattggcaaactttatagataaagatyttgagaacaaatatttcaggctttgtgggccgtatggtttttgttacaactactcaactctgccttgaagttcaaaaaaaaggtatacatggagcataagcaaatggatatggctgggattcaatactactttacaaaaacaagtggtgggtgtaattggcccatgggcaggagattattgactcttaatctaggctgattatgacatagctccaaatttcagcccttatctgaggtatatagccaactgctacttggactatcctcatcagaacatttgatgtgaacctcaaagatgttatgtcaacaattccttattttcccatgcaa

SEQ ID NO: 888327 - DNA, 651 bp, Homo sapiens
cctcccatggcttttcttcattatgtgaacaagggcatgttggggaccaagctctgtggtgtctcttcttataaggaaactaatctgatcagataatggccccacccttattacttcatttaaccttatgtacttccttactctaaatataggcacacttgagttggggcttcagcatatgaatttgtggggcaaacacaaatattcagtttaaaacaaaagggcttggaaaacattccaatgaggaacagttggatgtcctggggctgtttagtttggaaaagagaagaatcagtaggacttggtctcagacatcagattgcccraaggctataacagcagagggagcaaatgttttcagtttgtccttcgtggaagacttcagaaggaaataaacacatcatcattggggacaggaaggctggttctgacatcatttgggagggatggagtgtaagcttgacttaagtgagtagcctaaaatattacttcggattcccaaattctggaataactgttatgagaatacctccaaaccctatttcaactttcctcagcaagaagtttttctgggtgcaagaacattattctatccctcttgtattctacctcttcactcattccttcccaaccagagtctcagccaagccg

SEQ ID NO: 888328 - DNA, 585 bp, Homo sapiens
tactcacatatagaaagaatgcataagagtctcgtaatagtggaattgatcaagcataagacagaattagtgagcttaaagacaggctatttgaaaaggcagtcagaaaagacaaaaaatacaattaaaaaaatgaagctttcctacagaatctagaaaatagcctgaaaaggacaaatctgaaatttattggatttaaagataacatagagagagaaatgggggtaaaaagtttagttaaagggataacaacagagaatgtcccaagtcttaataaagatataaacatccaagtataaggttatagaacatcaagtagatttaacacaaaaagactacctcaaagcatttaataattgaactcytaaaagtcaagaataaggaaaagattttaaaagcagcaaaatgcaataaacaataacatacaatggaggtaaaatacatctgacaacagacttctcagtggaaaacttacaggttaggaaacactggcaggacatatttaaagtactgaaaaaaataatttttacctgagaatagtatatctagtgataatatctgatatggtaggctttgtgttctcac

SEQ ID NO: 888329 - DNA, 640 bp, Homo sapiens
gggaggtatagcattaggagaaatacctaatgtaaatgacaagttaatgggtgcagcacaccaacatggcacacgtatacctaggtatcaaacctgcatgttgtgcacatgtgccccagaacttaaagtataattttaaaaaatctgtcttataaaaaaaaawtccctctccactctgctttaaatgtgtcccagagattctggtacattgggtctttgttctcattggtttgaaagaccatctttatttctgctttcatttcaatatttatccagtagtcattcaggagcaggttgttcagttttcatgtagttgtgtggtttttactcagtttcttaatgctgagttctaatttgattacactgtggtctgagaggctgtttgttattatttccattattttgcatttgctgaggagtgtttcacttccaattatgtggtcaattttagaataagagcgatgaggtgctgagaagaatgtatactctgtttatttggcttggagagttctgtaaatgtctatcaggtcagcttggtcgagagctgagttcaagttctgaatatctttgctaagtttgtctctttgatctttctaatattgccagtggggtgttgaaatctcccactattattgtgttg

SEQ ID NO: 888330 - DNA, 618 bp, Homo sapiens
tgcctgattttagggatgaaggtaatcagggaagcctttagttggaataattattgggacctcaaaaactatttagatggtgacagattgctggagatagactgatcagggtacatttttcttatcaaataattaccagaccaataacaaaagaggatggaaaaggaaagagaagagatgagcaggaatagagatgggattggcgatagtctattagtccagggctttgattatctaattaaaaaatccccagtcatcctttaaacaacagggcacactacaggctgccartggtgtgagttacttgaggaaaaccctcacctgctaaggggtttaatcctagaatagcaaccccgatgtactgcagtgtagacttgctaaggggtttaatcctagagcagcagccccgatgtactgcagtgtagacttgctaaggggtttaatcctagagcagtagcactgatgtgctgtagtgtagccgactggactcgaaggctggtggatgggtcgtgaagactgctttggtgaggtccctggcccagaaagttgtgctaggagagcttgtttccaaaagcttttccaaattcaggcttcagctagagtcctactcctaaaggc

SEQ ID NO: 888331 - DNA, 615 bp, Homo sapiens
agaactaagagacagcaggtatttacatggtgccagtctcggtctaagcactagatgtgttcactcatttcatctgcagaaatgcgctgtgaaacaggggataggcactacaagtgtctacatttttaaattggcaaaactaaggtgatggatgaggaggattaagtaacttgcccagggacacgagtagtagaagctgagactggggtttgaaccccaggagcctgatgccagagcctatgcacacaaccgtaagaccataaagagccacaccagagaatggagacaggatggttatgcaggtcacaacctgcttaatgactatactcaaagtgtgctgattaattcacaaccaataaaatcttgactagagtaacatgttacttccctcaatgtgttaggtagggcaaaaagctgagctactggaacaagagaacaccccttccaaatataatggcttaaagaccaaaaagcacgcrtttttcactcaagtaatagtctggggtgtgtgttctgtgtcagtgagcagctctgctccgtgtggtcatccagggacttgagatcttccatcgtggagctctgccatccctgagggccttttctctgtgtggctgg

SEQ ID NO: 888332 - DNA, 643 bp, Homo sapiens; identical to SEQ ID NO: 885772

SEQ ID NO: 888333 - DNA, 573 bp, Homo sapiens
gaaatgattaagatacataaatattgtattcacagatttcataatgtattaagagggtgtgatacaacataaatggctatacatcaaagaagaaaataataaggatctgaggagagaatacattcaaatggcatgggtgttaggaagagcgataagagaaaagacaaaataatttaggggagrcatgcactttgattccttagtatatagatatgaaatgaatgagtaaatagatttggatgcattttttatgcatttgcaactacaagagaggtagaaatctgcgtagtaaaagccaaaaattaactagaagaagttctcctatatttggaggagtaaaactgcaaataaatcatttgctatgtttaaattaatatattttaaaactgctgtttgaaatttaacattttagaattcacataattcattctatgcacctatttgttcaaagaaaaggaagaaaagaacaatgtaggactctagaaagactgccagaggaaggtactgggatttgctcccatgcagtgtcttccttgaatttcactttgcctttgaggatgagaacagggcttg

SEQ ID NO: 888334 - DNA, 583 bp, Homo sapiens
cacacacacacacacacacacacacacacacacacacacacagtatttttagaaaaggaatagactagtgctatagtgatttttatagtatttcctgttgaggaaattaaaggagggaggctccctccttcaaaaagaattaaacggagtgggattttctaaaacaagacaaactcaccttctgttcttattatatggtgttgcagagtttgaggctggacttctccaggctcaagattccatagcttttgaactttccttggattatatgttgtaagtaagcctgcttcattaaaagctctcatatttccaggaggctctgaacattccgaatgcagcaatctaccatcctggcaaaataaagtgctgcctaccccacggtctttctttttcaggtttctaaatgatcygtcaagggttgcagactcagaggccgatgttgcttgatggctattttcctgtaaaagtggcatttcttttctggaccccacagtggacatgacctttatctcgttttcctgagttaagtggcagttgcagtatcccttagtgtggtaatttcttgcctcatgagcacacaggg

SEQ ID NO: 888335 - DNA, 593 bp, Homo sapiens
atgagaaaaaaaaaatcagtctttaagcacattcactaggagaaagtttcaaaatgtcattatccatataaagatctaacaggtaaatgcagtaatagggtattaggtacagaaatcactaatttcataccagcaayacaccacagctaaacagtaacttctaattcaaaacaaagcttcatgggtccatcttgttgcccacttcagtaggcagaggtgactactcttacatgaagccacctatgctgatggaaaaccaaacagaccacaggcaaagcatctttaaaacagctcctggtggctggataaaatggaaaatctctccaaagctaaattaaaataatgagacctctatatgctgttgttttaactaagtagaattttcagtatccgtgaaaaaaccatttagataaagtatttgcctacaaaactgtgcttttcaagtgttattttgatgtaaaattgagtgtttaaggatgaaaattccctcaagcactctgaaatgatagcgccgttgacagtgtcaaaagccatgctgagatcaagggaaatgcgaatggaagcagtagcaactgcattcataaagaggtcat

SEQ ID NO: 888336 - DNA, 593 bp, Homo sapiens
atgagaaaaaaaaaatcagtctttaagcacattcactaggagaaagtttcaaaatgtcattatccatataaagatctaacaggtaaatgcagtaatagggtattaggtacagaaatcactaatttcataccagcaatacaccacagctaaacagtaacttctaattcaaaacaaagcttcatgggtccatcttgttgcccacttcagtaggcagaggtgactactcttayatgaagccacctatgctgatggaaaaccaaacagaccacaggcaaagcatctttaaaacagctcctggtggctggataaaatggaaaatctctccaaagctaaattaaaataatgagacctctatatgctgttgttttaactaagtagaattttcagtatccgtgaaaaaaccatttagataaagtatttgcctacaaaactgtgcttttcaagtgttattttgatgtaaaattgagtgtttaaggatgaaaattccctcaagcactctgaaatgatagcgccgttgacagtgtcaaaagccatgctgagatcaagggaaatgcgaatggaagcagtagcaactgcattcataaagaggtcat

SEQ ID NO: 888337 - DNA, 566 bp, Homo sapiens
ctaaacacacatgcatttgtgcagaggaaagaaaatccacgggaacgcaaatttaggtttatagaaatgagatctgctctttggtggaaatacagacttccttggtgtgggagagaacagaaagattatctgatttctgctttccataagcagcyccttgctgctctccagctctcttaccgcagatgtgataacatctgggctgttaggttattatcaccgcgagcaagtgctccttccctggggactttggcacctgaactgtggctcccctgggaggctcttgatctgctaccacataagggccatataacaggttggctaattgatttattctttttaggtcttaatttcacaataattttttaaaaatttaaaaactggaccagagcttgtccccgttctttcaaattggcttgatttaatatttttgaatcaagctttcctgtaagttagtttgatctgtctcctattgaaaaaaatatatataagcaggcagagatatgaggcaaaaagccaaaaagatggaagggaaaagaaagttctcttttcaacatcttattccc

SEQ ID NO: 888338 - DNA, 623 bp, Homo sapiens
gttcttttttggtttcatatgaaatttaaagtagctttttctaattctgtgaagaaagtcaatggtagcttgatgggaatagcatttaatgtataaattactttgggcagtatggccattttcatgataccaattcttccyatccatgagcatggaatgttttttcatttgtttgtgttctttcttattttcttgagcagtggtttgtagttctccttgaagaggtccttcacatcccttgtaagttgtattcctaggtattttattctctctgcagcaattgtgagtgagagttctctcatgatttggctctctctttgtctattattggtgtataggaatgcctttgatttttgcacattaattttgtatcctgagactttgctgaaattgcttatcagcttaaggagcttttgggctgaggcagtggggttttctaaatatacaatcgtgtcatctgcaaacagagacaatttgacttcctctcttcctatttgaatacgctttatttctttctcttgcctgcttgccctggccagaacttccaatactatgttgaatggagtggtaagagagggcatcgttgtcttgtgccagttttcaaagggaatgcttccagcttt

SEQ ID NO: 888339 - DNA, 612 bp, Homo sapiens
agtttgaccactgtggaagacagtgtggtgattcctcaaagatctagaaccagaaataccatttgacccagcaatcccattactgggtatatacccaaaagattataaatcattctactgtaaagacacatgcacacrtatgtttactgcagcactatttacaatagcaaggacttggaaccaacccaaatgtccatcaatgatagactggataaagaaaatgtggcacatacacaccatggaatactatgcagccataaaaaagcatgggatcatgtcctttgcagggtcatggatgaaactggaagccatcattctcagcaaactagcacaggaacagaaaaccaaatatcacagttctcactcataagtgggagtcgaacaatgagaacacatggacacagggaggggaacatcacacaccagggcctgtcggggggtggggggcaaggggagggagagcattaggacaaatacctaatacatgtggggcttaaaacctagatgacaggttgatggctgcagcaaaccaccatggcacatgtttacctatgtcacaaacctgcacattctgcacatgtattccagaacttaaaatttaaaaaaaatttt

SEQ ID NO: 888340 - DNA, 646 bp, Homo sapiens
gaatgcttttatactgttggtgggagtgtaagttagtttgaccactgtggaagacagtgtggtgattcctcaaagatctagaaccagaaataccatttgacccagcaatcccattactgggtatatacccaaaagattataaatcattctactgtaaagacacatgcacacrtatgtttactgcagcactatttacaatagcaaggacttggaaccaacccaaatgtccatcaatgatagactggataaagaaaatgtggcacatacacaccatggaatactatgcagccataaaaaagcatgggatcatgtcctttgcagggtcatggatgaaactggaagccatcattctcagcaaactagcacaggaacagaaaaccaaatatcacagttctcactcataagtgggagtcgaacaatgagaacacatggacacagggaggggaacatcacacaccagggcctgtcggggggtggggggcaaggggagggagagcattaggacaaatacctaatacatgtggggcttaaaacctagatgacaggttgatggctgcagcaaaccaccatggcacatgtttacctatgtcacaaacctgcacattctgcacatgtattccagaacttaaaatttaaaaaaaatttt

SEQ ID NO: 888341 - DNA, 645 bp, Homo sapiens
tcaaatcagcctctctcagaactcagaggctagtctaggtaggggtttcatggctaatttggtgaacagcaggctagggaatgagtgctgctgattggttggggatgaaattgtaggggtgtggaaaatggtcctggtgcactgagtccacctcaaggcggggtccacaggactagttgagtcatgagtcacgggtcaggtgcagtcattcatttgccagaatgcagaagtctgaaaaacatctcagaataacaatcttaggcaatataaaagtagtgttatctataggaacaattggaaaagtcaccaatcctgtgacctctggccacatctcctaagaggcaaggaattatagaaaagcaagccagagaacagtggctggttatcatttaagcctacatgttagtagaattcagacctctcccaaaattctttttttgtggccctgcattcattttacraaggcagtttcgggccctgagcaaggagggagttagtttcaggaagggactgttaccgtctttgttttaaagttaacaaaggcaattagcttgtgagaatagaagcaagatggaattagttaggttaaatttctcttactgttacaaattttgcaaaggcagtttcatcagctttagtaaatcc

SEQ ID NO: 888342 - DNA, 571 bp, Homo sapiens
ccatttttaaaaagtaacaaaaaattggaagcaataaatggtcagtaataggagattgattaaaaatattatagcttatcaacacaacacaatgtgatgcagtcattaaaatgatttgtagaaagcttaatagcatattgaatgtatataatattaaatgatattcatataagtatacagtgtttatataaatatataaataagtgtatctttaaaagcaggttacaaacacaatataaagcatgatccttttataaaagaggtgtgtgtgtatgtgtatatatatgtgtatataaatatatgtgtgtgtgtatatatataaaataagtctggggaagatataatcaaaagtrtggaaagtgattatcaaatctgatagtcaagtggtggtgatttttgctgtcttctttttgcttatatatagtttctttctttctttccttcttctctctctttttttttttttttttagagataagcattctgttacccaggctgctcaaaatcctgggctcaagtgatcctcctatctcagcctattgagtagctgggaccacaggtgtgtgccacc

SEQ ID NO: 888343 - DNA, 646 bp, Homo sapiens
agccaatatcatattgaatgggcaaaagctggaagcattccctttgaaaactggcacaagacaacgatgccctctcttaccactccattcaacatagtattggaagttctggccagggcaagcaggcaagagaaagaaataaagcgtattcaaataggaagagaggaagtcaaattgtctctgtttgcagatgacacgattgtatatttagaaaaccccactgcctcagcccaaaagctccttaagctgataagcaatttcagcaaagtctcaggatacaaaattaatgtgcaaaaatcaaaggcattcctatacaccaataatagacaaagagagagccaaatcatgagagaactctcactcacaattgctgcagagagaataaaatacctaggaatacaacttacaagggatgtgaaggacctcttcaaggagaactacaaaccactgctcaagaaaataagaaagaacacaaacaaatgaaaaaacattccatgctcatggatrggaagaattggtatcatgaaaatggccatactgcccaaagtaatttatacattaaatgctattcccatcaagctaccattgactttcttcacagaattagaaaaagctactttaaatttcatatgaaaccaaaaaagaa

SEQ ID NO: 888344 - DNA, 524 bp, Homo sapiens
ggcccccagagtcatcccgttaatggtaatgaaactcagaggagactaatgtaaaagccagattgtcagctaattataaaattaattatttctggtaagcaaaatgctcatctccgccaactagaatatcccctctctgctatcagcatatatgggaaccaaatttgtckttagaagatttctcaattatagaattaaaggaaaggacagtgagaagcctttcatccaggccatagtaaagcctgagcatttcattcctccactggtggggggcggtggggagatgatatttcttttgaccaaactgagtgttccattattggataagctactcctgattcttctagtgattaaagttgcttttagttggttccaggccaattctcctccttctactctgaatcttttaaacagaatatgataggttattagatttccacttactaagtttctatcattcttacattatacccagcctaccctaattgaagtttagggtattctaaaactttcaattcagatgt

SEQ ID NO: 888345 - DNA, 524 bp, Homo sapiens
ggcccccagagtcatcccgttaatggtaatgaaactcagaggagactaatgtaaaagccagattgtcagctaattataaaattaattatttctggtaagcaaaatgctcatctccgccaactagaatatcccctctctgctatcagcatatatgggaaccaaatttgtcgttagaagatttctcaattatagaattaaaggaaaggrcagtgagaagcctttcatccaggccatagtaaagcctgagcatttcattcctccactggtggggggcggtggggagatgatatttcttttgaccaaactgagtgttccattattggataagctactcctgattcttctagtgattaaagttgcttttagttggttccaggccaattctcctccttctactctgaatcttttaaacagaatatgataggttattagatttccacttactaagtttctatcattcttacattatacccagcctaccctaattgaagtttagggtattctaaaactttcaattcagatgt

SEQ ID NO: 888346 - DNA, 524 bp, Homo sapiens
ggcccccagagtcatcccgttaatggtaatgaaactcagaggagactaatgtaaaagccagattgtcagctaattataaaattaattatttctggtaagcaaaatgctcatctccgccaactagaatatcccctctctgctatcagcatatatgggaaccaaatttgtcgttagaagatttctcaattatagaattaaaggaaaggacagtgagaagcctttcatccaggccatagtaaagcctgagcatttcattcctccactggtggggggcggtggggagatgatatttcttttgaccaaactgagtgttycattattggataagctactcctgattcttctagtgattaaagttgcttttagttggttccaggccaattctcctccttctactctgaatcttttaaacagaatatgataggttattagatttccacttactaagtttctatcattcttacattatacccagcctaccctaattgaagtttagggtattctaaaactttcaattcagatgt

SEQ ID NO: 888347 - DNA, 605 bp, Homo sapiens
cttctttacatcagccatttatttcaaggtaacaaaaactttagatttaaccactgttgctagtggtacacaattccaaactgacatttgaatcaaagtataaatgaatagtatttttaaagtctattgaagtattttcacattttcagtgtgtttttttttgggcctggtcagttatacctatcagcaaacaacttattttcaccaaagaattttgcatgggaaaggccccacaaatccacagtaatgttgttatatttgttttggaatgttaatttttcaatatctgtccttactgatttatcattttccatacagttgcaaacatagtggacataaattaagaaatcaaaatacataattaamattgcataataattttcatgtttccacatagtcatcataatgttattagggcaccatagtccttagtaccataatttatttagtaatttattattatttctctctctctgagacaggatcttgctctgttgcccaggctggagtgcagtggcttgatcatagctaactgtaaccttgaactcctgggctcaagggattctcccacctcagcctcccaagtagctgtgactacaggtgtg

SEQ ID NO: 888348 - DNA, 628 bp, Homo sapiens
tctcttctagctaatcaatatatttataaattactttaaaattatagagttctcataaatatgtttatagaattttagaactaaaagttcagagataatattactgttattatgaacttttttttttgtttccccttgttaytcacagtatctaccacttctagtagtgattaaaaatacggagattcttggctgggcgcagtggctcatgcctgtaatcccagcactctgggaggccgagacgggtggatcacttgaagtcaggagttcgagaccagcctggccaacatagtgaaattctgtctctattgaaaagaaaaaaaaaaattgccaggcatggtggtgcgcgattgtagtcccagctacttggcagctgaggcaggagaatcacttggaaccagagaggctgaggttgcagtgagcagagatcacgctactgcgacagagtgcgtccctgtctcaaaaaaaaaggagattctctaccctgttgtgtttaaaatttattaattttcgtttagtctaagaatatgtgttataaaacgtataaaatggttattacaaattcattctggcactaaaatatagagtaaaccttagttgctctcaaatacaatcaattccttattgt

SEQ ID NO: 888349 - DNA, 628 bp, Homo sapiens
tctcttctagctaatcaatatatttataaattactttaaaattatagagttctcataaatatgtttatagaattttagaactaaaagttcagagataatattactgttattatgaacttttttttttgtttccccttgttattcacagtatctaccacttctagtagtgrttaaaaatacggagattcttggctgggcgcagtggctcatgcctgtaatcccagcactctgggaggccgagacgggtggatcacttgaagtcaggagttcgagaccagcctggccaacatagtgaaattctgtctctattgaaaagaaaaaaaaaaattgccaggcatggtggtgcgcgattgtagtcccagctacttggcagctgaggcaggagaatcacttggaaccagagaggctgaggttgcagtgagcagagatcacgctactgcgacagagtgcgtccctgtctcaaaaaaaaaggagattctctaccctgttgtgtttaaaatttattaattttcgtttagtctaagaatatgtgttataaaacgtataaaatggttattacaaattcattctggcactaaaatatagagtaaaccttagttgctctcaaatacaatcaattccttattgt

SEQ ID NO: 888350 - DNA, 628 bp, Homo sapiens
tctcttctagctaatcaatatatttataaattactttaaaattatagagttctcataaatatgtttatagaattttagaactaaaagttcagagataatattactgttattatgaacttttttttttgtttccccttgttattcacagtatctaccacttctagtagtgattaaaaatayggagattcttggctgggcgcagtggctcatgcctgtaatcccagcactctgggaggccgagacgggtggatcacttgaagtcaggagttcgagaccagcctggccaacatagtgaaattctgtctctattgaaaagaaaaaaaaaaattgccaggcatggtggtgcgcgattgtagtcccagctacttggcagctgaggcaggagaatcacttggaaccagagaggctgaggttgcagtgagcagagatcacgctactgcgacagagtgcgtccctgtctcaaaaaaaaaggagattctctaccctgttgtgtttaaaatttattaattttcgtttagtctaagaatatgtgttataaaacgtataaaatggttattacaaattcattctggcactaaaatatagagtaaaccttagttgctctcaaatacaatcaattccttattgt

SEQ ID NO: 888351 - DNA, 628 bp, Homo sapiens
tctcttctagctaatcaatatatttataaattactttaaaattatagagttctcataaatatgtttatagaattttagaactaaaagttcagagataatattactgttattatgaacttttttttttgtttccccttgttattcacagtatctaccacttctagtagtgattaaaaatacggagattcttggctgggcgcagtggctcatgcctgtaatcccagcactctgggaggccgagacgggtggatcacttgaagtcaggagttcgagaccagcctggccaacayagtgaaattctgtctctattgaaaagaaaaaaaaaaattgccaggcatggtggtgcgcgattgtagtcccagctacttggcagctgaggcaggagaatcacttggaaccagagaggctgaggttgcagtgagcagagatcacgctactgcgacagagtgcgtccctgtctcaaaaaaaaaggagattctctaccctgttgtgtttaaaatttattaattttcgtttagtctaagaatatgtgttataaaacgtataaaatggttattacaaattcattctggcactaaaatatagagtaaaccttagttgctctcaaatacaatcaattccttattgt

SEQ ID NO: 888352 - DNA, 597 bp, Homo sapiens
tgccaggcatcaaattataagagcttcttgtaagaagtaaataagtgtttgcagccactgtcaggacaaataacagctggagtaggactgtatcaagagaggaggttataggagacaagagtcagaatatgctggacacaacagggagtgtgctttttcttctaagtgcaaaaagctagggaaatgtttaaggcaggaaagtgacaatggggaaacgggtgagaaaggaggtggcgattcaaatggcagccayggtggaaaaccactgccttagactaggggagggtctagctgcacatctaaaccaattatagctgtcggagtccacacagaagcaatggtaagagaggtctcctgagaggaagcagtgagaaaggccaggtgtcaggagaaaatcttgcccttaataagcttcatgtggcagcagctaaaagtgctcctggagtgaaactccaggccccattttgcacagactcttaagaaaaataagatttaatgccagcattctatggcctccctcctccgcctttgtttttataattgcaactcattttttatagtgtaaacaaccatttcaatgtcctaccacatggtacc

SEQ ID NO: 888353 - DNA, 621 bp, Homo sapiens
aaaatctacaagccagaagaaagtgggggccaatattcaacattcttaaagaaaataattttcaacccagaatttcatatccagccaaactaagcttcataagtgaaagagaaataaaatcctttacagataagcaaatgctgagagattttgtcaccaccaggcctgctgtacaaaagctcctgaaggaagcattaaacatggaaaggaacaactggtaccagctactgcaaaaacatgccaaattgtaaagagtrtcgatgctaggaagaaactgcatcaactaaaggacaaaataaccagctaacatcataatgacaagatcaaattcacacataacaatattaaccttaaatgtaaatgggctaaatccccaattaaacacacagactggcaaattggataaagagtcaagacccatcagtgtgctgtattcaggagacccatttcatgtgcagagacacacataagctcaaaataaatggatggaggaagatctaccaagcaaatatacggcaaaaaaagtaggggttgcaattctagtctctgacaaaacaggcgttaaaccaacaaagatcaaaagagacaaagaaggccattatgcaatagtaacgggatcat

SEQ ID NO: 888354 - DNA, 621 bp, Homo sapiens
aaaatctacaagccagaagaaagtgggggccaatattcaacattcttaaagaaaataattttcaacccagaatttcatatccagccaaactaagcttcataagtgaaagagaaataaaatcctttacagataagcaaatgctgagagattttgtcaccaccaggcctgctgtacaaaagctcctgaaggaagcattaaacatggaaaggaacaactggtaccagctactgcaaaaacatgccaaattgtaaagagtgtcgatgctaggaagaaamtgcatcaactaaaggacaaaataaccagctaacatcataatgacaagatcaaattcacacataacaatattaaccttaaatgtaaatgggctaaatccccaattaaacacacagactggcaaattggataaagagtcaagacccatcagtgtgctgtattcaggagacccatttcatgtgcagagacacacataagctcaaaataaatggatggaggaagatctaccaagcaaatatacggcaaaaaaagtaggggttgcaattctagtctctgacaaaacaggcgttaaaccaacaaagatcaaaagagacaaagaaggccattatgcaatagtaacgggatcat

SEQ ID NO: 888355 - DNA, 646 bp, Homo sapiens
tgcaattattaaaaagctaacattttagtaacaatttgctttaaaattatagttacatcaagagttacctagagcaggaagaaaacaaataaaaaactgatgatgcatgcagtcatcacattaaaatgtatttcttttattctttacagacattttcaaatatatttaataatagatcatggggctttaagaaaattgatttccaatataatcttccttaatgaaaaaatatactgggctctttcttgacgaatttgccagaaaaatgagatgtaagagtattagactattcaaaaatagcaatgtttttatctaactgaattcactttaaattaatgtacaatcagcatacattttattattaaaatggtgaaatcacataattctctattttgaaaagcaacactaatggaagcactatataataaacttagttaaacatttacaagcaattttcrttaaaatttgttcatttcatttggtggcatagcttatagtgttttaaaatgcaaatttatgataagcgcaaaaagagcagcgttagtatgaaatatattcacctaaaaatggaaaatataagtagaaatgattattgtctaacctaataatctagacttccacttaatcaatcctctgaataacataa

SEQ ID NO: 888356 - DNA, 709 bp, Homo sapiens
acaagtgtctgttcatatccttcacccacttgttgatggggttgtttggttttttcttgtaaatttgtttgagttcattgtagattctggatattagccctttggcagatgagtagattgcaaaaattttcttccattctgtaggttgcctgttcacgctaatggtagtttcttttgctgtgcagaagctctttagtttaattagatcccatttgtcaattttggcttttgttgccattgcttttggtgttttagacatgaagtccttgcccatgcctatgtcctgaatggtattgcctaggttttcttctagggtttttatggttttagatctaacatttaggtctttaatacrtcttgaattaatttttgtataaggtgtaaggaagggatccactttcagctttccacatatggctatccagttttcccagcaccatttattaaatagggaatcctttccccagttcttgtttttgtcacgtttgtcaaagatcagatggttgtagatatgtggcattatttctgagggatctgttctgttccgttggtctatatctctgttttggtaccagtaccatgctgttttggttactgtagccttgtagtatatagttcgaagtcaggtagcatgatgcctccagcttcgttcttttggcttaggattgacttggcaatgtgagctcttttttggttccatatgaacttt

SEQ ID NO: 888357 - DNA, 564 bp, Homo sapiens
gataggagccacgaaggcaccatgttgcccacttccactgacggcagcacagcccttccctcctgcctcctgcctccctcctgtctgaagccttaacactgaaaattctgtttagtgtttgagtctagaagaacagaggaaatctgtggtatctccctggctttcctcgtgttgtttgcaatcttacaagatacaaaatagtgcaggcaaaatccccataagtgtaatttccacttgtgagaggaacaacaaagcaaaacaaacaaactacaaaatcttatttaagcctatgtctttttttaatacatttacacaaaaacatttaccctgctccctatctttttgtttatccaaaaggaagccatttttytcttccagtatccccatagaatatcatatttacttttttacagcaaaattgtaaaagttttccatgtgttttaaggaattgttactccccaaggggaggcctgtggtataagcaggtggtcaccctgggtcactgaggacatttttcttatttgcagatgtggatctagttcaggaaatgtgtgactgagaaag

SEQ ID NO: 888358 - DNA, 640 bp, Homo sapiens
gagggtttgcctgaaagtggcgatggcagaacaagtatattcttttacaatatttaagccacacattttttaggatggcattgtgtgccaaggatgcttttatttgcactctgcataagtttgtaaaaatatcattatacatatcaaaatctattataattattattattatttgaggtggagtctcattctgttgtccaggctagagtgcagtggcactatcttggctcactgcaacctgtgcttccgggttcaagtgattctcctgcctcagtctcctgagtagctgagattacaggcatgcaccagcatgctcggataatttttgtatttttagtagagacggggtttcaccagrttggtcaggctggtcttgaactcctgacctcagtgatccacccgccttggcctcccaaagtgctgggattacaggcatgagccactccgcccagcccaaaaactattattattcttctcaatttactcagagtaactagggagtaaatgttgagaattatgagacccaacaatcccacactccacccatagtcactccttaatactgcctctgaaagaggcttcgtttcttttgttgtggttgttttaactttttagtttgaaatcattttagatttacgta

SEQ ID NO: 888359 - DNA, 652 bp, Homo sapiens
ctggttatagctgcatacacgtgcacatttacacacacacacgctcattcactcaaaatccattcaatacagaacatttctaaataaagtattaatttaaaaaaacacagtatggtggattatgcacctaattatgccattcaacagataataaaaagcaattaaccaacagaaacaaataagccaacaatgaacaaaagctcctgctttscttcccagagactggaaacattgcaaagttaaggctggaaagaggaattggaaagtggagcaggccgcagcaaattttaaaccagacattttaagcctcagctgccttatgaagtctcactgcgcccaggagtagatcccctcactaagagaatccctgggaggggttgtgctctgaagaccaaactgctagttcatttctgtatgttcttgggacaccataaaaataaaaacacaacacacacatgtaccacacacaatgtaaattattgttgcacagcaaacagtaaaaagaagttgccagtttataaaaaaaacaagtatctcattttattctttctgagattttaaacatatttatcaacatgttctattttaaataaagcaaatggtcacaaatattagatgtgttaagaaaataggtactgatatctaaaagtga

SEQ ID NO: 888360 - DNA, 652 bp, Homo sapiens
ctggttatagctgcatacacgtgcacatttacacacacacacgctcattcactcaaaatccattcaatacagaacatttctaaataaagtattaatttaaaaaaacacagtatggtggattatgcacctaattatgccattcaacagataataaaaagcaattaaccaacagaaacaaataagccaacaatgaacaaaagctcctgctttgcttcccagagactggaaacattgcaaagttaaggctggaaagaggaattggaaagtggagcaggccgcagcaaattttaaaccagacattttaagcctcagctgccttatgaagtctcacygcgcccaggagtagatcccctcactaagagaatccctgggaggggttgtgctctgaagaccaaactgctagttcatttctgtatgttcttgggacaccataaaaataaaaacacaacacacacatgtaccacacacaatgtaaattattgttgcacagcaaacagtaaaaagaagttgccagtttataaaaaaaacaagtatctcattttattctttctgagattttaaacatatttatcaacatgttctattttaaataaagcaaatggtcacaaatattagatgtgttaagaaaataggtactgatatctaaaagtga

SEQ ID NO: 888361 - DNA, 577 bp, Homo sapiens
ataataatgcaatgtgtgatattttgatatttatcattcaaaattaaagaaagctgatatttatattactaatgaggcatttccacggatttgcctttcagtttggagaatccctttaggacctaggtggctgcctgtggctggaaccagaggtctctccagaagactccagggctttccctaggcaactggcatttaggcctccaactgctttgctttcagtggagacagcacygcccccactctttgcctgggcctctgttgacccactctttgcctggccctgcccacctcgactgcaggcttctggccatgggtcagaactaccagctctgccaaggaattctcctagaggatggagccacccagtcacctgaagtcatttcctagagccctgaatgaggacacctgtctccaacattgagtctggggaccgttcctggaattaggattgaaacaaaactggaagtgatgggaagacggcatccatgtcagatatttgccaatcatacccacaaaccatatatttaattaactctaattgataaagttccccttatcacttataaaatttgct

SEQ ID NO: 888362 - DNA, 613 bp, Homo sapiens
ccaatgtgcccatcacagccattcttgggacactgcacctatcagttcacttgtaagccaccagcctgggaggcatctgggtctccagtctttccatgcccagaccctaggccagtaggtgcttgctgagtgaggttggaaggtttgagggaccaagtrctgcccctgggctgggctctggccgtgccccagtccacctctcccctcgggctgtaggcatggagaaggacctcttgctgaagccctcctgctcctcaccccatcctggacctccctgggcagctactctgagtgtgtgtggtgggatggtagggggaacggaggatctgggacaagcatcatttcactcccagttacattgtattatccaaattatccgtggtcattgacaacaacattgaaggtacagatcacaaatcaaaatcacccgaactccttgcacagcagccatgctcacgttcttggcttttgctacacaaatgggcacaacattccagcccccattcgctgagggctgtggctgtgtctccaccacagccctgaaagagggattcgggcaccaggaagagctaagcactcacccagctcacaaagttgggggccaggttggaaa

SEQ ID NO: 888363 - DNA, 642 bp, Homo sapiens
acatcctgagactgctgaagttgcttaccagcttaaggaaattttgggctgagacgatggggttttctaaatatacaatcatgtcacctgcagagacaatttgacttcctctcttcctatttgaatacgctttatttctttctcttgcctgattgccctggccagaacttccaatactatgttgaagaggagtggtgagagagggcacccttgtcctgtgctggttttcaaagggaatgcttcagcttttgcccattcagtatgacattggctgtgggtttgtcataaatagctcttattattttgatacatgttccatgaatatctagtttattggctttttttttttttttttttttttttgagacggaatcttgctctgtcgcccaggctagattgcaatggcatgattttggytcactgcaacctccatcccccaggttcaagtgattctcctgcctcagcctcctgtgtagctgggattacaggcgcatgccaccattcctagctaatttttgtatttttagtagagatggggttttgccatgttggccaggctggtcttgaactcctgacctcaggctgagatcatctcagcctcccaaagtgctgagattaaaggtgtaagccaccatgcctggc

SEQ ID NO: 888364 - DNA, 604 bp, Homo sapiens
ccttggaaactgaggcttagagagaggaagtggctggcccaaggtcacatagtgagtaaatgagcagagcttctccccctttcccttgaatcacctctatcttcctgtccagatgccaggcagcaggaactagcaggtgcttttgggtcatcttttaagaggcaatatagcacaatgagtgagagcagggactcaagggccagccacctgggttcaaatcccagctctgcttcctactggctatgtgaccttgggcaagtcactcaacttcttggttcctcagtctccccacctgtataatgaggataataatgatgcctcctttagggggtttctgtgagrattgcatatacacgtgacacataataagccctgtgccatgctagttatcccagcctctcactcttcccattgaaaaggtgaagacacagacccagagatggaggcaaattctgcaggggtcatgcccggggcagagcatggttcagctatgtctcctatggtgctgccaaggagccaccatgggcttgagctgagaggagccacctggcaccggacacgtgacctcctcgagggaagggaggctctgcagagagcaggggat

SEQ ID NO: 888365 - DNA, 581 bp, Homo sapiens
agccctcccactcccctaaaaatcagcctagatgttctcatgggtaagtactgctgaacctttttttttttttttttttttttgagacaaggtctcattctgtcgcccaggctagggtgtagtggcccaatcctggctcactgcaacctctgcttcccaaggctcaggtatcctcctgcctcagcccctcacgtagctggaactacaggcatgcaccaccacacccagctaatttttgtatttttagtagagatggggttttgctatgttgcccaggctggtcttaaactcctggactcaaacgatccacctatctaggcctcccaaagtgctgggattacaggtgtgagccaccgcgcccagcctgcagaaactttttagaaacaattaattcgtatcatatgcaagttgcttaaaaaraaaacaaaagaaaaaaaaaccaacctatcttattttaaaagtgttgtcttgattataaaagccagataagacaataccacaaaggaaagtataggtccatttcacttatgaatatggataggaaaacactaaacaaaatctttcctgactgagtctagcag

SEQ ID NO: 888366 - DNA, 597 bp, Homo sapiens
cagtgatattcttcacagaaatagaaaaggcaatactaaaatttatatggaaccacaaaagaccaagaatatccaaagccatcctgagaaaagagaacaaaactggaggaatcataataccttcaaattatactacagagctgtagtaaccaaaaaagcatggtattggcattaaaacagacacatagaccaatggaacagaatagagaatccagaaataaatctgtagatctacagtgaactcattttcgacaaagrtgccagaacatacattgaggaaaggacagtctcttcaacaaagggtgctctcaaaactagatatccatatacagaagaaagaaactagatccctgtctctcatcacatacaaaaatcaaattaaaatggattagagacttaaatcgaatacctcaaattataaaactactaaagaagaacattgtggaaattctccaggacattggtctgggtaaagattttttaatactaccctaaaagcacaggtagccaaagcaaaaaggacaaatggaatcacatcaagttaaaaagcttctgaacagcaaagaaaaaaaaagtgaagagacaatccatagaaca

SEQ ID NO: 888367 - DNA, 597 bp, Homo sapiens
cagtgatattcttcacagaaatagaaaaggcaatactaaaatttatatggaaccacaaaagaccaagaatatccaaagccatcctgagaaaagagaacaaaactggaggaatcataataccttcaaattatactacagagctgtagtaaccaaaaaagcatggtattggcattaaaacagacacatagaccaatggaacagaatagagaatccagaaataaatctgtagatctacagtgaactcattttcgacaaagatgccagaacatacattgaggaaaggacagtctcttcaacaaagggtgctctcaaaactagatatccatatacagaagaaagaaactagatccctgtctctcatcacatacaaaaatcaaattaaaatggattagagacttaaatcgaatacctcaaattataaaactactaaagaasaacattgtggaaattctccaggacattggtctgggtaaagattttttaatactaccctaaaagcacaggtagccaaagcaaaaaggacaaatggaatcacatcaagttaaaaagcttctgaacagcaaagaaaaaaaaagtgaagagacaatccatagaaca

SEQ ID NO: 888368 - DNA, 634 bp, Homo sapiens
tcattatattttctgaattccctatttatagctgagctgcatagcagttttgtgatctgtattgggagtcatgtattcatatgttacaaaactatttcctcttcgttttgattggacttgagatctttgatcaaattgttccttttaatgccatattatatttgttgagtctcaaatgaagtcttggctatgcctatcgtaacagtttgcattcatgtataaaaagttccatttactttggtaatcacttatactgggtgcctttaatacacaggtatctgaaaccagaaatattatctccctattactcccatctaaaattatgaaaaaattttcctgccatgtttcttcttgacctgactcttctttatttcttctttactttcattctttcttactttctctctctttctttctttcaagacaggatcttactctgtcttgcaggctggaatgcagtagtgcaaacatagctcatygcagcctggaccccctgggttcaagctatcttcctgcctcagcctcctgagttgctaggattacaggtatacaccacagcacccaactcctgattctcatttttgtcctctatttgcaatcttgtatggctgttttatccagaattttacttcta

SEQ ID NO: 888369 - DNA, 622 bp, Homo sapiens
gcctaacttcatgacttcttatgaatataggtcagaagaacccttgtcacttaaaatgcttgctctggaggaagccagacaccatctaagaagaccaactgcttagtaaccataggctgtgaggaagctggccagagaagaggaatggagggaggcatggagaaagaaaagttcccaaatgagccatctcaggtgaggcatcagacacatgtatgaggaagaagccatctttgacaaccagcccagtcaaaccttcaaatgacttccgcattgaccactatccaactataactacatgagatattatttcaaaaccttaygaattaataatcttttttttgaagtcatttattttcaaggtgacttgttacatgacaatatgtaataatggaaatagcagagaattaaggaagcacatggacagaaacgtgacacctcttcctacgtatacaaaagtaaagagcaaggtaaagctgaaagttgatggctttttaaatttaaaatgaaatgaattgatgagagtaagtggaatgcagatgaaatgaaggatttcagaagagtgatgtcagtttggaattggtagtatggagaatgggaagaagaattgaaaacagaaatggag

SEQ ID NO: 888370 - DNA, 644 bp, Homo sapiens
ggacctctgcccatcaagatgagcaattgtccctctttagaatatcagtagctagaaaagaggtgattagaaataggcctagcttgcctctggtatttcaaatcctaaaaccctacataaaaagttgatgacaacatcaaaaataacaataacaacaaacagagwttgaagttagatcttctgccaaaatctccatcagactaatgcaggtgctccatgcatgtcaccagctttgttcttctctcctcccagagcactaacccaatatgcttgtggtttcaccctttaaaagaaactgacaaacaaaaatacccatgtaacttcataataactttaccacctgcaatagtgatctggcagctatgatagtagtatcgccctcttccataatatgtataaaaagagtatcagatgctatagattgatatttttcctctgtttaacccaagttcataatttaatcctaggagagtaaggtaaaataaccagaatccctgtattagaactgctaatcccagctttatcagtaaatggctgtgtgatcttgaagactcagagaaccatattttcctcttttctttctgcttatcagaacttacgtatgtttcaacctcttgcaatttataaaaaataaaacataattt

SEQ ID NO: 888371 - DNA, 648 bp, Homo sapiens
ggaatacaatggccagagaacctggagctttgacatctaagggaaagagaagaagggtatcctgcctcaagaaaagagaaccccaattcacgctcactctccttgtttgttccttctgggcccccagttgaccggatggtgctcattcacattgagggagaatcttccccactcagtctgccaactcaaatgccagttttttcataaataccctcacagacacaccgagtgcagctcaatttttctaaccaaatgccaaaccaactgggtttctttcttaccagaagaggaatcractccatgtctaagaaaacattgacaatcagttatctgggtatcacttaatccagtcaagttgacatccaaaatcaactgtcacagggaccatcttagaattctactactataaggagaaagacagcaagatgagcaaattataatactaaggggtttccgttgcataaaaaagaaacatgacttctccactacacaatttagtaaattaaatatgtccaccattgaaccacgtatagagccaaaaggaaaaaaatgaaagaaatatctaaaaatgtaaaatgatggactcatcttagaaaattaaaaagacctgaaggataagtccaagaatcctgaaatgtggctattaca

SEQ ID NO: 888372 - DNA, 703 bp, Homo sapiens
ctgaatccaaatcctccagtcaatacaaaccataatatgctgctcggtctctgtggatccattctgcctcaagctatgagcttcaaaattctcaaagagttggacttcaatgctgtttcttatattttataatactatttaatctgcctgaaggtgtaggatgtaatgtcatgatactgtacaaacttctgggctactggccaaccgatacagatgagaaatattctattactatgaagctggagttccttcctactatttcatttgtatacatttgtattcatagcaattatttacttaaatattttagcacatgtaattttgaaattataaaggasatcttttttttttttctttttttcttggagacagagtcttgctcaatcacccaggctggagtgcagtggtataatctcagctcactgcaacctccgcctctggggttcaatcaattctcctgcctcagcctcctgagtagctgggattacaggcatgctccatcacgcccagctcatttttgtatttttagtagagatggggtttcaccatgttggccaggctggtctcaaactgctgacctcaagtgatctacctgcctgtcagtttggagccaagtaggcagaaggtcagcagaggactagaaagaaactctctgttcccaaaccagtcaagcgccttcctctgggctcgcgttctacaagcc

SEQ ID NO: 888373 - DNA, 665 bp, Homo sapiens
agatccttcctagaaacacctctagcccttcaaccatattagactccaatgagaagaaactgatcatctttcctttttttttttttttgagatggagtctcactctgtcacccaggctgagtgcagcggcacaatcttggctcactcagcctcccgggttcaagcgattctcctgcctcagtctccygagtagctgggactacaggcgtgtgccaccacacccggcttattttttgtatttttagtaaagacggggtttcaccatgttagccaggatggtctcgatctcatgacctcatgatctgcccgcctcagcctcccatagtgctgggattaccaggcgtgagccaccacacctggatgatcatctttcttaaataacaaaatatggtagactttaaattagcatataatggcagtaacataattttttattttgcattttcaaggccaacttaattttcaagtaaagattccaatgcatttgattagcaatatgaaagttatatccctgaaagagaaacaaattgattcatattttaaagaagccatagggcatcaatttttctagtaggcggtcaaaagtcattatatcctcattattaaactcttatccagattacaggatgtaaaatttaaattaaaagaaggaaacttttggatgt

SEQ ID NO: 888374 - DNA, 659 bp, Homo sapiens
tagattacaaacaaatccagagcccgaggctgggcatagagaaccagcccttccttcagtctggtgatcctggccccttcccaccccaccccaggcctcttctgcagcatttccatgagctgcagagaaggcttcacaagcctcttaacctgaagtaagacttaattggttagtttagaagtaatgtatgcctttcatgcatgcattttgaacagattagaaaactccagtayctatcaatttattttttccaaaaggagttattaaatataatgtggaaatgtctacagagtaggatcaatattgatatatcgagacaatcgctctctgtgtctcttcccagttgccctaagttgctacttaaattcgcttttccttttatcagtaaaaatagttgggaacatattccccatagcacccatttctcgtatgtttttagacattctgtgaaaacatcccagtttaatttccaggggtaggattgttgagtcaaaggtttatgcatgcttaattgcattaaatacagacgaattatttctcaaaaacttaacttacaatcccactaatggtggttaagaacgacatttccccctcacgtttgccaccacagggtattatgtatatatttcaactctgccaactggtgaaattggcatttg

SEQ ID NO: 888375 - DNA, 706 bp, Homo sapiens
aggctaggagagaatagtttaaaaatatgctcaggaaatcatctcagaacattgaaactgtggctaaagtaaagcagtaggtagactttcttcatgcaaatttagtgaaaaacccacacaatgctgatcaaatccttttttttttttttgaagtttctgttgagtgtttatattttctttctctgggtaatgtgctactttataacaatttctcttgttgctttgtgcacttaggtggaagctttaaaaagcaaagatcctatctgttacttgaattttgtatctcctgggtagtacatgctcaagctcagagcacagagaggtacaaactagcctagcccatctgcttgtctgtaaatttaccaattactcagctaaatgaatgctttaattctactcagacraaaaatcttgtaactaattggacctctccacactgaaaccccacatatctttctgtgtttatttcaatcaatgagacactggttcctactgctcccaactaactttctatgattactagagatgaaagattcgtggacatggcttggatcgcaggggtttagaattccctcagccctgccacacatacagatcattaaaaagtaaataatttactgcccttacacatgccctcgattcttctattcaacgaaaattcattctacaaatattaatttacccaccaggtagtaacgcaaagaca

SEQ ID NO: 888376 - DNA, 706 bp, Homo sapiens
aggctaggagagaatagtttaaaaatatgctcaggaaatcatctcagaacattgaaactgtggctaaagtaaagcagtaggtagactttcttcatgcaaatttagtgaaaaacccacacaatgctgatcaaatccttttttttttttttgaagtttctgttgagtgtttatattttctttctctgggtaatgtgctactttataacaatttctcttgttgctttgtgcacttaggtggaagctttaaaaagcaaagatcctatctgttacttgaattttgtatctcctgggtagtacatgctcaagctcagagcacagagaggtacaaactagcctagcccatctgcttgtctgtaaatttaccaattactcagctaaatgaatgctttaattctactcagacaaaaaaycttgtaactaattggacctctccacactgaaaccccacatatctttctgtgtttatttcaatcaatgagacactggttcctactgctcccaactaactttctatgattactagagatgaaagattcgtggacatggcttggatcgcaggggtttagaattccctcagccctgccacacatacagatcattaaaaagtaaataatttactgcccttacacatgccctcgattcttctattcaacgaaaattcattctacaaatattaatttacccaccaggtagtaacgcaaagaca

SEQ ID NO: 888377 - DNA, 632 bp, Homo sapiens
agattggagtgatgtatccacaagccatggaacaccagaatctagaaaaggcatggcagattctcctccagaaggaaccaaccctactgaccccttgatctcatacttttgaaatccagaaatgtgagagaatacatttccattgtttcaagccatcagattcatgatcaattgttacagcagccttaggaaactcaaagtgttccatgactgctagcgtgcttcatgatcaagacagaagaggaagcccagaaaggaagcttagggatcattttcaggcagaagcagagcccttttgtggtgggtctaaagatgtgtctgcagcggaatgaacactcaaacacagagaagagcaaaccgtccactcaagaagttggagtgggggtgctagaaggcttcctctgggctttctgttatagagagactgggatgggatgtagaagtgtgatccacaataaaatatccataggtaccccyccagagtggctaaagactgaatatacccagtgatggcagggatgtggagcaaccggaactctcaaccactgctgtgcctatgtaaaatggaaaacagtttggtatttagttaaaaagttaaacatacacctaacaggtatggaactcagctattc

SEQ ID NO: 888378 - DNA, 569 bp, Homo sapiens
aggaggactgacctatggaaagatccctggacttggtgtgggcctgagattttggttcaagctgacttactagctgttgacttttaacatgtgtcattgcttaactatggcctctgcttactcacctataaatcacagatctagttagctgtttactgttccttccagcttttaaagtctgggattctatgatctactaaactgaagtgcctgatttggccatctaggcttttaatgaatccattcattcctcaaacacctgaaaaatagtatgtacctaaaaagttatttatttatttatttatttgagacagagtttcacccttgttgcccaggctggagtgctatggcrcgatctcggcttgctgcaacctccacctcccaggttcaagcaattctcctgtctcagcttcccaagtagctgcgattacaggcatgcaccaccacacctggctaattttgtattttagcagagatggggtttcgccatgttggccagaaatgtgagagaataaatttccgttgtttcaagccatcagattcatgatcaattgttacagtacccttag

SEQ ID NO: 888379 - DNA, 569 bp, Homo sapiens
aggaggactgacctatggaaagatccctggacttggtgtgggcctgagattttggttcaagctgacttactagctgttgacttttaacatgtgtcattgcttaactatggcctctgcttactcacctataaatcacagatctagttagctgtttactgttccttccagcttttaaagtctgggattctatgatctactaaactgaagtgcctgatttggccatctaggcttttaatgaatccattcattcctcaaacacctgaaaaatagtatgtacctaaaaagttatttatttatttatttatttgagacagagtttcacccttgttgcccaggctggagtgctatggcgcgatctcggcttgctgcaacctccacctcccaggttcaagcaattctcctgtctcagcttcccaagtagctgsgattacaggcatgcaccaccacacctggctaattttgtattttagcagagatggggtttcgccatgttggccagaaatgtgagagaataaatttccgttgtttcaagccatcagattcatgatcaattgttacagtacccttag

SEQ ID NO: 888380 - DNA, 589 bp, Homo sapiens
cccaagtagctgcgattacaggcatgcaccaccacacctggctaattttgtattttagcagagatggggtttcgccatgttggccagaaatgtgagagaataaatttccgttgtttcaagccatcagattcatgatcaattgttacagtacccttaggaaactcataaagtgttccakgactgctagcttgcttcatgatcaggacagaaggggaagaccagaaaggaagcttagggatcattttcaggcagaagcagaacccttttgcagtggcccaaacaaccctaatcaaccaactgtgggaactgtacttattatgatgactgaatggaaaatgattatgtgcaaacgtttttccaggccacaccctctacctggtgggcatttgaggacagagttacagtgcggaatggacagagttacagtgcggaatctcttggcaagcctccattcaaagtttctgggactcaatcattcatacaggagaggactgccctctctcagcacatctacctgccttggcctcccagagtgctgagattacaggcataagccactgcgcccggccaaaagttattttatattgat

SEQ ID NO: 888381 - DNA, 679 bp, Homo sapiens
agaatgttctcagttggagctgaaatctatttattattattattattaatttattttttttgagatggagtctcattctgttgcccaggctggagtgcagtggtgtgatctcggctcactgtaacctctgcctcccgggctcaagcgatctcgtgccttagcctcccgagtacctgggattactggcaactgccaccatgcccagataattttgaaaatatttttagtagagacgaggttttgctgtattggccaggctggtcttgaactcctggcctgaggttgatccacttgcctcagcctccgaaagtgctgggattacaggtgtgagccactgcaccaggcctatttatattactttgtaagttgaaaaaaaaaacactgtagtaaaacaatcttaaaaacaacttaataacattctctcctgaattggaatgttatcaaagtcttgtttggggcagttattcagctgaatttacaaagagggrcgtatcctttgctgtaaatgtttaaattgcctgaagcaaaattcccataactacttaaaggagttgaaaatactcctaagtgtttatacttattcttacacagtaccatctctcctgagtggccctagtttactgagattgagccagctctgagacatctccctcctccttaagtttggcaaatatcctaa

SEQ ID NO: 888382 - DNA, 504 bp, Homo sapiens
gatccccaaaacctgccctccagaaagcatcctttaaatagcatgattttaggtgaaaggcattagcagctgatcacacttcagactttcttgcaaaacacatgaccactaggaaagttagataagcatctttatgagggcttgtctataccacagccattgtttaaagaccttgctgaataccttggtctctgcaggaattaaacatcagttatcatggtggtttcactccaagatgttgtcacttttgccatgcaacaggctggtttcttrcagcatggaagagaacactggactaggctcctgtcaatattcagcagaatggatgagcagccattttctgtttctagattgtttgctccttcagagttgggagatctttgatgattcaagagttctgacatattttggtgagccagcttgttgttaacataaatcagatgaagttgaaagcccacctcagcatcacaaggtcagtggctgttgtcactggaaaagctcctg

SEQ ID NO: 888383 - DNA, 628 bp, Homo sapiens
gaaagacttaatgagaaggtgtccttgtgagccctgacacaaaccttgctggcagggcactcaggactgccaggaagactcaggaccacagaggggactcaagaccaccagggaagagcaggttgcaggaagcacagggccagccccagagcagttgggggtagagatgagaggttggtttactgccaggttctggggttgcctcaccatcttcatgtttcctccagggaccctctcttatttcatggtgctgtgtctagctctacatctctaaaataccacagttttgttgtaccrggaggaaaccttctcacaggccctaaatgtagagcaatctctctgccagtggtcactaggatcacagccctgaggaagctgagggtaacctggtgaatcttctccagtcacattcgggacaggaaccttagcggggttccctgaggtgaacagtctcaggaatcctaacctcagccaagacagaggctgggccagatcaatgtcagatagaacctcacaagttttatgtctgacccttctccaccaacaataaagcatgccaatcagtatcagcgccgatctggggcccttttactcctagcccattctgtttctctttatttgttgttgt

SEQ ID NO: 888384 - DNA, 600 bp, Homo sapiens
agtaagtgcggtgtggtgctgaaaggatgtatattctgttgatttggcatagagagttctgtagatgtctattatgtctgcttggtgcagagctgagttcaattcctggatatccttgttaactttctgtctcgttgatctgtctaatgttgacagtggggtgttaaagtctcccactattattgtgtgggagtctatgtctctttgtaggtctctaaggacttgctttatgaatctgggttctcctgtatttggtgcatatatatttaggatagttaaytcttcttgttgaattgatccctttaccattctgtaatggccttctttgtctcttctgatctttgttggtttaaagtctgttttatcggagactaggattgcaacccctacctttttttgttttccatttgcttggtagatcttcccccatccctttattttgagcctgtgtgtgtctctgcacatgagatgggtttcctgaatacagcacactgaagggtcttgactctttatccaacttgccagtctgtgtctttaattggtgcattgagcccattttcatttaaggttaatattgttatgtgtgaatttgatcctgtc

SEQ ID NO: 888385 - DNA, 636 bp, Homo sapiens
gagaaatagaacgatactccaaaggaatataaagtttgctgtcagtgaaaattaggtcggcaaggatgagagtgacatccagtaagaccaggaaaactccaaatagtctaaaataaacaaataaataaataaataaataaatgcaaagataaargggcatttgtccctgtagctatactatatttaagccactgatcaggtaccaaaatgttattatttagtattaagctgcccagtggcaggaaaaactgtaatgccttagaatctcagaaaaatcactgttttcacccaatagaagcagttcttaataaacaaaattctcaccaaaccacttcacaagatattatagtaaacacatcagaccaacacctcaagagagaaaagtaaaactgaattaaaatcacctgtctgtttacaaactcttcttaaaatttgcgaatttcataagaagtttataccaatttctcataaaaaataaaccctcattaatctggataattctaaagaatttattaataaaaaccaaatgaaagcatgagtaacataagctcttaaaagaccaagatttttcatcagtgacattttcaacaagtacatgatttcatatttatgggtgcttctagcagagtgatgggc

SEQ ID NO: 888386 - DNA, 529 bp, Homo sapiens
cttctgagccctccaagtctctgggaagttccaaattttctcacattttcctgcctttttccgagcccttcaaatggttccaatctctgcctgttatccagttccaaaatcacttacacattttggggtatcttgacagcagtgctccactttctgcagtgggccaatttactgtgttagtccattctcacactgctaataaagacatacytgagactgagtaatttataaaggaaagaagtttaattgactcacagatcagcatagctggggaggccccaggtaacttacaatcattgcacaaggggaagcaaacaggtccttcttcacatggtggcaacaaggagaagtgccgagcaagaggggaaaaagcccatataaaaccatcagatctcgtgagaactcattcactatcatgagaactgcatgagggtaatcaccccaatgattaaattacctcccaatttgtccctcccatgacaaatagagcttataggaacaacaattcaagatgagatttgagtgagga

SEQ ID NO: 888387 - DNA, 600 bp, Homo sapiens
atgaacctttttattagcttcaacttaattgccagaagtctttgctcccttcctctagattaagttagatgtttcttctttatgttcctgtaagatcctacttttcctctgtcataacactcaagcttattaaatataattgaccatttaatcatgtcttcctgactagatggtaacatctacaagagagaaaaccctgtatgtgttgctccaaaatcarttgctatcatctagcacaatgctctgcaccaagtaagaaaccaaccaatattagttaaaaatgaatggaggcagagtgtggggtaaagggagtggctgggtaaaagacggtgggattgggtaacaaagagtcttacatgccattttattgcatttgaatgtcattctttagttaatggggaaaaatggagggtgtttgaggaagggtctaatgttacagagtgggactgctaagaaacagaagggccgccctggctcccctgttggtcccctcctcaaccctaagccaaaaaactttatttgtaaatattcataccgaaaagttataaatcataattgcacgtgtcagagaatttttgccattgggtgaacacacccatt

SEQ ID NO: 888388 - DNA, 602 bp, Homo sapiens
taactctatgcccatccccatcaggttctggctttagtgattggctgaatgtgggtgatgttcactgagacagaggctattgggcaagtgacatgagggcagaaattgatgaggtccattgtggatgaggtgccttcaagggtcactgaagtggagatttctggaaggctcaggtcacacttgaaattccgtgaataatacttggagggaaaggtggcttcagaagactttctggagcatcaccagaggttgaaatgcttttttaaggttgtctacttccactgggtaagccctgttctaatcccatatttccatcctccccatagcctgtcctctggaactttctaggtcatcagagaaatagattttttaaaaaaagcttttccctgaaggagctccttcttcaaagaaattacttaaaagttcaagaagtgagaaagtrtacatgaagccacagtggtagaaacaaggaagagatgcatgagcccagagatgtttgactttgaccttttggaccacctcagttgtgtgacacatatgtcatctagggttcttcataacaccatgtgaaaaccattatcctgtctactaaatttgccaca

SEQ ID NO: 888389 - DNA, 666 bp, Homo sapiens
aaaagtgagtttggcttcccagactcttttgcttcctctctcactatgtgatggctttgcacacacctgtacctccttatacttttcactatgagttacagcagcatgacaacctcaccggatggactgcccagtcttagacttcccagcctccaaaaaagagccaaataaatttctggtctttataaattacccagtctcaggtactctgttgtagcaacacaaaacggactaagacatctagcatcctccaaaactcacatctcactatttttttgtctatttgttgcatgtgtatgggtgtgttcttgtgcatctgtgtgattataaattcatatatttaacatatgatttgtctctacttaytgctgttatcattcctattggtagttaatttgtccaaattttgtccaaaatttcttacacaataggctcccacatccttttcataatctctgataacttccttttatctagtaaaataatgtgtcccaagctcctcaacttgtacatttcttgcctcagacttgcaatcagtcatttctccaagaagcccatgtgaaatgagcactggggatgtgaagtttactgcttctcttctggcccgaaagttcttttcagtgaacaccttataattgcgacttcaaatttgaatttgaaagtgtg

SEQ ID NO: 888390 - DNA, 637 bp, Homo sapiens
tgggccctctgccatgtagagcatcatgcctccagctgccagagagtaaaccaggtctaatgcaggctccatatcctggctttgctgttcctgagcacaagtgaccctgacacaaagagggggtcaccaccggaaagccacccattttccaccagctgcagtgtcacgtccttctgcatttgcatttctgacaggcagtctctgggtagaagataaaatttggatgatcatttgggttattcagatgaggaagtgcaattttgcccttcatttctaggagtgaaactttaaggtccactgagattactttgaggtccatggtgkttacatccagtttccgaggatatcctagaaaaagtgtctggttacttgccatggaaattgctttcctttctttggctggagaccatcatcctcaaactaatttcctgtttggtgctcaatatttgaaagcaggaaattgtattaacgaataggaagctggagatgatggtgaaaatgcatttagaaatttggctgctagggaaatcatttttgcctcccttaatttattaaaaacctagatcttatttggcatcttcttccctcattcttattcccgttattagccattatcaaaagaacattattaagtacg

SEQ ID NO: 888391 - DNA, 619 bp, Homo sapiens
atttctatttttaatacatgatatgcttaaggcaacaaattacttcttttttttttttggaaaaggcctaagtcctttccataaatctaaaagtactcagacatttcatttatttagtcagtcagtcagtgaatactgaatgcattgataagaaaaaattaaaaagacatcctctctctgcacagagtaatggtaattttttttccttcttgacctcttctccttcattcctccctgtctaatacatacagcttagttgtgtataattgacttcttctttttttttttttttgaaagagtctcactctgttgcctaggctggagtgcagtggcacgatctcagctctctgcaasccccacctcctgggttcaagcaattctcatgcctcagcctcccaagtagctgggactacagacatgtgccaccatgcctggataattttgtatttttagtagagatggggttttgccatgttggccaagctggtcttgaaacttggcctcaagtgacctgcccacctcagcctcccaaagtgctgagattataggcgtaagccaccacgcctggccagtataattgacttccactgaccactcatgactgagggaggaatattac

SEQ ID NO: 888392 - DNA, 607 bp, Homo sapiens
taaacagatgtactggcatctaggctttgttctatttgtagagcacaggcagagtagatttagcatagttaattagggggcctaggatttttggactgggaaatgggcattagcttcaccagctgcacaagcccttaataagagtgtcagcctgtcccttaaagctttgaagccaggcattgacttctcctctctaactctgaaagtcytagatggcatcttcttccaatagaagcctgttttgttgacattgaaaaatctgttgtttagtgtagccacctttgtctatggtcttagctaggtcttctaaataacttattgcagctcctacatcagcacttgcctgcttcaccttgcactgcattttgatgttacagagatggcttctttccttaagcctcatgaaccaacttctgctagcttcaaacttttcttctccaggttccttgcctccctcagccatcacagaattgaagcgaattagggccttgctcctgattagactttggcttaagggaatgttgtggctggtttgatcttctaatcagaccactcaaaaactttctccatatcaatagtaaggctgttttacttttgtatcattagt

SEQ ID NO: 888393 - DNA, 607 bp, Homo sapiens
taaacagatgtactggcatctaggctttgttctatttgtagagcacaggcagagtagatttagcatagttaattagggggcctaggatttttggactgggaaatgggcattagcttcaccagctgcacaagcccttaataagagtgtcagcctgtcccttaaagctttgaagccaggcattgacttctcctctctaactctgaaagtcctagatggcatcttcttccaatagaarcctgttttgttgacattgaaaaatctgttgtttagtgtagccacctttgtctatggtcttagctaggtcttctaaataacttattgcagctcctacatcagcacttgcctgcttcaccttgcactgcattttgatgttacagagatggcttctttccttaagcctcatgaaccaacttctgctagcttcaaacttttcttctccaggttccttgcctccctcagccatcacagaattgaagcgaattagggccttgctcctgattagactttggcttaagggaatgttgtggctggtttgatcttctaatcagaccactcaaaaactttctccatatcaatagtaaggctgttttacttttgtatcattagt

SEQ ID NO: 888394 - DNA, 628 bp, Homo sapiens
tataaactttgagaggctgaggtgggtggatcatttgaggtcaggagttcaagactggcctggccaacatggcgaaacctcatctctactaaaaatacaaaaagtagctgggcctggtggcacatgcctgtaattaatcccagctacttgggaggctgaggcaggagaatcacttgagggtggaggttgcagtgagctgagatcacaccactgcactccagcctgggcaacagagtgagactcagtctaaaaacaaaaacaaaaacaaaaaaatccacacgaaatctgacactatcatccccattttaatgttgggaaactgaggcccagagaggtgagttgacttgctcaagttaaaatagaaagtgcagagatgkcttctcatctaatccaaaacttttacatattttttagtggaaccttcttttctttatcaagaggtaaaccacatagggtgggagtgtctgagccctctgcaaggatgtaagaactcaggagtgtgcaaggacctcctttttattcatacagaggctgaattttaggaaaaacccacttaacccagccaggtgtttggctctgagccgtaacaggtgtgtggcagtcccttttatggccacatgaggtcagc

SEQ ID NO: 888395 - DNA, 654 bp, Homo sapiens
attttattgcaaagttgagaaccattccctttagcatcaaaaacacaatttttatacatatcactcagtaaatatctgttgaataaaactcatattaatcacacaaataggccaatcatgtcactatatttttagcctaaattatatcagccaagttattaaaaatctagtcatctttgggtttttataatatttgaattaaaatcaagttcattctcaaaagattatgatttgtcacttccaagaatagttaaaataatgtggctaactcccagagagtgttttttgaagcagaggaaggcccaacacattttttaacaatggcaacattagatctctataaatactttcacaaataagcaaatctggtacatagaaacattgataagtttttattaatatattcatatgtgacattttgagtactgctgactcttccatgctaatcttgtattttattcatttaatccaagaagtttatagtatcttstccatggcccataccagtattaatgcagattttttctttttccaaaggcttcatcaatgtatattttcccagaatttgagtaatagaagaaaagaaatctggacctgaaacataaaatgagatcatgagcatgcaatcattaaattgtcacagttatatcataa

SEQ ID NO: 888396 - DNA, 672 bp, Homo sapiens
acatttaaggttaatactgttctgtgggaatttgattctgtcatcatggtgctatctggttattttgcacagtagttgataaagtttcttcatagtgtcactggtctttatattttggtgtgtttttgcagtggttggtactggtttttcctttccatatttaatgcttctttcaagaggtcttgcaaggaaggcacggtgataacaaaatccctcagcatcagcttgtctggaaataattgtatttatcctttgcttatgaagatgactttggatggatacgaaattctgggttgaaaattcttccctttaagaatgttgaatattggcccacaatctcctctggcttgtagagtgtgttcttcagctgctggatcaaatattatrtaaatatctattagatccatttggtctaccatgcagaataagcctaaagtattataaatcattctactataaagacacatgcacaagtgtgtttattgcagcactattcacaatagtaaagacttggaagtaacccaatgatagactggataaagaaaatgtggcacatttacaccatggaatactatgcagctgtaagaaaggatgagttcatgtcctttgcagggacatggatgaagctggaaaccatcattctcagcaaactaacacaggagcagaaaacca

SEQ ID NO: 888397 - DNA, 592 bp, Homo sapiens
taataaatttctgttgttgataaattacccagtctgtggcatttttgttatgcattttgtttcatggcgtttttgtcacaattgcccaaatagactaagacagcttcctaggaatcatccctggatcagcattgcttactagccaacaaatattggtcaatgttaaacaggttgtacttgaagaccttgagcgaataaagcttccactttttgctgagatgattttggggttggggcatgcattcaaagttaatccagttaattgagctgccttggcttttactttctgcttatgcagagcctctccatcatttgggtgtgagtagattactagggccctctctggtctttgctcagtatgttcttagccctgcacatgcacacagacttccggattcttcaagaatatgacagccttttcaaaaccttctaaagttrtctcattccccagatctccacttatcatttttggttggtctctagtttgctcaaccagtatcatagcctcagacagctatggcattagcctttaattttttggcactggtcactattgttttcaataatatccctgggcatttggacttcagca

SEQ ID NO: 888398 - DNA, 555 bp, Homo sapiens
atttcaattgatgctgaaaaagcatttgataaaattcaatatcccttcatgataaaatccttcaaaaactgtgtatagaaggaacatacctcaacataataaaagctatatattacagaccaacagctagtatcggaatgaatcacaaaaaattgaaagtctttcctctaagatctggaacatgacaaggatgtcygctttcaccactgttattcaatgtagtgctggaacttgtagctagagttatcagacaagaataagatataaagggcatccaagttggaaaggaaaagtcaaagtacccttgtttgctgatgatataatcttacatttggaaaaaccaaaagccttcacaagaaaactattggaactaatttaaaaattcagtagggggaggagccaagatgggcaaataggaacagctccggtctacagctcccagagtgagcgatgcagaagacgggcgatttgtgcatttccaactgaggtactggttcatctcactggggagtgccagacagtaggtgcaggacagtgggtgcagcacacgaagca

SEQ ID NO: 888399 - DNA, 588 bp, Homo sapiens
ccacttatgtggatagcacctgtagatcatggtggaaaaatatgttgtgttacacaatttaccaaaattaaaggatactgtttgaaatgtgccaaattttcttacctcatctcacagattcacccacagtttaaagctcattaattatttttaaatggatatatacacacccaaacatatatatgtatatgtttgtgtgtgtgtgtgtgtgtgtatatatatgtatatatatatatacacacacacacgttcttttaaagttttagactctactgtcytgtgtggaaacatgaacagctaaacaaggcaaaataaagattttcttgttccattgtgtaagggttaaaattttggaaaagtctgaaggccacaacagctaagtccatcagggacccaagtatatgcatttacagaacgttttacaaggaaacaaaacagctgctttcaaagtttgttttctaaaagcaaaatctgtagctgaaaattatttaaagtgcaaagttatattgctgatactttatatctcagttttatatattttataatagtctgggataaattataaaaatagctataaaatcaacacta

SEQ ID NO: 888400 - DNA, 529 bp, Homo sapiens
ttttaagtcactgatttttttgaaaaaggaacaagaaatgcctgcaactaactaccataaacctcctactggttgacaccaatctaattattaatagccttttaatttaatttttaaaccaaattaaaatctacccacctgtactaatatccagttcttatgcgtgttcctttcccacaatggtatccacagagaatttacccaaaataaaaatatgttatgcatttactttccagtygattttctctaagaaacagttgccagtagtttggcatcagttattttacataatccatgctacttcttgatttttagcatgatgatttataaatttatgaagactttgggcatacccaagcatgaggcagagttgggagtgcttcattttctttaacacaattgagaaaagttgatatttttatcaagacatttgttaaggaagaaacagggaaggtataagaaatctaaataaactggcttgcatactacaggattctaatctccctctagctaatgcagcctacagggc

SEQ ID NO: 888401 - DNA, 614 bp, Homo sapiens
atacagcaataatagacacacagagagccaaatcatgaatgaactcatattcacaattgctacaaagataataaaatacccaggaatacaacttacaaggaatgtgaaagacgtcttcaaggagaactacaaaccactgctcaaggaaatgagagaagacacaaacaaatgggaaaacagcccatgctcatggataggaagaatcaatattgtcaaaatggccatactgcccaaagtaatgtatggattcagtgctattcccatcaagctaccattgactttcttcacagarttggaaaaaaactactttaaatttcatatggaaccaaaaaagatcctgtatagccaagacaatcctgagcaaaaagaacaaagctggaggcatcacactacctgactttaaactatactacaaggctgtagtaaccaaaacagcatggtacttgtaccaaaacagacatatagaccaatggagcagaacagagacctcacagtgtaaccccacacatctaaaaccatctgatcttcaacaaaactgacaaaaaaaaagcaatggggaaatgattccctatttaataaatgatgcttggaaaactggctagccatatgcagaa

SEQ ID NO: 888402 - DNA, 587 bp, Homo sapiens
gcagagtttttaaggataacttggtgggtggggggaagccagtgagccaggagtgctgactggtcagagatgaaatcacagggagtcggagctgtcttcttgcgctgagtcagttcctgggtggaggccacaagatcagatgagccagtttattgatctgggtggtgccagctgatccatcaagtgcagggtctgcaaaatatctcaagcactgatcttaggagcagtttggtgggggtcagaatcttgttgcctccagctgcatgactcctaaaccataatttctaacactgtggctgatgttagtcctacaaacgcaaggtcccaggcaagaaggaattttgctctgggaaagggctgttaccatctttaaactgtaaactaagtttctcccaaagttagttcagcytatgcccaggaatgaacgaagacagcttggaggttagaagcaagatggagtcagttaagttagattgttttcactgtctcagacctaattttgcaaaggtggtttcaatcccttcctttgggttttctaacactttaaccctaaggtataggctataaagatgggaaaaggccgtcga

SEQ ID NO: 888403 - DNA, 607 bp, Homo sapiens
aaactagagttgttaggccgggtgcagtggctcacacctgtaatcccagcactttgggagtctgaggcgggtggatcacgaggtcaggagatcgagaccagactggctaacacggtgaaaccccgtctctactaaaaatacaaaaaattagccaggcgtggtggtgggcacctgtagtcccagctactcgggaggctgaggcaggagaatggcgtgaatytgggaggtggagcttgctgtgagccgagatcacgccaatgcactccagcctgggagacagtgagactccatctcaaaaaaaaaaaaaaaaaaaaaaaaaaaaaaaaaactagagttttaacatggctgaaacttggccaatgtttttaattattgcggtgattagttttcataattgatgatgaagatagtttgaaacctgtatgagaatatttgaataagatattttataagtaaataataatatgcactcaggtaaatgacaatatgcattcagatgacttttccttcaattttgtagagattttgcggtcatctttggctcgaattatttagatgattgtctcaatattccatgctgtttatattttgaaaataacctatcttt

SEQ ID NO: 888404 - DNA, 607 bp, Homo sapiens
aaactagagttgttaggccgggtgcagtggctcacacctgtaatcccagcactttgggagtctgaggcgggtggatcacgaggtcaggagatcgagaccagactggctaacacggtgaaaccccgtctctactaaaaatacaaaaaattagccaggcgtggtggtgggcacctgtagtcccagctactcgggaggctgaggcaggagaatggcgtgaatctgggaggtggagcttgctgtgagccgagatcacgccaatgcactccagcytgggagacagtgagactccatctcaaaaaaaaaaaaaaaaaaaaaaaaaaaaaaaaaactagagttttaacatggctgaaacttggccaatgtttttaattattgcggtgattagttttcataattgatgatgaagatagtttgaaacctgtatgagaatatttgaataagatattttataagtaaataataatatgcactcaggtaaatgacaatatgcattcagatgacttttccttcaattttgtagagattttgcggtcatctttggctcgaattatttagatgattgtctcaatattccatgctgtttatattttgaaaataacctatcttt

SEQ ID NO: 888405 - DNA, 557 bp, Homo sapiens
gaaaaatcatgtaattttccttaggttacacagcttgtaagtgatggagttattcaaacacagatctgtctatttgcatagaaaacaatcataaccacgaagctatggttcctcttcagaatctctgaccttttacctcactcacaaaccctcatttcaagctgttcgtcaatcagaattcattatttttcccaagtccagcacatacacagttggcaactgaagacaggataagagacttactaataaaagctttcaacatagtgcttacttaaaatacagagaccactcaagattaaaattcagactttcaaagaatggtgattcattttgcagctgcaactgctaactattaactaattaactsctctcactattgactgtttaccctattttaaggtggcagaaatatccagttaatcccactgttatcaattgtagagacattagatttacatgtaatcatagctcaaaatcatgcttgtggctgtaataagtggttgcattcttttatcagtagatttagtttcctagtggccagtaattttgaactctca

SEQ ID NO: 888406 - DNA, 642 bp, Homo sapiens
  misc_feature 109: n = A,T,C or G
atgttaatatctttaggcctttctcataaacaggccagtttctcagagatagacctttagtgttctgcctgcggatggggaaagttgctggtgtatggagaagctgaangtctggcaaaatgaacctggggaggcgagagtgcctcttcattatgtctgagactttcacttatttcctagttaagtgaaggagagtgacccacacagatttgtacacctacatgattctgcaccttcagagaataaacttccagtcttctgccttgatgaggttgagaagtcttctgattgtaaaggagggaggaagaaatatgcagatccctagaacccaagtacttaactgccctctttttttttcttttctacccctcacctctgcctccagagacacctggtgcctccagagacacctggtgcctccagttccttaacatttctgcagttctgcggctttactggtttcccactrctaacctcctttgcaaacttagaattgagctttctttagtgaagggcagttatcttttctactattcagtagcttccagattttttttttttttgagacagagtcttgctctgtcacccagactggagtgcagtggcgtgattccagctcactgtaacctcaaactcctgagc

SEQ ID NO: 888407 - DNA, 632 bp, Homo sapiens
tgcaatcccagctactaagcaggctaagacacgagaatcgcttgaactcgggaggcagaggttgcagtgagctgaaatcgcaccactaccctccagcctaggcaacataacaaataaaaagaatgaattatgaaccataaactgaaagaaagtacaattgggtcattaagtctccttagtaaactagtactcaccttccagttttcaaaaaattttgatttacaagcaaatctacttttattcagctttgtgtatagaaaaagaaagaaatgaagatggaatgagggaggaaaaaagcacactgaaagatcctgttcatctttacctgggaaatctcacgttcctagtcactaaaaatccagctaaagttcatcccaaagcttcctttctgtagccactccagctyagtgtgatccttcctctctatgatattcttcaaccatcactgcctttagtactaattttgacattgattcaaaatatctgcatgctttagttgtatcttatctatgtaataatactcaaggctccttcatgtcgggtcttcagatctcatacactttcatctctttcattgacccttaaataatgctacaccctagtaagcactccagtttttaaaaaatcaaatg

SEQ ID NO: 888408 - DNA, 632 bp, Homo sapiens
tgcaatcccagctactaagcaggctaagacacgagaatcgcttgaactcgggaggcagaggttgcagtgagctgaaatcgcaccactaccctccagcctaggcaacataacaaataaaaagaatgaattatgaaccataaactgaaagaaagtacaattgggtcattaagtctccttagtaaactagtactcaccttccagttttcaaaaaattttgatttacaagcaaatctacttttattcagctttgtgtatagaaaaagaaagaaatgaagatggaatgagggaggaaaaaagcacactgaaagatcctgttcatctttacctgggaaatctcacgttcctagtcactaaaaatccagctaaagttcatcccaaagcttcctttctgtagccactccagctcagtgtgatccttcctctctatgatattcttcaaccatcactgcctttastactaattttgacattgattcaaaatatctgcatgctttagttgtatcttatctatgtaataatactcaaggctccttcatgtcgggtcttcagatctcatacactttcatctctttcattgacccttaaataatgctacaccctagtaagcactccagtttttaaaaaatcaaatg

SEQ ID NO: 888409 - DNA, 632 bp, Homo sapiens
tgcaatcccagctactaagcaggctaagacacgagaatcgcttgaactcgggaggcagaggttgcagtgagctgaaatcgcaccactaccctccagcctaggcaacataacaaataaaaagaatgaattatgaaccataaactgaaagaaagtacaattgggtcattaagtctccttagtaaactagtactcaccttccagttttcaaaaaattttgatttacaagcaaatctacttttattcagctttgtgtatagaaaaagaaagaaatgaagatggaatgagggaggaaaaaagcacactgaaagatcctgttcatctttacctgggaaatctcacgttcctagtcactaaaaatccagctaaagttcatcccaaagcttcctttctgtagccactccagctcagtgtgatccttcctctctatgatattcttcaaccatcactgcctttagtactmattttgacattgattcaaaatatctgcatgctttagttgtatcttatctatgtaataatactcaaggctccttcatgtcgggtcttcagatctcatacactttcatctctttcattgacccttaaataatgctacaccctagtaagcactccagtttttaaaaaatcaaatg

SEQ ID NO: 888410 - DNA, 578 bp, Homo sapiens
acaatggggtgttacaatctcccactattattgtgtgggagtctaaatctctttgtaggtctcttagaacttgctttatgaatctgggtgctcctctattgggtgcatatatacttaggatagttagctcttcttgttgcattcatccctttaccattatgtaatgcccttctttgtcttttttttkatcttcattggtttaaagtctgttttatcagagactaggattgtaaccctgctttttttgctttccgtttgcttggtaaatattcctccatccctttattttgagcctatgtgtgtctttgcaggtgagatgggtctcctgaatacagcacaccgatgggtcttgactctttatccagttttccaggctgtgtcttttaattgggggcatttatcccatttatgtttaaggttaatattgttatgtgtgaatttgattctgtcattatgatgctagctagttattttgcccgttaattgatgcagtttcttcatagtgtcgatggtctttacaatttggtatgtttttgcagtggctggtaccagtttttcctttccatatttaatgcttc

SEQ ID NO: 888411 - DNA, 595 bp, Homo sapiens
tcatctacagattcaatgcaatctctatcaaaataccaatgacattgtcttcagaaatagaaaaagcaatcctaaaatttgtatggaactaaaaacaaataaacaaacagaaaaccctgaatagcccaaacaaccttgaagaaaagaaaagcttcaggtattatactacctgacttcaaaaactctaataatctacaaacctataataatcaaaacagcattgtacaggcacaaaaacagacacatagacsaatgaaacagaatagagagcccggaaataaatccacacatttatagcccactgattttcaacaaaggtgttaagaatacacgatgtggaaaggacagtgtcttcactaaatagtattaagaaaactggatatccacttatagaagaatgaaattagattcttatctctcaccatagacaaaaatcaactcaaaatggatgaaagacttaaatgtatgaccctgaactgaaactactaggagaaaacattggggaaagctctatgtcactgatttgggcagtgatttttttggctaggacctcaaaagcaaaagcaataaaagcaaaaatagacaaacgggatta

SEQ ID NO: 888412 - DNA, 624 bp, Homo sapiens
atttctttaagcaggaaagacatatgtatttcttattcagccttcaaacaatgtccatgctacggacaaagccggggtccctggggtcacttaatgcctcttttcccaaccctcttgcgtggccagtagccttaggacaggttggtaaccactatcataaaatgacaattagtgataatatgctgctcctcttagaggtgtttatatttaacaggaggaaaatgcttcaaaccataagagggtctttggttggggtcaatttctggggaattcctaactgttcttcctctatgatgaatttaagcagtggtgtactggaacctgttggcatgggctcatgggaccctactgttaaattttcacaatactgcatatcagtagcttgaataaakcattataggagtatttatagtagggaaattagtaaatgcaataagtaagccccatacccatactccagagtgccagttttaaaatatttgttaacatactactggatttatgcattaaatatgggaattatatgaagacagtctaaggcatattcttccctgtctgtccttatagaattcttttcagcctcaaaataaaataagacaaaatgtgttattgttggcctgagag

SEQ ID NO: 888413 - DNA, 650 bp, Homo sapiens
tcaggcatgataaaagccatgttgaacagccctggtcaatttgccgagaatgaaaccaatgaggtcaattttagagagataccttcgtatgtgctatcaaaagtatgcatgtattttacttacaaggttcgctacactaacagctccactgagattcccgaattcccaatcacacctgaaattgcactagaactgctggtggctgtgaacttcctagattgttaaataaaataaattacattttgaaaaaaaggggcccgaaggaagtctgtgggagctgaggagagggaaaggaaaagagcccagtctgacaggtggtgtttctttttgcactcaccctttctattccccttcccctttaacctctttccccgtttaaccatctttcactatcttccttcccttccaagagatcttccctatgtagcaccaycagttcccaaaggctgcccaattatctccagctttttatcctctacctccgctagccctacagatagtaaacacagtcatgctgagcctccgtgcacatcccttggttaaaagctttccattaatttactgatcactattcattcatttattcaaaagacatttaccaagtgcctcctaggtgtcaggcccagggctagctgctgaggataaggagg

SEQ ID NO: 888414 - DNA, 612 bp, Homo sapiens
ggcacgtgccaccacgcctggctagttttcttatatttttagtagagacaggggtcttgctatgttgccccagctggtctcgaactcctggcctccagtgatctacctgccttggcttcccaaagtgctgggattacaggcatgagccactgtgcccagcccaaattgtttcttttcatttcttattttgggatggcactacatatcattcttcttcctcctccatcttcccttccctcctttaagtctctctctccaacaggaacccctcccctctttttattatagaaaagggcattgaatacytgaaaggcggtttatcatggaccagagaaaaaacaatgctcacagctggttctctaggttctctgagcctttcattcacgtcaagaagttctggctgcctgcatcctctgccatctcaccttgccttgcacaccagatgaaaaggagatgcaggaggtgggaaagcaccctggacccccatcaccccagggtggcattccccaaatgatggttgacctcaaactgccctcctgacttttgccatgtcaacaaactgccagaccaccacacctgcaaaacatggtctgcgtaaaacagattctataa

SEQ ID NO: 888415 - DNA, 596 bp, Homo sapiens
ttttggatacatgtgagaaaatgtttttattttctatacaaaaataggtaacatgcaaactgaaaagaattaaattaaaactacaataaataatgaaaatattggatgtcacatcatcttatgagcctagcactttttttaacagaaagcattgaaggctgactcttgggaattrgtttcttcaaaatgctattgcaaatacacaccaataaaatattatagtaaagaaggtgctttatcatctcttcctagtacacagggcctggaatagcaggaaacaagatgaaaataaacaagggccagaagatatttcattattgcttaaaaaaaaaactgtgctatactttctatagcatataaatacagacacatgaaaaggatacaataaaaacaggagttgaaaggaaaacccagtgctccaagactgctccaccagacagctggaacatcaaacatgctttctgaaatatcatataacagctgtctactatgctaagcccttgaacattaccccaaatagtttttttttttttaaatcatgatgatcaatagcaaccatttacttagggccttctctatgcccggtgctggactaa

SEQ ID NO: 888416 - DNA, 545 bp, Homo sapiens
gtgtgtcacggtaggtgtcttgaattcattgaacttggagtttgttatgctttttgaatgtgtaagtttgccttttacagaaatcatataaataggcctacagcctttgagactgacttctcttacttatcagtttgcatttcaaattcaaccatgtctttgtgagtcttgacaggtcattccatgttatcactgcacagcattccattgcatgagtgtgtaccacagtktatcgattcaattattgaaggacatgttggtagatcacagatagtggatgttatgactaaagctgccataattatttgaatgcaccttattttttgtcgagatattttaaaatgtactagatcaatttttgaatgtggtgttgctggatcgtatcataaaattatgtttatcttttaagattgtgagttagtttgtatttttttatagtgtttatattttatttaacctttctcaaacttacagtagaatttgcaggactctcatcctatgttacagttcaaacagcctttactgtacaaatttttttcacaatt

SEQ ID NO: 888417 - DNA, 646 bp, Homo sapiens
agccccatctatgaggcagggaaaacttcttatctggccatccatactgcagtgagatgtgacaacttagagagaaaagaatccatttcccgtggcctgcagagattttatgcatccccgttagcctccctcttgctctgatgcagggggctgggagagcagccaggacagaattctgggtctccgagggtgaaatttgagaataggagcactcaaggaccctgctggggctgaccttgtacccccaggaggtcacgcttgtgccaactcgtggatgctcattcctcatttcccttgacctccttgaggccactgaccctccccccctttctagtagcctctcttccttgggcctccttcaccccatgctctcctgattctcttccttcccctccagccttgccagcccaggcatcctgtggcttccaccctttcatctgtgccattcagggtcccaccccaggtcctcatctctgctctccmtgagcagctgtcgtctccacctcccaggctccctgcaggatgtgctgatgactcctagagctcagcctccagccctgctccttcctccaagtgcccagccacagggccaccatctacagggaccccaatcccaacacatcccaaatggacctcactatgtttc

SEQ ID NO: 888418 - DNA, 636 bp, Homo sapiens
tatttaattaagaattgagtaggtggattttccttggttcctttccctttttacctgggtactgttttaattttcttcttgaaacttgaggtggaggggtggatattaatggggttttcttgttttgttttgttttgagacmgggtcttactttgtcacccaggctggagtgcagtgacatgatcatggctcagtgcagcctcaacttccctgggctcaggtgattttcccacttctgccttccaagtgcataccaccatgcccagctaagagtgtgtgtgtgtgtgtgtgtgtgtgtgtgtgtgtgtggcttttctttttttttcttttttttttttttggtagagacagagtttcaccatgttgcccaggctggtctcgaactcttgggcttaagaaatccaccctccttggcctcccaaagtgctgggattataggtgtgaaccaccgcacctggcaagatattaatggtttatgatctatatttagttcttcagtgagggattttagaagaacgggggatatgcaggtcagagttgagaggttaactttgagaccacagtcatataaatattcatgaagacatggagtgactgaaattacctagggagagaatatagaatgagaagcaagaa

SEQ ID NO: 888419 - DNA, 636 bp, Homo sapiens
tatttaattaagaattgagtaggtggattttccttggttcctttccctttttacctgggtactgttttaattttcttcttgaaacttgaggtggaggggtggatattaatggggttttcttgttttgttttgttttgagaccgggtcttactttgtcacccaggctggagtgcagtgacatgatcatggctcagtgcagcctcaacttccctgggctcaggtgattttcccacttctgccttccaagtgcataccaccatgcccagctaagwgtgtgtgtgtgtgtgtgtgtgtgtgtgtgtgtgtgtggcttttctttttttttcttttttttttttttggtagagacagagtttcaccatgttgcccaggctggtctcgaactcttgggcttaagaaatccaccctccttggcctcccaaagtgctgggattataggtgtgaaccaccgcacctggcaagatattaatggtttatgatctatatttagttcttcagtgagggattttagaagaacgggggatatgcaggtcagagttgagaggttaactttgagaccacagtcatataaatattcatgaagacatggagtgactgaaattacctagggagagaatatagaatgagaagcaagaa

SEQ ID NO: 888420 - DNA, 636 bp, Homo sapiens
tatttaattaagaattgagtaggtggattttccttggttcctttccctttttacctgggtactgttttaattttcttcttgaaacttgaggtggaggggtggatattaatggggttttcttgttttgttttgttttgagaccgggtcttactttgtcacccaggctggagtgcagtgacatgatcatggctcagtgcagcctcaacttccctgggctcaggtgattttcccacttctgccttccaagtgcataccaccatgcccagctaagagtgtgtgtgtgtgtgtgtgtgtgtgtgtgtgtgtgtggcttttctttttttttcttttttttttttttggtagagacagagtttcaccatgttgcccaggctggtctcgaactcttgggcttaaraaatccaccctccttggcctcccaaagtgctgggattataggtgtgaaccaccgcacctggcaagatattaatggtttatgatctatatttagttcttcagtgagggattttagaagaacgggggatatgcaggtcagagttgagaggttaactttgagaccacagtcatataaatattcatgaagacatggagtgactgaaattacctagggagagaatatagaatgagaagcaagaa

SEQ ID NO: 888421 - DNA, 612 bp, Homo sapiens
tccaaagtctcatctgagacaaggcaagtcccttccgcctacaagcctgtaaaatcaaaaacaagctagttacttcctagatacaatagaggtacaggtattgggtaaatacagtcattctaaatgggagaaattggccaaaacaaaggtgttacagggcccatgcaagtccaaaatccagtggggcagtcaaattctaaagctccaaaatgatctcctttgactccatgtctcacatctaggtcatgctgatgcaagaagtagmttcttatagtcttggccagctctgcctcagtggctttgcagggtatagaccctcttctggcttttttcacgggcagctggagttgagtgtctgtggtttttccaggcacacagtgcaagctgtcattggatctaccattctggggtctggaggacagtggccctcttctcacagcctcactaggcagtgccccagtagggactctgtgtgggggctctgacaccacatttcccttctgccctgccctagcagaagttctccatgagggccccacccctgcagcaaacttttgcctgggcatccaggcatttccatatatcttctgaaatctaggtggacgttcccaa

SEQ ID NO: 888422 - DNA, 582 bp, Homo sapiens
catattttattgtctttttttcatagcttggtcattcagccctgaagaatattaacaatacacatctctatctatatattattttttaattatacttaaggacatatagaaaataagtagttaaacttggatgcattctataaactatatatggttcatgctatagcactctgtccattacatttttctagaatattgttttgttgaatcagttattaagatagaatagcttagcatgtacttataaacaattttgtattgkggttctggttttttcccactttccaaaagccctatttcaatttctgcagttctaaaggagatttgagttcttttaaaattacttattaattaagtaataataattacaaagacaattattataattcttagcaacgtaatccatgtttattctagaaaacaaactcaatggaaacaagcaaaatgaaaaggcattcataattccaccaaccaggcagaaccactcttagtattttgttatatacctttgcagatattttcattggaaaataaatgcaaatataaaatttcaggtagaagggcttcaacatggctgactag

SEQ ID NO: 888423 - DNA, 650 bp, Homo sapiens
aaatttttaaatgtcagctgtatgttgtaagggaagagaaattacagctggaagaaaggatttaaaagcaattacttttaataattgaaatacagattctcagcctcaggtcttagtctctaacggtttaaagaataaaatgctttccaagacaatgcacattcttcagtgtctaattatgtaagaagaacaaattttcactacctgaggttaagtctggtgagtgcaaaaccaactaccccaagcctagtgctagatcaatattcaggtaataaaacaaccayttatcattatttttgactttactgttacatcagtgtgattgcattggtccttttagagctgtaaagatgtagtttcatattcaggtataaaaacatagaacagatttttttcccattcaacctaatacatctattaggtgaggtagctcttctctattaattatcattgctatggaggatccaatttaagtttcttgatttgttaatgctaatgaaatcattagagttctagaaattcaaaatagaaagcattttcttgtggtagaataaatgaagatctttttaaatggtggatattttcttaacaatactgcaagaatgtctcaacatttggtatctctcttcaaattgtccatgtatgtatta

SEQ ID NO: 888424 - DNA, 768 bp, Homo sapiens
ataaagggcattcagttaggaaaagaggaagtcaaattgtccctgtttgcagataacatgattgtatatctagaaaacccatcgtctcagcccaaaatctccttaagctgataagcaacttcagcaaagtctcaggatacaaaatcaatgtgcaaaaatcacaagcattcctatacaccaataacagacaaacagagagccaaatcatgagtgaactcccacattcacaattgctkcaaagagaataaaatacctaggaatccaacttacaagggatgtgaaggacctcttcaaggacaactacaaatgactgctcaatgaaataaaagaggatacaaacaaatggaagaacattccatgttcatgggtaggaagaatcgatatcatgaaaatggccatactgcccaaggtaatttatagattcaatgccatccccatcaagctaccaatgactttcttcacagaattggaaaaaactactttaaagttcatatggaaccaaaaaagagcccgcatcgccaagtcaatcctaagccaaaagaacaaagctggaggcatcacactacctgacttcaaactatactacaaggctacagtaaccaaaacagcatggtactggtaccaaaacagagatatagaccaatggaacagaatatagccctcagaaataatgccgcatatctacaactatctgatctttgacaaacctgacgaaaacaagcaatggggaaaggattccctatttaataaacgttgctgggaaaactg

SEQ ID NO: 888425 - DNA, 666 bp, Homo sapiens
aatattctaacatttaacctgatgtactcaaaatattatttcaatatataattaacagaaaaattataaatgaaatatttggcatttgttttatcatacaaattttcaaaatccagtgtgcattttatacaatacagacagcacatccgcatgtsgactacccacgttttaaatgtttagtagccaccatattgtgacctcacgtctgaggtctctcagttgggatgactggcatggctgggatggctgaagcttcttgtcatatagcctctaatcctgcaggtttgttctcccatcaatcttttatcagtgcaggtttgttcacatgaagggagaagaactcccagcagcaagatagtcccaacgcagaagtgctttttaaatgtttcatgtttgccaaagctccattggccaaagcaagtcacatgaccaagccccagcatctgtgtgaaaggggtatccctgaggctgtggttacctggaggtaacaaagagaaggtcatttctcccagtgccccaggcccgggggaaacacccaccatcaccaatgccgtcctctctccatcatagaaaagttcaaaacagagaaaagcacaaaaaaggaaaattgaaataatctgttaactccatctcccagagataactactgtcaacttttggttatct

SEQ ID NO: 888426 - DNA, 666 bp, Homo sapiens
aatattctaacatttaacctgatgtactcaaaatattatttcaatatataattaacagaaaaattataaatgaaatatttggcatttgttttatcatacaaattttcaaaatccagtgtgcattttatacaatacagacagcacatccgcatgtggactacccacgttttaaatgtttagtagccaccatattgtgacctcacgtctgaggtctctcagttgggatgactggcatggctgggatggctgaagcttcttgtcatatagcctctaatcctgcaggtttgttctcccatcaatcttttatcagtgcaggtttgttcacatgaagggagaagaactcccagcagcaagatagtcccaacgcagaagtgctttttaaatgtttcatgtttgcyaaagctccattggccaaagcaagtcacatgaccaagccccagcatctgtgtgaaaggggtatccctgaggctgtggttacctggaggtaacaaagagaaggtcatttctcccagtgccccaggcccgggggaaacacccaccatcaccaatgccgtcctctctccatcatagaaaagttcaaaacagagaaaagcacaaaaaaggaaaattgaaataatctgttaactccatctcccagagataactactgtcaacttttggttatct

SEQ ID NO: 888427 - DNA, 617 bp, Homo sapiens
taagatttagaacaatttccaccaaggccacagttctgtagcacttccctaagaattgcttctccacaacaccttcactgaaattaaagacagagagacaggagtgcagatgatgtagtaaaaagaaattgtctgtgaaaacygctgactgtcgatgcaacataaaacagcagggttaacgtcctgccattcaaatacatttgccctcagtattcagaagcccttatgtggatcaacattccagctagagcctgctcacctctaatatgtcatgggccatgatgatttcctgttatcttaggtgtttttccatttaaccactgtagacaaagttctttagttttattagtctcaatcaacctttgaaattacctgatgagatagtaattatttctcagaatcctgggtcaatagccacttcctcaatcttctccttgcactacctctacccagcacagtatcttctgtggctcacatcagttagggaagcacatggcttcaagtacagagcccccagctaatggtgagtgaagcaagtaaggaagtcctttcctcacatagttagaaatacagaaggagctgatttcaggaattagtccagatggtgcatggtgtcc

SEQ ID NO: 888428 - DNA, 632 bp, Homo sapiens
ccagtttatgtttaccaagagctcttagtctaatggaaatgaatgcaaatctgtcaacctctaaaggagaaaaaaatatccaagtttattcccttctgacaataggacagaggcatcttattcatgggaccagagttccaccaccgtttgtagagaaactcacctgactgggcatcatagccatacctgatgaagttttaataacctgatatgtttaaagctgaattcaagttaacagaggcctgaagatattasagttgattagggaaagtccaaaagagaaagaaagaaaattaaatctgagaaagagaaataaaaatgataatcaaattttacagtgggcaattttgttctatttctctgtctcaaagtagaggtgaaagtagaatttccttttattctttagaaaatccacaactggcccaggaggccaggcatgtactcagttcccacctcaagacttcatgtatagcgttctcctatttttaaaagtggatttctgtaaaatgtttcataatgtggattggtttctttggggtctgcctctgcactatagctgcattaaaaaagacattaataacttttccgttaatgggtttttcagagtctccaaagactcaccttgtacatta

SEQ ID NO: 888429 - DNA, 644 bp, Homo sapiens
gaatggtaccagttcctccttgtacctctggtagaatttggctgtgaatccatctggtcctggactctttttggttggtaagctattgattattgccacaatttcagagcctgttattggtctattcagagtttcaacttcttcctgctttagtcttgggagggtgtatgtgtcaaggaatttatccatttcttctagattttctagtttatttgtgtagaggtgtttgtagtattctctgatggtagtttgtatttctgtgggattggtggtgatatcccctggccaggtactcctctgagacaaaacttccagaggaacgatcagacagcagcttttgtggttcatgaaaatctgctgttctacagccaacgctgctgrcacccaggcaaacagggtctggagtggacctctagcaaactccaacagacctgcagctgagggtcttgtctgttagaaggaaaacaaacaaacagaaaggacatccacaccaaaaaccaatctgtacatcaccatcatcaaagaccaaaagcagataaaaccacaaagatggggaaaaaaaagagcagaaaaactggaaactctaaaaagtgagcgactctcctcctccaaaagaactcagctcctcaccagcaacagaacaa

SEQ ID NO: 888430 - DNA, 660 bp, Homo sapiens
gcagaaactctacaagctagaagagagtgggggccaatattcaacattcttaaagaaaagaattttcaacccagaatttcacgtccagccaaactaagcttcataagtgaaggagaaataaaatactttacagacaagcaaatgctgagagattttgtcacctccaggcctgccctaaaagagctcctgaaggaagcactaaacatggaaaggaacaaccgrtagcagccactgcaaaaccatgcaaaattgtaaagaccatcaaggctaggaagaactgcatcaactaatgagcaaaataaccagctaacatcataatgacaggatcaaattcacacatatcaatatcaactttaaatgtaaagggactaaatgctccaattaaaagacacagactggcaaattggataaagagtcaagacccaacagtgtgctgtattcaggaaacccatctcacgtgcagagtcacacataggctcaaaataaaaggatggaggaagatctaccaagcaaatgaaaaacaaaaaaaggcaggggttgcaatcctagtctctgataaaacagactttaaaccaacaaagatcaaaagagacaaagaaggccattgcataatggtaaagggatcaattcaacaagaagagctaactatcctaaatatat

SEQ ID NO: 888431 - DNA, 653 bp, Homo sapiens
gtaataattgtttaatagaatatatagacagctaaaatttactagaacattatctcattctaaccttaagcccaattttctatataactatctcaaaatatttaaagtattcattaaaaaggaagcttaaaattttagaatgttatatgcatttttgaatagcattttgtgtattgaatattttatatgtaaaactaattctggaaataaaactctgctctgggtttataaaatagttgccacttgaatattcgtctgaagccctttcagacttcacctacagaccacagcaccctcgcccactagtaatgaactgcctccaaaattatctcaacataatccacattatctcattctaaccttaaacccaatcttctatatgactagctcaaaatctttaaagtattcattaaaacggaagcttaaaattttagaatgctatgtgtattcttgratagcattttaatgctattagattgaatatattatatgtaaaaataattctggaagtaaaacctctgctctgggtttataaattagtcagcacttgaatatttgtctgaagtccttccagacctcacctatagaccacagcaccttctcccactaacagtgaactgccttcaaaaattatctcagcataatccatgaaa

SEQ ID NO: 888432 - DNA, 617 bp, Homo sapiens
ctctacaaaaataaaaaattggccagatatggtggcacacctgtggtcctagctgctctaaaggctgagacaataggatcactagagcccgggaggtcaaggctgcagtgagccatgatcatgccactgcactctagcctgagcaacagaggccgaggcgggcagatcacctgaggtcaggagttcgagaccagcctgacaaacatggagaaaccctgtctctactaaaaatacaaaaattgccgggcgtggtggcgcatgcctgtaatcccagctactctggaggctgaggcagaagaatcacttgaacccaggaggcagaggttgcagtgagccgagatcgcaccattrcgctccagcctgggcaacaagagcgaaactccgtctcgaaaaccgaaaaaagaaaaggaaaaaaagtgtacaagtcagtgattttcagtgtattcacaaatatatgccatcattaccacagttgattttataacattttcatcacctcaaaaagaaacctggtaccctttagctgttcccatcccaccaccctaagcaaccacgaatctcctttctatttcaatggatttgcctattctggacattttatatatatatatatatga

SEQ ID NO: 888433 - DNA, 643 bp, Homo sapiens
tgcatgaaagtgcctgttttactaagtgataccatatttgtataagcattccttgtcagctgccatgcagatgcagactgcctcattaccatgttttatgccacataggagttcctatcatgtgctaggtagtaggtgaaccagaactcagatgtgaaaattgattcagtcttttacaaaagaatttaggcataaggaaatgactaaggaaggaaagtttgctcttctttgagtatgttcgtttgttaccaaacattttgttgtgttggatagtgagatgagtcctttaagtgaactttggctggctggtcacagtrttaagatgtgcattctcaagcaatggaacttaggagacttgtgaaggagaaatgtgaaggaaattagagacttcactgtggatgctgttggaatgtgaggaaatcatgtccaaaggtaggatctgaaagaactttcacctagataggtagttctctctccccactcccaaggagacacttctagaagaaaataaggaagcacttctggcttttatgaggttaaggaccttcccccatccagatgtcttttacagtgaaagacagttctgcacacagaagaagtcattgctgtgcacactctgactttcaaaattcctgttctagtt

SEQ ID NO: 888434 - DNA, 583 bp, Homo sapiens
tgtaaaatcgagccacagatatagatgacagcagaaaaatactaccagggactaggcatgttcaaaatggcggctccatcttctcttcttgccagccatgtgtaaggtaaggagcagacaagatggtgctggtcaagtggagagcccatttgcataataacattgggtggggtggccagccctccatgcaggctatgtaaatggcacacctgatcaaaccaatctgtgagccctacctaaatcagacaccacctcctcaagcctgcctataaaatctggcaaactccacaggaggccygtctttcccttccagaagcccctgtctctcactaaagagagagttgttctcctttctctttcttctgcctattaaacctcggcttctcaactcctcatgtgtatccatctcctaaattttcttggtgcgagacaacgaaccctggatattcaccccagaaaacgtagctgcttcattttgaatgagattaaactttaaatcagtggactttgagtaaaacagatttctctccattatgttgtgagccttgtccagcagttgaaggcctaaatagaacaaaaatga

SEQ ID NO: 888435 - DNA, 638 bp, Homo sapiens
gaaacagagacacaacacatttccatgttatctcttagatgttttatatatttttagctatagtatttcaatgccaattgttacattttataggtgtctcctttttacagttataattgtatatatcacttgaaataattatattttcaaaacaaaatttacactatgtgacaaaaagactggaaacaaaatggtgtattgatataaatatataattgaaactaatatttaatgggtttgtaaatatatttttgttkgctaattttccctggaaattagatttccatatttaaatctgcaccttaggaagctggaatttcttcccattagagatacagtaataactttgtaattagtgaaatcattgtcacactgcataatcagctcattgaacacatgcattatagtaagaaaaaaataataaaattccttgatagtaacataactgtcccattaaagtcttgattaactttataacaataatacagtatcattttggttttgtaaattagcagacaaattggaaatatatcatacaaggctcctgtatctttacagaagagaaggatgcttaattaaaataatataatgctggcaacattaatttcttattgtgaggacttagcaactcacttcag

SEQ ID NO: 888436 - DNA, 638 bp, Homo sapiens
gaaacagagacacaacacatttccatgttatctcttagatgttttatatatttttagctatagtatttcaatgccaattgttacattttataggtgtctcctttttacagttataattgtatatatcacttgaaataattatattttcaaaacaaaatttacactatgtgacaaaaagactggaaacaaaatggtgtattgatataaatatataattgaaactaatatttaatgggtttgtaaatatatttttgttggctaattttccctggaaattagatttccatatttaaatctgcamcttaggaagctggaatttcttcccattagagatacagtaataactttgtaattagtgaaatcattgtcacactgcataatcagctcattgaacacatgcattatagtaagaaaaaaataataaaattccttgatagtaacataactgtcccattaaagtcttgattaactttataacaataatacagtatcattttggttttgtaaattagcagacaaattggaaatatatcatacaaggctcctgtatctttacagaagagaaggatgcttaattaaaataatataatgctggcaacattaatttcttattgtgaggacttagcaactcacttcag

SEQ ID NO: 888437 - DNA, 638 bp, Homo sapiens
gaaacagagacacaacacatttccatgttatctcttagatgttttatatatttttagctatagtatttcaatgccaattgttacattttataggtgtctcctttttacagttataattgtatatatcacttgaaataattatattttcaaaacaaaatttacactatgtgacaaaaagactggaaacaaaatggtgtattgatataaatatataattgaaactaatatttaatgggtttgtaaatatatttttgttggctaattttccctggaaattagatttccatatttaaatctgcaccttaggaagctggaatttcttcccattagagatacagtaataaytttgtaattagtgaaatcattgtcacactgcataatcagctcattgaacacatgcattatagtaagaaaaaaataataaaattccttgatagtaacataactgtcccattaaagtcttgattaactttataacaataatacagtatcattttggttttgtaaattagcagacaaattggaaatatatcatacaaggctcctgtatctttacagaagagaaggatgcttaattaaaataatataatgctggcaacattaatttcttattgtgaggacttagcaactcacttcag

SEQ ID NO: 888438 - DNA, 630 bp, Homo sapiens
aatcatgctggagttgcaagaacagtaaaataaaggaaaatatatcattaatagttttatattgattatattttgaaatattttaaatatattaaaaaatgaaatattaaaattaattttaacttcttcgtgctttttatgtggctactagaaaattaaaatacatgtatgtttcttattatattcttgccagacagcactatatataccacaatatataccacatggctggtatatttwtatatatatatatatatatatatatatatatatatatatatatattcatatcagtaaattcaatcaatctgaaaccatgttatctctattttggtctagtgttcccagaaattacttttacccacaatttttatttttttgccatatatgtattaatattataatcttttttatagtgtgtaaatgttctgatcctttgggactcagcatgcttaatctgaccttagtagaggccctgttagcactgacaggcagttggaggtggacatgaggtaaaaccccttcagagtctataagcaaggcatgactctgcgggcaagtgaggcttcatgggagtgggagtttgggagtcatttaaatcaaataaatcatttcaaatatcatcattct

SEQ ID NO: 888439 - DNA, 600 bp, Homo sapiens
tgctgttttgtgactggcccatttcacttagcaaaatgtccccaaagtttactcatgttgtagcatgtatcagacattccttcctatttaggatgaataatattccattctatgtgtatattgcgttttgcttgcttacggacatttgggttggtgctatctgttggctattgtgaataatgctgctgtgaacatgagtgtacaaatctctctccaagaccctactttaaattatttttggtatatacccagaagtgcaatkgctaaataatatagatgtcaacagaaagagtcgaactcttttttctgttgttttaatcaactcagtttgtggtactttgctacagcagtcctaggaaactgatgcacatgtaatgaattgttataactttatgtattagtaacaagctgccatagatttagtagattaacagttcatattaattatcttatagttctgtgggttagaagttggacataggtatcattatgctaaaatcaaggtgttggctgagccacattcatttttgtaggctcttcggaacaatcaattgctttcctttatccagcttccaggtaacacctgcatttcttggctga

SEQ ID NO: 888440 - DNA, 648 bp, Homo sapiens
aaatagacctataacaactaaacagattgaattaataattaaaaatcttccaaaaataaaaacttatattttcctttaaatgatatcaaatattaaacaaatattaaaagcataaacaaaagtaatcattcacaaactcttgcagaaaataaaagaaggactacttctcaagtcattatgaagtcaatagaattctcaatattaaagctaaccaaagtcatcacaagaaaaaagcaaatctacagaccattatcattcacaaagagacctaaaatcctccaaatattagcaaattaagaccagcaacatataaaaagcattatattaatacactatgaccaygtgagatttatctcaggaatgtgagattggcttaacaatagaatataccatattaatagaataagaccaaaaaagtgatcatcccatgcataaagcttttgacaatattatttcttcatcctgggtcatgttttctgcatttttatatgtttgatcatttttatttgaatgatggaagtgtgtcttccatcagtcttcttgtatgaaggtcgggtcaatgcattcagtagttgaactggttctggaatttgttgtttctttggttatattcagcttgccaccacatgctctaaattacttgaggat

SEQ ID NO: 888441 - DNA, 648 bp, Homo sapiens
aaatagacctataacaactaaacagattgaattaataattaaaaatcttccaaaaataaaaacttatattttcctttaaatgatatcaaatattaaacaaatattaaaagcataaacaaaagtaatcattcacaaactcttgcagaaaataaaagaaggactacttctcaagtcattatgaagtcaatagaattctcaatattaaagctaaccaaagtcatcacaagaaaaaagcaaatctacagaccattatcattcacaaagagacctaaaatcctccaaatattagcaaattaagaccagcaacatataaaaagcattatattaatacactatgaccatgtgagatttatctcaggaatgtgagattggcttaacaatagaatataccatattaatagaataagaccaaaaaagtgatcatcccatgcataaagcttttgacaatattatttcttcatsctgggtcatgttttctgcatttttatatgtttgatcatttttatttgaatgatggaagtgtgtcttccatcagtcttcttgtatgaaggtcgggtcaatgcattcagtagttgaactggttctggaatttgttgtttctttggttatattcagcttgccaccacatgctctaaattacttgaggat

SEQ ID NO: 888442 - DNA, 627 bp, Homo sapiens
aagatagcaatgaatagagctggtgatcttaatggtcaccaatttaaccaatttggaaaagttttataaaatagctatcagtttccttgatataaaagggaggttataattttgagaaatagacattcctgtgatcctcacatgggctgttggtcacttcctaaagaaagcagcagggccaggtgcggtggctcacacgtataatcccagcactttgggaggtcgaggcaggtggatcacctgaggtcaggagtttgagaccagcytgaccaacatggtgaaaccccgcctctactaaaaaatataaaaattagccaggcatggtggtggatgcctgtaatcccagctactcaggaggctgaggcaggagaattgcttgaacctgggagggggaggttgcagtgagctgagaacatgccattgcactccagcctgggcaacagagcaagactcctcaaaaaaaaaaaaaaaaaaaaaaaaaaacgaaagaaagaaagaaaaagaaaaagcagtggaacagcatgtttgggtgcaatgatctccgaatgggacacgagtgcctaacaggctaagatttaaaggtaatggcagagaaatccctgtggatgtgataggaaggaagggaac

SEQ ID NO: 888443 - DNA, 514 bp, Homo sapiens
ctcattctcatgagactgtaaaatgcttgagagcaagtctgtatttaatttgcttttccctcacgggacaaatcagagacaaggttggcctgcattttaaaatttatttatttaactaacatttattaagcataaactatgtgccagacattgggctagagattcaatagtgagtataaatcatttctccaccaccaaggaatttatactgtagtgaccaaatagtcgatgattaacaaatacctgataagttaatcmaaagagcacccctcatacccataaatatctctccttcttaaccccattcttcctcctcctctgtatgctcttttaaattgatttccctaaacagtatctaaaggcttcctacctaaggaaagactgaaaatgaagacaaaggtttaagaaaagagatatgttatactctgagcatttcaactggtggttaaggagaatgcttatatcttatgattgacatttatgagcccctataggcaaggaaggtatcctcccc

SEQ ID NO: 888444 - DNA, 671 bp, Homo sapiens
tttaatacatcttgaattaatttttgtataaggtgtaaggaaggggcccagtttcagttttctgcatatggctagccagttttcccaatatcatttattaaatagggaatcctttccctattgcttgtttttgtcaggtttgtcaaagttcagatggttgtagatgtgtggtgttatttctgaggactctgttctgtcccattgttctatatatctgttttggtaacagtamcatgctgttttgattactgtagccttgcagtatggtttgaagtcagctagcatgatgcctccagctttgttctttttgcttaagatagtcttggttacatgggctctttttcactccatatgaaatttaaggtagttttttccattgtgaagaaagtcaatagtaacttgatgggaatagcattgaatctattaattactttgggcagtatggccattttcatgatactgattcttcctatccatgggcatgaaatgtttttccatttgtttgtgtcctctcttatttccttgtgcagtggtttgtagttctccttgaagaggtccttcacatctcttgtaagttgtagtcgtaagtattttattctcttcgtaagaattgtgaatgggagttcactcatgatttggctctctgtttgtctattattggtgtataggaa

SEQ ID NO: 888445 - DNA, 671 bp, Homo sapiens
tttaatacatcttgaattaatttttgtataaggtgtaaggaaggggcccagtttcagttttctgcatatggctagccagttttcccaatatcatttattaaatagggaatcctttccctattgcttgtttttgtcaggtttgtcaaagttcagatggttgtagatgtgtggtgttatttctgaggactctgttctgtcccattgttctatatatctgttttggtaacagtaacatgctgttttgattactgtagccttgcagtatggtttgaagtcagctagcatgatgcctccagctttgttctttttgcttaagatagtcttggttacatgggctctttttcactccatatgaaatttaaggtagttttttcyattgtgaagaaagtcaatagtaacttgatgggaatagcattgaatctattaattactttgggcagtatggccattttcatgatactgattcttcctatccatgggcatgaaatgtttttccatttgtttgtgtcctctcttatttccttgtgcagtggtttgtagttctccttgaagaggtccttcacatctcttgtaagttgtagtcgtaagtattttattctcttcgtaagaattgtgaatgggagttcactcatgatttggctctctgtttgtctattattggtgtataggaa

SEQ ID NO: 888446 - DNA, 597 bp, Homo sapiens
accaatacgaccagtaagctgacttcttaatttatctctatgatcaacaaatgctttagagtctaaattcgcagaaaaagatccttcaacaacatctccattatcaataggtttgaatcttcaaattattgtcaacatagttagcaagccctatccatttatccattctttcattcactcatttgtttactatttatgttttacttttaaaaatacaagtaaaacaaaataacaacaaaaaattaaactaagtatctcttacgggctgggaatagaaataggcctcagggatatgtctaattcagatttcagaagcaaaactgacatttttctatgtagtgggatttggaagcatcccctgccccaaatatgtcccttttttatcctacattttcttttttattgcctacttttaraccccccaaaaacaggttgtctaccaaggaatggtaattagatttttcatcagcaaaaaacaaaaaaactaaaagctaataacataaccatgaaaatagaatgtatagaaaattatcatttacttctgaagcatatgaagaattaatcacctgcagtcaaccctatctgaaagaattatta

SEQ ID NO: 888447 - DNA, 681 bp, Homo sapiens
attgcttatttttgttgacattgttgaagatcagatgaatgtaagtgtgcagatttattcctgggttctctattctgttccattggtctatatgtctgtttttgtaccagtaccatgctgttttggttactttggccttatagtatagtacgaagtcaggtgatataatgcccccaactttattctctttgcataggattgctttggctacttgtgctcttttttggttccaaaataattttagaataattttttccaattctgtggaaaatgacattggtagtttgataggaatattgttagatatggtttgactgttttcctacccaaaatctcatcttgaattgtaaccccatatccccatgtgtcaagggcaggaccaggtggaggtaattgaaccatgggggcagtttcccccaygctgttctcgtggtagtgagcaagtctcacgagatctgatggttttataagtgtctggcatttcccctgcttgcactcattctctctcctgctgccctgtgaagaggtgtctttcgtcatgattgtaagtttcctgaggcctccccagtcatgcggaagtgtgagtcaattaaacctctttctttataaattacccagtcttgggtatttcttcatgacagcatgagaatggactaatacaatgttgaatctgcagattgc

SEQ ID NO: 888448 - DNA, 605 bp, Homo sapiens
  misc_feature 572: n = A,T,C or G
cctctatggaaaacagtatggagacttttcaaacaactaataatagatctactatttgattcagcaatcccactactgggtatatacccaaaagaaagtaaatcattatatcaaaaagatacctgcaaccgtatgtttattgcagcactattcacaatagcaaatatggaatcaacctgcgtccatcaacaggtgattggataaacaaaatgtgctatgtgcatattataccagggactactactcagccataaaaaaatgaagtcatactttttgcagcaacatagatggaactagaggtcattatcttaagcgaaataattcataagcggaaattaaaatactgtatgttctcacatgtaagtaaggagctaaataatgtgtacatatggacatagggcrtggactaatagacactggagactcagaagggtgagaagatgggagaggtgagggattagaaataaattaatgcatacaatgtagactatttggtgatggctacactaagagctcagacttcgaccagtatgcaatagatccatgtacgacatggcacttgtaacccgtanatctataccattttgtacaatgcaagatgtagt

SEQ ID NO: 888449 - DNA, 644 bp, Homo sapiens
cctgagcccatctgagtgcctaagtatagtgaaattaagtagaaatctattgaactaaaaggatctggaagcctcccagaactggaatcaatgcaaaggaaaacagaacaattctcttcctgatcaccaggctgaggctgggaacagttagtcacaatcacaggtattgttagggtcatttatgaggtgagtcataagtaatttgttaacaataacaaagcgtggaagtgtcccaatgatgtgctccttcacagattagagcagattcaaggttatcactatagcaatgatgtagcccaatatgctttgttgagtgagtttgctcctgagagtgtgttgcacacatttgcatactgattgcaatgtagatcaaggcaaaccagaaaaaataaaaacaaatgaaagtcaactgattcaggctagagaagtattggacctcttytgattttcactgtgagcgagaagtcagttcgctggctccatctttcctcccatgacccacagtaggaacagatcgggggaggagggcaatgctgcctttatttataggaagcagcagagaaatcctttttaaatgatttattttaataatgtaaaaagtgaaaccatataatttgtattttcttagcactttgtggattata

SEQ ID NO: 888450 - DNA, 473 bp, Homo sapiens
cgtgggttgtcacacctagataagtcctgtgatttaaacagtgaccttttcaaatggctttgccacttaattacacagactgtacacttatgagtaaaaagaaacatacctccacgtacaatcactgagacagacaaggtagaattctttatttattattatttcaggattttratgtgattgtttggtatctgctagactcaatggacatgtaacttcacaactgaagacttcttttacttcatttcacaccccgcaacatgccagttatttttctaaaatacaaatctttttatgtcattcaccaactcaaaattcttcggtggttaattcccccattgtctatagagaaaaattataattctttagcttgacatacaaatccctttcaatatttgaatcctgccaaatttgtagccacaactaccaatagtctactcctccccatcccccacaataacatattaactcca

SEQ ID NO: 888451 - DNA, 587 bp, Homo sapiens
atgtgtcactctgtacaccaatacaggttgagtatccctaatccagaaatccaaaatcctaaatgctccaaaatccaaaacttcttgagcaccaacatggcatccaaaggaaatgctcattgaagcttttccaatttcatgttttcaggttaggctgctgaaccagtaaatatataatrtaaacattctggaaaccaacaaaatctgaaatccaaaacacttctggttccaagcattttggataaatgatacacaacctgtaccacatgtcttaattgctgtagccttatattatgtgtttaaatcaggtagtatgagtcctcttactttgttcttcctttttgtaatgttttaactagtctaggtccttggtattttcctagaaattttagaatcagcttgtcaatttttgcaaaaaagcctgcaggggattttgacattgcatggaatttgtggataattgatgtgcaatattgagccttctaaatcatgaatatggtatatccgtctatttcagttcttttaaattttatttcagtaatatttgatagttttgaatggataggtcttgcacatattttgtttaa

SEQ ID NO: 888452 - DNA, 605 bp, Homo sapiens
ataagtttccttcagacacataaagagacttcattgtcaaaaatcttctcatgaaagaaacttgtcaatgacaagcttcaagaacaacagtgatatcaaaaggaatcttttatatgtgaaagaaatggttagcaaaggcagtagtaattaagtgaataaatgtaarcaaatacagccttacttttaaaagttaaatggtaaaaatatttggtgtgtaaggttaagaaaacataaaaccaaattattggcaaaaatataaatcaagtaggagttatcagccttaaatgctccaaagtccttaactggttaactttagattttaagaatgcatgctgaaatttctaaggtatccatttaaacaagcccagaactataatgtgtaacttccaaactaataaagggtaaaaacctgattaaaataaataaataaaatcattcctttttttttttttttttttttttgacagtgtctcgctttgtcacccaagctgaagtgcagtggtgtgatctgggctcactacaaactctgcctcctgaattcaagcgattctcatacctcagcctccagagtagctgggattacaggtgtccgccaccacgtctgg

SEQ ID NO: 888453 - DNA, 605 bp, Homo sapiens
ataagtttccttcagacacataaagagacttcattgtcaaaaatcttctcatgaaagaaacttgtcaatgacaagcttcaagaacaacagtgatatcaaaaggaatcttttatatgtgaaagaaatggttagcaaaggcagtagtaattaagtgaataaatgtaaacaaatacagccttacttttaaaagwtaaatggtaaaaatatttggtgtgtaaggttaagaaaacataaaaccaaattattggcaaaaatataaatcaagtaggagttatcagccttaaatgctccaaagtccttaactggttaactttagattttaagaatgcatgctgaaatttctaaggtatccatttaaacaagcccagaactataatgtgtaacttccaaactaataaagggtaaaaacctgattaaaataaataaataaaatcattcctttttttttttttttttttttttgacagtgtctcgctttgtcacccaagctgaagtgcagtggtgtgatctgggctcactacaaactctgcctcctgaattcaagcgattctcatacctcagcctccagagtagctgggattacaggtgtccgccaccacgtctgg

SEQ ID NO: 888454 - DNA, 605 bp, Homo sapiens
ataagtttccttcagacacataaagagacttcattgtcaaaaatcttctcatgaaagaaacttgtcaatgacaagcttcaagaacaacagtgatatcaaaaggaatcttttatatgtgaaagaaatggttagcaaaggcagtagtaattaagtgaataaatgtaaacaaatacagccttacttttaaaagttaaatggtaaaaatatttggtgtgtaaggttaagaaaacataaaaccaaattattggcaaaaatrtaaatcaagtaggagttatcagccttaaatgctccaaagtccttaactggttaactttagattttaagaatgcatgctgaaatttctaaggtatccatttaaacaagcccagaactataatgtgtaacttccaaactaataaagggtaaaaacctgattaaaataaataaataaaatcattcctttttttttttttttttttttttgacagtgtctcgctttgtcacccaagctgaagtgcagtggtgtgatctgggctcactacaaactctgcctcctgaattcaagcgattctcatacctcagcctccagagtagctgggattacaggtgtccgccaccacgtctgg

SEQ ID NO: 888455 - DNA, 605 bp, Homo sapiens
ataagtttccttcagacacataaagagacttcattgtcaaaaatcttctcatgaaagaaacttgtcaatgacaagcttcaagaacaacagtgatatcaaaaggaatcttttatatgtgaaagaaatggttagcaaaggcagtagtaattaagtgaataaatgtaaacaaatacagccttacttttaaaagttaaatggtaaaaatatttggtgtgtaaggttaagaaaacataaaaccaaattattggcaaaaatataaatcaagtaggagttatcagccttaaatgctccaaagtccttaactggttaactttagattttaagaatgcatgctgaaatttctaaggtatccatttaaacaagcccagaactataatgtgtaacttccaaacyaataaagggtaaaaacctgattaaaataaataaataaaatcattcctttttttttttttttttttttttgacagtgtctcgctttgtcacccaagctgaagtgcagtggtgtgatctgggctcactacaaactctgcctcctgaattcaagcgattctcatacctcagcctccagagtagctgggattacaggtgtccgccaccacgtctgg

SEQ ID NO: 888456 - DNA, 601 bp, Homo sapiens
aggttaataggtacttgaaacatctatttcccaggtgttttaaagtaattttttgcagtattagcatctacttattcaattccctagttctagtatctaaaacaggagctggtataaattaagttctcaataatgttgggtagctgcctagtcctaacaatgtgaaataggcctgataaatcaaaggaaagttcagttagcctgtattatctcaaattatctctgaattaaaaatctgtattgataactagaaaaggtctttctttttttcttcccccctctctttttttttttttaagacagagtctcgcactgtcacccaggctagactgcagtggtgtggccatagctcattacagcctccaacttccaggctcargcaatcttcccacctcagcttcctgagtagctaggactacagatacatggcactatgcctggttaaattttgtattcgttgtagtgccaatttcaccatgttgcctcagctggtcttggacccctgggctaaagcaatccacccacctcagcttcccagggtgctggaattacaggcatgagccaccagacctggtccctaggaaagatcttaacctactca

SEQ ID NO: 888457 - DNA, 565 bp, Homo sapiens
cctataaagcacattaataaaagtactatacagagggaaatttaatatgaatggttaaaatgcatggaattcagattttactgtcaaacagctcaattaaacaaattgaatttttaagcaacaaaagggaattgaatcaaattaggaacagagtgtgatgtgaaatgtggacctttatgaggagcgccagcccctccagcatgaagccttctttatttgttgcctcggcagttagaggaggctggcagaaccgcatcacaacaggataaaaatgttcaccattgaaacacagtttttggctcccaataaatcatctrtcacttcatcacagcccagtagataatgagcaataaagttttcacactcagggaatgaggacacagacacaagaaatacagctgaagccgtaagtctggctctgctgtgagtggaaagtgctttgtataagaaatgaccctaagatttcctccaaacaagaacacagcatctgtacaatacacaatttgccacattaaaaattaaattgcatttattaggaactttaatgacaacagtatgttgaggt

SEQ ID NO: 888458 - DNA, 620 bp, Homo sapiens
gagcggtggctcgtgcatgtaatcccagcactttgggaggccaaggcggacggatgacctgaggtcaggagtttgagaccagcctggccaacatggggaaaccccgtctctactaaaaatacaaaaaaaaataaccaggygtggtggtgggcgcctgtaatcccagctacttgggaggctgaggcaggaggcttgctggaactcgggaggcggaggttgcagtgagccaagattgcaccattgcactccagcctgggcaacaagagcaaaactccatcacacacacacaaaaaaggtacccatcctcatgtatattcaaaagggcatcaggaggaaggctcctgccatcagccactgcactgatgagaagggcatccccgctatgctacacccacctggacgaggagccaggcttcatgccacccactgggaacaaagatttctcctatctggtggaggaattctcattcaccaaggacttcctccgggggactgtgcttgtgttcttccaggttccttgttactttgcaggacagtttgagatttaatctatttgtatgatacaatggcggggagctggagggcttcccttcctctccatgtggtatggtggtctcatt

SEQ ID NO: 888459 - DNA, 620 bp, Homo sapiens
gagcggtggctcgtgcatgtaatcccagcactttgggaggccaaggcggacggatgacctgaggtcaggagtttgagaccagcctggccaacatggggaaaccccgtctctactaaaaatacaaaaaaaaataaccaggcgtggtggtgggcgcctgtaatcccagctactygggaggctgaggcaggaggcttgctggaactcgggaggcggaggttgcagtgagccaagattgcaccattgcactccagcctgggcaacaagagcaaaactccatcacacacacacaaaaaaggtacccatcctcatgtatattcaaaagggcatcaggaggaaggctcctgccatcagccactgcactgatgagaagggcatccccgctatgctacacccacctggacgaggagccaggcttcatgccacccactgggaacaaagatttctcctatctggtggaggaattctcattcaccaaggacttcctccgggggactgtgcttgtgttcttccaggttccttgttactttgcaggacagtttgagatttaatctatttgtatgatacaatggcggggagctggagggcttcccttcctctccatgtggtatggtggtctcatt

SEQ ID NO: 888460 - DNA, 622 bp, Homo sapiens
tcatttatattcattgctactgtgccctgtctaacagaaataacctggcactgatggggacagagtgaagatcttggaacgaggtgacccagtggtttaaatttcattatggtgttgaacatccaggcaacacacacaactcagtagaaatgcaarcagataatgcacccaggacctcacttcagtcacacccagagcagcaggaaggacagaaagttccagaaagagccatgtgcctggctgaggcattttcactgcaggaacaatgtgatgtgactgagcacaaggctgcctttgggcttttacaccacagttcacctggtcacatcccactgcaggtccatcttgggcactgactgatccatccatccacccaccaagggtttgccagactggagattccagaagcggctgaagctgtggtcctgccacagggtgtcggggctggcagggcaacagtcatcacattagtggatgtgaagttggctcagcacccagggtgggaagggcctgggagaaggtcctcccagggaaagcaatgtccaccctggccttggattcaggaagagcaagctcccagagaaacctgagggtcctgggcatggtggactaatgagggcag

SEQ ID NO: 888461 - DNA, 637 bp, Homo sapiens
gagacaaaatgtattgctttgtaccatttaaatgttaagagggttttcatgtttttctgcaaaaagcctatttaccctgcactgagtttccccggcctcacagtatcacaggttagggagttccctttcattaaayggttctttagaccatgaaattttcttgttttgctttctaccaaattccaaattaattccagtccaaggtttaatagatcagatccatgaggtcattgtaacttcatattttatattaagcatgactactattaattgagggccagctttgtgatatgcatgctctatacattgtctctaatcctcctagatctcccaaggtaagtagcatttttcctaacaacagaactgaggctaagtgaaatcacataggaaagctagaacctgaacataagtctccatggtctcaaagcctgaactcaccactacagcatatagcaattgtaccctcattatctgaggtttcaattttgcaatgtccatattttgagttttacatcattttcctgctcctaattgcccagagtcatagtggactgcgtacaagcttcatttctccctccaaggttttgcagagaaaaattctattgtttggcccaggagccccaggtatcatttaggg

SEQ ID NO: 888462 - DNA, 579 bp, Homo sapiens
ttgcaaaccctctgcggcctgctgtccttactctcctgtagggccatgaactccccaggatgtgccttcctgtcttcatgtctcctggcctgatgggcctcctgcctgtgtcttgccaacatggaggtcaggcacagaractccagcctatcaactcaggtgcttctctggtagtagcaacttggggtccttgacattttgttttgtcctaaagagaacaaaatgctccctacttcttccactgtgtcttgatccctgtcaatttactgggacacacacccctccccaaggacagaggaaaaaatattgtgatgtccaaatactcagagagtgacatacgaagatgtcagaatgagactttcactctcagttttggtggcggccctaaaagaccagtgacagacaccacgtatcaaatatagcagctctgtacaatgaataaacaaagccctttgcccaattcctacttcaggcatgaaaagcccaagagaaacagctatacctttagaaaatggttctggggttcgggtgcattttctaacactgccccagagaagcctccaagagaaacaataaggg

SEQ ID NO: 888463 - DNA, 612 bp, Homo sapiens
tagtgccaagattgagacaccccgagatgtgcagacgaccaacaggaaacccacactgcttcacgccatcaacctcattgcagccaggttccacccaaccctccaccttctgcctagccagccacagctgtggactcttgcactttcaaacaaggatccaggcatcagtcccaaatccttcaaactcctggaaactttcgtcaatctctgaaatgcctccatcgccttgagawgtggtggagacacaacaaccatcctctccaaaggcacctgcactgcctgtctcttcacctcccaaggattcttagcatctctgttacagcttggaggccgatgaggaagctggagcagaacccattcaccatcactaaggtgatctcacaaactggcccggtctttggagcacctgtcagaacttgatacaaataagccacatttaatattattgcaaaactgttgttattggcacattaatagaacaatcaaattctggaaaatattttaaagaggtttattgtgagctaatatgagtgacatggaatgggaaacagtctcaagaggtcctgaggaagtgtgtgcaaggcagttgggttacagtttggttttacacat

SEQ ID NO: 888464 - DNA, 634 bp, Homo sapiens
aggataagccaggctaacagatctttctggattttactttgcatctcattcattcattcatttattcatttaactgatacttattgattactgaggatgtgccaggactgtactgggtgctgcaatagtagtggatgaaacagtaaggtccctattctcatggagtttgactaktgggaggatgaggggagagcgacaagtgtcagtatacagtaaatcagtgaacgagtatttggattatataactttaaacagtgaatggggctgtaggaaaaattgaatgggtaattgggtagagggactggaggataggtaggtaccgttttagatagaatgatcagggaaaatttctctaaggaggtaggattagagctgagaaagagacagatctaagggatgtattccaaaaacagggatagaaaatactactaccctcagataagaataagttaattctgtccaatggcagtgagggggccagtgtgtaaggtacagagaattgaaggacaggggaacttggtgaggtttgggggtttggtggggtctatgtgccacagaaagctgattttgtttttgtcacaatgggaagccattagaggctttgaagcacatgaatcaacatattcttatttat

SEQ ID NO: 888465 - DNA, 508 bp, Homo sapiens
gtgcaactttttttgtcattgtaataaagcgacaaggattaaggtatgcaacactgcacagtatgaattcagcaatggagatgagtatttgttcagctttttattcacaatctgttattcgtgtgctaatggattttcctcttattartagctatatggagatttttctgtgaaagggtctaggaaacactttataatcaaaggtttcaagacataaattatatgcagagatcttaattatattttacctcaattttcatttaattttactattcttacatccaactacttaagtaattaaaataaaaaagcatgcactgaaaagtcagccactcatttctgtgcaaaacagcacattttctcaacatcggcaactctcccatcataacacacccaagagaacactgtgtcttaggatttctgttttcttccagatttctttaaaggtatatgtagtaaaatacaagcatatattctcagttgtcctcctttcctcaataaaatacac

SEQ ID NO: 888466 - DNA, 566 bp, Homo sapiens
gatttagtttctgttgttgttaggaatttggccttagttttctagaggccagaggggagaagaagtttagtgaaaaaattagctcaagagctctagtgaagaacagatttaggtaattattaacttacatggcattaattttcttcacattacaaaattatttatgaagcctgtgttgaattatagaaataaaattttaattatgtttacattaacatggctttgtagcttctagaatatagacttacatataaagaagataattaatcatatgaagaaatctaatataaaatagaattataaggtgaatcattatcacctactccttaattaactgcttttatgttcattttgacagagaattccttttcatttctattttaccataaaaatacttagagaaaatcatgatctmtatagtctacagtatttgtagatggatattcataacatttaagagactatgcaattattcatatgataagacttccaggaaactcgctttgatattctaacttttaaatggatatgtaagacaagtaaaccctatttatgtaagataagta

SEQ ID NO: 888467 - DNA, 646 bp, Homo sapiens
tggcaagtgagttgatgtacttcatttgtatagctgtatctgatggcaggctttaagtccgaatctgacacttattttagtccacatgtggcctacccattattttatttactacttccattcttgactctttcctacactgcacacttgtctcagtcacagttttgattaagcccagaagctaatcctagccaaaatgagtaaaaaacaatttcactggagagcttttatgaaaagggggaaagacccagtgatgagaaagcagaatactctaagactgaaaacaaaaagaaagcttcctttaaaagaaaataccaagaatcatacttaaattatgagttcattgtaacaagtgattcacattctccaagtctgctttgtataacatgtggccaccggttatctaacraagtaatgaaaccttcaaaattgcttcactacgtggagacaaagcaccccacattaaaagacaagcctttgaagttttttcaaaagaaaaaaaaaacgtgaacatgaaaagaaccaattattgaaggctaccacttcatcgaatgtgtctgcattgagaacattattgtaagtggctaaccacattgctaaagctaagaagctcttttgtaagatgaagaattgaccctgcctgatg

SEQ ID NO: 888468 - DNA, 696 bp, Homo sapiens
aagaaatatttttctttgttctcattatttaatttaatttgcaaacaattattccactgcattatatttatctatgaatataattactaccttattactttgagtgttttgtttttattttagttatagcagttaataataattttaaatctgaaacatgtattataaatgaaaaccatgtttcttgtcttacacatctgtcctctgtcttagatctgacaggctgaatggccatgcttagaaaatggtttgatattcttttgtcttactcacttcttgtctctctctgcctgcatcctgcaagcatgaagacctacttgcaccctgtagcacctttttaacttcctctactccaaacccattatgacagtgaataaaacagttctaccaattwaatgattctcaaatatttctattacttattctctactttcacccagaaacaacctcttgaggtccactcttgcagattcaagtcaacttccaacttcatattttgccactgcagtatctttcatatgctattttactattctaaaagataactttaacactggtcttcagcctattagtacaagtatgcttacagagcatgagctagtgccttggccctatttcaaaattatcatcatttctactgccgtctaagttgatgaacaaatattgttctgttggtaataatctttgacatattca

SEQ ID NO: 888469 - DNA, 670 bp, Homo sapiens
ctatgctatgaaggggtccaatttcaattttctgcatatgactaaccagttgtcccaacatcatttattaaatagggaatccattccccatagcttgttttggccaggtctgtcaaagatcagatggttttaggtgtgcagccttatttctgaattctctatagtgttccattggtttatatgtctgtttttgtaccagtatcatgctgttttggttactgcagccttgtagtactgtttgaagttgggcagcatgatgcctctagctttgttctttttgcttaggattttctttgctatgtgggctcttttttgattccacatgaattttaaaatactctttctaattctgtgaagaatgtcaatggcracttaatgagaatagcattgaatctataaattgctttggactgtatggccatgttcacaatatttattcttcctatccatgagcatgtaatgtttctcatttgtttctattttctctgatttctttaagcagtggtttgtagatctcattgaagaggtccttcacttttgttgttagctgtatttgtaggtatttattctttttgcaacaattgtgaatgggagttcattcatgatttgttttttgcacattgattttctaacctgagactttgctaaagctgcttatcagttgaagaag

SEQ ID NO: 888470 - DNA, 654 bp, Homo sapiens
aaagaagactatccattttatattacgtgaagttccatattgataattcaggtaacgtttcctttttaacaagcaagacaaatatatacaataaaaaagagataaactgtttctcttacacactcaataatattcaggatttttcttaggagagaggaagtactctgctgtaygcaaatggttctcaaactgtggttcattgaccaacagcattattattacctgggaacttgttatgaacacacattctcagatctttcttagacctaatgtacaagaaattctggggcagagcctaataatctgtgatttactaattttgtggatgattctgtcgcacaccaatgatttagaaatactactccatgttgtcacttagtaagagaagcagatggatactttgcctatctcaacacgtaatgctcaaagtcattatggtcatctccaaccagttagtggaaaggcaaccagtctggagaagcaggagaggaaagtttactagaccccacttggaatcagtacatataaattccatccatttttcattggctaaagttcagtcatgtggccatacatgattgtaaggtaagacaggaaattgctgtgtgtgaaacatgacagaatgtgtgtgaagaagaatgacatattttggtt

SEQ ID NO: 888471 - DNA, 625 bp, Homo sapiens
ggaatgatgaatacatgtacgtgtaaagatggcatttattttctgagactgccaaaaaatagagaaataaaaaacagactgtacatgacaaaaaatgtataatatacatagaatctggataaaacaatgtaaatttgttgtgtaaatacattttaaaagactgaataatttccagcgtcatgtaggataaataaattaacatcgtgtgtgtatgtacatgtgtgtgcacgtgtgggtgtatgtgcgtgtgagtctacattaaaataaaatcagctaatgctttatttggcatttatatctattcagtaagwcattcatacgttaagcagacctggaacatcttaattatatttgatatgatacatataaaagtaaattatattaatatgaaaattggttgttaatgccaaattagctttatcttgttcctgctaccgatgtttttttactttatcactttatttataatagattttcaagtcaaaataggagattacatgacaaaattatgaagtcactttggaacaccacaaaattatgtttctttacaaacctaagaggagcagtgatcttcagctgttccctggacctcatgcatatgatttgaagataatattttgcatgc

SEQ ID NO: 888472 - DNA, 625 bp, Homo sapiens
aggcccacagaaaatatcagcatataggttaacctccctacctctcttgtggaaatctccatattttatttcttatcatttctctcagggagaatttatgaactgaccatttaagtttacagtacagagtcaggaagcccagcaacccgggggcacaggaatggggttgcagattcaaggacagtccacaaatccagcttgcatctttcatccagtggaaacaaacaaaacaaacaaactcaaactctaggaaaaaaaatagcaaatacaatggaagacaattatataaatgtttgaaaaaaaggtttaaagaattatctatttttcctttagtttaattttaaaaaaatcttaggctttctgagaaaaacaacaagataattctacagatacaaaaatagaggtggatgtgattaggacagattgtaaggaactcagaaagacaacataattaagatttaccacattcacatttgtagraaaaatgaaatgtgtggtgcagaaaataaacttgaaattgttctcagtttatggagggaaaaaaatggaggaatatagttgatcataaaaaaaaaaaagatgagagaagaggaagaatagagacctaaattggaactgctcacaa

SEQ ID NO: 888473 - DNA, 625 bp, Homo sapiens
tgctgatttaagagcccgttggcactgaataatcaatagtgatagtcaggcagtgtgcaccacaggcccttgggtgagactcaatgctgtgctggtttcaggtgttatgcagtgcattttaagctgtggtggctacaaggagagactccttctgcaatcagaaaggaaaaagaagagtaaagaggattttgtatggcagcttgggtaccagcttgaccacagtgtggtacagcaccaagcygactcctagggttccccattctaagccttgactcctggatgacatttctggatcttctctgggccacagagaagcccactccctcaaagagacagactcaggaatagcagcaactactacaagctgactcaagagttttggagccttaagggaacattgtcagtatccaggcactactcactgcaggcccggggcagtggtcaccacagggtgaggctcctctgcttaaagaaagatgagggaagagtgcaaaggactttttcttgtgtcttgaggaccagctcacctacagtagaatagagcaccaggtttcctaaggttcctgacttgaagccttgactcccagttggcatatacaggcccatctttaaccaggggggaatt

SEQ ID NO: 888474 - DNA, 625 bp, Homo sapiens
tgctgatttaagagcccgttggcactgaataatcaatagtgatagtcaggcagtgtgcaccacaggcccttgggtgagactcaatgctgtgctggtttcaggtgttatgcagtgcattttaagctgtggtggctacaaggagagactccttctgcaatcagaaaggaaaaagaagagtaaagaggattttgtatggcagcttgggtaccagcttgaccacagtgtggtacagcaccaagctgactcctagggtyccccattctaagccttgactcctggatgacatttctggatcttctctgggccacagagaagcccactccctcaaagagacagactcaggaatagcagcaactactacaagctgactcaagagttttggagccttaagggaacattgtcagtatccaggcactactcactgcaggcccggggcagtggtcaccacagggtgaggctcctctgcttaaagaaagatgagggaagagtgcaaaggactttttcttgtgtcttgaggaccagctcacctacagtagaatagagcaccaggtttcctaaggttcctgacttgaagccttgactcccagttggcatatacaggcccatctttaaccaggggggaatt

SEQ ID NO: 888475 - DNA, 651 bp, Homo sapiens
caaaaaatttaagaggacggaattctccttaacccattctatgaggccagcattacatttccaaaaggtaaacacacacaaaagaaaactacaggcaaatagcactgataaacattgatgcaaaaattctcaacataattttagcaaaccaaattccatagcacatcaaaaagataatacaccatgatcaagtggaatttatcccagggatgtaaggatgattcagtgtatgaaaatcaatgaacgttctatgtcacatcaatgaaatgaaggagaaaaatcatataatcttctcaatagacacagaaaaaaacattgataaaattcaacatcccttcatgataaaaactctcaacaaacggagcacagaaggaatgtacctcttacataataaatgccatatatracaaatttacagctaacgtcatactgaatagggaaaaagctgaaaatctttcctgtatgatctggaacaagacaaagatgcccattttcaccacttctagtcaacataatactggaagtcctagccagagcaatcagtaaagacaaagaaataaaaggcattcaaattggaaaaaagaaaatcacattgttccactttgcagacaatatgatcttatacctaaaaaacatctaaagacttcacca

SEQ ID NO: 888476 - DNA, 661 bp, Homo sapiens
gtcaatggtagcttgatggggagagcattgaatctataaattactttggcagtatggccattttcatgatattgattcttcctatccatgagcatggaatgtttttccatttgtttgtgtcctctcttttttccttgagcagtggtttgtagttcttcttgaagaggtccttcacgtcccttgtaagttgtattcccaggtattttattctctttgtagcaattgtgaatggaagttcgcttatgatttggttctctgtttgtctgttatgggtgtataggaatgcttgtgatttttgcacattgattttgtatcctgagactttgctgaagttgcttatcagcttaaggagattttgggctgagatgatggggttttctaaatatacaatcatgtcatgtgcaaacagagacaatctgacttcttctcttcctatttgaataccctttatttctttctcttgcctgattgccctggccagaacttccaatactaygtcaaataggagtggtgagagagggcatccttgtcttgtgcctgttttcaaagggaatgcttccagcttttgcccattcagtatgatattggctgtgggactgtcataaatagctcttattgagatacgttccatcaatacctagtttattgagagtttttagca

SEQ ID NO: 888477 - DNA, 581 bp, Homo sapiens
actaatgacaccaccacagtagcggcaactcacactcacaaacactgcccttgtgtcagactgtcctaaccacgccatccgcatgatctcatttagccctgagaggcctccatgagctgcctgagggaatgggggccccaagagatcaagggacttgtctctgaggggcacttccaggtgctctaccctgggtgggggtgaaagctctggcagggccctggcccagaactgaytcttccagctgctgctaggccgccctgcagcagccaggcagaggggttcatcccagggcacccctatctcctgtgcgacccaagctaagtatgtcaaactccagccccatccttcagagcaggaccctgagcagccccctcctgtctctggctgcactgcaaggacagcagagttggctgccagggctcgggccgcccccagggtgtgctgctgctcctctggactgccaaggctgcctgcctgctcacccttcacctctgggccagctgggcccgccagggagaggtgctgtaagcagggacaagcccaacttccctctcaggctgagaatgtgtctcctgcctgca

SEQ ID NO: 888478 - DNA, 611 bp, Homo sapiens
gtactcagatacggtatatgctacgtggagctttgtgtaaaatgttgcttttgctccaatttccatataatcacgagaaagctactctgcaggaaaaacacagatggttactttccttattagaataatcagtattgaaaatagctattttattcctattaaatatattaaatgcaggcaggtagatattctgagtatgtgactttggatgtgacacattcacatatggaattctgacattcactatcagaatgctgcaatttcatcaggcyttcattggttgctgaggtcaagaaatatagtttgacatcattttcagattttattagactgtctgttgaatttaaagaaggaattaattctacttataactatattattctctcaaccaaaatcgtaacaacacacatgtctggatctttaaagaattctatgacctcagaccttcagtcaatgcagttttaggtttaattttgccttttcagatctggcatacggccaaaaagcaaacaagtttataactatggaatttttctttattattgatggaatctgatgtatttagttcaagggcaagaaaagtatttcccattgactggttctgcattttg

SEQ ID NO: 888479 - DNA, 566 bp, Homo sapiens
aattaaaaaatagaaaaatgacttttggctttgcttacagaactcagctttcaaaccatatgactcacaataattaagaataaaataattgtataaggccaattttttcctgattattgtacaaagaagttgcgagagctgcttctctctctcgcaactatatatgtgtatatacatatataatatacacatatatatgtgtatattatatatgtatatatrtgtgtatatattatatacatatatgtgtgtatatatattatatacacatatatagttgcgagagagagatatatatatatataattgcaagagagagaagcagggagcacacagattcataaagcaaatattactagatctaaagagaaagataaactacaatacaataatagaccccattctcagcataagacagattagctagacagaaattcaactaagaaacactgggtttaaactggacttcagaccaaatggatgttatagaggtttacagaacattttatctaactgtctgcatacattcttttcactagcacatgaaacattcatcagggtagaca

SEQ ID NO: 888480 - DNA, 647 bp, Homo sapiens
atcaaaggttggtttctggagacataactaaaccaatttatctacataagttcctttacattcccttgttatctaccctttgctctcagcttccagataacagaatcagctgccttcagcttctctcccaaagcttttgcaaaatctcctggccttccaagaaggtttrtgtctttccttataatttttcccaccaccctgaccgatcttctacagatatctattaggtcggctttgtccagagctgagttcaaatcctgaatatccttgttaattttctgtcttgttcatctaatattgacagtggggtgttaaagtctcccattattattgtgtgggagtctaagtctctttgtgggtttctaagaacttgctttatgaatctgggtgctcctgtgttgggtgcatatatatttaggatagttagctcttcttgttgcattgatccctttaccattatgtaatggccttctttgtcttttttgatctttgttgctttgaagtttgttttattggagactaggattgcaattcctgctctttttttttgtttctttgctttccatttgcttggtaaatattcctacctccctttattttgagcctatgtgtgtctttgcacgtgagatgggtcccctgaatacagg

SEQ ID NO: 888481 - DNA, 713 bp, Homo sapiens
cagagtaaaaaatgctaaaggggatatcatcactgatcccacagaaatacagactaccatcagagcatactataaacacctctacgcaagtaaagtagaaaatctagacaaaatggataaattcctggacacatacaccctcccaagactaaaccaggaagaagttgaatccttgaatagaccaataacaagttctgaaattgaggcagtaattaataacctaccaacaagaaaagcccaggactggatggattcacaaccaaattctaccagaggtacaaagaggaactggtaccattccttctgaaactattccaaacaatagaaaaagagggcatcctccctaattcattttatgaggctagcatcatcctgatatcaaaacctggcagagacacaacaaaaaaaaatttcaggccaatatccctgatgaacattgatgcaaaaatcctcaataaaatcyggacaaactgaatccagcagcacatcaaaaagctcatccaccacgatcaagtcagctccatccctgggatgcaaggctggttcaacatacgcaaatcaataaacgtatcccatcacataaacagaaccaatgacaaaagctacatgattatcccaatagatgcagaaaatgccttcaataaaattcaacagcccttcatgctaaaaactttcaataaattaggtgttaatggaacctatctcaaaataat

SEQ ID NO: 888482 - DNA, 654 bp, Homo sapiens
aaaccaaacacttataagtgggagctgaacaatgagatcacttggacacagggaggggaacaacacacactggggcctgctgggggtggtctggggggagggagagtattaggaaaaatagtcaatgcatgctgggcttaatacctakgtgatgtgttggtaagtgcagcaaaccactatggcacacgtctacctatgtaacaaaccaacacatcctgcaaatgtaccgcagaactaaaaataaacattaaaatgaacaaacaacaaaaaaattctgagtataaggatataattgaaaattataaaataagtggtgcagtataaaacaagccatcatgagtgagtgacaataaaaacaacaaagagcacaattcaacctggaaatattccaaataaacttaagttctgcttaaaaacataaaagtaagataaaaataaaagatgggggttttatgctcaatagtggtacagtagttatgatcagataaattctcccccatataataactgtaaactggagatatgtcttaaatataaagacacagaaagttgagaataaaaggatgaaaaaagacatatcatgcaaataataagcatgagaaggctaaggaatcaaaataatgtagacactacagagtttaccagagacaaaga

SEQ ID NO: 888483 - DNA, 623 bp, Homo sapiens
tttaggtcttagtttaagtctctaatccatcttgagttgatttttgtattaggtgtaaggaaggggtccagtttcagctttctgcatatggctagatagttttcccaacaccgtttattaaatagggaatcctttccccattacttgtttttgtcaggtttatcaaagatcagattgttgtagatgtgtggtgttatttctgaggtttcaattctgttccattggtctgtatatctgctttggcaccagtaccatgatgttttggttactctagccttgtatagtttgaagtcaggtaatgtgatgccaccagctttgttctttttgcttargattatcttggctatacgggctcttttttgctcccatatgaaatttaaagtagtttttcctgattctgtgaagaaagtcaatggtagcttgattggggatagcactgaatctataaattactttgggcaggatggccattttcacaatattaattcttcctacccatgagcatgggatgttttcccattgattgtgtcctctcttacttccttgagcaatggtttgtacctctctttgaagaggtccttcacatcccttataagttggattcctaggtattttattctctt

SEQ ID NO: 888484 - DNA, 570 bp, Homo sapiens
gggtgagtggctcttctgagacaaagttcattgttaataaatacagttactcttttgttgtgaaattttatgaggaatataaacaatgcttttgctaaattggcagaattgctatcattaaaatatccctgatgtaattttcyttaactcaaaacttctacagtctgtgttttcattgcaaaaatgaatatctggactccttgcttggcgtttactaaaatatcagcttctggactctccctaaccaaactggggtgagaaggagattgttagtagacctgcctttctcagcacttcaagacagttataccacttgggaaatgagataacagtggttttgagatccattattgacaatagaagactgtcctttctttcatataatgtgttaggaaatccacatgcccctgatcagcagggccattgtcctgtgcaacaagtggcattaattcacaaaggttcagcactgccacttcattggatgtcccctctccacaccccttttccatccacctctacacaacatatattggctgtagcaccttgccaagctaccaactgtcttttgag

SEQ ID NO: 888485 - DNA, 612 bp, Homo sapiens
atctactatataatctggtcattccattacttgatatttgtccaagagaaataaaaacatatgtccacaaaaatgtttgtacatgaatgtttagagcagctctactcataatgcttaaaactggaaacaactcaaatacccatcaataagtgaatagataaacaatgttagtacttacttatcagtaaaaataatgaattattggaatatgcaaaaacatgcataaatttcaaaataattaggctgattgaaagaagccagacacaaaagaatatgtactgcatgattccattaatataaaactctagaagatgcaaactaatctataatgacagaaagcagatctggcacctakggccagtggcagaaggaggagcgcaatgcaaaatggcatgaggaagctttcggggtgttagaaatgtttcctatcttgattgtcatggtggctttacagatgtaaacatatgtgaatccaccaaattgcacattttaaataaattaattttattgtacataaatcatctcaataatgttgatacaaacaaaacttggaagcagcatgtattctattttcttttttttttttttttgagatggagtctcactctgtcg

SEQ ID NO: 888486 - DNA, 615 bp, Homo sapiens
aaaccatgctcttatagaaattatctacactagttgacttgatggcccaaaaatgttcagctcatgtacaaaagagttttacaatttgcttctagttgaacttcacacacataaaaacaaaaccaaaatgaggaagattgaaatctgtaccttaaatgttttacttattttaatgtatgaatttttaaaaaggtaacattcagcaacaatatagttgaatttcagtaaagcaagaatatgaaagtagatgcattctctatgtacaaccatcttttttgcattttttgcatttttaaatttgaatgtcccaaaaggcatggctaactaataatactatcaatctcattttacccatttcatttgacactatatatagcagacattgtccatttatctcctttgtgggcctctttctctttctaaattcattccatactcaaggacaatgatatacagctgttttcctcccacatawaattaccacgccccatgaggctacactgacagagccaagaaaagcagagggctgtgtactcattgagttaaatgaatgacatcacactatcagtcaagacaattcaggcaagggcgaagtgttgggattttccaaaacca

SEQ ID NO: 888487 - DNA, 612 bp, Homo sapiens
gtgataaagagccggaaatgccatttgacccagcaaccccattactgagtatatacccaaaggaatacaaatcattctgttataaagatacatacacgtgtatgttcattgcagcactattcacgatagcaaagacatggaatcaacccaaatgcccatcaatgatagactggaaaaagaaaatgtgttatatatacactgtggaatactgtgcggccataaaaaggaatgaggtcatgtaatttgcagggacatggatgaagctgaaagccattattctcagcaaactaacgcaggaacagaaaatcaaacactgcatgtcctcacttataagggagagctgaacattgagaacacatggaaacagggaggggaacaacacttgggcytgcagggggaaggtggatggggagagcactagggaaaagagctaatgcatgctgggcttaatacctacgtaatgggttgataggtgcagcaaacaaccatggcacacgtttacccatgtaacaaacctgcacatccggcacatgtaccccggatttttttttttttttaaagaattacaaaaaaatgttgttccacatttgtttgttaagcaaatatgtcttt

SEQ ID NO: 888488 - DNA, 649 bp, Homo sapiens
cctcaatttcctcatttgttaatgaagacaactttaatatctgcatcactgtgagtgtgtgtgtgcctgtgtgtgtgtatttgtgcataaaatgtgttagcatacataaactacttagaaatatgtctggagcttagtaagtgctatattagtacagttattaatattattgttatgtcagtattatcactattattatttttaaaaatctcccttgatctcacattctctttcattagctgcctyttttgtctgctccttttcacagtaaacttctcaaatgattttccttcacttgttatctttacttcctctcctcccattttatcttttcatgttaatataatgtgagacctactaaaaatacaagaataatacaaagaagtaccttgtcttttctatcctttacccagattcaccaattattaacataacattgttgccagatttgttttatcattcttcatatagtgtacacacaaacacacacattttttttcaaaccaccattgttcattaagttgccaacattctgtccttttatcccaaactacttcaatatgcatttcctaagaacagagacattctcatatatgaccacaatacaattatcagaacaagaacatttaacattataaaataccatttt

SEQ ID NO: 888489 - DNA, 592 bp, Homo sapiens
ctccccaacacacactacccgtgctggccaggttttaaaacaccttgtattagtcaatttgtgcctatttgactgtgaaccatattcacttagtagagtataatgtgaccttaaatggagggagcaactaattcttatctgggaatattttctgacaagtgagattgaatggtacgcatctatcactggtatcagataacaactttaacttatgtttcatttgaatatatattctgtgaatgaatgggtaagcaaacaaaccaaatctgggtctgaaagttgtttataaagaatctgcataaaagtaaagcataattattgggggataataaacattctaaaattttacartattaaattgacaaagattttatatattcaaagtacagagcacaataaattgatgtacataaacattgtgtaataattacaaaaatcaaatgaacacacccatcaccacctgcctgagtgagtttattgttgccttttaatagaatacctgaaatgaggcaattttttttttaatttatttgttactgttatggagactgagaagtccaaggttgaggggctgcatctggtgagaaacttc

SEQ ID NO: 888490 - DNA, 675 bp, Homo sapiens
acttttgatctttttacattaggcaaaactagccatatggtctcttctaacctcaaggaggtgtgaaagtgtaattcttcatgtacctggaagaaaaagagaactgaatatattggtgggtgctaatattggctcccacagttttcatcatgactaccacttctggctgtacattcttgggaaaattactaaacccttttgagtctcagattcctcattgtaaaatgggtataataattttatcttgtagtaatttataagtttgaaatgagataaatctttaaagaattggacagagagtcccacacatagtatttattcaattaacaatggtcattttagttcagagggaaaaagtcagctcttaccatctagtcttgaattacccaggtttattatctatatagacaagaatcaataccyttaagccaaatattcccatcactgtatatttggcctgaaaatattggtttttataatggtttctctctagaccttctagacctgagaaaagagaatttatgatcaatcaaaatactactactattggcataactattgttatatgttaaacatagcaaaaaacttgtagaacaactgttcagattagtaaaaaaaaaactttttaacatatggcatatttgtagttactatgtatatatgtttttgctgctt

SEQ ID NO: 888491 - DNA, 640 bp, Homo sapiens
attctcacatgtgcttattttgaaattaaaccaatgcaaaagtttttaccctgaggtgttgctaattcatgaacctattctcttgacagtttttccctccaatataacctatatcttattaaatgtcttttcttcttctagattgtttccaatagtagctcaattttagctttgttcargctccaaattagaaaaacgctgagattagccaaatatttgaacactgtaaggtattaatcagtttaatctgaaaaaaaaggtataagaacacttcctacagttccagaagagtgagctgtcctggctgagggttatttcataagcacctacatgtatggacactaatggtgagtcatcaccagaggaagatgaaaaatctggactctgtatttgtgttgatgccacatttcagggcaaaagttttgcatccagaccatgcactctagcatcctaagtccatggctgctgtggcagtggctcttttcacaccaaaaatggagggagaaaaccagctaactcctgggctctctgactgcagtcaggccaaggaccagggaacctgcatctgttcactagggtgaggatttaaagcatcttctgggttttcagatcctaccaagaaaagcttcagaggcagacc

SEQ ID NO: 888492 - DNA, 640 bp, Homo sapiens
attctcacatgtgcttattttgaaattaaaccaatgcaaaagtttttaccctgaggtgttgctaattcatgaacctattctcttgacagtttttccctccaatataacctatatcttattaaatgtcttttcttcttctagattgtttccaatagtagctcaattttagctttgttcaggctccaaattagaaaaacgctgagattagccaaatatttgaacactgtaaggtattaatcagtttaatctgaaaaaaaaggtataagaacacttcctacagttccagaagagtgagctgtcctggctgagggttatttcataagcacctacatgtatggacactaatggtgagtcatcaccagaggaagatgaaaaatctggactctgtatttgtgttgatgccacatttcarggcaaaagttttgcatccagaccatgcactctagcatcctaagtccatggctgctgtggcagtggctcttttcacaccaaaaatggagggagaaaaccagctaactcctgggctctctgactgcagtcaggccaaggaccagggaacctgcatctgttcactagggtgaggatttaaagcatcttctgggttttcagatcctaccaagaaaagcttcagaggcagacc

SEQ ID NO: 888493 - DNA, 563 bp, Homo sapiens
cagctcactgcaacctccacctcccaggttcaaccaattctcctgcttcagccttctaagtagctgggatgacagatgccccccaccactccgggctacttttttgtatttttagtagagacagggtttcatcaggctggtctctaactcccggcctcaggtgatccacctgcctcggcctcccaaagtgctcggattacaggcatgagccaccgcacctggccctgtctatacatttttaaatctacatggagtaatcagactttaaaagtgaaaacgggaactgttcatctccacattcatggagttagggggagttatatggtcatgctcttagtgaagtatattttataggataggcagattattttgcaaatgaaatctaagaatgtgtgtttgcatrtgtgtgtgtgtgtgtgtgtgtgtgtgcgcatgcatgtgagacaagttgacaggaaggtgggctgggatttggggcattttacatggacatcagaacaaaatgtatgttctcaagcctaacatatctaatttggaagaaacctgggggtaatcaggactta

SEQ ID NO: 888494 - DNA, 588 bp, Homo sapiens
ttctgtttgggcttttgcagtttcatactgaattttattgtgagcctaaatttacctataatttatttctaatctggtttaagaatagggaagccattcacattttccttgtttaatttgtgtctttctagaacaaatagcttaaatgtactgtcaataatatatttgctgtcccttatatgagataaccacattgtatttttataggcctaccaggcttctggtgactcagagatatttaggaattcaggaactctaggttggattttgtgttctttctttcctttttttacttatattttttattttttagagacagagtctcagggtctcactgtgtgtcacccacgctggagtgcagtagcacgaccagwgctcactgcatccctgaattcctgggctcaagtcatcctcttacctcggcctcccaagtagctgcaactacaggtgcatgccaccatgcccagctaattaaaaaaatgtttttttgtagaggtggggtctccttatgttgcccaggctggtctcgaaatcctagcctcaagagatcctcccacctcagactcctgaatcactaggatttcaggc

SEQ ID NO: 888495 - DNA, 597 bp, Homo sapiens
gctggtgttctggggaaaacagtttgggcatctctaaaggttatttttattttaccagcatattcctgagagtcctcaggccttcaagggcaaagaaataaaattttaataatagaatttcaggcactccaacagatgttggagatattttggacaaccatccttattcaaaccataccatataagttaaagcttctactcaaaagatatcctggtttctgaacattctgaataacacttaaacaagaatcttgactatgtaaaaaaacaggaagagttaagataaaaaacaaaamaaaaaaaaaaaaaaacttctacatctttttaccactaagacttttgttcttttcccctttggtcctaatgtttaaaaaatgttgtcaaccaaattgtttttactaaattgcaataagttgattttaataactcccagctatagtgtatatccatgactgtttatcctgcctttctccttcttcttccttctggtaatagtacttccaagttgtctttagaaaaactgtccctctcccctcttcttaactatttgatgtgagtggttcttttagtcagggttctctagagaaatagaaccaa

SEQ ID NO: 888496 - DNA, 584 bp, Homo sapiens
cttcaaggatgtatacactgcttttacgtcttaggaaataacacctaggaatttccttacaagtgcaactttacagaaatttttaaaaatatgcatactcacttttagaacattactacttctcataatcctatgtatatacatgatatgtatatgtatacgtgtttatatatgcaaattttaaatttcattccttgtttcaaatggattttctcgaagattttttttttttgacactgtctctgtcagccagactggagtgcagtggcgcgatattggcttactgcaaccttcgcctcccaggcttagcgatcctcccacctcagcctcctgagtagctgggactacaggcatacgccaccacacctggttaatttatttttttgtaragatggggtttttgccatgttgcccaagctggtcttgaactcctgggctcaagtgatccactcaccctggcctcccatactgctggtactacaggcatgaaccaccgtgcctggccaatatttttttttaaagaaataaaaaaccaccaacttctacctcaaaccactcttcctaattgagtgtgaattttctaa

SEQ ID NO: 888497 - DNA, 638 bp, Homo sapiens
ggatacatgatattcacaatgtcttttaactaagcaaaaaatgaaaacaatcaattcacacacagacataaatgcgaataagtgataggcattttttactaaaatcaaaatattactcaaaatatcaacttcttagttttaaagttcttacatatatataacaaaaagtaagaatattgaggaaaatactgaaaacaaacagtagtgtgtacattgcaccaccaattataaaaacwtaaacatatgattgaaatattttggtactgatacacaaatagccagataatccagggtaacagaataaaaaatacagcgataaacccaagtgcatatggaaatttagtgtataactatggtggcatgtgaaattagtgggaaaaacatgaactgtttaataaatgatgtctttatagctatttaaaaaaagatgaaattagaatgatattttattgtatactctaatatagattccacaatgtaagcttaagtatagaaaataatactatagaagttctggaattaaacatggatgatttcttttataacatgagagtggggaaaactttcctaactgtgatggaaaattccccagttaagtataatgttaactgtagatttttttgtagatgtgcactctc

SEQ ID NO: 888498 - DNA, 450 bp, Homo sapiens
tgctataaccatattttcaaaagagctggctatggagtgacaagttacacttgccagataccaggaagtcacacttctgttaagtagtagcatacaggtagcatagtttttatagtatgatttcaccaaatgttaggacttaaagtatctaaagaaatggattatcctacaaattgtcttccatgaacattattgagaaatactgtgcagctttttgtgtttttttgtttgtttgtttkgtgttgttttgtttttttggttttttttttttttttttttttttgagaaggagtctcgctctgccgcccaggctggagtgcggtagcacaatctctgctcactgcaacttctgcctcctgagttcaagtgattctcctcttgtagttttcattacagctgaagtacagtagtccacgctgtcaattaacagaatatatgcctgactttacc

SEQ ID NO: 888499 - DNA, 541 bp, Homo sapiens
acaatgtatcaaatagtaggtattcggtaaatgttccttctttactaaagatagagaaaccattttctgatgtacaaagggatgaagagctggcccaatatgaattttcccaaagaagttaaatgaaaaggatctcatgatccttttcaggatttattatttacgaatgttaatatattattttaatattttctatcttatgaaataattatttggtcaaaacataagacaattgataggaatatacagcatggaaaatggttaccaactagagctgcagggtatcagggaatgtgacaaggcagcaaaatgtttctacacatgtctgttttttcargcattatctttcttgagactatcaagtgtgtatttaaggagccattcaacttacttcagtgcatttgcttgcaaagggtgcaatgtgatgtttcctactggtagggtcgtatttcatatgtggtgatagtgttgctgaacaaataggaaatatccttgcctagactatattttatcatttcattatctagtggtaaaggaatgt

SEQ ID NO: 888500 - DNA, 681 bp, Homo sapiens
cttctgagtatctaataatatccaggacagatccctacaacaaagaattatctgatcaaaatgtcagtagtggcagggactaagaaatcctggcataatataatgtcaggagtaccatatgtcataatcaatgcttatcatttattgaactattactatgtcaagtaaacattctatctacttaaggaaactcaataatcctgagagtcaaaagattatgcctcaaactttctgggccttttgaagataattattttatagattttgaatatgaaattagttgagaacaatttccaacatasttgtactcagacataacctgttaagaatacttcgtccaaaacagaaaatttgtttaattataataaggttatgaataatacataaagccctacaatatcaaccacaatatacaaacaaagtaatcacagtagatcatgaatgaatgagttattctatgtaaaccagatctggcagttttaattataatgtcagcagtcacatttaaacctgtttatatcattattaacattgttaaacttaaaagtctcaaagcttcaaagacacctagactattacaatttcaggagcttaattcaaacccaagaaaataaatactaccttaaaaatataagtgaatattatattagtttatttttgttattttctattttcttttta

SEQ ID NO: 888501 - DNA, 579 bp, Homo sapiens
agtggatgagaacccattagcattttggaaagaattttggaggcttatcagaaatatacagatgtaggccgggcacagaggctcacacctgtaatcccagcacttagggaggtcaaggcaggtggattgcttgaggtcaggagttcgagacaaacctggccagcatggtgaaaccccgtctctactaaaaatacaaaaaattagctgggcatggtggtgcacgcctgcagtcctagctactcaggaggctgtggcaggagaatctcttgaacccagaaggcagaggttgcagtgagccgagatcgcaccactgcactccagcytgggtgacagaacgagactctgtctcaaaaaaaaaaaaaaagaaaaagaaaaagaaaagaaagaaagaaaagaaaacaaatatacagatgtagatccgacagtcctaagaattccatgttaattaatgtgaactattttgtaatacgcagatgatatcttgatagccagtgaaatggagggtaactccatcctccatgccatcaaagtcttaaatttcctggcagataaagggtacaaggtttctaagaaagaggc

SEQ ID NO: 888502 - DNA, 579 bp, Homo sapiens
agtggatgagaacccattagcattttggaaagaattttggaggcttatcagaaatatacagatgtaggccgggcacagaggctcacacctgtaatcccagcacttagggaggtcaaggcaggtggattgcttgaggtcaggagttcgagacaaacctggccagcatggtgaaaccccgtctctactaaaaatacaaaaaattagctgggcatggtggtgcacgcctgcagtcctagctactcaggaggctgtggcaggagaatctcttgaacccagaaggcagaggttgcagtgagccgagatcgcaccactgcactccagcctgggtgacagaacgagactctgtctcaaaaaaaaaaaaaaagaaaaagaaaaagaaaagaaagaaagaaaagaaaasaaatatacagatgtagatccgacagtcctaagaattccatgttaattaatgtgaactattttgtaatacgcagatgatatcttgatagccagtgaaatggagggtaactccatcctccatgccatcaaagtcttaaatttcctggcagataaagggtacaaggtttctaagaaagaggc

SEQ ID NO: 888503 - DNA, 656 bp, Homo sapiens
attttcctttgaatctgaccctttcttaccaactctgctgccaccatactggcctaaacactgtcatctcccatcagtactattgcaagagctacttccttagtctttgctcctcagtgtcttctctacatagtagccagagtgatccttttaaactgtaagatcatttgggaggccaaggtgggaggattgtttgaggccaggagtttgagaccagcctaggtaacatagaaagacttcgtctcaagtttaaaaatcagctgagcacagtggcacacactggtagtcctagctactcgagagacagaggcaggaggattgtttgaggccaggagtttgagaccagcctaggtaacatagraagacttcgtctcaagtttaaaaatcagctgagcacagtagcacacactggtagtcctagctactcgagagacagaggcaggaggattgcttgagcccagagtttgaggttgcagtgagctatgatcatactactgcactctagcctgggcaacagagcaagatcctgtctcaaaaataaataagtaaatgaaatgaaatgtaagatcatgtccttcttcaattcaacactttccagtagcttcttatttcatccagaataaaatccaaagtccttgccgtggcttacaagacta

SEQ ID NO: 888504 - DNA, 633 bp, Homo sapiens
ttgagccaggttaattccaaagcctaggctttttccatgctgcttctagagccatcttgttaatttttaaattccacagtatttattgcagacctgctaaggagggcaccatcctaggcattggacatagagccatgaacaagttggatatgacccctcttcatggagctcacattctagggcaaaaggcatgcaataagcaagaaaacaaatgtatataaaatctacattgggagaagtactcagaagaaaataaagacagaaaaatgggatagagaatgactggggggtgagagaggtgccaaatttggtttgtgtggtgacagaaggcttctctaagaaggtgacatctgccctcaggcctcaatgatgataaagagccagscatatgaaaatgggcaggaaaataattccaggatgagggatagcaagtacaaagtctctaaggtgggaatgagtttggcatgaccatggtaacaaggaatggagaggggaatggtgataaagagttagggactgcagacttgcatcctggacctattgctaattttctgtattgcttagttaagtctaggtgatcactaaggctctgacatgttatggttctctaatttacggagcatattcaatgtg

SEQ ID NO: 888505 - DNA, 662 bp, Homo sapiens
aacgtatttattgagggaaaaaggtacagataagaaaatggcaactccaagaggttaatagatgatcggtagacggatgtaatgtaaaatgtgagacagagtattactcttactctatataccaaccctacactgtctgtgtaactgaacctacaattatatataaatacatttataaatatttactttcaaaatatttatggtaattcaaccctcctcttcaaactcagtgttatagtgctaattcaggcaattaatatctctttaatttgtctattacaagaacctccagctccttcttcctctacctagccaccagagggtgtatttatctaaagcaagcatkatcatattactaccttgcttaaaccattcaatggctctctgtgattctattttacctatttgactagcctatactccccagttattcaattaaacacaaatctaggtgttgctgtggaaggtattttatacatatgattaaagtccataatcagttgactttgaatcagggagattatcccagctcttctgagtgggcctgattcaatcagttgaaaggctgtaagaacagaactggggcttccctgatgaagaagaaactctttctatgtacagaagctttagcttattccctagatttccaggcttctcttctc

SEQ ID NO: 888506 - DNA, 547 bp, Homo sapiens
atgttcatatactatttcttaataattttctccccctttttttttccctcttctcttttgtgataggtctgtctggtagttgccggactttttagattgaacttcagtttccttaattttttttttttttttttttgagacggagtctcgctattttgcctaggccggactgcagtggcactatctcagctcactgcaagctccgcctcttgggttcacgccattctcctgcctcagcctaccgagtagctgggaccacagacgcccaccaccgtgcccggccaattttttgtrtttttagtagagacggggtttcaccatgttagccaggatggtctcaatctcctgacctcgtgatccgcccacctcggccccccaaagtgctgggattacaggcgtgagccaccgcgcccggccagttttcttaagtttttatctctcataactgagagaatttctcagtttaccttacaactgtcttactggattttttagtgtttaattttaactctcataagttccacctcttcttcagcgatctagttgt

SEQ ID NO: 888507 - DNA, 660 bp, Homo sapiens
attttcctttgaatctgaccctttcttaccaactctgctgccaccatactggcctaaacactgtcatctcccatcagtactattgcaagagctacttccttagtctttgctcctcagtgtcttctctacatagtagccagagtgatccttttaaactgtaagatcatttgggaggccaaggtgggaggattgtttgaggccaggagtttgagaccagcctaggtaacatagaaagacttcgtctcaagtttaaaaatcagctgagcacagtggcacacactggtagtcctagctactcgagagacagaggcaggaggattgtttgaggccaggagtttgagaccagcctaggtaacatagraagacttcgtctcaagtttaaaaatcagctgagcacagtagcacacactggtagtcctagctactcgagagacagaggcaggaggattgcttgagcccagagtttgaggttgcagtgagctatgatcatactactgcactctagcctgggcaacagagcaagatcctgtctcaaaaataaataagtaaatgaaatgaaatgtaagatcatgtccttcttcaattcaacactttccagtagcttcttatttcatccagaataaaatccaaagtccttgccgtggcttacaagactacctg

SEQ ID NO: 888508 - DNA, 629 bp, Homo sapiens
gccaggttaattccaaagcctaggctttttccatgctgcttctagagccatcttgttaatttttaaattccacagtatttattgcagacctgctaaggagggcaccatcctaggcattggacatagagccatgaacaagttggatatgacccctcttcatggagctcacattctagggcaaaaggcatgcaataagcaagaaaacaaatgtatataaaatctacattgggagaagtactcagaagaaaataaagacagaaaaatgggatagagaatgactggggggtgagagaggtgccaaatttggtttgtgtggtgacagaaggcttctctaagaaggtgacatctgccctcaggcctcaatgatgataaagagccagscatatgaaaatgggcaggaaaataattccaggatgagggatagcaagtacaaagtctctaaggtgggaatgagtttggcatgaccatggtaacaaggaatggagaggggaatggtgataaagagttagggactgcagacttgcatcctggacctattgctaattttctgtattgcttagttaagtctaggtgatcactaaggctctgacatgttatggttctctaatttacggagcatattcaatgtg

SEQ ID NO: 888509 - DNA, 579 bp, Homo sapiens
tgagtataataggaaatgagaagtatgtatggctattgttaaagtgaaatatctaatctgaaattagaatctttctgcctaaccaagtatccctaacttaattatgatgtgtgttattggctgatagtgtactcctccaatctaaccatcaattggaaaagtacccttctttcttctagaagatacttctccacaagtctacctgccacaatgctgctaatttgttgtctcagctttaaaaaatttgccctggtgaggcctaactctgctargcagctctaacaccctacatgtatctccatcacggaatttatgtcataatacatgcaatcctttgtttgcatgtcactgatcatctaaaggaatgcatcatccatatatctcctggtgttgagcacaatgcggatatatagcaagtccctaaaaaatgtgtagatttaatggtcaaaacaaattaatggtagtttacctactaaatgtctacatatcatcctttaagactcaaatgtttactccttaagaagtcttgtttgtgtcatttccgtatcatacttattgccattgctgtttttcatacca

SEQ ID NO: 888510 - DNA, 625 bp, Homo sapiens
tcccacaactccattaggcattgccctaattgcgactctttgcagtggccccactattatagcagccctttgcctgggttctgtgtccaaggctcaggagttccatccttcaaattccaggtgaaggtggccatagcccattgctcaggcacttttgtggtgatagcagagatggcaccttgaggtttacagtttgtgccctctggtgtcgtggtcaccccagcccaaactgcatctggtcccactggagtcacatctgaggtggccaatgagtactataccagaatttggagagtgcagctttgaagtctatgcatgctccaggatcttgtagtctggctcatgmtaagaggggcagccccagtgatctctgaaatttatttggaaatattcttccattgtcttggagaaaaagtcctggtttctgtttagatggcagatcaaactaatctctatcaaaaggtccctcagggacaaccttgttctctcccaaacaagctttctcttttctttcaatatagataactgaaaattttccctttttttaaggttctattcttttgattaaaaatcccaactttaaactgtctctcttttcacactttactataagtactcaagagaa

SEQ ID NO: 888511 - DNA, 585 bp, Homo sapiens
accaatacccttcaaaactgtccagggcatcacaatagaaagtctgagaaactgtcgtagccacaaggagcctaaagaggcttgataactaaatatactgttattctggatgggattctgtgagaaaaaaaggacagcaggcaaaactagagacatataagtaaaatataaactttagttaataatagtcaatatttgttcactaattatggcaaacgaaccatttttaggatgataataataaaagaaactattatgaatatgggtgtgtgggaactaccttcacaacttttctatagmactaaaactattctaaaatagaaaagtttataaaaatagaaaagatgaatattaaagatatggaatgactgagtgagacactatgtatgatagggttttgcacactacaaagtgcaagaaaaagacatttcctatgtgtgtttgtgactcatacaagtaggtgacaggtgatatttctggcagagaagacatcttctgtgattaagttagttcagtaaatttgtggggaaaggccatggaatgtaggcctaagaacagtggtcactgtggtgtctgcaagtcaag

SEQ ID NO: 888512 - DNA, 517 bp, Homo sapiens
aacctgggaggcagatgttgtggtgagctgagactgctccgttgcaccccagcctgggcaacaagagcgaaactccatctcaaaaaaaaaaaaaaaatccaaaatacatgtatctagagattatggagagtttctgattttcagattgagtaggctaaaaagtatagagtattagaaaattaacataaacaaggatgatttaatagagatcaatgtgaacacaaataattttctattctttaraaaatagacattctcaaatgtttctgcaccaaaatttgttgaggtattggattactgaaatccttataagacttatggttttgaaatttttgttatgttctgtttaaaatatgtaataaacctggaaaaagtaaaaataaacaaaaatatactaatcacttagaagttttacaataaaattcttgattcagaaaaacaaccctgcagttagagactattcagaagtaaacaatgaaaatattagtaagaataagcattcaattgttatcaatac

SEQ ID NO: 888513 - DNA, 631 bp, Homo sapiens
ctacctaccttagaggctattgtaaggattaaaaagaaagaaaggaagttgagaactttgtgagctttcatgcagtagatagatgtagcatctaagcagtcagtcatcctgtagtctggtcctacgaggtacacagagaaataaaggatgcattctgtgccatctgaaggaaaacagagagtcagagacaaaggcagagacagcaagagagcaatccctggtagtacatacctaggtgctgattgggtagcygagacaaaagtaggaattcaaagggaggaggacagcactgggctaaagtatccaagaagaggaaaagggatttgatatcacccttgaagaatgaatattatttccactgatggtggggcatggggaaggaattcttggtctgaaaggtgatgtgagaaaagatatggagaagataaacacaaggcagattcaggagatgctggacaaagcatctggagtccagggagggaagtcatggaagataagccaagttgtcttggcttgggactgaagcttgagactgaatggacacaagcttttcatgatgagctaagtggtctgaattttattccagaatcaatcaaggctcttgagtggtgatagtgacaatgctgcaact

SEQ ID NO: 888514 - DNA, 642 bp, Homo sapiens
tttcattctgttcattcagtcactaaatctcatctaacacatggcactggttttctctctgaaattaccctgatttaagcgaagaatggtagcttgttttacagtagtgaaaaatcaaagtaaagttgagaatgaacactaaggtactattcagcctcacctttctttggactaaaagtacaatgcccctttttttctcagtagcagctttctgaacttcaatactttccttattatagtgatagccatctagaaagctatgtttaccgattaataaaagaagaaccttagaagggaaygaatctgttcagaaaaaggccctatgctatgtagaagggaaaagatctttaatgaaagttaaattaccttcttagaattaaaggctgccattcacaggaagcctgagccccccaggtgatttggaatacaactccactttcatcactatcactttagagatggcaagtaatagctgctactttattttaaaaatatcccccaccattcaaacctctttttacttgagaaactcaacttatatctcatcacggaacttgctctcatcactgagcttatatggtgcaattagtaattgccttttgagatgtttccttttatctgggcactgaataactcactttc

SEQ ID NO: 888515 - DNA, 635 bp, Homo sapiens
ggggaggataacaggtttttgaaataaagtgtattagagcactgaaaggatgggaggttgttgttagattttagatttctgagatgtaacaattcttgataacaaggttaatgtgaccatgggagtggttggtagaattggagtagacatcaaagttattggagttaaaagggctagaaactgtgaggcttgagtatttgatgrgtcagcacccatggttggaattgagggagaggaagactgagccaggtactaaagacttccataaatgaagagaactgctagctaacaataacaagaaatgattgtagttctagccaaataatatgagcctcaaaagagatatgtttttacaaaaagaggaggaacaatgatctcaaagaagtattgagatgatgtaaatgaagtatggtcctcagagaagaactcagctttattaaatcaaggagaggaagaagtgttctgagaagatgttgaatgtgtagagaagtaggtttcacaaggagcagggatttcctgaaggaagtgtggcaaatggttggaaatagagcaataatggggatagaggaagtgccaagaaatatttaaataatagcagaggggtgatttacattttggactccaagcctgttctc

SEQ ID NO: 888516 - DNA, 635 bp, Homo sapiens
ggggaggataacaggtttttgaaataaagtgtattagagcactgaaaggatgggaggttgttgttagattttagatttctgagatgtaacaattcttgataacaaggttaatgtgaccatgggagtggttggtagaattggagtagacatcaaagttattggagttaaaagggctagaaactgtgaggcttgagtatttgatgggtcagcacccatggttggaattgagggagaggaagactgagccaggtactaaagacttccataaatgaagagaactgctagctaacaataacaakaaatgattgtagttctagccaaataatatgagcctcaaaagagatatgtttttacaaaaagaggaggaacaatgatctcaaagaagtattgagatgatgtaaatgaagtatggtcctcagagaagaactcagctttattaaatcaaggagaggaagaagtgttctgagaagatgttgaatgtgtagagaagtaggtttcacaaggagcagggatttcctgaaggaagtgtggcaaatggttggaaatagagcaataatggggatagaggaagtgccaagaaatatttaaataatagcagaggggtgatttacattttggactccaagcctgttctc

SEQ ID NO: 888517 - DNA, 625 bp, Homo sapiens
ctgtcaggttaagggcggggtgggctaggagagggatagcattaggagaaatacctaatgtagatgacgggttgatgggtgcagcaaaccatcatggcacatgtgtacctatgtaacaaacccgtacattctgcacatgtatcccagagcttaaagtataatttaaaaaaaaaagaaaakaagaaaaagaatgtgtaattattgtttaatatgtgaaaaatcttgactattttggtgttaaagattgtacaatatacagaatgtaattagtaccactaagttttacacttaaaattgtaaaaatcagatgttttatgttccatacagtttactgcaactgcaacaaaataaaaaagaaagttctcaaatttataaccttactttacatcttctaaaactagaaaaaggagtgcacactaaaaccaaaagaagcataaggaattaaataataaataataaaatgaagaaaaataaaacagaataaatcaaaacagcaatacagagaatcagtgaaaacaagattggttctattaaaagatcaacaaaattgagaaatctttataagaactttggactgagaaaagatagatgacttaaattaataaaatcagaagtgaaatcatag

SEQ ID NO: 888518 - DNA, 625 bp, Homo sapiens
ctgtcaggttaagggcggggtgggctaggagagggatagcattaggagaaatacctaatgtagatgacgggttgatgggtgcagcaaaccatcatggcacatgtgtacctatgtaacaaacccgtacattctgcacatgtatcccagagcttaaagtataatttaaaaaaaaaagaaaagaagaaaaagaatgtgtaattattgtttaatatgtgaaaaatcttgactattttggtgttaaagattgtacaatatacagaatgtaattagtaccactaagttttacacttaaaattgtaaaaatcagatgttttatgttccatacagtttactgcaactgcaacaaaataaaaaagaaagttctcaaatttataaccttactttacatcttctaaaactmgaaaaaggagtgcacactaaaaccaaaagaagcataaggaattaaataataaataataaaatgaagaaaaataaaacagaataaatcaaaacagcaatacagagaatcagtgaaaacaagattggttctattaaaagatcaacaaaattgagaaatctttataagaactttggactgagaaaagatagatgacttaaattaataaaatcagaagtgaaatcatag

SEQ ID NO: 888519 - DNA, 628 bp, Homo sapiens
gtgggcttactttgtgcctgacccatgcttcttcaagacaaaacaccacgcttacatcacacacacaccacaaaacaaagaatgggtaaaaagggcacataaacacttttacagtttacaccaaagcagaatcaaaaccaaaatcagagtatcaagaaatccaagccaggtcaaaactaaaaccaaagtatcaagcaatccaagtcaagtcaaaaaaaagaacyaaagtgctggtacaggcacaccatgggtgatcaggccacgcttccactcaaatggagtaggcaagttccaaagactagtcttaccaactttcagatgtctggactccaggtgccatttccttcccagtgttcagccactgcattgatcctccacaggggcctgccatgcgctgctctggcaaggcattccactggggcaattgcctacttgggagcactctcaggatctgtgtcactcaagctggccagagtcccccgcagggatgctccacagggcaggcctaagccgcctaaggggctgcctcgactgtctgttaatcaccttgcttcctggtcaaggaaccaagaaatgtagcaggaaaagccacagataaaacccctcagacactgagttaaagaaggaa

SEQ ID NO: 888520 - DNA, 630 bp, Homo sapiens
ttcttgctgtttggtctcttgtactttttggaatttaagccatgtgaatgtattaccccttcaaaaatgtaattacaaaaaacaccgtttgtgttactcttctcttgaaccactatccagtgactcaggaactgtttctgtaatattgagacttctggagaaagattcttccacgtgttctatgttgtgcttcattagaagcttgggaagtcatttcttttcttcagggcaatgaaatcttttaacatttggattcycctttgtttcattcttatacattgcacaaaatgattggtgattgggttttgagcagctttttagataatttgacacttctttggttgggattatttccaccatttggggttcatggaaagaaagaagacagaccctgtgaaggtatcagtggcctcatgaagattcattagaatgcatatgctagggctttttacatttcaggaagaagctaaaaaaaggtcaactttctcatctacccaaggcagttatcaactgcagcatcaatcacacatttactatccatttattgagcacccactgttcatagcaaggctctcaagcctcatatgccttcctaaacaggacggaattaagctaatagtgtcattaaca

SEQ ID NO: 888521 - DNA, 628 bp, Homo sapiens
ttagcctggctgaaaattgtgtgagagcctcttttaagggaatggggaaaattacaaatggctacacagaaactaatctaataggacaaataaggcaattaactttaggaaaaacaaaaagaaaggatccatggtgatagcagatgctaagctctggataacccttgcttgtaatgtgatgacgtggtttgacttggggatagcattttgctatttgttttcggtattttgtttttctgttcctcctttcctgacttcttttggactagtcaaaatkttttagtatctcattttaactccctttttcttacatgtccttgcactgctttctgtattgttgtcatatatattatatattcgtacattataaacctcacaaagcagtgagatactatttgggttaccagtaatatgacttttgaaaaattagaagaaaaaatgtaaagtatgaagtcttttctatttaccattctagaggctgttcatccattcctatagatctgaatttctatctagggtcatgaagaacttcctttagaattcttgtaatacaattatgcttggagcgaaatatctttactgcatcttcaattttaaatgatattttcacaggatttagaattctggg

SEQ ID NO: 888522 - DNA, 654 bp, Homo sapiens
caccttgttgggaactggagcaaagatgactcttgttatgttttagcaaagagactggcagcattttgcccctgccctatggatttgaagaactttgaacttgagaaagatgatttagggtatctggcagaagaaatttctaagcaaagcattcaagaggcgacttagttgctgttaaggcattcagttgaatatgggaagcagagcagaaaagtttggaaaatttgtaggctgacaatgtgatagaaaagcaaaacccattttttctggggagaaatttaagctggctatagaaatttgcataagtaatgaggagccaaacattaatccccaagacaatgggaaaaatgtgtccaggacatgtcagagatcttcatggtagcccctcctatcacaggcccagaggcctacaagaaaatggttttgtgggctgggcccagggtcactgtgctatgtgcagcctagggactcrgtgtcctgaatcccaggcactccagctgcggctgaaaggggtcaacatagagctcgggctgtgacttcagagggtgcaagcccaaaccttggccacttccacatggtattgagcctgtgagtgcacagaagtcaagaattggggtttgggaacctccacatagatttcaaaggataaatgga

SEQ ID NO: 888523 - DNA, 557 bp, Homo sapiens
aatgttacatttttatgtttaattatttgccttttaaactctacctcttaatccctccggaagcaaagaaaataattgctgcactcgagcatatggacccacagtatcttagaaaatacatgggatttttcagtagctaggactatggtgaaaagacattagaggagtcagtgtgtgactgctaaaaaaaaggtacataaaaggctgtttgtaggcaagccaagatggaaggtctgtggcttctccttcaaagcatcagtgatttccttttatacactggtgaaataaatataaaatacatttgcgttgttggatctggcttycttaaaagcagaaatccatagccatggacattatgtagactctgaattaatgcttgcttagatgaatagcatgaagaattggatgagacccctttactaagtttgcgtagtgtctgtgtcttctgtttagtgtaggttctttaacttttcccccaagactccatccaggattatagacacctatgaaataaagccgtcgtgaatatctgaatgtttgcttcagggagtcgatcc

SEQ ID NO: 888524 - DNA, 653 bp, Homo sapiens
tacatgttattacacttcatgttttacaaaaggctttcagatacaccccttctttcaatcctcacaatttccctgttaactaaaaattttatgctcattttaaagcctgaagaaactggaaactgacatttagagggccctaactactcaagatcatatagacactcaggagcaaagatggacccaaaaccagaccctgcactatctctacaaccacttctctaatcctagacaagcagacagatggacagatagataggcagacagatagacagataaagaaccctatactttttgcataaagagtgcttagtaattatctgttgatttattggactaaatgtgttttcttttgaatcaaatgtgatgccactgactcaccatcacatgccttagattacttgcccattagaggaacaggtttaacaactatttgtttgagtacctactatggacaaggcactgttgaaagtgttgggggaatacaaagggcgtcctatatcasttatattcttaaagacagtgaagagtgaatgagacatacactgtgcacacaaagctataagcagagtgtgataaatgccattcatttattcaccaaatatttattgccatcaactattaatacattccaggcactgggaattcaatga

SEQ ID NO: 888525 - DNA, 653 bp, Homo sapiens
tacatgttattacacttcatgttttacaaaaggctttcagatacaccccttctttcaatcctcacaatttccctgttaactaaaaattttatgctcattttaaagcctgaagaaactggaaactgacatttagagggccctaactactcaagatcatatagacactcaggagcaaagatggacccaaaaccagaccctgcactatctctacaaccacttctctaatcctagacaagcagacagatggacagatagataggcagacagatagacagataaagaaccctatactttttgcataaagagtgcttagtaattatctgttgatttattggactaaatgtgttttcttttgaatcaaatgtgatgccactgactcaccatcacatgccttagattacttgcccattagaggaacaggtttaacaactatttgtttgagtacctactatggacaaggcactgttgaaagtgttgggggaatacaaagggcgtcctatatcagytatattcttaaagacagtgaagagtgaatgagacatacactgtgcacacaaagctataagcagagtgtgataaatgccattcatttattcaccaaatatttattgccatcaactattaatacattccaggcactgggaattcaatga

SEQ ID NO: 888526 - DNA, 584 bp, Homo sapiens
ttgctgcctcttagaagatggcaaaacaaagcctgtaatcccccccatccaattgtgcagtaatcctcagggtgagaaggagatcagggagagagaggacttctctcatttcatttaacaaacacactgtaacactaatgctcgctactattgtaagcactttaccagcctcggctcatgtaatcctcataacaaccctaggagtaggtactgttaccattgttcycgtactccttttagagacaaagaaacagaggaattgagaggtgaaataacttgcttaaggtcttatagctagaaaatggcacagccagggattgaacccaggcagactagctcccagagttcacactgctgagctgcctctcacagcttctgtgagtgacacagttgctctgcaaagccaggggcagcagcacacccccagggagctcccggtgctccaatacaacctcagatatgcagcctcagcactgactggttgttgcagacccagtggactggccattgaggaataagccatgggataggttaagagcaacggtgatctctgcagaattaattggtggcttcccttgggtaca

SEQ ID NO: 888527 - DNA, 621 bp, Homo sapiens
ttcttgttatctcaactcaataagatttgtattttagaagaagaatattggaaagacaatacacatccttaaaaaacagacaaacaaacaaaaaaaccttttggatggttgtcatgaccttggatggggaaagaatttcaaatcaacttacaaaatagaagrccttaatagggattaaaaattggtgatatggtacctgcctccagtggttgttgcattaatagagatgttatatgtcaagtacttagctcagtgcttggaacttaataaatggcagtagtattgttaaggatagtgaaaaagccacatctgtacagcttaacttcttgattgaagaatccaactcaaaactcagaaacctgtaaaggcctttgtacttcaaggaaattttttcaaaacagtattacaaaaaattaagtttctatttcacatctgaattctatagctctttatcaaacactgtatttgtcaattttcacactgctataaagatactacttgagattggtaatttataaaagaggtttaatacagttccacatggctgggaagacctcacaaaatgtgcaatcatggcagaggagaaagggaagcaaggcacaccttaacatggcggcaggc

SEQ ID NO: 888528 - DNA, 508 bp, Homo sapiens
ctgagctcctagtatctactggttactatgttaaaagtgctgaagcactaatggtgaacaagacatagacattcttggttcctctagagctaataatctggtaattgcctacatatgagttgtacttttagcttttggtatagcacagagtaataagtaaattccttcccctgtgcattaatcattcagttatcacattgcttcatgggtgcctcttctctagacaaaatatgtcctttttcttcaacataggagctattacttttctctggacacccttaatttcgtcagcatctttcttaaggagtggcattctgaattagacacccaggctcccagtatgatctggtkggtgtgtagtgctcagagactgtggcctcagaagacttgaaggttgaattactaggagtgcaacctggactcatcacagctattttgatttctcatggcagtgttcatttttatggttcgtaaaatcacaagaccttctttctgtgaattgtgacca

SEQ ID NO: 888529 - DNA, 612 bp, Homo sapiens
caggaggctgagtcagaattggaacccagattttgtgtctctagtttgtttttttactctttctacatttatgacagctaatctttgtcacaagtaaattgtatttattccagtggagtagtaagaaagcagttaatccagtttagcgctataaaaagctcagttttcaagaaaatgtaaagcttctaaatatagtggagattgtgatctttttgttttcattcttcttgagagttaagccattgaaataaagatttagccgagaataggacacagtaagttaatgtgtgaatgcaggcgagggattcacaggtaatggcagtttgaaattgaacacttaatggagcttgacacctacttgggataagctgtaggttaggtaatgacacagctataaagttgagttccaataaagtatcgagatttcytaaattaaaggccatactttatttatagactggttaaggaattatttatatatacttttttggcatagagtttttttccatctggcagacatggaaaattaaaaggtaaattaagagagaggtcacacatataaggcattttgtaggacttagcttgcttggtttgaaaacaaaacaaaacaaa

SEQ ID NO: 888530 - DNA, 501 bp, Homo sapiens
gcaacttattcactaccatgagaacagtatgtgggaaaactcccccatgactcaactaccaaccagcaggtccctcccacaacatgtaggaattatgggagtacaattgaagatgagatttgggtggggacacagggccaaaccctatctttctgcacttggcccctgccaaatctcatgtcctcacatttcaaaaccaatcatgccttcccaacagtcccccaaagtcttaactcatttcagccttaactcaaaagtccacagtccaaagtctcatctgagacaaggcaagtcccttctrcctatgagcctgtaaaatcaaaagtaagttagttacttcctagatacaatgggggtacgggcactgggtaaatacaacaattccaaatgggagaaattggccaaaacagaggggcaagagggcctatgcaagtccaaaatccagtgggacagtcaaatcttaaagctccaaaatgatctcctttgacttcatgtctcaca

SEQ ID NO: 888531 - DNA, 613 bp, Homo sapiens
gcaataagggatgacacaacaattttttgagaaatgttcacaagaactgttttaagtgtacctgtacatctgttctctattcgtcatttggaaatagtagttatttcctaatatcatcatcatcatcatcatcatcttcatcaaataaaacaatagaactcaatgttcatagatgtagctgcgytgaaggagatcatgtgccctgaacagaaagggagaagttgagctacgtgattaatgtgctatagatgcagagaacatatgcccaggactttctgtgattgtctcaattttatgtaactttattcttagaaaaaaagggacaatgattgactaaagttatgagaatttaatttttacacaattgtcttttcacatgaaaaagttcacaaatcaagaaaagtttagaaaacataaatatcacaatgatggccttgagaaaataagtatgttggtggcgatgtatgcaggtgggtaaagcaataatcattttcagcaagttgttaatccccgttacaaaatgcagaataaaaataacaagcattctatttagtgtattaactgagtttgtaagacagtaaaaagtaattaatatgggtctgaaatggaaagg

SEQ ID NO: 888532 - DNA, 613 bp, Homo sapiens
gcaataagggatgacacaacaattttttgagaaatgttcacaagaactgttttaagtgtacctgtacatctgttctctattcgtcatttggaaatagtagttatttcctaatatcatcatcatcatcatcatcatcttcatcaaataaaacaatagaactcaatgttcatagatgtagctgcgctgaaggagatcatgtgccctgaacagaaagggagaagttgagctacgtgattaatgtgctatagatgcagagaacatatgcccaggactttctgtgattgtctcaattttatgtaactttattcttagaaaaaaagggacaatgattgactaaagttatgagaatttaatttttacacaattgtcttttcacatgaaaaagttcacaaatcaagaaaagtttagaaaacataaatatcacaatgatggccttgagaaaataagtatgttggtggcratgtatgcaggtgggtaaagcaataatcattttcagcaagttgttaatccccgttacaaaatgcagaataaaaataacaagcattctatttagtgtattaactgagtttgtaagacagtaaaaagtaattaatatgggtctgaaatggaaagg

SEQ ID NO: 888533 - DNA, 600 bp, Homo sapiens
agagaaagaggaagtcaaactgttgctgtttgctgatgatgtgattgtgtacctggaaaaccctaaagactcatccaaaaagctcctagaactgataagtgaattcagcaaagtttcaatataacaaaatcaatgtacaccgatcaatagctctactatacatcgacagtgaccaagctgagaatcaaatcaagaactcaactccttttacaatggctgcaaaaaaaagtaataaaataaaataaaatacttagtagtacaactaaccaaggaggtgaaatgyctctacaaggaaaactataaaacactgctgaaagaaattgtagatgacacaaacaaatgaaaatacatcccatgcttatggatggatagaatcaatattgtgaaaaagaccttactgccaaaagcaatctacaaattcaatgcaatttccatcaaaataccaccaccattcttcacagaactagaaaaaacaatcctaaaattcatatggaaccaaaaaggagcccacatagccaaagcaagactaagcaaaaagaacaaatctggaggcatcacattacctgacttcaaactatactgtaaggccatggtcaccaa

SEQ ID NO: 888534 - DNA, 593 bp, Homo sapiens
tcaggttattagatttttttcctgtagagttgtttgagcttcttatgtattgtgatcattaatcccatgtcagatggatagcttacaaatgttttctcccattctgtggtttatctctttattttgtggattgtttcctttgctgtgcagacccttttcaacctgtgattccatttgttcatttttgctttggttgcctgtgstgttgaagtactattcaagaaatgtttgcccagaccaatgtcctggagagtttccccaatctttaattttagtaatttctgagtttcaggttttagatttaagtctttattctattttgatttgatatttgtatatggtgagagataggagtctagtttcattcttctgtgtatgaataggcagctttcccagcacagtttattgaagagacttctttccccattgtgtgttcttggaagctttgtcaaaaatgaattcactataaatgtatggattttatggatttctgatggttgctatattccgttccataactttatatgtttttaatgacagcgccatgttgtttttgttactatagctctgcagtataatctgaagtcaggaaa

SEQ ID NO: 888535 - DNA, 668 bp, Homo sapiens
aggcctttgacaaaattcaacagcatttcatgccaaaaactgtcaataaactaggtattgatggaacgtatctcaaaataataagagctatttatgacaaacccacagccaatatcatactgaatggacaaaaactggaagcattccctttgaaaaccagcacaagacaaggatgccctctctcaccactcccattcaacacagtattggacgttctggccagagcaatcaggcaagagaaagaaataaagggtattcagttaggaaaagaggaagtcaaattgtctctgtttgcagatgacatgattgtctatttagcaaacccaattaactcagcccaaaatctccttaagctgataagcaacttcagcaaagtctcaggatacaaaatcaatgtgcaaaaatcacaagcattcctayacacgaacagacaaacagccaaatcataagtgaactgccattcacaattgctacaaagaaaatggaacacctaggaatccaacttaaaagggatatgaaggacctcttctaggagaactacaaaccactgctcaaggaaataagagaagacacaaacaaatggaaaaacatgccatgttcattaataggaagaatcaatatcgtgaaaatggccaactgcccaaagtaatttatagattcaatgctat

SEQ ID NO: 888536 - DNA, 573 bp, Homo sapiens
aaatgcttcattataaatctggaatataggaatattttcaaaaatggatttttgcaaaaagtctgttattttttttttcccctgcagcagggacagaactgtagcttcatgatctgagatatcaggtaaggaagtcctcccctattctttctcaagggataggctgtttatattcctctcctccaatccctcagagacagcatcaaataactcccctatgctctgtgctgtgttggctccatcctcggggcaagtgttattatttcacatcttactcttaaatcgctttcaagaaatagacatagtttccaccaaagaggagcccttcccaacaaacctttaataacaacaaagggtttccatatatgcaccyttaagcgaacatacacaaatgaaatgaatctacagattgataatgaagccagtatttttatttttatttttatttttttttattttttattttttatttttttgagatggagtctggctctgtcacccagcctggagcgcagcggtgtgatctcggctcactgcaacctccgcctcccgggttcaagcaattctcctgtg

SEQ ID NO: 888537 - DNA, 584 bp, Homo sapiens
tatatagttattacgtatgtatatatagccattacaaataacattttactcacattttaataacttccacagatattggcatggggttctttatttttgtttttattatctcaagatacaaacaaaattccagattagtagttatgtcagttctttttgtttatttgtaaaagtgagtcattttttgaaactgtttatttctaaaatttggcataaaaaagagcattttaaacttacataacataaattgtcagagcattatatagagagaaaataagaagggaagcatgtatttatattgcatgcatcctggatttactacttctacatcaagagctaaggaaatatgccatcaagtttatgatgttataatactgtcactttacatctgtcctggaatatatakagtcaatgatttatatgactggtttcggtaagcagaccattcctgattcccgccagacaatttgtaccacaattggatatgttaaaagttctgtagaacatgtaagtttgacaatagccttttgaatattttttccatcttacagaaacttggaaatttcatcttcagcaaaaaataa

SEQ ID NO: 888538 - DNA, 676 bp, Homo sapiens
ggcttatttagctctctccaaaatgaggagaaggagaggaacaggcaggagaccatttaagaaacttgaagtcaggctgggtgccatggctcactcctgtaatcccagcactttgggaggccgaggcgggtggatcacttgaggccaggagttcaagaccagcctggccaacatggcgaaaccctgtctctaccaaaaatacaaaaattagctggatgtggtggcatgcacctgtaatcccagctactcaggaggctgaggcaggagaatcacttgaacccgggagacaacagaggttgcagtgagctgatattgcaccactgccctccagcctgggcaacaaagcgagactctgtctcaagaaaagaaaagaaaccgttgaaatcaaagcctgcaaacaactttcttgtggccgaattttcctatgtawactcataaattcagtctttctttagagctaccatgatatctcattgccgggtctgcaactcataggtaaggctgtccatctacccacccaagtgttctcagtctgtgccatgttcctccaataaggacactgctgcagatccttcagaggaacctggggatcaggatcattgctttgaagctgaacaaagctctgatgttgacttcagggctgcagagttgttcatttgttcctatgtcctaataa

SEQ ID NO: 888539 - DNA, 633 bp, Homo sapiens
atgtttaagagagagtttaaaatgtagtatctgagtaacaaatatttagtaaataatctctactttctattttaatatgttgtaccaaaatttatattttctgagcaaaccaatctatatgttgtgctcctaaattaataaagtgcttatattttataaagtacaaaataacttctgtagaagttgtcattgttctcaatatttttatattttccatattttttggaaagtccccaaaaattaactcccttaaaagtcttcttgtaaattccagtaaattacatgtattcaaagcaaggagttcttgcttggggtttccaaaatatgttattttccacttgaattcgaatattgtcccagagatcatgaaggttcctagaatgtttattcacaattctaactattctaacaataatatctggattctacaacctctatcaaaagtcccaatactctaaaatatcyttgcttggtaaacatactgaaatccttgtccttagagttaattcctctttttaatccaagatgactagaagaccccaggagaaaaatgatatataaagaaaaggtattatcactgaccaatacatttgctcattcatccattcattcacttagcaaatactaccaagt

SEQ ID NO: 888540 - DNA, 654 bp, Homo sapiens
ttcccagagcaggcagattaggtaaacagccctctttacaagatggtttctaaaaagaggcttgaacacagaagcacgttctaccactgctgtttctagttagctagttctttattacagttgtatttcacagcttagtctataatatagaaattctctagcaaggttggatacctccttactatttagtaggaggatttactttcctggggggtaaaaactgtatcttcattctaccytccaccttctccttttaaatccttggcttttaactccactgtaggttctatgctccttgtctggaagctggaagacctattaggaggctgttgcaatagtctgagcaagaaataatgagccagaacaaaggcagtggctgtgtgtgtgtgtgtgtgtgtgtgtgtgtgtgtctgtgtgtgtgtctgtgtgtgtagctgagtgggaaattcagtaagtctgaggctgacagggaacgcaggagaggggatctctccccactgctgtgctgattacagctataccccgctccataaccttgcagccaccaactctcataaaatctaccaatcagacctaaaagagatagagcactgtaaccacaaatgtcctggccatcagcatagagactttccaaaagacccgccccaaatacat

SEQ ID NO: 888541 - DNA, 509 bp, Homo sapiens
cgagattaaaatctgcccaaatacataattaagtgactatgaatgtgttgaaaatgccaaaataaacacagacagaggctcttctaagcttcctaagcaactttgaatttttttcatcaatttgtataatatactctctgcaagctttaatagagacaggacacaaaacattgtctttactcattctcatttatgtccatcagattgcgttaccttgcctggtaatgtactagaatttcctctgaattttagacaaggtgatcgtgaaatgtggtacagtctcaggtggtttagcaaacaaccttccacatcagtgcagttatctcagccttwaaaccatcagctctggattataaatttgatctgccagcttatgaacttgagtcaaagacaaagaacattatgccttgctttgaaaggggattagaagcaaaaatgaactcaagtgttaaaaaaagtactaaaaaataatgaaacaaaaaatatattatcagtacctctctaagcaa

SEQ ID NO: 888542 - DNA, 665 bp, Homo sapiens
caactggaagaaaggctatcagtgatgaaagatgaaatgaatgaaatgaagcaagaagggaagtttagagaaaaaagaataaaaagaaatgaacaaagcctccaagaaatatgggactatttgaaaagaccaaatctaagcctgattggtgtacctgaaagtgacgggaagaatagaaacaacttggaaaactctctkcaggatgttatccaggagaacttccccaatctagcaaggcacgccaacattcagattcaggaaatacagagaacgccacaaagatactcctcgagaagagcaactccaagacacataattgtcacattcaccaaagttgaaatgaaggaaagaatgttaagggcagccagagagaaaggtcgggttatccacaaagggaagcccatcagactaacagcagatctctcggcagaaactctacaagccagaagagagtgggggccaatattcaacattcttaaagaaaagaattttcaacccagaatttcatatccagccaaactaagcttcataagtgaaggagaaataaaatactttacagacaagcaaatgctgagagattttgtcaccaccaggcctgccctaaaagagctcctgaaggaagcactaaacatggaaagaacaaccggtaccagccactgcaaaat

SEQ ID NO: 888543 - DNA, 600 bp, Homo sapiens
tagtgagtgagttctcatgagatctgatggctttataaggggcttcccccttcactggcactgattcttctccttcctgctaccatgtgaagaaggatgtggttgctttctcttctgccatgatggtaagtttcctgagacctccttagccaaatggaactgtgaatcaattaaacctctttcctttataaattacccagtcttagatatgtcattatagcaatgtgagaatggactaatactataaactggtaccgcatagtggggtgctgatataaagatacctaaaaatgtggaagtgacattggaactgggtaacgggcagaggttggracagtttggagggctcagaagaagacagaaaaatggggggaagtttggaacttcctagagacttggagggctcaaaggacaggaagatgtggaaaagtttggaacttcctggagacttgttgaatggctttgaccaaaatgctgatagtgatatggacaataaagttcaggctgaggtggtctcagatggagatgaagaacatgttgggaactggagcaaaggtgactcttcctatgctttagcaaagagactggcagaattttgcc

SEQ ID NO: 888544 - DNA, 511 bp, Homo sapiens
tgtctcatttccccctctaaagacatgcatctaactgcccttagattaaggataaagacaaagatgaacttaactgcttcctgctgacagggggtgctgtttgggggaaacagtagtcagagctccctcaaagtcctatctaagggatcccagcagaaggggccatcgtcagaggctcaggttgcatgactgttttgagtgtgatgtcctgaaggcaagaacagatgaaccaggttattagaaaacatgaatcaaaacaaaacaagagaarggataaggacagctgaaagatcccaaggccttttaccagtttgtacagggagagggaggtcaaaagcccaactggttttttaaaaaaaaaacaaaaacaaaaaaaaaactttacccttttgccggcaagttgggcttctgggttcccttcccctgggcccaatcttaagtcaaccagtttaaggtttaggaaattactctttatagtttggaggatgcatctgaagggagtgtcccatag

SEQ ID NO: 888545 - DNA, 418 bp, Homo sapiens
ggcacacatagtaattgtctagatgaatactagggagcatatgagaggccagagctaagggaagtctctcagactagatgacaattgatctgattagagaatcaatcaagaggaaagaatagagaatggctctgaggcttctagtcttgagtactgggtagctggtaagactattaaccaagagatgaaccatatgcagtaaagycgaccgggaatcagaataaggaggaggcaagtgaaaagcttaacttagtatatgttaagttgatctggggaaaaaagggatttaagcaaaatcttgaagaatgcaaataatgagtatattctgcattgggctcattctcagacattgaaaaactttttaaaaggttgcattctggactcttttcaatagtgagaaatccagagtaacaattat

SEQ ID NO: 888546 - DNA, 635 bp, Homo sapiens
agattctcattaagccttaaccaaccaaactggaactgagtggtgtccttgtatgtaactgtaacctaccccaactggaattccttatcctgcaggttacctgtgggttttactacttatgtagtagaagtgtgaagactcccacaacagakacaggtgggtaaatggtgattctgagagttccctctttagcaaagaagtttcccttctagatgagagattggtggagaatagagactagtaagagcagtctcttcttaagggcatcctattttatttcagatagaacttttattgattaaaaaaaatttcagcctatgcatctctttctctttttacatacagaaacatatattttataaatgtcacacatacctatattagataccatacgtaatgagagaaatacatatttttttctgagataatatagttttgtgtccctgtaccaaccaagagcagaattctccagcgtgtctgtgatttccaagtataaagacctcatctggtttgaatgaccacctatggggccagagccaaaaatctggcagaaaggaaaactaggaaaagggacaatcatgtgctcctggttttgaattgaatactgccagtattgcagccagcttttctgtttc

SEQ ID NO: 888547 - DNA, 612 bp, Homo sapiens
ctaaatatttcccaataataggctgtttctttagttggtaaaacacctaattttgtagcatctcaatggccaatgggcaaagttgttttacagaacttcttgatgtgaaaatttttaaataccctccaccaattatcagcacttttatttcatctgcttccctctctcccttttttggtgaagtcttttaaagcagatcctakatatggcatcatgtctgtatatactttgatatggaattttaatctctaagaacaacaacaacaaaacccaacaacaacaaaacccaacaacaaacatacaagcaaacaaaaaaacccaagtgatctcccattactattgtaatacctgatgaaattaataataatttctttgaatcaggatccaaataaggtccacacatatttggtatacaaatttttggaaataatttgtttttcatttagaattctttggtaattagtactactattaatgccagttgctgagtgcctcttgtgagatcttgacaattatctcaaatcttcaccacctcctaacagagtgctctgcccattttatagatgagcagggcaacttaactgcttgacccaggttatgaggcctcgactg

SEQ ID NO: 888548 - DNA, 612 bp, Homo sapiens
ctaaatatttcccaataataggctgtttctttagttggtaaaacacctaattttgtagcatctcaatggccaatgggcaaagttgttttacagaacttcttgatgtgaaaatttttaaataccctccaccaattatcagcacttttatttcatctgcttccctctctcccttttttggtgaagtcttttaaagcagatcctagatatggcatcatgtctgtatatactttgatatggaattttaatctctaagaacaacaacaacaaaacccaacaacaacaaaacccaacaacaaacatacaagcaaacaaaaaaacccaagtgatctcccattactattgtaatacctgatgaaattaataataatttctttgaatcaggatccaaataaggtccacacatatttggtatacaaatttttggaaataatttgtttttcatttagaattctttggtaattagtactacyattaatgccagttgctgagtgcctcttgtgagatcttgacaattatctcaaatcttcaccacctcctaacagagtgctctgcccattttatagatgagcagggcaacttaactgcttgacccaggttatgaggcctcgactg

SEQ ID NO: 888549 - DNA, 677 bp, Homo sapiens
gttgcttatcagcttatggagattgtgggctgagatgttggggttttctaaatatacaattatctcatctgcaaacagggacaatttgacttcctcatttcttaattgaatacctcttatttctttctcctgcctgaatgccttggccagaacttccaacactatgtggaataggagtggtgagagagggcatccttcttttgtggccgttttcatagggaatgcttcccgtttttgcccattcartatgatattggctgtgggtttgtcataaatagctcttattattttgagatatgttccatcaatacctagttcattgagagtttttagcatgaaggggtgttgaattttattgaaggccttttctgcatctattgagataatcatgtggtttttgttgttggttctgtttttatgatggattacatttattgatttgcatatgttgaactagccttgcatcccagggatgaagctgacttgatcgtggaggataagctttctgatatgctgctggattcggtttgccagtattttattgagaattttcacattgatgttcatcagggatattggtcgaaaaatatcttttttgtgtgtgtgtttctgccaggcttaggtatcaggatgatgtttgcctcataaaatgagttagagagaattccttcttttgc

SEQ ID NO: 888550 - DNA, 706 bp, Homo sapiens
gtacactattcctacacacatttgaaatatttcaacccactagattaatgtagggttaaatattgcaaggatttatatttaccttctttggattttgaataaagcttaaaaagataagaaatgtaaactaattttgtgctcgattttctactggggatttttcaataatcgtcttcatgtaaaccccagcagtaaatatattgtagtcttcaatttgcagatgactaaattgagattcaaaaatattaactaactttcctactactgcacaattagtaaatagtgcttccagggttccaacaagcatctgtattgactgtttttctactgaaagtcacacatatttattaaagacttattcggccaaattatttattaatgcatctcatttaaccctcctaagagtcacattaactaagtactagatcctaaatttacagatgaggaatctgatgcatcagaaaggaaaatgattttctcagatcccaaagtagtacatgaacaagctaggatggaagtcctacaccatctsagtccagagcctgtgctcaatctcactttgatgttaagagacattgactccagtagctttaatttaggtagatcaggaaacctttctccaagaacaagtgaaaatggaaggctgctgtaactcttggtaaagtgagcacacattattaaattttactcagccattgtaaagttt

SEQ ID NO: 888551 - DNA, 642 bp, Homo sapiens
tcttttgagaggtgtctgttcatgtcctttgctaactttttaacgggaatatttttctcttataaatttgcttaagttcattgtagattctggatatccactgactccacagaaatacaaacaaccatcagagaatactataaacacctccattcaaacaaactagaaaatctagaagaaattaataaattcttagacacatgcaccctcccaagttgaatccctgaatagaccaataacaaggcctgaaattgaggcaataataaatagcctaccaacaacaacaacaacaaaaaaggcccacgaccggatggatttactgaaactattccaaacratcaaaaaggagggactcctccctaactcactttatgaggccagcatgatcctagtaccaaaacctggcagagatacaataaaaaaaggaaactgcaggccaatatctctgatgaacatccatgcgaatatcctcaataaaatactggcaaactgaatccagcagtacatcaaaaagcttatccaccacgatcaagtcagcttcaacttgcaagactggttcaacatacacaaatcaataaacataattcatcacataagcagaactaaagacaaaaaccacttgattatctcaacagacaccaa

SEQ ID NO: 888552 - DNA, 589 bp, Homo sapiens
catcaaaaagcttatccaccacgatcaagtcagcttcaacttgcaagactggttcaacatacacaaatcaataaacataattcatcacataagcagaactaaagacaaaaaccacttgattatctcaacagacaccaaaaaggcctttgataaaattcaacatcccttcatgttaaaaactctcaataaacyaggtattgatggaacacacctcaaaataataagagccatttatgaaaaactcacagccaatatcatactgaatgggcaaaagctggaagcattccccttgaaaatcagcacaagacaagaatgccatctctcaccaaccctaatcaacatagtactggaagttctggccagggcaatcaggcaagagaaagaaataaagggtattcagatagaaagagaggaagtcaaactgtatctatttgcagatgacacgatcctacatctagaaaaccccatcatctcacccctaatgcttcttaaggtgataagcaacttcagcaaagtctcaggatacaaaatcaatgtgcaaaaatcacaagcattcctatacagaaacagtagacaagcagagagccaa

SEQ ID NO: 888553 - DNA, 611 bp, Homo sapiens
gaatatcctagatgtttgctaaaacacagattatttgatatggtccaaaatatttgtattgtgagatggcttttagtgttgtctttcatttgactaaggctgtttattgtatctggattatgatatcttctgggagagttactagtttatggggtatatttatgttaagaacccatagtttcaagatacatttgaataaagaaatacaaaaatttcattggtaggacaacaaaatgcaccaatgtagggcgatctcagcaacatgcaaacttcyttttatgacagtaatagaattttaaaaaatctgggtcatcttattgctctggatactgccttaggaaaaccaaagttgaaacctcttaatgaccattgcttctgttcaagatttgctgtcttatcatcatctatatttttacatttctgaagttacattagtgaaaataggtcatatatgtgcttgattaccttaggaaatgacagagcactgaaatgaagaatctgttgaatatcaacaaccacaaccttgcaagtttcttctatttcctaataaaccattatcaatttcataaaaaatattttgtatttatgttaaacatttgttctcctaatag

SEQ ID NO: 888554 - DNA, 593 bp, Homo sapiens
acagactttctcatgagagtgacttctgtgtttcagagagagattctcttgtggctattattaaaagctttctttgtataatttgttacagcttccacatgctaaataacatctttgatgtcccgttgaggaaggaaaatagaagctaagttgttgtaccgatagaaaacagattgggcccaatgggattccaaatgaaggaaattcccaggctttgaaagagtgtgaactmtctgaccttgcacccgtgtgtaaccgaaagaacatattaatttgtgccatgcatccaggaagttccatgtgggccaaccaagagatgcctggatatattacccattctgtagcatgcgaatccatacttttaatattataatatataaacatctgtctcttggtgtccatcttatatcccttgttctatttggacagatagctttagaattattcttttgtttccaacatagggggacaagttgactaggctggccaaaagatagttaaccaaataaattcattctatatttgggttattttcattgcagtatcagatcacttcgttctttaactgaagtgtttcaggctgagactgagtt

SEQ ID NO: 888555 - DNA, 667 bp, Homo sapiens
tttttctgtcctttagcttaaaactgccttaggacttgggtttagggagcttgtgcctagtattagatacagccttctgggaggaagggcatccaaacacattgttggaatcccattcccagaccctctcaccatgcactgtcctataaatcatcacatcaaagcctgagctaaggaggggtgaccaaattccctcaaacggagcccactgctgtcctggctaagcagggtctaacactagaccatcaacaagcaccatcacacaccrttaacaaacatgagacttcttacgtggtgccactatccttaccttacatgagttaaatgaaaactctgctgtaatggatttctagagagcacattagagccccaggacaagaatgaaaccatgaagggctgtggtcatccctaggtgaaggcttcagaaagtatactgaagccctcagtaaagccttcattttatttctaggtgcttgctttctaaaacacctgtgcccattttgtttggtgagcatgagaatgacatgccagtaagagatgcaggggatagagtcaccagttcataatcacttgttgatttcagatagaagcaacccacacttatgaaagacaagccacatgaattattttactttctacttgattcctttgccaaatagcaaatgtt

SEQ ID NO: 888556 - DNA, 625 bp, Homo sapiens
ttataatctttcaatgtgtttgctttatgtccagctgataagaaataattaaaatgtaaagttgtatggtttactcgtattaggtgattagtatatttctatttaattgcatataacatgtacagaacttctagaaattaccatgagtataattttatccaaatattataattccagttgttgctaaatttctagttgttgctaatttaagactgtattaattaaagctgataaaataataaaaacttttttcacttacttcactggtggcatattgatttttctaatagactctaaagatgccagcagtgacttctgggatacatttttgcaacttcatatttcaccctgattttgagacagaattatgatgcaggcaggccagagccttaagtgytaattttttataaaatagggtcatataaatagacaacagttttgtgccttgctaatcaataggaatattttattactaacatatattttctttcataagtacacatttgtaaatgttcaaagtattatctgaacagaatcacctgcatagcccccatatcccatacccccatagccattagtatctttttcacttttgtcttccttcctttttttctctctctcaagt

SEQ ID NO: 888557 - DNA, 575 bp, Homo sapiens
aaataatactccaaacaaatgtatttttttaaatttttaaaaggaaccatactttctacatgtatgcgtaactgagtctttctatattgtttacatactatccatggtctttgatgtgtggctgccactaatatttccatgttgatgccagacctctaccacttgatctgtgacaagttatataacttaggcaggatttttttttatcaggtttagtgagtacctcaaattgaaaatgtccaaacttgagtttagcatctcacttctctaccaaaatgtctaaatcctacttctcttttcctaatctagggtctctcaatatccatgtyttgggtgggataatttttttgttgtgagggctgtcgtgtgtactgtaggatcctaaacagcacccttggcctctacccattagatagccatagaatccgcaacccactctgagctgtgacaactaaaattatcttgagacattgccaaaggtcacatggaaggcaaaattgtccccagttgagatctactggctaatctttttcttttaggttaatagcaccagcatccatccagtttcccaagat

SEQ ID NO: 888558 - DNA, 575 bp, Homo sapiens
aaataatactccaaacaaatgtatttttttaaatttttaaaaggaaccatactttctacatgtatgcgtaactgagtctttctatattgtttacatactatccatggtctttgatgtgtggctgccactaatatttccatgttgatgccagacctctaccacttgatctgtgacaagttatataacttaggcaggatttttttttatcaggtttagtgagtacctcaaattgaaaatgtccaaacttgagtttagcatctcacttctctaccaaaatgtctaaatcctacttctcttttcctaatctagggtctctcaatatccatgttttgggtgggataatttttttgttgtgagggctgtcgtgtgtactgtaggatcctaaacagcacccttggcctctacccattagatagccatagaatccgcaacccactcygagctgtgacaactaaaattatcttgagacattgccaaaggtcacatggaaggcaaaattgtccccagttgagatctactggctaatctttttcttttaggttaatagcaccagcatccatccagtttcccaagat

SEQ ID NO: 888559 - DNA, 461 bp, Homo sapiens
tccactgctctgattgctgttgaaaatcacaaaggcatctcatggcagacacagctgctggaagatcgcatggcatgtgtactgctgtgcaacagatcagctttcttgacttagttttcacaccaggctagagaggatttttgtcttttatatttctaagaaaatatttcttcaattcatatgtaaacttttttatagtacttcgtgaatattttaaactgaraaaaaaaatcaaaatcctaaaccacaacgtcctaacaaaaacgaacatgttcagtgtattgcctaacatataaaaagccataaaacgcctttatgtactctgaagtagaaatgacatttctatatcttacagatgttaagatgtagacttacacatgcagttgctcattgcagacaaaatgttaaataatggaagattgataaatgatagcacactgatatggtgtgatgattaatac

SEQ ID NO: 888560 - DNA, 458 bp, Homo sapiens
tccactgctctgattgctgttgaaaatcacaaaggcatctcatggcagacacagctgctggaagatcgcatggcatgtgtactgctgtgcaacagatcagctttcttgacttagttttcacgccaggctagagaggatttttgtcttttatatttctaagaaaatatttcttcaattcatatgtaaacttttttatagtacttcgtgaatattttaaactgaraaaaaaaatcaaaatcctaaaccacaacgtcctaacaaaaacgaacatgttcagtgtattgcctaacatataaaaagccataaaacgcctttatgtactctgaagtagaaatgacatttctatatcttacagatgttaagatgtagacttacacatgcagttgctcattgcagacaaaatgttaaataatggaagattgataaatgatagcacactgatatggtgtgatgattaa

SEQ ID NO: 888561 - DNA, 617 bp, Homo sapiens
aggtagacccacaatgcatgggaatacgacatgactgaaagaatgtacaaggtaagtgcataatctgtacagctaaatacatgggacactgactgccctgagaagccaggctttctgttcaaactatagctgcttcaataaaagcaggaccgactgaggagcccaatcatatcctttcttrcattacttgcctgtattatgtagaaaatgatgacatagaaagaaaggaaaagtggggtaaccactagagagtgttagtgggatgtgcacataccgagaagtgaaatacaaacagctgagttggttttgtgcagcattttcacatatgcatatataaaacacaacctgtgtaatttgggtgattttgcatttaagataaatgcttttatatttatatttaaagttggcagtgccataatatgaagaatggtaaattttattctaaaaatttaaatatttaatgtttaaacttagaacattaaatagcaaataaagataccatgaaaagttgaaagacacaccagagaagaaaggaaaaatcttttatatttgattaccttaaatggcacaatttttcctgctttttgaacaaggagccccatatttttgtttggtaa

SEQ ID NO: 888562 - DNA, 601 bp, Homo sapiens
aatgtattttagttaatgcataagtttagaaggccaaagatgaaaaaatgaataaataataaacagttcataaccaaattactctcaggtggaagttctagagtttacccaataataaattagaacttgacaagtaaatgaaggcatagattgtatctagcatgttcatttgccatttgcacagtctttcagtaagctatctaacattcataccacattcaaaaccttttaatcaagaatacattggagaaatgtgcataaatatcataytactatcaaatttaatagtttgtatacaccagagtgtatatgcatttatacatatccatgttaatctccaaacttcagaatattttatacttttctgtataacaagttgactttcttgcaagatagcattaaccaagataaggaaaaaaggatgaaagaggcattgtgttgctcttagagagtctgttgtgacttctttacaaactctattcttggtgcaaacagttagctggcacattgatttaatatttatttttaaaaccccaataacattaatttttattgatgacaccaaatctccaatgacctgcttatcaagaccttgcttact

SEQ ID NO: 888563 - DNA, 653 bp, Homo sapiens
catacttaattaaaataaatgtacttgacaggaaaatttgtcattattacatctttgatatacaggcaatttgtagaagatgatttcaaatgattgtttttgaaaggaaatcagacgtggaatgataaaaagaaattggaaagactagggctgaggtccaattgtgcccatgtgattcccagcaagccattaatctctgagcctcatttttctcatttgtaaataggaatacaggagtgtcccactaytcatgggtgatacattccaagacctccagtggatgcctgaaactatagatagtaccaaatctggtatacactatgctttttcttatacagaaacaggcaggtagcttacacaacataaatatactggacaaaggaatgattcacatgccagatcgggtggtacaaaattagatcacactactcagaaaggcatgcaatttaaagcttataaattgtttatttttgtatttttccatttaatagttttagaacttggttgatcacaggtaacaaaccatagaatgcaaaaccacaaataagggagtactactacagtaacatctacttcacaaaactgatgtgagaattaaatgataaggtgtccacaaagatactccataaattataaggcacaatgttaatttg

SEQ ID NO: 888564 - DNA, 568 bp, Homo sapiens
ttaaaaacgtaagcttaataacatattgaccttctctgtgaataaatgggcttctacatgaacaaatgagatggtgggtataaaaatatccatcaccacacctgttacactacatacatttaatattttggggtcagctgcaggacctctgggtgatttgactggctccctctagccctgatgaacccatgccaggctgaagcagccagttctccttcctcacatggatttttcatcctctgaaaaatcacactcttcactgttgytgatagctttcaacttgctcccatcagtcaaaattacacccattatttcttcatcactaacctagtgaacactcaagtcattctgtgtccatctgtttctcctatactgagagttctcagatgtgaagggcaagtaaccctctccattttaagaatgtaggaatgttctttgtccagcactccctccaaagcctgtcaatccttcatcatctgaagcaaatgatccccagaggcaccagagcaattttctccaagtttttccaatatgctcaagaccaaatggaattccagacacgtgtaat

SEQ ID NO: 888565 - DNA, 616 bp, Homo sapiens
accagcatgggccatgcaaagctagaggaacagaaagtgcctgactgttttgggcaactggattctgcctgagctctgcacaaatgtgcctttgtctcactctctctgggaagctacagtgagccctaagctgccctgttgcctacctggccttcactgctgtgtctgctttcatttaagttttaacagcctctcccacctccaactctggcagtagccggtctcgcctatctacaggcacagctcctgttggatttctcttcatggcaacagctctcagcaggtgctgggtggctgttcctcccctctgccccttcaarccatctggtaggtgtcactattgcacgtggcttctctaatactacccacatcaccggaaatggtcctttcataaactctcttcaatcacctcactggccgcaccatgtgtttcctgccaggaatctgatggattgaccagcgagtgaaaacacggggacagggcagaaatgtggacctcaaaaaaggatcggagctcgggctggtgtgagctactaggagctggctccagcacatccctggcttcgtcctgtacatcacagtctttccatcatgtttcagccctcgagtgaagcac

SEQ ID NO: 888566 - DNA, 616 bp, Homo sapiens
accagcatgggccatgcaaagctagaggaacagaaagtgcctgactgttttgggcaactggattctgcctgagctctgcacaaatgtgcctttgtctcactctctctgggaagctacagtgagccctaagctgccctgttgcctacctggccttcactgctgtgtctgctttcatttaagttttaacagcctctcccacctccaactctggcagtagccggtctcgcctatctacaggcacagctcctgttggatttctcttcatggcaacagctctcagcaggtgctgggtggctgttcctcccctctgccccttcaaaccatctggtaggtgtcactattgcmcgtggcttctctaatactacccacatcaccggaaatggtcctttcataaactctcttcaatcacctcactggccgcaccatgtgtttcctgccaggaatctgatggattgaccagcgagtgaaaacacggggacagggcagaaatgtggacctcaaaaaaggatcggagctcgggctggtgtgagctactaggagctggctccagcacatccctggcttcgtcctgtacatcacagtctttccatcatgtttcagccctcgagtgaagcac

SEQ ID NO: 888567 - DNA, 616 bp, Homo sapiens
accagcatgggccatgcaaagctagaggaacagaaagtgcctgactgttttgggcaactggattctgcctgagctctgcacaaatgtgcctttgtctcactctctctgggaagctacagtgagccctaagctgccctgttgcctacctggccttcactgctgtgtctgctttcatttaagttttaacagcctctcccacctccaactctggcagtagccggtctcgcctatctacaggcacagctcctgttggatttctcttcatggcaacagctctcagcaggtgctgggtggctgttcctcccctctgccccttcaaaccatctggtaggtgtcactattgcacgtggcttctctaatactacccacatcaccggaaatggtcctttcataaactctcttcaatcacctcactggycgcaccatgtgtttcctgccaggaatctgatggattgaccagcgagtgaaaacacggggacagggcagaaatgtggacctcaaaaaaggatcggagctcgggctggtgtgagctactaggagctggctccagcacatccctggcttcgtcctgtacatcacagtctttccatcatgtttcagccctcgagtgaagcac

SEQ ID NO: 888568 - DNA, 589 bp, Homo sapiens; identical to SEQ ID NO: 887986

SEQ ID NO: 888569 - DNA, 618 bp, Homo sapiens; identical to SEQ ID NO: 887987

SEQ ID NO: 888570 - DNA, 618 bp, Homo sapiens; identical to SEQ ID NO: 887988

SEQ ID NO: 888571 - DNA, 618 bp, Homo sapiens; identical to SEQ ID NO: 887989

SEQ ID NO: 888572 - DNA, 645 bp, Homo sapiens; identical to SEQ ID NO: 887990

SEQ ID NO: 888573 - DNA, 628 bp, Homo sapiens
acagccgaattttaccagaggtacaaagaggagctggcaccattccttctgaaactattccaaacaatagagaaagagggaatcctccctaactcattttctgaggccagcatcatcctgataccaaaacctggcagagacacaacaaaaamgaaaatttcagtccaatgtctctaatgaagattgatgcaaaaatcctcaataaaatactggcaaatagaatccagcagcacatcaaaaagctcatccaccatgatcaagttggcttcatcccggggatggaaggccggttcaacatacgcaaatcaataaacgtaatccatcacataagcagaaccaatgacaaaaaaacacatgattatctcaatagatgcagaaatgaccaaattcaacagcgcttcatgctgtaaactctcaaactaggtattgatggaaggtatctccaaataataacagctatttatgacaagcccacagctaatatcatactaaacggacaaaactggaagcattccctttgaaaactggcacaagtcatggatgccccctctcaccactcttattcaacatagtattggaagttcaggccagggcaagagaaagaaataaaccatattcaaataggaaa

SEQ ID NO: 888574 - DNA, 628 bp, Homo sapiens
acagccgaattttaccagaggtacaaagaggagctggcaccattccttctgaaactattccaaacaatagagaaagagggaatcctccctaactcattttctgaggccagcatcatcctgataccaaaacctggcagagacacaacaaaaaagaaaatttcagtccaatgtctctaatgaagattgatgcaaaaatcctcaataaaatactggcaaatagaatccagcagcacatcaaaaagctcatccaccatgatcaagttggcttcatcccggggatggaaggccggttcaacatacgcaaatcaataaacgtaatccatcacataagcagaaccaatgacaaaaaaacacatgattatctcaatagatgcagaaatgaccaaattcaacagcgcttcatgctgtaaactctcaaactaggtattgatggaaggtatctcmaaataataacagctatttatgacaagcccacagctaatatcatactaaacggacaaaactggaagcattccctttgaaaactggcacaagtcatggatgccccctctcaccactcttattcaacatagtattggaagttcaggccagggcaagagaaagaaataaaccatattcaaataggaaa

SEQ ID NO: 888575 - DNA, 633 bp, Homo sapiens
ctttcctatacaccaataatacacagagagccaaatcatgaatggactcccattcacaattgctactaagagatcaaaatacctacaatacaacttacaagggaatttaaagacctcttcaaggagaactacaaaccagtactcaaggaaataagagaggacaaaaacaaatggaaaatcattccatgctcatggataggaagaatgaatatcgtgaaaatgaccatactgcccaaggtaatttatagattcaatgctatgtccatcatactagcaatgactttcttcacagaattagaataaactactttaaactttatatggaaccagaaaagagcctgcatagccaggtcaatcctaagcaaaaagaacaaagttggaggcatcatgctacctgacttcaaactayactacaaggcaacagtaaccaaaacagcatggtctggtaccaaaacagctgtatagaccagtggaacagaacagaggcctgagaaataacaacacacatctacaaccatctgatctttgacaaacctgacacaaacaagcaatggggaaaggatttcctatttaataaatggtgttgggaaaactggctagacttatgcagaaaattgaaactggacctcttcc

SEQ ID NO: 888576 - DNA, 605 bp, Homo sapiens
atatactatttaacacattttttcattccgttatcaccaagaatcatttattgaaccatgatataccccacttatatttcttcatgtttttggtactgaattatttatggcttgaaatctcttactctattttctatttctgctatcttttacaaaataaaaaagttaggatcatgcggtggactttggtcatactttttggtactgaattatttatggtttgaaattccttactctatattctatttctgctatcttttacaaaataaaaagttargattatgatgtagactttggttatagttctctttggaccctgcattctcttatttaacatctcagttgctaggttttaaatatgggactaggagagtggtcagccattatattttttaatatctcattctaaatttatgtacagcttatatagtgaaaatacaaagttcagtgagtcctgacaatatctgtgtgtaactagcaccttaacaaagatatagaactttcccactttctatcaaatgttccttctttcactttccattttgttgccaccctgaagaagctaaacactgttctcattcctatcaatatggctaaactcgcct

SEQ ID NO: 888577 - DNA, 615 bp, Homo sapiens
ctgccaccacgcccggttaattttgtttttgtatttttagtagagatggggtttcactgtgttagccaagatggtctcgatctcctgacctggagatccacccgcctcggcctcccaaagtgctgagattacagacgtgagccaccgcgcccggccagaacatgatatttagtcacagaatcctttatttcaaggagcagcttaagaagatgggaaatgctaatctaaaaacttcctctcctgacttcccaccctgaaatctctgtttcccttgacgcttctatcacaaatatgtctctctatgacctttttcagttgtcaaaatccagtgcttcctgtaactttcaagtcataaactacctcctctctgaggcctttcctcatttcaccaatgtgctgtgctgtccctgccttaatgggaatrgtaactgcacacatctctcaggaggccatgtgggctgaatgagatgatcagtacagaatgtctagaacagtacctggtacttagtaagtgctccatgtgtggtgattagcattaagtaccatcacagcatttgacttctctgacatctgaagagaactacaatgaggtggaattccatttccgtatcgact

SEQ ID NO: 888578 - DNA, 671 bp, Homo sapiens
aggcaaggaggagcaagtcatatcttacatggatggtgtcaggcaaagagaagaacatgtgcagggaaattcctctttttaaaactatcagatctcatgacacttattcactatgacaagaacagcacaggaacaacctgcccccatgattcaattacctcccagcaggtccctcccacaatacatgtgaattcaagatgaaatttgtgtggggacacagccgaaccatataattccaccactggtccctcccaaatctcctgtcctaacatttcaaaaccaatgatgccttcccaacagtcccccagagtcttaactcattttaacattaactcaaaagtacatagtccaaagtctgaagtctcatctaaaacaaggcaagtcccttctgcctatgagcctgtaaaattgaaagcaagttagttactttctagatacatkgggggtacaggcatttcataaatacagccattccaaatgggaaacattgacctaaacaaatgggcttcaggctgggggaagtctgaagtccagtggggcaatcaaatcttaaagcttcaaaatgatctcctttgactccatgtctcacatccaggtcacactgatgcaagaagtgggttcacaagatcttggtcagctccacccatgtgtctttgcagagtaaagcctcc

SEQ ID NO: 888579 - DNA, 607 bp, Homo sapiens
atacataatttgaagatattttctcccatcctgtgggttatcttctcttttcttgccagtgctctttgacatacaaaaggtttctaatttttataaaacctaatatactgatttctttggttgcttgtagttttggtatcatatttaagaaacagttgcytaatccgggatcataacgattcattccaagttttcttctaagagttttatagttttaactcttgcatttatgtctataatctcattctgagtcaatttttcattctagtgtgagttatgtgtccaaatttattcttttgcacacggatatctagttgtcttagcgccattcattgaaaagaatacttttgtcctaatgaagaatcttggcacatttgttgaaaatcaattggctatacatgtgagggtttatttttggattctcaatcctatcccattgatctataaatctttctttgtacgccactacacccaatcatctttgctgtaaattttgatgttgagaagtgttattccttcaatgttgttttttccacaatttttttggttctcaacaatttgggttacttatatttccatataaattttaggacaaccctgtcaattt

SEQ ID NO: 888580 - DNA, 607 bp, Homo sapiens
atacataatttgaagatattttctcccatcctgtgggttatcttctcttttcttgccagtgctctttgacatacaaaaggtttctaatttttataaaacctaatatactgatttctttggttgcttgtagttttggtatcatatttaagaaacagttgcctaatccgggatcataacgattcattccaagttttcttctaagagttttatagttttaactcttgcatttatgtctataatctcattctgagtcaatttttcattctagtgtgagttatgtgtccaaatttattcttttgcacacggatatctagttgtcttagcgccattcattgaaaagaatacttttgtcytaatgaagaatcttggcacatttgttgaaaatcaattggctatacatgtgagggtttatttttggattctcaatcctatcccattgatctataaatctttctttgtacgccactacacccaatcatctttgctgtaaattttgatgttgagaagtgttattccttcaatgttgttttttccacaatttttttggttctcaacaatttgggttacttatatttccatataaattttaggacaaccctgtcaattt

SEQ ID NO: 888581 - DNA, 574 bp, Homo sapiens
cttgtgcttcccgagtgaggcaatgcctcaccctgcttcggctcgtgcacggtgcgtgcacccactgacctgctcccactgtctggcactccctagtgagatgaacctggtacctcagatggaaatgcagaaatcacccgtcttctgcgtcgcttacgctgggagctgtagaccggagctgttcctatttggccatcttggctcctcccccgatttctctttttttttttttttttgagacagactctcactctgtcgcccagtctggagtgcagtggagcgatttcggctcactgcaagctctgcctcctgggttcatgycattctcctgcctttgcctcctgagtagctgggactacaggtgcctgccaacatgcccagctaattttttgtatgttttagtagagatggggtttcactgtgttagccaggatggtttcgatctcctgaccttgtgatccacctgccttggcctccaaagtgctgggattacaggcatgagccactgtgcccagccataaactactcttatcttatgtagaaaggctgaatgatgagccaatcaaaaataata

SEQ ID NO: 888582 - DNA, 595 bp, Homo sapiens
tcagatctcaaattccgtgctgggagaaccactactctcttcgaatctgtcagacagggacatttaggtctgcagaagtttctgctgccttttgttcagctgtcttgcccccagaggtgtagtctacagaggcaggcaggcctccttgagctgcagtgggctccacccagtttgagcttcctggcctctttgtttacctactcaagcctcagcaatggtttgcacccctcccccaggcttgctgctgccttgcagttcaatctcagactgctgtgctagcaatgagcaaggctccataagtgtgggaccctctgagccaggygcgggatattatctcctggtgtgctgtttgctaagaccattggaaaagtgcagtattagggtgggaatgacccaattttccaggtgctgtctgtcacagcttcccttggctaggaaagggaattccctgacccgttgtgcttcccaggtgaggtgatgcctcacccttgtttggctcttgctcggtgggctgcacccactgtcctgcacccactgtctgacaagccccagtgagatgaacctggtacctcagttggaaatccagaaatcaccc

SEQ ID NO: 888583 - DNA, 648 bp, Homo sapiens
ggagagaaatcttcactaatgaaaatgaaaacttacggagcagtaggaaggggataaacctcttgacccagatgctcctatcactagcctttctgcctgtattttcaaaagcagaatttttagtaaaatttattgaaataccatttcctctagaagctagctcaaatgtgactgataataaaagtccagtgtcctctaaacaaaaccagcatatacaaatttgaatttatttttaaaaaataaattaaaagaacagaagtgattatttacatcacagaagaattaattgttcttacaaagtgattcttttgggaatgttaatgacaactgataagtgatttgccttttgctaattttatatagaattttgcataattttcaaattatgactaaattttaagaccatatctgttgtaagaagtaagatgtagttctatatttgagacacttatgagccccactgtggatctgtacrtttccttagggcattggagcttcagggaagccaatatataatacttgcataagggtctgcaaggtcaaaggacttgatttgttatggaggatttgctaactgttcaaagcaaagaaatttgtttcaatgctgcagttcagattcatcaattgacgttaataagttagtattta

SEQ ID NO: 888584 - DNA, 655 bp, Homo sapiens
aagcttctaattccctgcacacttttagtctcactctagttatgagttttttttttcttttgcaattgtgaacagtttattatttcctatactatggaaccacttgtaaattatcccagttcttttccttgagttctcatattctctctctctctctctttttaatttatttaagctctgggatacatgtgcagaacgtggaggtttgttacacaggtatacacatgtcatggtggtttgctgcacccatcaacccatcatctacactaggtatttctcctaatgctatccctcccctagccccccacctcccgacaggccctggtgtgtgttgttcccctctctgtgtccatgggttctcattcttcagctcccacttatgagtgagaacatgcactgtttggttttctgttcctgtgttagtttgctgagaatgctggtttccagcttcatccatgtccctgcgaargacacgaactcatccttctttatggctatatcatattccatggtgtatatgtggcacattttctttatccagtctgtcattgatgggcatttgggttggttccaagtgtttgctattgtaaatagtgctgcagtaaacatacgtgtgcatgggtctttatagtagactgatttataatcctttggg

SEQ ID NO: 888585 - DNA, 655 bp, Homo sapiens
aagcttctaattccctgcacacttttagtctcactctagttatgagttttttttttcttttgcaattgtgaacagtttattatttcctatactatggaaccacttgtaaattatcccagttcttttccttgagttctcatattctctctctctctctctttttaatttatttaagctctgggatacatgtgcagaacgtggaggtttgttacacaggtatacacatgtcatggtggtttgctgcacccatcaacccatcatctacactaggtatttctcctaatgctatccctcccctagccccccacctcccgacaggccctggtgtgtgttgttcccctctctgtgtccatgggttctcattcttcagctcccacttatgagtgagaacatgcactgtttggttttctgttcctgtgttagtttgctgagaatgctggtttccagcttcatccatgtccctgcgaaggacacgaactcatccttctttatggctrtatcatattccatggtgtatatgtggcacattttctttatccagtctgtcattgatgggcatttgggttggttccaagtgtttgctattgtaaatagtgctgcagtaaacatacgtgtgcatgggtctttatagtagactgatttataatcctttggg

SEQ ID NO: 888586 - DNA, 530 bp, Homo sapiens
tggctatgagcaattaggtcctgttcaatttatatttcctgccctctggccagtagccttaacaactttgggacctgaaactgctgctgtgcagagttcagaagtttcagcaccagtcgctccgccttctcattcattytgttctcatactggaaggcacagggaagctgaatgggtcagcaggctcggtccctgtcacactagagagaagtaataacaactagggtcgcagagtaaatctctaggaggcctgataaggaggcatggaacaaaggaacagaaaccagcatattatcgggctagtcaggggtttaaatgtaagcattattaacaggtagcaggttttggctaactgggtacacctctaagccaaaggcctcctgaggccaaggaacccttagacttccggctcagggccaagagctggtgttcaagtgtgggaggggcgtcctccatggaaagcacgtaagtatatgtaactgaatgggggcaagagggcacaagcagagctgtccccaagagctgtgtga

SEQ ID NO: 888587 - DNA, 668 bp, Homo sapiens
  misc_feature 27, 36, 38: n = A,T,C or G
acaatgcactcactaatacaaccctgngctttccangnccagccccagccccagccaccaggcaagtccttgggtctcttggatggtcagacacagacattctcaaactttgcccacactcaccatcccaggacccccaatttctcttccaatctgtcccctttcaaaaagtgtcaattcctcctcatgaccccgcggtatctgtcctttccatgacatctgctgagggctgtggagcccacagagcagccggtgccatgggagctaggaagacactgccctgctggggcactgcaagcataatagattagctgcctgatgcacacagcaagtcagtgtgccaagacaccagttcgcagcaaaaaacaggtttaatcgtagggtcaatgaacaaggtgatgagaaggaacctcaaatccatctcyctgaggaatttggggttagggtttttatgggttttgaatggggccaaagtgtggagattcttgactggtggaagagtgcagggtgaagtcagggggcagggagagaggaaggcgttttatcctcatgctgatcctattcctccgtggaggtcctcaaattggtttctggaatttgaggtctgaaaaacctcttaagcgatccttaaacaaaagccttatgattccaacgtcagagctgctgtc

SEQ ID NO: 888588 - DNA, 566 bp, Homo sapiens
ttgggggacactgtgagttaagggccatgacagaagtcttcataagtaaactgttactggcacaagctgctacctgcccaggtgagcaatctgttggcccagaggagagttgcttactgacataaattgatttgcagaaatttcctgaagcaaacaataagttatttataggtttgcagccttactttcctggaaaaatacttttctggaatgaattgtgaaatcatgttgacacagatggcctcaggtttcagttcggataattaagctgtgtaaatatagaaagtctaaggtttctgtgtgctgttgattcacagtatgcaacaatgatcatattacttttatttactatgagcttcagctgaaartccaaaagaaactttaatttcagatatttaatgaaatcattatagctgtggtaatttcctttagctgggtgtgagtgtgtgatgtgagcgtgtgatgtgtgtgtgtgtgtgtgtactctggcagcatattccaaataatttctgtaaaatttcagtttgaaattaatagaagacatattaagttgtttaaactctttg

SEQ ID NO: 888589 - DNA, 631 bp, Homo sapiens
aattgaaatgcaacataattatgataaagaaggaaatgccaggggcttcttttctctatggactacaataccatagtgaattgggcctttcaaaatccagaaactttttattggctgttcgtttcacgaaagcagaaatactccaggatgtgttttcartaattaaggtaatctttataatacatatttttctttagcccagctgactatccaaatgagtgagtgtttggtgactaatgtaaatagctgtatgaaccaattccagatattttagctgtgaatgacttgatgataattataacagaagcaaaatgagtgttcctcattttaatgtgacctaataacaccatatcatttaagacaatatttattttttagtataatatgaactggtcctaattctgaggtatgctcataccttagagtatcaacactagagagttattacaattaatgactggctttctattgtgttcgagccaattaaatttttttttcaaaattctcttctgcaagtcatttctgaggtctccttgcaaaccatttgcacagtcataacatctatacaagtatttgcttatcaccttggccagaaaaatctcttttcaaggctgcttcacagggtttcttg

SEQ ID NO: 888590 - DNA, 581 bp, Homo sapiens
ccctagttctgaagcttcaggacttggagaaagctactctactctcttccctggttctccagcttgcagacaacctatcctggaacttctcggcccgcataatcgcatgatccaattcctataataaatgtacatctctctctctctctctgtatgtgtaggtatatgcatgtgtgtatatatatatgtatacgtgtaggttctgtctgagagaacccagcctaatacatcatgcagcatattatcagaataaaatttgataatgtatgtacaatgctgaacacagcatctkgtatttaaaaacatattcagcatcgagttactgtaactgctgtcattgatgcctcttcttctaaaatgagatgccatcacttgtaaaattatttttaaaagatatatttttaaatgaagaagtctttttatatgtcaaataatttactttagatgtttaaaatagtatagctcacaaaaaatgttggcttataacaacttctactgagtatgtaagaaaatggttttgaagttcaatctttttttaaaaaaaaagttgtatgaatgtattcaaaatttacatgaacact

SEQ ID NO: 888591 - DNA, 529 bp, Homo sapiens
gggaacatagagccaaactatgtcaggtaggaaggcaggattcaggaaaataaaattctctgtctgattaaagagttcactaaatcacgcctgtaatctcagcactttgggaggccgaggtgggcagatcatgaggtcaggagatcgagaccatcctggctaacacggtgaaaccccatctctactaaaaatacaaaaaattagccaggcgtggtggcaggcgcctgtagtcccagctactcgggaggctgaggcaggagaatggcatgaacctgggaggcggagcttgcagtgagctgagatcacgccactgcactccagcytgggcaacagagcaagactccatctcaaaaaaaaaaaaaaaaaagatttcactaaatagttgcatattcaaatacaagtcacttaactcaccccctcccaaattttaagtcatgcttcagtgtattatgtgtttattacaagttcatacggtgcttaaatcctagtcttcaatctagtaacctcactatgggtaatccttagtgta

SEQ ID NO: 888592 - DNA, 581 bp, Homo sapiens
acacctaggcacctaattgacctcacctagtcctggccctccccatgtgtgatagagtctgattttttactaaacatgtgtaaacagagaagataatagagaaacaacaaaatgtgtcctagtgaactttgatttttatcccccataaatttaggaacatgcttttttttcatcttttcattgagtactgtactaatcagaacagaaatagagaaaagaatgcactttcttctcgggaatgcaggtgccttgagaaagggaaaatctatgattgccatatttttattagmggttatttgagtccacagtaataaaaaagttatgaaattgcacagtaaattttgaaaacctttagaatataattgttttctctacttgctactgttagacttcatattcaatacaattcagtgcagttcagttcaattattaccactttgcttctcaaatatgcaaaggtcatttagttatctgggaaacttttcctaggtttgaagagttaatattcaaagactagctgagaggtggcaagctgtaggcatcattcacacattcagaaaccgtaccttgaacctccacct

SEQ ID NO: 888593 - DNA, 662 bp, Homo sapiens
actgactcttgacaactattagtcagtgcttcttccttcttatgttcaagcagcattgatttccttgtctttctgacatagccttgttcttaatactcagtctcaagacaaacaagagaaacagtttgggagcagccagccatgtttgagtcaatttcttatagttctttcatactgagaataggaactctgggtcaaagctattgagggccacaagaaataatgaaatgatgtcctgaaagttaattatttgacttccaygagacgatttagtgcaatgagagaagtacttatgaaatagcagtccaatagcatgcaagagtcaaagggcttccagggatatggaaaattcataaagatcgagtcctgggctcaatgctccaagctatggacaaaatggatttcctagctcaaagctgaatgatgtgtcttgaaaaagctggccttctttagagatgcatgacaaaaatcttagaaacttgaaactgtaatttgtaagaggttctccagagtggtatacagagagttagaggtttctgcaagagatgagactagaaagagcagaaaaggttaatagagcagtatcagcaggatcagaacactgctgaatcatagtgtgtattggtacaataaagaataagaacttagatacttagacacta

SEQ ID NO: 888594 - DNA, 600 bp, Homo sapiens
ctgtacagctgctgtcagtgaccaaagtagggttctcttttgttgatggcctgatttttggggcttggataaacacagatatagatagaagcacttacagtactctccactctccaagattcaagtaagtgtaggaggtgcccagaaaaacctccaaaatagctgattataaattgcctttgatattagcttgtctctgctgctgctatttttttccgccctaaatacagagacttgggaagttttgccagatttcttacagcgatcagctcagwactgagaagctcgtctgcacttactcttcactgtagtttgcctcataagtgcatgtgaaagcccttgtgccccccgacttcaagtgttctggctagaatttgctttgtgatctttgaaccaggtgggattagacaaaattatcgtgttagggcttcaccactgtgacaggctgctgactgtgattctaggtttagtggaggttttgtgttgtgctgggctgagttcggttgtgctgtgctgcgtgtgttttgctttcatttgtctactcagctaaattagagtgagttaagcctgaactattcatctcgccttatctacaaattc

SEQ ID NO: 888595 - DNA, 581 bp, Homo sapiens
attggactgctttatgatggcactgggctacagaacaagtctacatttctagtgcacaggatataagctgcattgcttttcattccctaaccttgaaatcatgcagcatcatttttaacatattctattagaaagacatcataagcctgcctagatccaaggagaagggaactggaccttaatgcataatgaggggtagcaaaattctaaagagcaagagggataggagctattgtcatgggcacctttggaaaatacaatctgtctcacagtgaaaaaggttgggggttgagaaacctgattatacctgaatacctgtgtgctgcttgttcctgcagccaacctaaaagctctgccctagtcccactaaatgagaaatcagcactttccccagcagtctctgtggtggtacacctggaaccactgtcaacaagctgcagacccytctctcctcacctctaagcacctctgagtcccactctgctcaccttcccccactgcctgacactgacacgatggccttttgcatgctgtcttagtttccagggcctgctgtatcaaaacccacaggctgattggct

SEQ ID NO: 888596 - DNA, 649 bp, Homo sapiens
tgctagcagctattattccagcatacttggtgtataggcaggcctaccttattatttattgtccaactcaggccctttgaaagtaaaagagtgatctgtaagtacagtaggataacaagcataaaccaagacagcctgacaaactggaatatgtagttaccctaactataagttatgttgtaggagatgtcgttgggaaagtgagttggggtcatttgttgattatttatctcttggaagcaaaaattaggcttattctgtcaaattttgrttttaacatctgcatgtatacaacctggctaggcaataatgataatcacaatagttactatttactgagtgcccactttgaggtttctaacttacattctcattgatccttacactgactctgcaaggtgcctattatgcctgtattcatgcccagtggctgcccaaaataatgactgcaaactttgtggcttaaaacaacagaagtttattcctcatagttctggctaaagtctgaaatcaaggtgtctatagggccacactctctctgaaggttctaaagggagaatttgttccttgccttttccagcttctggtggccacgtcacttcaatctctgcttctgtggtgatactgactccttctcctctgcatgtct

SEQ ID NO: 888597 - DNA, 611 bp, Homo sapiens
tcaggctagaattctcttccttgggtgctgaactccgttcctagcgtatggataggaagcaccagaaaatgccatccgcaaggccaggccccacaaactgacgtgtggtacagctgaggatggggatggcaaaggcagaaagccacagatgaaccgaaatacatggcagggccaggcccgtcaatcaggacaagccacgtacttgttccttccctgttagggcagatgtgctcgcacctcccggcctcggccccagagaagctactatctgctcccctaggcgccaacattccttatttgatccttgccatcaagcttttattctgatcaccaccccccgctatacagacacacatatacacatctatagctatttccacatytccacaccacattcacatcttccacatacacacacatccaaaagagctgcgtgcacttctgatggtcaaagcctatagcccattctcagctgccatctgtcttgcctgctgcaccacacacgtgcatacacacacacattctctctctctctctctctctctctactctactctgtccatcccaatactgcatcaactgtgaacaagccaggtactattaagtaagga

SEQ ID NO: 888598 - DNA, 611 bp, Homo sapiens
tcaggctagaattctcttccttgggtgctgaactccgttcctagcgtatggataggaagcaccagaaaatgccatccgcaaggccaggccccacaaactgacgtgtggtacagctgaggatggggatggcaaaggcagaaagccacagatgaaccgaaatacatggcagggccaggcccgtcaatcaggacaagccacgtacttgttccttccctgttagggcagatgtgctcgcacctcccggcctcggccccagagaagctactatctgctcccctaggcgccaacattccttatttgatccttgccatcaagcttttattctgatcaccaccccccgctatacagacacacatatacacatctatagctatttccacatttccacaccacattcacatcttccacatacacacacatccaaaagagctgygtgcacttctgatggtcaaagcctatagcccattctcagctgccatctgtcttgcctgctgcaccacacacgtgcatacacacacacattctctctctctctctctctctctctactctactctgtccatcccaatactgcatcaactgtgaacaagccaggtactattaagtaagga

SEQ ID NO: 888599 - DNA, 586 bp, Homo sapiens
tataattaaaaatagtcttgcgatagagctaccgattgtcctaatgcttttcctttttagggagccatcaatattgctgttaagatcacatatatagtgcactcatgattataatatttgaaatatctaatttttattatttggtaggcatcaagcactggggtaaagagtttaaaaccattatcttaaaacattttgattttcatacgaaccttaggaggccacagatgagaaaagtattttatatatagggagatttgataacgtacctgacgtgacaactacactcagatttctgtgattacagaaatcatgtgtgcccttcttaaaggacatttctaccatgtataaccatggacattgcagattaaaygatgttgaaatttcaagagtgtggcatagatattttcacataattttatcataaacttaataattgcacttacttttatttaccgttctaggtcagtaccattgataataaaaagagattagacagttatgaggacatgccctgtgctagacacagtgagaagtgactactttgtcctcttccatttcactcaatacatttacagtagaaacc

SEQ ID NO: 888600 - DNA, 604 bp, Homo sapiens
atttatatgttataattctgtcagaaagggagacccctcataaatgggacttgtgcccttgtcaaaaaggccccagagatctccctcacccattccactatgtgagggcacagtaataaggtgccatctatgaaccagaggatgggatctcaccagtcwcctcatctgctgctgccttgatcttggacttttcatcctccagaactgtgagaaataaatttctgttgtatataaaccactcagtccatggtatttcgttatagcagctcaaatgtactaagacatagaataaatgtgctacaacaaccaagttctaaagggaatctattaaaaaatctcgaattatgtatgctcatctgtacataattctaaagggcaactactttctttttgtagaaactaagactttccatacatataagagtaagtgagtttatgttctccctcccttcataagacaaagggcaccaactctgtagtttaaaagactatattgactttcagatttttagagaggtgccactatgaatccacagagcacttaataagggttttaaaataattaaatcagtagtaacaaagtaaaggccatcacagatgcaca

SEQ ID NO: 888601 - DNA, 604 bp, Homo sapiens
atttatatgttataattctgtcagaaagggagacccctcataaatgggacttgtgcccttgtcaaaaaggccccagagatctccctcacccattccactatgtgagggcacagtaataaggtgccatctatgaaccagaggatgggatctcaccagtcacckcatctgctgctgccttgatcttggacttttcatcctccagaactgtgagaaataaatttctgttgtatataaaccactcagtccatggtatttcgttatagcagctcaaatgtactaagacatagaataaatgtgctacaacaaccaagttctaaagggaatctattaaaaaatctcgaattatgtatgctcatctgtacataattctaaagggcaactactttctttttgtagaaactaagactttccatacatataagagtaagtgagtttatgttctccctcccttcataagacaaagggcaccaactctgtagtttaaaagactatattgactttcagatttttagagaggtgccactatgaatccacagagcacttaataagggttttaaaataattaaatcagtagtaacaaagtaaaggccatcacagatgcaca

SEQ ID NO: 888602 - DNA, 633 bp, Homo sapiens
actgattgagaccctgcaaactagactgataaaacatagattaacaagacaaaaacaatcaggagtttactaacactcacatcctacatacacataagaaaacccagtgatgagtcactctactgggtggtttgaacttgggcttctatagcatcttaacaaaagaacaattaattattacagtgatgrcaagagaaagaaaacggacatttagtttccagagcagcaaactgggagatagtaaacatatgaggctacaaggcaagggctagtgagtgaggtttgttaggtcaacttctgtggaccctacaggatgataaggggctagagttttttcggtgattaactcctgtccttctgggtagagagaaagggagacacctttacaaatgatgccctgccttaggcatatgggaagggtttgaaagattttcttgtattagcatattctcaattgtctttagcccaaaagaatccttatgccaaagtggcatattttggggtagcatgttctgtacctccaaagcttgaattgattttatttcttctctgactgtgcaaaggcactaaaatgcaaggatgcaaatcaaatctcaggctgtctctaagacacaggccaagggacagctttct

SEQ ID NO: 888603 - DNA, 648 bp, Homo sapiens
catgttgcccctggactttctcttccagtgccttgaagtagtcacttgggtttgtcaagggttgtgtctaaatcatatgattataagctcatgttcttctattccctccccctctttagagacagcgatgtggaacctttctttttctgcttgcttttaaaattgtacatttcacatacactgggaatgtttctgtagaaaacatrgaagtgacttaaactaataaggtgtctccagaagagaagaactaggagtctacggaagctgactttgtggatttcagaaaatctgcctgtatctgataaggcactgattggcagcagcagaagttggtcccagagccatctctctccctcacagagatgcttcctaccttgaaaagtcatatggacactaaaagctttaaaatgccaggaaaagattgaatttctgttgttactgtgtggtggtgatacgtgtatatccgtgtatatgcatacgtacgtgtgtgtattgaaaaatgtaaatgcacagtgggaaaaatttcattttgaatctcccccagaaagataatgtaaagcatttaaaggtgttatgattttagggagaaaagaataggatgaggcaataagtttctacacttttcttatgtacctgaaacaaaaagtt

SEQ ID NO: 888604 - DNA, 648 bp, Homo sapiens
catgttgcccctggactttctcttccagtgccttgaagtagtcacttgggtttgtcaagggttgtgtctaaatcatatgattataagctcatgttcttctattccctccccctctttagagacagcgatgtggaacctttctttttctgcttgcttttaaaattgtacatttcacatacactgggaatgtttctgtagaaaacatagaagtgacttaaactaataaggtgtctccagaagagaagaactaggagtctacggaagctgactttgtggatttcagaaaatctgcctgtatctgataaggcactgattggcagcagcagaagttggtcccagagccatctctctccctcacagagatgcttcctaccttgaaaagtcatatggacactaaaagctttaaaatgccaggaaaagattgaatttctgttgttactgtgtggtggtgatacgtgtatatcygtgtatatgcatacgtacgtgtgtgtattgaaaaatgtaaatgcacagtgggaaaaatttcattttgaatctcccccagaaagataatgtaaagcatttaaaggtgttatgattttagggagaaaagaataggatgaggcaataagtttctacacttttcttatgtacctgaaacaaaaagtt

SEQ ID NO: 888605 - DNA, 638 bp, Homo sapiens
cacaatgagatgccatctcaaacttgttagaatggctattactgaacaggcaaaaaataacaggtgctggtgaggttgtggagaaaagggaacacttaaacactgttggtgggagtataaattagttcaacaattgtgaaagacagtgtggcgaatcctcaaagagctaaaaataaaactaccattcaacccagcaataccattactgggtatataccaaaaggagtataagtcattctactataaagacacatgcacacaaatgttcactgcagcactattcacaatagccaagacatggaatcaacctaaacgcccatcaatagcacactggataaataagacatggtgcatgtacaccacrgaatactatgcagccatgaaaaaaaaaatcagatcatgtcctttgcaggaatatggatgaaactggaggccattattctaagcaaactaatgtgggaacagaaaatcaaataccacatcttctcacttattagtgggagctaaataacgagaacacatggaaatagagatgggaacaacagacactgggcctacttaagggtggaggttgcgaggagagagaagatcagaaaaaaatgcctactgggtactatgcttagtacataggtgatgaa

SEQ ID NO: 888606 - DNA, 590 bp, Homo sapiens; identical to SEQ ID NO: 883362

SEQ ID NO: 888607 - DNA, 590 bp, Homo sapiens; identical to SEQ ID NO: 883363

SEQ ID NO: 888608 - DNA, 633 bp, Homo sapiens
ttcttaaaataagacattaatgaagtttgtcatatccattgactcttcttttcttgaaagatttctctgtagcatgcaatgttgtttgatagcattttactcacagtagaacttctttcaaaaccaaagtcaggctgagcatggtggctcccaccagtcatcccagcgctgtgggaggctgaggtaggaggattgcttgaggccaggaatttgagactagcctgggccatatagcaagatccagtctctgcaaaaaaaaaaaaaaaaaaaaaaaaamaaacctgggtgtggtggtgtgtgcatgtagtcccagctactcaggaggctgaggtgagaggcttgcatgaacctcagcaatcctcactcaggaggctgtagtgaggtatgattgcaccactgcactccagcctgagcaagagagcaagaccctatctttaaaaaacaaacaaaaaatgaagtcagtgctcccaaaccctgctgctactttatcaactaagtttatgtaatatctaaatcctttgttgtcatttcaccacattcgcagcccattcctcaggagtagattccatctcatctcaagaaaccacagtctttgcttatctataagaagtcactcgttgtccattcaagctt

SEQ ID NO: 888609 - DNA, 602 bp, Homo sapiens
atcttgctggaagctacagaccagagctgtttttatttggccatcttctatttacatttatttttatatgtagttatatatttaaaactttatcttgaccacttgatttagagtaatggaaattggagaaatgtatacagtacagaacattctacattggctttttttttcctatttaaaatgcttaaacgttytttaactcaagaactttaattttgctaataacaaagattcttaagcttagtgtgaaacatggaaaggaaacgccagcagcctggttatgaataggatcagcagtgccatcttgtggtaaataccttgaattacaattagaggcacccgcatgggatctgggagactaagaaattctactctatgctcagtgatttacatagaatgtaaaaggtatttctcaccattttaagactttgggtttatataatcagaggaggttcttcctttacaaatgtggcaaagactacagttttctacaagaccttttaatgttgagcttttaatgttacatacaattacattaaatgttactgtatgtaatattaaaaactacagttataatttcaaaaagattatagtacatgaaa

SEQ ID NO: 888610 - DNA, 577 bp, Homo sapiens
gattaaataatgccgatttgtttaggcaatgctcacaagagaccgtggcggaaggctggaagggagatgtgcgtattctggccatccagcatctgaacctccttcctctgtttggagtatcctctacctttaagaggcaaagtctacttcccagagttaaagctcaaaatatcagatgatctgttcaccagccttctttgcagccaagccagggcttggccataccatctggtctttgctgatttgagagaatcccacccactctgggttcgaatcagaaaccagtgatgggaagaagcagggacacaggttcacagagactctgactatctacaggtgacagtrtggtggcagagacaattacatccagtttccagaggcaggagtggcaaggctgcctatgtccttcatggtgttttcctgggccagttccacagtatgatttttcaaccttgtttctggtagcagagccaattggccaagttctccagcattctgctaattctgtgggctcaccaatatctttgaaataaattccattttgcttagatcagccagagtcatttttgagtgctta

SEQ ID NO: 888611 - DNA, 622 bp, Homo sapiens
gccaaagtctttgtcaaaactccaaatttgttgataaaagattgtgtttgccattctcatttataatgcagtttctccttaagcctggagttttttgaatgagtgcatgagtaaatgagagaatgtgtgaacgaacatttatgaagtatctaacatgtgccaagcattgtgcctggcactttcaatcattagaatgttttatgtgattccacagcattttctgtatragagtagctcacaacattttaaatgtttccaatatgaatcgtgttacaaaattcttaattttatatttcatataaattaaagaggaaaaagaaaaggtttataatatattttaaaacaatgtgttactgtataatacaactataattgtagttaataactaaaacctcttgaaaatgtcaaagaaatacttgatttctgatgcaactttgactaaaatatttactttagaaataaaaacgttcttattttgctatatcactttaattgcataattaaaaagcagtgttttatagaaatgctggttattttatattcaaaaagattttgtcacataattcatgggtaaaacttgcagttgtaaattgtgtctgctctggtatgggccctattaata

SEQ ID NO: 888612 - DNA, 622 bp, Homo sapiens
gccaaagtctttgtcaaaactccaaatttgttgataaaagattgtgtttgccattctcatttataatgcagtttctccttaagcctggagttttttgaatgagtgcatgagtaaatgagagaatgtgtgaacgaacatttatgaagtatctaacatgtgccaagcattgtgcctggcactttcaatcattagaatgttttatgtgattccacagcattttctgtatgagagtagctcacaacattttaaatgtttccaatatgaatcgtgttacaaaattcttaattttatatttcatataaattaaagaggaaaaagaaaaggtttataatatattttaaaacaatgtgttactrtataatacaactataattgtagttaataactaaaacctcttgaaaatgtcaaagaaatacttgatttctgatgcaactttgactaaaatatttactttagaaataaaaacgttcttattttgctatatcactttaattgcataattaaaaagcagtgttttatagaaatgctggttattttatattcaaaaagattttgtcacataattcatgggtaaaacttgcagttgtaaattgtgtctgctctggtatgggccctattaata

SEQ ID NO: 888613 - DNA, 615 bp, Homo sapiens
ttattattattatactttaagttctgggatacatgtccagaacatgcaggtttgttacataggtatacatgtgccatggtggtttgctgcacccatcaacccatcatctacattaggtatttctcctaatgctatccccccaccagcctctcacccccataactggccccgatgtgtgatgttcccctccctgtgtccatgtgttcttattgttcaactaccacttatgagtgagaacatgtggtgtttggttttctgttcctgtgttagtttgctgagaatgatggttttcagcttcatccatgtccctgcaaaggacatgaactcatcctttcttatggctgcataatattccatgatgtatatgtgccacattttcttaatccagtctatcactgatgggcatttgggttggttccaaatctttgctattgtgaatagtkctgcaataaacatatgtgtgcatgtgtctttatagaatgatttataatcctttgggtatatacccagtagtgggattgctgggtcaaatggtatttctggttctagatccttgaggaatcacacactgtcttccacaatggttgaactaatttacactcccaccaacggtgt

SEQ ID NO: 888614 - DNA, 604 bp, Homo sapiens
tggttatttatattcaggtgacaggtgctaaggattgtttttggccttccctacttgctctactgctcagagtatcccaagagtctatgtctctagcttttggtcactattttttttttaatctcatcttatagaatagtttggtaaacatctacacaaaatttctrtagtttttattaaagaaatgacaactagtgtatacctgaagacattttgaattgttcctttgattaaaaaaccttcagtaaaatacggaagattgagaattccaacttagaaggtatttaaattgagtacttcttgccataaacaagactaggcattgagatagattgaaaagaagcctgacatacaacagaaaggtgaaactacagtcccagacacaactaaaattactgtgtgaggcctgatacaacagtacccactgctcttggagtgtttgggaaataatataaacaaggacataagaagtttaccgtgtaattctagacatggaaaataattagtgagtttagcagcaactaaagtgcaaaatataggagatgccataaagcagaatgtgattaacttccaaattaataatatagagctgctgctctaggaa

SEQ ID NO: 888615 - DNA, 613 bp, Homo sapiens
tagggatcaatgtgagaaatcctctgggatacatccccaggagaaagatggatgagatgctggctatactcacacattattcttctcactactatcagatggtaaagcaaatattttaaagttctggtttctatttgacctcctaactacacaaaaatctcgaatcaatgctccttggtttcatctctcactgttccaaaatttcctgtataaatttgyttcttcctacttgtcatcttttatagaaccacattatgacctgcagacattttgctgcatcaaaaataagactgggtttacttttaaaatggtgagctacatttattagaattgatacggattgagatgctgcaatatgattttttaaagtcatttcttgatcattaaacactttaatttgctgcatttcaaatcatactatctgtcccaggttagatgtagttcatgctgagaaatgtgggtaaagaattcaagtccattttaaaattctccaattctgcaggaaaccctgcaatgattcttgtatcacgaacagttatacctcttagcacgattagataaaagctatgaaatatgattctttcacagacagttttggtaagacactttataa

SEQ ID NO: 888616 - DNA, 613 bp, Homo sapiens
tagggatcaatgtgagaaatcctctgggatacatccccaggagaaagatggatgagatgctggctatactcacacattattcttctcactactatcagatggtaaagcaaatattttaaagttctggtttctatttgacctcctaactacacaaaaatctcgaatcaatgctccttggtttcatctctcactgttccaaaatttcctgtataaatttgtttcttcctacttgtcatcttttatagaaccacattatgacctgcagacattttgctgcatcaaaaataagactgggtttacttttaaaatggtgagctacatttattagaattgatayggattgagatgctgcaatatgattttttaaagtcatttcttgatcattaaacactttaatttgctgcatttcaaatcatactatctgtcccaggttagatgtagttcatgctgagaaatgtgggtaaagaattcaagtccattttaaaattctccaattctgcaggaaaccctgcaatgattcttgtatcacgaacagttatacctcttagcacgattagataaaagctatgaaatatgattctttcacagacagttttggtaagacactttataa

SEQ ID NO: 888617 - DNA, 613 bp, Homo sapiens
tagggatcaatgtgagaaatcctctgggatacatccccaggagaaagatggatgagatgctggctatactcacacattattcttctcactactatcagatggtaaagcaaatattttaaagttctggtttctatttgacctcctaactacacaaaaatctcgaatcaatgctccttggtttcatctctcactgttccaaaatttcctgtataaatttgtttcttcctacttgtcatcttttatagaaccacattatgacctgcagacattttgctgcatcaaaaataagactgggtttacttttaaaatggtgagctacatttattagaattgatacggattgagatrctgcaatatgattttttaaagtcatttcttgatcattaaacactttaatttgctgcatttcaaatcatactatctgtcccaggttagatgtagttcatgctgagaaatgtgggtaaagaattcaagtccattttaaaattctccaattctgcaggaaaccctgcaatgattcttgtatcacgaacagttatacctcttagcacgattagataaaagctatgaaatatgattctttcacagacagttttggtaagacactttataa

SEQ ID NO: 888618 - DNA, 682 bp, Homo sapiens
catggaattagaaatattatcttgacctaaaatagtgtccaagcaacagtggctgtttagtaaacatttgttgcttcaattggattatcctagagcattcagacatttactttagaactcccattgtctttaatatgtttgaatactacccccaaatcaaaattctctcctttttgaaagaactttaatgctagtaaagtgggcttacattgcacaaagttataaagaagatgaaagtttcttagcttcccttaccccattccctgtagaggtgcctagggcatgtaagtgtggataatggtagctattcattttcagtttttaaatgctgcactctttacagttattgtggaaattagcttatattgataatgctcagttatgtcagagattataaaarttaggaagatgaagataaaataagcttacattaatcagaagtgattattcagaatgaagtatgttagttctaagccaataatataatattttgttattacatactgaacatcaattatgtacatgaagtgtacataattgtctatttataagtcctgcctaggggtagtttaattctatggccaagctgctagagattcaattgatgcagtgcaaattaatggtcaatgctaataacacaaagtttatgagatttagatccaaaacagaggctgttacaaat

SEQ ID NO: 888619 - DNA, 665 bp, Homo sapiens
tgggccacatggatttttgaattcagagttgttccaagtgaagtcaacaagccaattgtaagtaaacaggctttgcttgttacgaagtgaggggagtgtctgcattaatatccctagaaaagggagagaattggttcatcactgatacaygaggaatgagttttcccaaaaaagctgcagtagtataggcccagactacagtgcaagaactgaagctatctggacaagccagttgtactggaggtagtgaggatgagacccaaaggctagaagtagggggtgcagtcatcaacagtattaacagtagcagtatggactgtctgcctgaaataagagactctcctaggcatagaagaataaggaagtgctgtggcaagctggcgagaagtgagcaggtcaggattctagctgttatattgttggaaagttaaccatagagtcattggttctgttgccatagtagatactcattataagccctcagttgtagtttcccaggtgttatctatgatataacatgatggctgtcatataatttatgatatacatgatataacaatctatactgccaaataaaacaaacttctgtgtttctctggcatccttctgctagcattatttctctgtcccttttgatagttgaatttctaggaagtagtctctat

SEQ ID NO: 888620 - DNA, 665 bp, Homo sapiens
tgggccacatggatttttgaattcagagttgttccaagtgaagtcaacaagccaattgtaagtaaacaggctttgcttgttacgaagtgaggggagtgtctgcattaatatccctagaaaagggagagaattggttcatcactgatacacgaggaatgagttttcccaaaaaagctgcagtagtataggcccagactacagtgcaagaactgaagctatctggacaagccagttgtactggaggtagtgaggatgagacccaaaggctagaagtagggggtgcartcatcaacagtattaacagtagcagtatggactgtctgcctgaaataagagactctcctaggcatagaagaataaggaagtgctgtggcaagctggcgagaagtgagcaggtcaggattctagctgttatattgttggaaagttaaccatagagtcattggttctgttgccatagtagatactcattataagccctcagttgtagtttcccaggtgttatctatgatataacatgatggctgtcatataatttatgatatacatgatataacaatctatactgccaaataaaacaaacttctgtgtttctctggcatccttctgctagcattatttctctgtcccttttgatagttgaatttctaggaagtagtctctat

SEQ ID NO: 888621 - DNA, 665 bp, Homo sapiens
tgggccacatggatttttgaattcagagttgttccaagtgaagtcaacaagccaattgtaagtaaacaggctttgcttgttacgaagtgaggggagtgtctgcattaatatccctagaaaagggagagaattggttcatcactgatacacgaggaatgagttttcccaaaaaagctgcagtagtataggcccagactacagtgcaagaactgaagctatctggacaagccagttgtactggaggtagtgaggatgagacccaaaggctagaagtagggggtgcagtcatcaacagtattaacagtagcagtatggactgtctgcctgaaataagagactctcctaggcatagaaraataaggaagtgctgtggcaagctggcgagaagtgagcaggtcaggattctagctgttatattgttggaaagttaaccatagagtcattggttctgttgccatagtagatactcattataagccctcagttgtagtttcccaggtgttatctatgatataacatgatggctgtcatataatttatgatatacatgatataacaatctatactgccaaataaaacaaacttctgtgtttctctggcatccttctgctagcattatttctctgtcccttttgatagttgaatttctaggaagtagtctctat

SEQ ID NO: 888622 - DNA, 623 bp, Homo sapiens
ggggcaatgctgtctatttgttttctgttttaagttttataattaccactgtctcttcatcctctattttacttatttgaccaggtaatttttcattatagttgttcaaataacttaattgcttccctgtatttacttcaaagagcttctgaaaatcacttccttctttacaaagataattgaatgaatttcaataataataagatgttattacacaggatctgtgatatatttaacagtcttgaatttgactatatctgatttagtgatgctgataattgactgagttccagtgaaaaccatatctttatctgaacttaatattccttaataytgtgaaggaaccaatcatttgtaatggctattatccctatcaagtctctaaagattttcaaatcattatggagatgttcatcaacccttatcacaatctcattatccttatattactttacagtattttttactgcctttatttttcttttatttgaatttgccttccttaatctggttacttcatataatacattaagaatttcttaaaaccattctgattttgtttagtcactgcattttgaaaacatattggtatttgttgcatccaatgaaaaaatgctgccttt

SEQ ID NO: 888623 - DNA, 623 bp, Homo sapiens
ggggcaatgctgtctatttgttttctgttttaagttttataattaccactgtctcttcatcctctattttacttatttgaccaggtaatttttcattatagttgttcaaataacttaattgcttccctgtatttacttcaaagagcttctgaaaatcacttccttctttacaaagataattgaatgaatttcaataataataagatgttattacacaggatctgtgatatatttaacagtcttgaatttgactatatctgatttagtgatgctgataattgactgagttccagtgaaaaccatatctttatctgaacttaatattccttaatactgtgaaggaaccaatcatttgtaatggctattatccctatcaagtctctaaagattttcaaatcattatggagatgttcatcaacccttatcacaatctcattatccttatattactttayagtattttttactgcctttatttttcttttatttgaatttgccttccttaatctggttacttcatataatacattaagaatttcttaaaaccattctgattttgtttagtcactgcattttgaaaacatattggtatttgttgcatccaatgaaaaaatgctgccttt

SEQ ID NO: 888624 - DNA, 607 bp, Homo sapiens
ttgacccacaggccatcttcaaggtgtggaagccaaaatggaccagaagtaatttctatttcctgccagatagaacacaagcaggagccgtagttgccaaaaatgcccgcgcacacaggctagtggtctctgaccctccyagggcactgcttgggttggaatggcggcgctcacgcaggattccttcaattctgcactgtcacaagcccacagggctggagaggctggcagcacaaagaggaatgagactcgcttgctggtctcatgaagttcacagcctagttggggagcctgcaagtaagaagacaatcccgatgcaggagggcaggcgtgtgaccccgaaacagtgtagagaaggagcctgcagcctgtggtgggggagggtggtgctgagcggtccaggagagacctgacacatagcaggattgaagatgatttgccaggcaggctgaggcagtgagcagggcaggagaggaggcagacacgtgccgaggagctcaaggcacattaaacgaatggatgaatgaaggaaaactagccatgctgtgtttaaggaaaacaactgctggtaataactgagttgggcaatgaaattaatggtgtgaat

SEQ ID NO: 888625 - DNA, 611 bp, Homo sapiens
atatacttacccttttctacttggttttctacactgtcatgcccatctttgagtggtgttttcactttaaccttttttgcatactcacaaatgaatcagcatgcactctccatcctatgcctataaagaccccagactcagtaagtggagggaaagatgacctgactttggggaagagacaacctgactttgggaaatacgacctgtctttcctgtcccctctctatctccctttttcactgagagctgtttttattgctcaaaatttctccaccttaagcatccttcaacaatccatgtgatctcattcttcttggattccagataagagctcargacccactgagtgtgggtacccagaaatgctgtcacaccagccctttgcccttgtgggtgaaggtaagctgcccaatgcaatgaggcaaggggccaactgagctgctaacacaatcttgtctgtggataaaggaactaaagaagcaatgtcacacactctctggggattcagggtcatgggcatcctcacattggcatcactccactcctcttgaggtgacacacatggtctggctgtggtccccacacagagcttgctccagtgtcagtgcctg

SEQ ID NO: 888626 - DNA, 624 bp, Homo sapiens
attctgactggcgtgaaatggtatctcattgtggttttgatttgcatttctctgatcagtgatgttgagctttttttcataagtttgttggctgcataaatgtcttcttttaaggagtgtctgctcatgtcctttgcccactttttgatggtgttgtttgcttttttcttgtaaacatgtttaaattctttataaattatggatattagacctttgccagatgggtagattgcaaaaattttctcccattctgtaggttgtctattcackctgatgatagttttgtttgctgtgcagaagctctttcagtttaattagatcccatttgcaaattttgacttttgttgcaattgcttttggcgtttttgtcatgaagtctttgcccatctctgttttctgaatggtattgcctaggttttcttctggggtttttatggttttgggctttacatttaagtctttaatccatcttgcgttaacttttgcatcaggtgtaaggaaggggtccagtttctgttttctgcatatggctagccacttttcccagcaccatttactgaataggagatcctttccacattgcttgtttctgtcaggattgtcaatgttgtagacggttgtaga

SEQ ID NO: 888627 - DNA, 622 bp, Homo sapiens
ttggaggaggaggactgagaacataaggactggttgaaaattatcattatcagatttagcaatgctgttgaaagggcatgtaagaagcagttatcaccccagagtctctctcccaccagctcaaccaagaaactgcccctcccyaaacctagtggaaaacaggaagttcattttctgggtgggggcactctggattcaagaacacccatcatagctgagtatcggctccaaaagctagagattttggtccgttttggttactgatgtatctcaagtatctagagatgcctggcatttaatagccacctggtaattattcttcaagtgcatgcatgaatgaatgaaccttattatacacagggaaattaatcaaaagtttgcataacgaacactgaaagcttccagcttccttcttgggctgagcttccaaaatgctgccagtcagaatcatatcccctaagcaggagattataggattcatgggatcagtggtgggaactcacatataagtaaaagggcttacagctattgacatttggggctttccccatcaaaataaagtgatccttgcctagtcactccctgtgggacctacccaccaagccctgcccaagggaattat

SEQ ID NO: 888628 - DNA, 602 bp, Homo sapiens
gcattctttccctagcttcaattcatgcccttctcatatgcaaaatacattcatttcatcccaatagcctcaaaagtctttacacattccagcatcacctcagaagtctaaaacccagagcatcatctaaagatcatctaaatcagatatggagagactcaaggttccctttattctgaagcaaatagctctccagctgttgacttgtgaaatcaagcatgttatatgcttccaaaataaaatggcgagataggcataggatagacatgtccattccaaaaaggagaaataggaaagaaggaagaggtaatgggtcctgagcaagtccaaaaccttaagggtcaaaaataacttctttggcgtgaaactgtgccgtctgggcactctggagcagtggctctgtcttccaggcccactgggatgatggccctgtcttctaggcttgggtgkctccacccatacggcagttccctgcagtaaccccacctctgcagcagcaacgtgcctgggtcgtgtccctgtggctctcctgggctggaattgcacatctatagatatactggtctgaaatttaggggacaccaccaccctcaaactggttt

SEQ ID NO: 888629 - DNA, 614 bp, Homo sapiens
atctgaagccatttaaaagttcttacagacacaggattcaagaatcaaacctatgcttgccagtttggtaatgagtctttaaatatgatgtcactcttgaataaaaacatttaggttattctttttgtgtattcttgagtttgtagtctggaggttttgactttataactcaccactcagctctattccagattaaaatcattatgtcagagctgagaattacttttttaccatgactgcctgctatggtctgaatgtttgtgttcccctccagagtttgtgtgttcaaatccttaccctcatgggaatggtattaggagttggggcctttggagaagtgattaggtcaggaggttggagccytcatgactggcattagtgcccttttaaaataagctccagtgatctcattagccacttccaccatgtgggaatacagtgagaaggcacattttatgaaccaggaaattggccctcactagacaccatatctgctggtgcctggaccttggatttcacagtctccagaactgtgagaaataaatgtttgttgtttataagctacccagtttaaagtatttgttatagcagcctcaatggactatgaaactgag

SEQ ID NO: 888630 - DNA, 653 bp, Homo sapiens
ggggtctaccagttctctaacgcaggattctaccccaaggtcatgaggcatggcacccctccccattatccaactagccccagcctataacccctactgctcattgaagtaagcccaaccagtactaccaggagtggagccccttatcggcccttaaaatgaaasctgtgtccattgcaggaggtagctggcagggagaagggaacacttagagtacattatgccattctgtgtgtctgatttggctttatgcagggagaaatttggccagttttcagataacccagggaagtttatagaagagtttgttaagttgaccatgttcttcaatttaacttggcatgactagcatgtatggtcatccacttgctgtgagtggagaagcagaggattctgcgtgctgactgtgagtatgcagatggagcagccacatgtaatgaaggccatgcatagttattgtatcagaagttcctgatctggacccttagtgagataaccaggatggttcccaagatcttgaatgcagaaatcacatggtaacatgtttaatatatttaaaaacatgcttcgttaagccagttaaacatgacaaaattaaagaagtaactcgggaaagacaaaagtcctgctgtgtttcagagcctttttgttga

SEQ ID NO: 888631 - DNA, 624 bp, Homo sapiens
aattaagggaaggtgatattataataataaaatatctgatataggaatgggaggttctttttgacactgttccaaaaagtaatcacttaatgatagaaaaaattctggttactaaaaataccataaaataaaagtgttctttattttgggaagggcttcaaaatcatcaattgtatttcatattcactccaagttgtaaaaactatcttggaataagtgtatctgtattattacataatttccataaatggaaaaccacctttccccctcctctaagctttaataaaacaagcaaatatacatctcaatggcagattaaggctttttttgtagctaagcctaattaaaatggcaacattccaatggtttctttaccagggagcaaggacatctgcaagggataaaaagatagcaagcattttgatgcatttgtttccagtgtttaaatgtggcracagaaaacagggattgatactggctaagttacaagcaacatttgagttaaatgttttaaaagagtacaggaaatcaaagcagttatataaattgtgattttaggttgttgttttgcctgctatttctgcctgttttcagtagcatagacttccccaaatcgtgtcccag

SEQ ID NO: 888632 - DNA, 594 bp, Homo sapiens
cagaatctcatatgcagccaaactaagcttcctaagtgaaggagaaataaaatcctttacagacaagcaaatgctgagagattttgtcactctaggcctgccttacaagagctcttgaaggaagcactaaacatggaatggaacaaccggtaccagccactatgaaaacatgccaaatggtaaagaccaaggacactatgaagaaactgcatcaattaatgggcaaaataaccagctaacatcataatgataggatcaaattcaaatataacaatattaaccttaaatgtaaatgggctaaatgccccaattaaaagacacagrctggcaaattggataaagagtcaagacccatcagtgtgctgtattcaggagacctatctcatgtgcaaagacacacataggctcaaaataaagggatggaggaagatctaccaagcaaatggaaagcaaaaaaaagcagggattgcaatcctagtctccgataaaacagactttaaaccaacaaagaacaaaagaggcaaagaaggccactacgtaatggtaaagggatcaattcaacaagaagacctaactatcctaaatatgtatgta

SEQ ID NO: 888633 - DNA, 594 bp, Homo sapiens
cagaatctcatatgcagccaaactaagcttcctaagtgaaggagaaataaaatcctttacagacaagcaaatgctgagagattttgtcactctaggcctgccttacaagagctcttgaaggaagcactaaacatggaatggaacaaccggtaccagccactatgaaaacatgccaaatggtaaagaccaaggacactatgaagaaactgcatcaattaatgggcaaaataaccagctaacatcataatgataggatcaaattcaaatataacaatattaaccttaaatgtaaatgggctaaatgccccaattaaaagacacaggctggcaaattggataaagastcaagacccatcagtgtgctgtattcaggagacctatctcatgtgcaaagacacacataggctcaaaataaagggatggaggaagatctaccaagcaaatggaaagcaaaaaaaagcagggattgcaatcctagtctccgataaaacagactttaaaccaacaaagaacaaaagaggcaaagaaggccactacgtaatggtaaagggatcaattcaacaagaagacctaactatcctaaatatgtatgta

SEQ ID NO: 888634 - DNA, 611 bp, Homo sapiens
agggattgcaatcctagtctccgataaaacagactttaaaccaacaaagaacaaaagaggcaaagaaggccactacgtaatggtaaagggatcaattcaacaagaagacctaactatcctaaatatgtatgtacccaacacaggagcacccagattcataaagcaagtccttagagacctacaaagagacttagactcccacacaataataatgggagactttaacacctcactgtcaatattagacagatcaacgagaaagaaggttaccaaggataaccagracttgaactcagctctggaccaagtggacctaatagacatctacagaattctccaccccaaatcaacagaatatacattcctcccagcaccacatcacacttattctaaaattgatcacataattggtagtaaaacactcctcagcaaatgtaaaagaacagaaatcacaacaaactgtctctcagaccacagtgcaataaaattagaactcaggattaagaaactcactcaaaaccacacaactacatggaaactgaacaacttgctcctgaatgactacagggtaaattacaaaataaaggcagaaatgaagatgttctttgaaa

SEQ ID NO: 888635 - DNA, 567 bp, Homo sapiens
ataaacatctatatgcaaataaactagaaaatctagaagaaatggattaattcctggacacatacaccctcccaagactaaaccagtggaagaagttgaatctctgaatagaccaataacaggttctgaaattgaggcaataattaatagcctatcaaccaaaaaaagtccaggaccagatggattcacagccaaattctaccagaggtgcaaaaaggagctggtactattccttctgaaactatttcaatcaatagaaaaagaggatatcctccctaactcattttatgaggctagcattatcctgatagcaaagcctggtagagacacaataaaaaaagagaattttaggccaatatccctcatgaacatcaaygcaaaaatcctcaataaaatactggcaaactgaatccagcagcacatcaaaaagcttatccaccacaatcaagttggcttcatccctgggatgcaaggctggttcaacatatgcaaatcaataaacgtaatccatcacatcaacaggaccaaagacaaaatccacatgattatctcaatagatgcagaaaa

SEQ ID NO: 888636 - DNA, 581 bp, Homo sapiens
aaccacctctaccccattttttctaccttgagtctcctttaaagtatcatctcttctgagacttttctttatttccttaattgacaccaatgctttcccccacacctccctattccgttatagcatttatcacagaatactctgataactggtttacatattttaaaaggtaagggcccaaacatatttactccctgtatccctattggattagttgatgtccaattaatataagatataggatgtagccggaacttaataaaaactgaatcaatgagtctaacctaagcactcttgccctggcttctattcattggcttaaatccctgaaaccatgtgaaaagtatgtatatattgtttargatgttgggactcttttatttttattgaaacaccaatgtgatagtctatctttcatgtcctttgtaatcccacgtttcagataacagataccaaaagaaactcagagaaccagatccaggactcttgggatccagggcagatcaagagaataagaaaggataagaatgtagagaaaacaaaggatgtacgaagagagcagttactgtcttggagattct

SEQ ID NO: 888637 - DNA, 691 bp, Homo sapiens
atataattatataaataaataaatataaacaggcaattcacaggaaagaaaacctgagaagacaataaatatatgaaaatgtgctcaaactcattaatatctgcagaatgcaaattataacactaatgagaaaacatttcacatccatcaaatttatgaaaattcaaaagtttggcaatgccaagtgttggtaaggatatgctggtaggagggtaaattaatactattactttgaaaaacaatttggcattatctaggaactctgaagatgctcatactctctccaaaatagtgttttagagaaactytaactcttgtgcatgaggaaacatgtgtaataatgtccattgcagctgttttcctgggagcaaacatttggaaatgatttaaatatctatcaatagaaatgaataaatttcaatatattttctggaatggaatatgtttaatggaacacttaaaataaatgtggaaaacttcaaattgagagaacaacaaatactaatattgataaaacacacactgcagaatgatacagacataggaccattcagataaaatcttaaaatgtgcaaaattttgctatttacagtttagggatgcatacatagatagtaaaagtataaaataagcatgagtactcagaagagaagcagaagaataggaccggcgcaatggtaccctgtggtct

SEQ ID NO: 888638 - DNA, 567 bp, Homo sapiens
gggttacaatcacaggatagaaatggggagctgcagcaaacaaggatcagaagggtaaggagagaagattcctgagcccatcttaagaaggactattgaaaaatacaatcggtggactcaggagagagcgagttccttgctactgcaaatgcaaaagcagaaactggcctctaaggcccctattgattttgagattctagaaggtgtaagtcaagatgtagaaaagaggatggcccagctctcagggcagcagagctgtaactatgatgtttttgtttcccgggtgcctcaagacctactagccyctgaggctcaggaagtggttggttcagctttattcttagttggaattttttgccgtaagtcaaagacccaagtggaaggatggaaggatggaaggatggaaggatggaaggatgtgggagatgacactgtaggaagtcgcagaggaactcagagtgtgacttgggaggtttcctcagccctgaaccccatggtcttgactgagtggcaatgattgccacagaaattttaccccggttggctcagttcccccagaatagcaaa

SEQ ID NO: 888639 - DNA, 569 bp, Homo sapiens
tgtgatgtaagaatgtggtcttacagaagaagaaattagggcccaataggattaaatggcatagctgagattcttactcatcctctaaccaaaagtgcagagcctccttttactgtagcagacttctgactacctgtcaaatcatattattttagtgtaatgtggtcatttgaaaggctttgatgaacattcctttatgatacagggatatcacaggtccagcgtattatcccaacctattccaatataaaaaagcattaggtttagcattggaagacctacacaccagtctcacctgcacatgytatgttagttctcatttctttttcatagttactccaacaataggagttgtgtgtttttacttttccttgtgtacctcacaggattgtttatgaatctgaattgatatttgaaaaaaaatccctaagtacgctaaaacgttttacatattatcatcagtttcagaggcacaaaaggattaaataagctagggtcttaccagtcatgtcctgtatgcatgtcacaagtcttaaagggaacaaagccagaaaatgtcaattaagatg

SEQ ID NO: 888640 - DNA, 685 bp, Homo sapiens
tttctttttgagacggagtctcactctgctacccaggctggagtgcaatggtgtgatctcggctcacagcaagctctgcctcctgggttcatgccattctcctgcctcagcctcccgagtagctgggactacaggcacctgccaccatgcctggctaattttttttattattattttttagtagagacagggtttcaccgtgttagccagcatggtctcgatctcctgacctcgtgatccrcccacctcggcctcccaaggtgctgggattacaggcgtgagccaccacgcccggccaataatcactattctgactggcatgagatggtatctcactgtggaattgatttgcttttctctaatgaccagtgatgatgagctttttgtagtatgtttgttggctgcataaatgtcttattttgagaagtgtctgctcaaacttttgcccactttttgataggattcttttttcttgtaaatttatgtgagttccttgtagattctggatattagacctttgtcagatgtgtagattgcaagaattttcttccattctgtagaaaaacctatacttctttctccagcattttctaatattagatctctgtccttccctgcatttagggcaaaagggctatctatactcactaccctctaggatagggccctattaaataaaaaatcc

SEQ ID NO: 888641 - DNA, 546 bp, Homo sapiens
atatgagagggatttgacccgctattgctagctttgctgatggaggaaggggctgtgagccaaggaatgtgggcagcctccagaagctggagagggccctcagctgacagccagcagggaatggagccctcagtcctgtaatggcaaggaactgaattctcccaacaacctgaactacaaaggaagccgatccttctctttgagcctcaagaaaggaacacagccctgtgaataccttgattttagcctagtgagacccgtatcaaacttctgacctccagaactgtaagataaatttgtgtaatttagctgttatgtttgcagtaatttgttgcagcagcaatagaaaactgatacggggctctgctcaratgtgtctgggaaacgacgctatagaacatattgatcatcttgttatggaacagtcataataaaaacaaaaccaataataaaacattaattgaatcaaagagcagataacttgttcactacaaagagaaaagctgacactgcactgattcataattctgtgttctgatagcatca

SEQ ID NO: 888642 - DNA, 611 bp, Homo sapiens
ataggaattcagttccccaaagtaagttgaacatcatagatttaggcacaaagttaggaaggcttaagaaaaagcccaaccatgaatggacttagttgtttagcagaaaatgccttcgaggttaccctactagtctatgtatactggtgcctactcagggggcgcaattgattttctgtacactgctaggaaactaaaaacaccagaaaagatagaagatggtctgatagaatctgttaaagaagagaatgggcatggtacagtgctttgtgcaaataggaaatgtggatctaatgtagagtcacaaaatgacagtgggagagtgtgagttcacagtaattctcaaatgactcttcagggcagagaaaggcagctattmtcagaatgagaggctgtttctaggggcccaagtgtttgggtcaattggataattcactggagttaaaaccttagctgcaataaaacacccctcaaggacagctgacatcctgtgctctgatttcatacttaacaagccccttctgtgcactagtttggtttcttacatattttttattacaaaaatattcccttggtagtggacatgggcattccagtcaatagaaagaaac

SEQ ID NO: 888643 - DNA, 655 bp, Homo sapiens
agtttttttccgtggtatttggctggagtagagaaattattatctaaaagttttctgtcttgtttggctgctcctaccaccatcctttggccagagacagcaggctttggttgggacttttcttgcctgtgtctttgctattttgggatttgcagtttcttcagcaacaagtctgttgcatatgagtcaaaaagaaaacttagggaactcaccgccttgttttctcttgggtgccaagatccctagtttgtctgccttctctctaccattcatagttttactactttgttttatttataatgtccatcatttttagttttaattaatgcaggaaaatggrctttgtcttcctaaaagtgggtttctttacaaatagataaaattttactctggcttttcatcagagtgcatcttatttctttttcttgactaatattcctgactagaatatctagttcacctttaaatagaaatgatgaaggcagatatctttgtcttattcctggtcatagagaaaaatcatccacccttttgatattaagtatgttagctgtgggttttgtggatactctttatccacttgtaaggggttatttttatttctcatttgatgagtgtttttattatacaaagacgttggattttgtcaaatgcc

SEQ ID NO: 888644 - DNA, 660 bp, Homo sapiens
tctcaaagaaataagtcattcctgagagagcaagaactcactcactcccagggaaggcattaatccgtttatgaaggatccacccccacaacccaaacccctcccactagactccacttcccaactcaactccgccacattggggatgcaatttcaacatgagttttggcagggacaaatcacatccaaaccatagcatttggttttcygtatgacccctataattcctagagttagtctgtcaaattataagaacaatgctatagagacttttactaaaattgcattaaaatttgtttaacttggagacatctaacatctttatgctaatgatttttctctatccatatatatgttatatcttaccatttatttaggtcttctacctgatttgttcataacaatttgaaattttacatatattagacataaattcttttcttagatttttttctcacatattcataattttacttgctattttgaatgttttctttttaaattttatttttggccattgctagtgcataggattttttttacagagatctcatacgcagtaaccttgtcaaactcatatatctttacttactataaacatatctaagtttcctgccctttcactcgtaattctctattatctatttatagcataatggt

SEQ ID NO: 888645 - DNA, 716 bp, Homo sapiens
ctgttagatgaggtaatatgacatcatcttaagggccactaaaaacctgactctaggattcaccaagtcctaggattgtattctgtctctgccaggtatttgatgtatagattttaaggctcattttcctctatacaatgggaacaatagtagaactatttccatggtagccatggaatagaatgagatattataactacagtcattccagtaatttgctaatcattcttctgatgatttagttagggagttagagcttttaaaagatagctgtttgttttattgtaagaaaatatacctgagacctctgttgagaggagtcaggaagggagactattttagcatctgtttcacaaaaatgatacctgaacttttgtaaaaaagaaaaaatcttcgaacacttaaagatctccattccctttttttgtcatgaaataaataaattgtccactagaaagktggtaaacaaagcagtagcagattgtaaactctaaatgcatagtgaatttccatgtttaggaattcatgccctccaaataatcatagatttatataatcatacagctaaggatatattaattgcagtattatttctctaaaatgtattgaagcataatatatacacagtaaagtatacaaatcagatgtacacagttcaaattattttcacaaagtgaataaatgtgttcacccagctcaagatacagaacaactct

SEQ ID NO: 888646 - DNA, 716 bp, Homo sapiens
ctgttagatgaggtaatatgacatcatcttaagggccactaaaaacctgactctaggattcaccaagtcctaggattgtattctgtctctgccaggtatttgatgtatagattttaaggctcattttcctctatacaatgggaacaatagtagaactatttccatggtagccatggaatagaatgagatattataactacagtcattccagtaatttgctaatcattcttctgatgatttagttagggagttagagcttttaaaagatagctgtttgttttattgtaagaaaatatacctgagacctctgttgagaggagtcaggaagggagactattttagcatctgtttcacaaaaatgatacctgaacttttgtaaaaaagaaaaaatcttcgaacacttaaagatctccattccctttttttgtcatgaaataaataaattgtccactagaaagttggtaaacaaagcagtagcagattgtaaactctaaatgcatagtgaatttccatgtttaggaattcatgccctccaaataatcatagatttatataatcatacwgctaaggatatattaattgcagtattatttctctaaaatgtattgaagcataatatatacacagtaaagtatacaaatcagatgtacacagttcaaattattttcacaaagtgaataaatgtgttcacccagctcaagatacagaacaactct

SEQ ID NO: 888647 - DNA, 672 bp, Homo sapiens
actgtgactctattcagcataaattggttttgcatggtttaaaatttacataaatggaataaaaataattagtaggaaactctaatatctactactttcacttataaattttataaaacgtatccatactgctacatggaaaagtaatgtgttctttctcatttctgcatagtattccattgtacacacataacatagttgacattttttctgctgcgtgcatatagccaggagtggatttgctgtgttactgtatatgcatatgttcaattttaataggtaataccaaagtggttttactaattgacacccccgtgctttttcaaacattttgtgtattctgtcttttgaattttagacatcctattggctgttaattttcattttcctaatgacaatcctgttgagtgtctttgtaggcactgtggttcaggattcactccattgtgaaktacctgatcaaatattttgctgggtgtctcttgcttttcctactgatgtgttgttgatttttatatatttgaatcacaaagtatttttcagagctaagtaataacaatttgttctctcactttgagtcttgaaattttctccctaaataatgtttttgatgaatagtcttttcctttataatcaatgtgtttcatgtctggttgaaaatatctttgccta

SEQ ID NO: 888648 - DNA, 663 bp, Homo sapiens
ttttaatattacagaccccagatcacattttttggatgataacttttgggtggtgatgtctgaatgttgccatggcaacagtaaactgacatgacactggggtgtgtgtctcatggagagatgcttttccctctttcctgtttcactcagtcttcaatctggtctgaagagtctgagccccacctctagagtcaagtgctgcctcctaccttagtatttttggtacaattggtaggaatatgctaatatttaacttataattatattctactttggtcatacattttgaagtgagattgggctatagttggtgtgtctgtatgtgtgcatacatatgtgcacactacttcactatttcactatttagattttggcaatctagaaatactaggtctttctagttgaatygaaataaaattctatttttttgtcagggtatagaaaatagtaataacctggaaagtaccttttcttggaaagtctaaatgaacagctactgctaccacccttgtccaagcaccatcattatctcttgcctggatttagctgttctcctagcttccatccctggttccccgtgatatattctccagcgggcagtcagcatgggacctgcagcatgtgttagatcacacgcctcttctgaggacccaccaaagtttc

SEQ ID NO: 888649 - DNA, 514 bp, Homo sapiens
tcattatagctgttgttctattgtgttctattggattggctacatcctgagtcacttttggctatttctattttcctagaaaggcaggctctgcaccccaattttatacatggaaagccacactttagatattatatctattatctgaaagcctatctcacttatccatcttaatattcttcatttgtgatttaacctttgtttttctgaattaggctagaaggcctattacaaacactgaattaattcgtataaagaacgagttcctaaatataataattaactccagtgttttctctgatttctatgtttttctaaaattctacttttccaatttggagatttctcaaataarcaaaaacagaattacaattcaacctagcaatcccattactgggtatatacccaaaagaaaataaattattctcacaaaaagacacctgcactcatatgtttatcacagcacgattcacagtagcaaagatatggaatcaacccaaatgcttatcaatgg

SEQ ID NO: 888650 - DNA, 581 bp, Homo sapiens
tttacttaaaataactatatagtattccattttacatatacccagtaggcagtttttcaatcattatcgctctccttctctcccctttcccctgctggaatcctcagtgtttattgttcccatctttgtgtccatgtggactcaatatttagctcccacttataagtgagaatatgtggtatttggttttctgttccacaatacattttccattctacagtttgcttaatcaatcctttacagattgtacatatcaaatatcaaataggtccaatattttttgttggccaaaaacatttttccaaacgtttttattcattaccacttaatgacaacctaatagataagatttgtcctcatctgtgattatttcttygtggcaaaatatttgaaatgaacagcagaataaaaattcatgtacattgccaagttctatgttctatatttctaaaatacgctccagaaatgctatgttaaatatgattctatcagtaaatgaaacccatgtccttgcatctgtgctcatttttttaaattttaaaggatttccagtaattttataggtaaaagattttttcttt

SEQ ID NO: 888651 - DNA, 581 bp, Homo sapiens
tttacttaaaataactatatagtattccattttacatatacccagtaggcagtttttcaatcattatcgctctccttctctcccctttcccctgctggaatcctcagtgtttattgttcccatctttgtgtccatgtggactcaatatttagctcccacttataagtgagaatatgtggtatttggttttctgttccacaatacattttccattctacagtttgcttaatcaatcctttacagattgtacatatcaaatatcaaataggtccaatattttttgttggccaaaaacatttttccaaacgtttttattcattaccacttaatgacaacctaatagataagatttgtcctcatctgtgattatttctttgtggcaaaatatttgaaatgaacagcagaatmaaaattcatgtacattgccaagttctatgttctatatttctaaaatacgctccagaaatgctatgttaaatatgattctatcagtaaatgaaacccatgtccttgcatctgtgctcatttttttaaattttaaaggatttccagtaattttataggtaaaagattttttcttt

SEQ ID NO: 888652 - DNA, 581 bp, Homo sapiens
tttacttaaaataactatatagtattccattttacatatacccagtaggcagtttttcaatcattatcgctctccttctctcccctttcccctgctggaatcctcagtgtttattgttcccatctttgtgtccatgtggactcaatatttagctcccacttataagtgagaatatgtggtatttggttttctgttccacaatacattttccattctacagtttgcttaatcaatcctttacagattgtacatatcaaatatcaaataggtccaatattttttgttggccaaaaacatttttccaaacgtttttattcattaccacttaatgacaacctaatagataagatttgtcctcatctgtgattatttctttgtggcaaaatatttgaaatgaacagcagaataaaaattcatgtacattgccaagttctatgwtctatatttctaaaatacgctccagaaatgctatgttaaatatgattctatcagtaaatgaaacccatgtccttgcatctgtgctcatttttttaaattttaaaggatttccagtaattttataggtaaaagattttttcttt

SEQ ID NO: 888653 - DNA, 669 bp, Homo sapiens
gaatatagatttttaaattataaatatgatgacaatgggaagtcataaagaaaatattagtatgttggattacatgcaagatgaccttttatcagaaaatattataaaactgaaaagataaatcacataattagaaaatattttcaaaatatgtaaccaaaaatattagcattcataaaatataaacagcatcttcaaatcaataataaaaaagagcaacatattctgaaaataatttttttttaaagacagaggagtggtgagtgaacacagaattctgtcagtcattgttagtcatacctgtacatcaaaaccacagatagttgttttcagggctccctgagatcatgagcccctgggtctcttgcaacctttaggggcctaaaggccaaatgacagagggaaattggaagcctgaatgggaagagataggaccaatgggttgagcaaagggctgaagaaggtagggacttgaaggaggacatatgagaggatctgtcttcactccttatgatttaagaatccatgkttagtcctactcctgagccagtgctccagatcacatacattgatacaaggtaaggagagattctgattcttgtgagtcttagtgaactctggaagctggattcaagtcccagatagttagaactgaagggaagatggaca

SEQ ID NO: 888654 - DNA, 624 bp, Homo sapiens
aaggtttgactccttttcccattcaaatgtctcttaattctttctcctcctgattgcttaggctaggacttccagtactgtgttgaataggaatggtgagaatgggcctcatcatcttgctccatttttcaaagtgaatgcttcagcttttgcccattcagtatgatgttggctgtggtgaggatgtatatgtgacattgatggctcttattattttgaagtacgttccttcaatacctagtttgttgagggtttttaacatgaagtgatgccgagttatactgagcaccttctctgtatctcttgagataatcatgtcgtttttgttgttaattctgtttatgtggtgaatcacatttattgatttgcatatgttaaaccaaacttgcatcccaggaacaaagcctagttgattgtggtgaattaactttttgatgtgctgctggatttkgtttgctagtattttgttgagaatttttacatctatattcatcaaggtttttggcctgaagaagttttcttttttaatcatgtctctgccaggctttggtaccagagcaatgctggctttgtagaatgagttaggaaagagtttctcctcctcaatattttggagtaatttgg

SEQ ID NO: 888655 - DNA, 662 bp, Homo sapiens
tttcattttaaatgtttgtgggtacatagtaagtgtatatatttatggggcacatgagatgttttgatacggtcatgcaacacataaaagcagatgtcttctgtgggagtggaaccctcatggagaatctctagcagggcagtccagaggggaaatgtggggttggagtccccacactgagtctccactagggcacagcctagtagagctatgaaaagagggccaccatcctccagacctcagaatggtaggtccactgacagcttgcactgtgtgcctggaaaagctgcaggcagtcaatgccagcccttgagagcaaccatgggatctgygccctgcagaaactcactctttgcatcagtgtggcctgtatgtgagacatggagtcaaagattattttggagctttaagatgtaatgagtgccctgctaggtttcgaacttgcatggagcctgtagcccctttgtttttgctgatttctccctcttggaaaggctatgtttacccaatgcctgtaccctcattgtatcgtggaagtaactaactcgttttttattttacaggctcggaggtggaagggtcttgccttgtctcagatgagactttcaactctaggcttttcagttaatgctgaaattagttaagactttgggggactgttg

SEQ ID NO: 888656 - DNA, 669 bp, Homo sapiens
tttgttaagaaaaccaccgtgaggaagtgacaatctcatacttactgtttagtgctgtgctctgccacgagaggatgattttagacattattattttatattttgggtgttagggttttgatatggtttggctcagtgtccccacccaaatctcatgctaaattgtaatttccagtgttggagaagggacctggtgggaggtgactggatcrtgggggcagatttcccccatgctatactcatggtagtgagtgagttctcatgagagctgatagtttaaacatgtgtggcacttccccccggctctctctctcctgccaccatgtgaagaaggtgcttgttgcccttcaccttctgccatgatcataagtttgctaaggcctcccagtcatgcttcctgttaagcctgcagaactgtgaatcaattaaacctcttttcttcttaaattacccagtgtcaggtagttctttatagcagtgtgagaatggactaatgcagctttctattggcactttgaacacaaggtacttgcatgtgcatatatgtatatggtatatgcatgtacacgcttacacttgagttttgatttatattccagcaaaagggtaatagagctatattcctctcatttatccacttggacttcttgataaatgtttgctattaac

SEQ ID NO: 888657 - DNA, 631 bp, Homo sapiens
cacaataatcactctgcagtgacgatttgttgattaccaacagagaaaaaatggagagccatgaaacagccctcgtacatatgtgaaattaatgataaagaaaccatcacaaataatgaggtggggagaaagactattcaaaaatctstactgagaggattagctattttcaaagagatcaagtatgagctggagttcacccatcgcaccaacataaaatccagatgtataaaaaagagttaaatgttaaagacacagaaaaacagagaaagcaaggaggaatggaggaaaagaaaactaagggaaagggagagaagagaaaagaaaagttcccaaactcaaactcaaggactgtctaagcataaaagcaagggaagaaatattttttaaaacagacaaatagatccgactacataaaaattttcacaaaatattttcatcatatttttagatgaaaatcattgccaaccaataaaccagacaaaaaaactgccactagtctgataaaagttatagatctcttataaatcaataggaaaaaataccaatagcccacttttaaaaattcagaggaaataaacagcacctcagagaatgaaaattcaaatttctaaaaactatactaattggt

SEQ ID NO: 888658 - DNA, 691 bp, Homo sapiens
gctagagaggaaaaagactccataaacagctactcccacatgtatgagtcgacagtgctggcttgctgctacattccagacccctctcagggtctgccccaccaggagaggcacacaggatgcctagctgtatcagggattcactatgacagtaacgagagttgtattctcactgctttgtgagatggaagaccaatcaaaaccatgacaaataaatacataaaaagaagctgatcatcaatgggacaagggaaaatcaactgccccagcccatctggcttctcagatttgaaggctttattaaactcggtcagcctgcccaccaaagaaagaatatatgctatccaaacaaattttttttggctgggcatggtggctcacacttgtaatcccagcacattgggaggccaagatagaaagatctcttgagcccargagtttgcctgggcaaaacagcaagaccccatctctacaaaaataaattttaaaaataattagccataatgacacacgcctatagtcccagctacttggaaggctgaggcaggaggattgcttgagcccatgagtttgaggctgcagtgagctatgatcatgccactgcaccccagcctgggcaacagagcaagaccccctcttaaactaaaataaattttaagagatagaggccccactgagtgagagtaaggct

SEQ ID NO: 888659 - DNA, 582 bp, Homo sapiens
gttttcattgtttccctgctcatagcaatacactgaaattattctgatttgcctacttaagacggaaagaaagataggagcaaagttacattggaaccagaattacctcaatacctaggtcattttttcctaaagatgggtttgctgcaaaatcaggggaataatctccctcccagggcccttctaaatagtaccytcatggcctagaagaactaatgtccttgctacacaagagcctttgcaacagaggagccctaactgccagggccgatcttggaattttgcctccctcagtcaggtgttcaagttgaatcaaagaaaagaaatagaaaatgccctccatgagtaggctaaagccttcttctgccttatgtttctatcacgttctggagaaggactcaatgttgatccaagtacagaaaccatgtcaggttgcttggataacaactgtaaacgggtttaattgtgctggtttggggtgggccccagcccgggagcattgcttctctgtgtacatcaacactgagtagtgtgcattctaactctttcaccacaaccatatgatccatgctaaggcatttg

SEQ ID NO: 888660 - DNA, 577 bp, Homo sapiens
ctgagaatcatattaagaactcaatcccatttataatagctgcaaaaaaatagcatacataggaatatacttaaccaaagagatgaaagatctctaaaaggagaattataaaacactgaggaaataaattatacatgacataattggaaaggcatcccatgctcatgaattagaagactcgatattgtggaaaatgaccatactgttcaaagcactctacagagtcaacgcaattcatattaaaataccaatgtcatttttttcacagaattagaataaacaatcctaaaattcatacagaatcaataaaagagcctgagtaaccaagacaatmttaagcaaacaaaacaaaatgaaacaaaaaattctggaggtgtcacattacccaactttaaattaaacaaggctgtagtaaccaaaacagcatagtactggtataaaagtagattcatagaccaatggaacagaagagagaatctagaaataaagccaaatacttacaactaactgatcttcagcaaagcagatgaaaacatacactggcagaaaggacatcctattcatcaaatgatgctgg

SEQ ID NO: 888661 - DNA, 693 bp, Homo sapiens
ttttgtcttctgccatcattataagtttcctgaggtctccccagaagcccagctgatgctgacatgcttactgtacagtcttcagaactatgagccaattaaacctcttttctttataaattaaccagtctcaggtatctctttatagcaatgagagaacagactaatataaccacatattgtatgaatttaattatattagatttccagaacaggaaaatctccagagacaaaaaagtatgttggtggttgcttagagtttggtatttcaggaaaattgaaaataactgctaaccatgtgggtgtcttttggggttcaygataatattccaaaattgatacggataatcttatgactgtacttaaactcattaaattttacagttttaatggatgaattgtatggtatgagaattatatctcaataaagcatttataaaaataaataagcaaagcatttaaatagaataaacatttcttaaaagcaaatacacagtggctgagtagcacatgaaaagatactcagcatcatttgtcattagggaaatgcaaatcaaaccacaatgtaatactacttcataccaactaggatggctatagtcaaagcgatgggcagtaagaagtactggcgtggttatgaggacagtgatatccttctatattgctgatgggaatgtgaagtatagctgcttt

SEQ ID NO: 888662 - DNA, 609 bp, Homo sapiens
tgagaatctcaggaggtattcagcatctataaactggtaaagcaaaatcagtagatctattttctttcagtaacaaaatctacagaaagagaagtgctacaaaattttgtgactattgggcatccataaaaatctactgagaagacattttggggaacccaagttataaaaataacgattgagaaatattcctatcacttatttttctttgcatttttatttgctattctctacttacgtggttagaaaattatattcacaaagaacataacaaatatatccaagccaagagttaaaatgctttgaaagacggaggatcttgagtcctttcctataagtaacatagagtacatgtaatgtagacaacatattttgtatcatatgcagtgtctgtgtgggaggygacctcatgggctactttccagtacaagcacagtattcctcattctttgtgtgccctccattctctactctcattatttactcttttcctggtctgaaacactcctacctactttgagtaccaaagctttacgcttctccaactttcgcctcaaatgccacctactctccccttcttataatgtaagacttcctccagagtctagt

SEQ ID NO: 888663 - DNA, 598 bp, Homo sapiens
aatgacaaaatgtgagaaaggggaggttcttatatgctaataatgttctatttcttgaacttactgagtattacacagatatgttccctttttaaaagtatttaataatatgtacattttcatttgtgcatttttaatgtcttatttctttctttctttttttttttttttttttttttttgagacagagtcgcgctctatcgcccaggctggagtgcaatggcatgatctcggctcactgcaacctccacctcctgggttccggtgattcgtgcctcagcctcccgagtagctaggactacaggcacgcaccaccgtgcccgactaatttttgtttttcagtagagacgggatttcactrtgttggccagggtggtcttgatctcttgacctcgtgattcacctgcctcagcttcccaaagtgttgggattacaggtgtaagctactgcgcccaggctttaatgttttatttcaacaaaaaatttacttaacacaaaacaaactgcagggctgatgaaaatatagttcagaagaaaagttttagcttcatcttttcctctcttcactgacctgctataccagtaaagatattgtccc

SEQ ID NO: 888664 - DNA, 649 bp, Homo sapiens
ccaaaatgatgtacatagtcaccctcacttttggcaatgtctctaatgcctccagaatggatggcttaagatgtaaagtggcctttgactctagtgatgcctctgtgtcgtacattatagtcaattgcacatctctctctctctctcacacacacacacacacatacacacacacacacacasaggtagaaaactatttgagggtaggaataaaaaggtgcttttgtcttctctccagtgcgaagggcacgagcatacagctgaagctccagatggttttactgaatcacttgataaatatgaacatccttattttggtagccatgcggctacattatctcaattttgccatccctttagcccccacctgcacagctgcaggacctcaaggaccccctcctcagcttccctcttccacccacccaccagctgccaaaattcccaggagttccttgtcacgcagttctctggatggccttggactggtcctgttccctcttcaatcttgcttgtagttctcaggaataactatagattgtgctgagaatgcaacagcctgagataggcaggaactaaccagaacagctcagggtctgctccatttctccctagaaataggatgctctttggtgctttagcccagcctgtc

SEQ ID NO: 888665 - DNA, 620 bp, Homo sapiens
tatcacgtaatctttacaatattcttataggtatttttactggagaatttacaaaagggagggaggaaagtttaaaagcttcatgttcaaaagtagaaatcttcaggggatgagcattcttgtttagaaaaatatatttataatccccttggttatgaaagaggagaagccttgaatataatcaggatgatttggagcaaaataaatagccaaattcctctgccaataaaaacacaaaaaacctggaaatattatatgggcaagacagcttaaaagcaggagataaagttggcagagagagataagagaaaagatataaacaatggaactgaaaactggkgctctgcaagaatcaataactagagacaagtttctggtaaagaaaatgtttgaagggcttcaaaagaaatattgaacattacattgaaagatgtctttttggttgggctcaagtatggaatcttcagacgcagttcaggaatttagaattcagaggaaagaggaaactagatctagagtgtctagcagaaacacaaggcacctcaaaattcataaatatatatgataagttggaaagtagattttccatcatatatgagagggatatcatccagctttat

SEQ ID NO: 888666 - DNA, 634 bp, Homo sapiens
tcctcagacaactagtcactgatcatctgagtcaagtagcattcctcactccaccccatcttcccggcaggtcacgttctactactctgttttatttttgacacaatatttatagttgcacaaacaattttttggcaatgattctgtcttattccacatgatatccccataatctagagtattgcctgatggatagtagggcttaataaacatttcctgaacgaataacgaataatgaatgaatgaatgaatgaatgaatgcacgttcttcatctttactgtggacacagatggaatccacctagactgatctttatcaataatatgcttcatggccactcgctaatgttgcagcaaaaatgtaacatgagttcaacgtgkatcagtataacttagcctctttcgttttgtttttgggtttatgactgcatgagtatatctgagttcgtataaacatcctgtaaataaagaagggaactgttccctgataactttctcaaaaaaaaaaaaaaaggtgctagagatcttgtagggtctaagttatattcaaactgaagttaatgcctggggccaatatttaccagaattatgatggtggctttctgggtatgcagtggtctttcacaggtggcca

SEQ ID NO: 888667 - DNA, 599 bp, Homo sapiens
ctggccagaaactactttttgaaaattcagaaacagatccatacatggaataatagatgtcacttggtgtatggcaagcatggcatgaatagtcattgaaagcttttaaataaatgatactgggacaatatttctgtatgtaaaaaatataaattaaaacattacttcacacaatgtaaaaaaatcaattcaaagtgartttagcatatgaaagtaaaaagctaaactttaaatcttttagaagaaaaaataagataatattaatatgatattggattaaggaaagatttcttggacaactcacaaaagcacaaagattaatggaaaatattaataactttgatagcattggaataaaagtatctagaacattaaattatcagcaaggtgaaaaaaagtgaaaaaataattgcaagcataaaaatgaaagacttgtacattgaatatataaggaatacataaaatacccaaaacaccccataaactggacaaagttctgaataggtgtaattcatataaataagtacttggaaactgggtaatgaagtgagacccccatctttacagttaaaaaaaaattagttggatgtagtggtgcg

SEQ ID NO: 888668 - DNA, 535 bp, Homo sapiens
ctgtacataccaacattcatgaccacattacacatatggtgctttatgaaaaggttttactgactttgtccccatatcatctcctaggacttattttttaagcattacattattttttacaggtgaaaatgtctgatccagcttatagctcttttccgtgtaatccctgcgttttttccacatttggttcttttagtccttataacacattcttctttttttaatctgggaaaatgtagcttaggctcaccatctgtttcatagtgaagtgcttgtattcagcttcccagatgggttgaataagagaaaaaggttaagtgatttaacttgaattcatacagtgagtcatctgccctcagcgcaggcatgacaaagtgaaagattttcagggktttctcttcactatacaaatttggagatcacacaagtttcatcagagcattctaaaaactggtcagagtagcaaatatattcaacatggctgaacaataatttggatttcaaatgtattcataatatacaacattaaaaaaac

SEQ ID NO: 888669 - DNA, 548 bp, Homo sapiens
ttctcactatacacaaaaaataagtttgtaggagctgggcacggtggctcacacctataatcccagcactttgggaggctgaggcgggcggatcatgaggtcagcaaatcgagaccatcctggctaacacagtgaaaccccatctctactaaaaatacaacaaattagctgggcrtggtggtgggtgcctgtagtcccagctacttgggaggctgaggcaggagaatggtgtgaacctgggaggtggagtttgcagtgagctgagactgcgccactgcactccagcctgggcaacagagtgatactccatctcaaaaaaaaaaaaaaaaaaaaaaaatttaaaaaaaagtttgtaaggcaatgcatatgttaaatagcttgatttggtcattcataatgcatacatttaccaaaacatgttttacaccataactgtatacatttttttatttgtcaattaaaaaaataagtttaaaaaatcaaaataaaagttttccaggagaggtgagatttgaagtagttttcatcatgtgaatgtgattttgaga

SEQ ID NO: 888670 - DNA, 622 bp, Homo sapiens
tcaaggttctctcaacccataaatctatagggtttacaccatcataatgtggcaatacatcaaggctttcctcaattcactatggttagatgctgctgctgacgcgacccaaactgcagaggtaaacatgggacctaactctaagttaattagtactttcactactgtgagtttggttcagaatcattatgttacacatttggaccaaatgccagtcaagctcaaagagtttttcccccatatattgagagaaagacatwtccacctttttaattaatttggagtggcaaagatgtaatctaaagctgctcacagtcatccacagaggagagcagggaaaatagatggagaaatcttttttgtgatattgcttgggttgtccatgaacttataattttaggtgtcaacatgtattcttttttggctatgttaatttgaattaaatttcagttaattttcctaaaaacagtactaaccgatacaattagattttttttttcctggataacatacccagagagaagacattggcattatttaaaccacagaaagacaatagcaatcattgtaaacatgggtgcagcatgaaaagttgatagaagagtagaaagaatggatgtga

SEQ ID NO: 888671 - DNA, 622 bp, Homo sapiens
tcaaggttctctcaacccataaatctatagggtttacaccatcataatgtggcaatacatcaaggctttcctcaattcactatggttagatgctgctgctgacgcgacccaaactgcagaggtaaacatgggacctaactctaagttaattagtactttcactactgtgagtttggttcagaatcattatgttacacatttggaccaaatgccagtcaagctcaaagagtttttcccccatatattgagagaaagacatttccacctttttaattaatttggagtggcaaagatgtaatctaaagctgctcacagtcatccacagaggagagcagggaaaatagatggagaaatcttttttgtgatattgcttgggttgtccatgaacttataattttaggtgtcaacatgtattcttttttggctatgttaatttgaattaaatttcagttaattttcctaaaaasagtactaaccgatacaattagattttttttttcctggataacatacccagagagaagacattggcattatttaaaccacagaaagacaatagcaatcattgtaaacatgggtgcagcatgaaaagttgatagaagagtagaaagaatggatgtga

SEQ ID NO: 888672 - DNA, 597 bp, Homo sapiens
actagagtctatacaaaaaaaaaatgagagttttttagatattggaaaatttacattttccttctatgtttcttatattttaaattggtttatttttgtttctcttttttatctcctcttggaaattaataggaaactggtttaaattaaaattgtctttgtgttatatttatgaactgataaaattcagaaaagttgaagacacagcatcctagtacgctgcaggcttgagcaaaaaaggaagccaggtgggagaagtatgtgttgggagctagtgaggagggaaaacagattgtgtgcctgaggcctgcaggaacaaagtgaaagattaactggaagactgktcatggaaaattattcaagaatagcaataatactttgttttttaagatttaattacctcaagccaaaaacttaaggtttttatattggttccttagtatatgtctgtcttctggtttgtttcttccctaagtctacggtacagatgatccacagaaatgggtagtctgatttttgtaaagattaacaggttaggatagcaatataaagagtaatattcttttaaaagtacattctgaaatttggtattcttac

SEQ ID NO: 888673 - DNA, 597 bp, Homo sapiens
actagagtctatacaaaaaaaaaatgagagttttttagatattggaaaatttacattttccttctatgtttcttatattttaaattggtttatttttgtttctcttttttatctcctcttggaaattaataggaaactggtttaaattaaaattgtctttgtgttatatttatgaactgataaaattcagaaaagttgaagacacagcatcctagtacgctgcaggcttgagcaaaaaaggaagccaggtgggagaagtatgtgttgggagctagtgaggagggaaaacagattgtgtgcctgaggcctgcaggaacaaagtgaaagattaactggaagactggwcatggaaaattattcaagaatagcaataatactttgttttttaagatttaattacctcaagccaaaaacttaaggtttttatattggttccttagtatatgtctgtcttctggtttgtttcttccctaagtctacggtacagatgatccacagaaatgggtagtctgatttttgtaaagattaacaggttaggatagcaatataaagagtaatattcttttaaaagtacattctgaaatttggtattcttac

SEQ ID NO: 888674 - DNA, 646 bp, Homo sapiens
acgtcaggctgatcacctttttttcagcataggagcaaaaggtgggctcccatggacttgggcgctccacccctggggctttgcagggtagagtccacaggctggactctgctgcatccacaggctggtgttgagtgttgcagaattttcaggcacacagtgtaagctgttggtgcatctactattctgggatctggaggatggtggccctgttctcacagctccattaggcagtgccccagtggggattctgtatggagctctaaccacacatttcacttttgcactgccctagcagaactccatgagggctctgccccagagcatacttctgcctggacatccaggcatttccatacaacctgtaaaatctaggtgragcttaccaaacctcagttcttgacttctgtgcacctgcaggccaagtattatgtgtaagccaccaaggcttggggtttgtcttctctgaagcaacagcctgaactctatgttggcccctcttagacacagttgagaggcagggcaacaagtcctgaggctgcacagaacagcaaggccctggacccagtccaggaaaccattttttttttttctcctggacctccagacttgtgatgggaggggcagccatgaagatctctgacat

SEQ ID NO: 888675 - DNA, 658 bp, Homo sapiens
tatgcaaataggatacaatacaatttttaaatctttaagattttttagaaatactggaaagaagaaattgttatatactatatctagacaaaagattcaccagaagtattttgttgaactctagctctgtgtaatartaagtgttgtgtagtaaaggcaaccttagtgaaataagtttgaaaaattagtcctcacaataagtcatccttcttgaggcaaaattaaggcttgcagaagcctggagataaatcaattaaatacataattcaacaacaacaacaacaacaagaaatgttatatttagtccaaaagggttttttccctcaatgcaactgcatttttgaaaacaccatgtaagaatcgattaagattattgaataaattaacttttatgttgtagaaaatgaaaacctgattttcatatctgtgggaaagaccatatcatgatacagtgaaaaaagtgaaatattacaaaataacagtatcagagcaaagtactacattggtcagattgctgaatatatatatatatataaagtaatataattaagaataaatggtgtcatttagcttcttaattattattagtgtgtcatattttaaggtatatttgctttaacacaggataaatatgttttagttatgaattacatcataa

SEQ ID NO: 888676 - DNA, 572 bp, Homo sapiens
accttgtccacttgcttttatgccattgccattccaccactctgtctctgtaagaggatgcatgaaacaccatgtgtccacctgcagcctgagagagatatgggctgtcagagtcaatgagcttcctaggccttccccttacctgcttcttaccgttccctctggatatgaggcctccagatccccatctctcacttaaggtgttctgaatgcttaccttggcttctagcagataggaaaccatcctggccaacacagtgaaaccccatctctaygaaaaatacaaaaattagctgggcatgatggcgcacgcctgtagtcccagctgcttgggaggctgaggcaggagaatcgcttgaacctgggaggcagaggttgcggtgagccgagattgtgccattgcattccagcctgggcaacaagagcgaaactccatctaaaaaaataaaaataaaaacaacaagaaaaaagaaagtattttcctacctgccttcccagactaaatttcttccccaggcttcagagtttctgaaaacaaccttgcagtgtctccttcatccctctctaagagg

SEQ ID NO: 888677 - DNA, 595 bp, Homo sapiens
aagcaacatgtcatgtaatcccatacattgacgtatgtcaagcatcagtcaaggtcagaaggataggaagctggtttcagttctacctggaatgaagttcattatatatgtccagagcacaaagattttaaaattgagggcaggccactttaaaaacaatttgcaaaaaaactggcaaacataattcacaaatataaacaggaaaatataatggatctctcattctaaattcagtttaaagtagcagtcctggggccattgttaaggcacagagtgggcacagaaagttagaagtctacccagtttttactcccttagaaacagtgggggttttggctaatagagctgtgaatattcagtgaaggccaataatcaatttgcttcgaaaatagcagcagtcacagttccckcagctttacaggcttgccaggaggggcaccccatacccacacacacacttggtaaagggtggaggaaacaccatcctcataaatgagccttcaaggcttgctttttgatgtttctgtcacaggaaggattaacaatgcacagcttccttcactgctgctttcacagctagaattttaacatgccc

SEQ ID NO: 888678 - DNA, 625 bp, Homo sapiens
atgtatttaggatagttagatcttcttgttgcattgatccctttaccattatgtaatgcccttctttgtttttgttgatctttgttagtttaaattctgttttatcagagactaggatcacaacctccacttcttttttcctttcatttgcttggtaaatattccttcctctgtccttttattttgagtttatatgtgtctttgcacgtgtgatgggtctcctgaatacagcacactgatgggtcttgaatctttatccaatttgtcagtctgtgtcttttaattggggcatttagcccgtttacatttaaggttaatattatatgtgaattggatcctgtcrtcatgatgctagtgcttattttgcacattagttgatgcagtttcttcatagtatcattggtctttatattttggtgtgtttttgcagtggctggtaccagttgttcctttccgtatttagtgcttccttcaggagctcttgtaaagcaggcctagtggtgacaaaattcctcagcattttcttgtctgtaaaggattttatttctcctttgcttatgaagcttaatttggctggatatgaaattctgggtagaaaattctttaagaatgttgaatattggcc

SEQ ID NO: 888679 - DNA, 603 bp, Homo sapiens
ctgtatgccagagaataaatgaaggaagatagtagatactaaaaaccaggtgttttcacaaattgaactttaaagatccttgtattgggtaagtccaaaatgtaaatggaggctgaattagggttaaaaaatatttttaagttcctgttcatttctttgattcctcaaggcgataattcagtacaatcaagtcattaagtcaggtaggtttcagagtacacacttgagggacctccctcccccttctgtcttgtactgtctctctctctctctytctctgcttccctccctctttcccctccactcttctcgtatttatcaggtattatttgagcacccaccttgcaccagtcaatatcctaggagctccaaggtaagcatggccctgccttctgccattcagaggaccttgatcatctcatattgatctgctttttaaaatttattttcatttttatttaatttcagagacagggtctcactctgccatccactggagtacagtactgaaatcatcactcactgcagctttaaaatcctgagctcaagtgatcttcctgcctcagccttctgagtagctggagccacaagcacacgccacca

SEQ ID NO: 888680 - DNA, 502 bp, Homo sapiens
ggtttattatcttgagagtgagctcctaataaaaggataagtttggtcccctttttctctctgtcttgtatgctttctcacttctcaccatgtgatactttctgccacattaaaagccaaaagaagaccctcaccrgatatagctcctcgatcttggacttcccagcctcttgaactataagctaaataaatttctgtagtattctgttacagagtagaaaacaagctgagacactcgggttttaatacagtatttttttaagtaggtgagtctataaagataatattattttccttagtgactaataaaggttggtcatgctatataccacagacatttgttgtttcatttatccaggagaggatatggatttcattaaaatttgtttatatttatttaataggtaataaaaggaggctgtaagatattggaaaattatacaaatttttatgctgatttaaagagttgagctggaacttgaatccagatctatctaaactt

SEQ ID NO: 888681 - DNA, 566 bp, Homo sapiens
aaactaacaaggcttttatggtagaagggagcatcgaaatctgaggccttctgtgccttctctccccgctgctgtgatggcagctggcaactgggccctactgtccattaacaaaacagagagacggataactatccagccgaggccarcttcctcacaccaggcagatccacagtggactctcaggaatcttcagcaccctttacaccagcagtggtcaaagtggggggtgcagctgccttgggactgagagatggggatggacacatctgcagggaggggtcaggctctagcccctttccccaggccaccactcctcagaggctggtcctccaccccagcttcagggacaggggatgcatggtggaaaccactgcagctgctgcattagcaaccttcaagagccaaagattctcttctctctagccagagagggaaggcaaacaggttagggtgacctgcagctcagggtcggccccaggccaggccactgcctgtactgactcctgggcctctatgcagtgcactccactttctagggcaggctgcttgccaaggattcacag

SEQ ID NO: 888682 - DNA, 609 bp, Homo sapiens
gtaaaatgttggcttctaagtgctattgttctctaaataccaaaaaacggacatgacctagggaaaacagaaatataagggatgctaaggggctaaatgtagttctagactttgaagaaagaaggctagaagacctaacagagattcagaattgtaaytttgttagaaatatggagtacacattctgctgctgtatccccttgcaatttagtttcagagatcatagtgtgagtattggttttgatgggaaaatgatttggctggggtaagagaagctaacagagtatgtttaccactgctttgaagacccatctccacaaaccactagggacccatgagacatctgaccaccagaactttagagactctgtgcttctagacttccttgtccaaaagatggcacagatggatgcagactctgaagaactaggtgtttattgccagaaacaaaaatagaaagtgtcaatgagattgatgaaagataggcagaagcagctcccagaacaaagaacttcatgagccagtttcctgcattgatactttgcactgcctttttaaagcataaaataaactttatttttagaacagttttaggttcacagcaaaatg

SEQ ID NO: 888683 - DNA, 609 bp, Homo sapiens
gtaaaatgttggcttctaagtgctattgttctctaaataccaaaaaacggacatgacctagggaaaacagaaatataagggatgctaaggggctaaatgtagttctagactttgaagaaagaaggctagaagacctaacagagattcagaattgtaattttgttagaaatatggagtayacattctgctgctgtatccccttgcaatttagtttcagagatcatagtgtgagtattggttttgatgggaaaatgatttggctggggtaagagaagctaacagagtatgtttaccactgctttgaagacccatctccacaaaccactagggacccatgagacatctgaccaccagaactttagagactctgtgcttctagacttccttgtccaaaagatggcacagatggatgcagactctgaagaactaggtgtttattgccagaaacaaaaatagaaagtgtcaatgagattgatgaaagataggcagaagcagctcccagaacaaagaacttcatgagccagtttcctgcattgatactttgcactgcctttttaaagcataaaataaactttatttttagaacagttttaggttcacagcaaaatg

SEQ ID NO: 888684 - DNA, 620 bp, Homo sapiens
ataagaagacttctaaaaatatggataaaagtgaaaataaaaacacttgccaacacactaccaagtaacagttattatcatattgtaatttattatgatagcattttctgcatgaatatatatacatttcttcctttcaagaatagatttttactcatgaatcccttttcacttaaaacatcatgactttttaatgtcattaatattatcttataatctgcattagaataactatatatcattctatgaatgcaccattaattgactccagttgttcatttagacrtttagagacttttaatgagtattccttatcattgtgtgtatgtgttatttctctgtttaaaatggggggtttgcttctgaatttctttgggaacttaatttaatagtatattactagtagggtttcaactttttaatttactcatatattacaatttcaaatttcaagaaacaataggagttaggttttggttgtgtgagcataataaaagaaggtacaccacgaactcctcacattcttactaacttatagtcctttgcatttattttgcatatgtttttaaacagaaaagaaaatgagtttctttcttattgtcaagtgaatatattacacc

SEQ ID NO: 888685 - DNA, 574 bp, Homo sapiens
ccacgcccggctaattttgtatttttggtagagacggggtttctccatgttggtcaggctggtctcgaactcctgacctgaggtgatcccccagcctcggcctcccaaagttctgggattacaggcgtgagccaccacgcccagcaatcytacttacttttaagaactaataatatttataaattaaattgttttagacttagttggattttgtttttgtttaagttatccctttcaaacagatcacactcttcacacacttaatcatgagttgttcaagaaaaagtcttctcttctttcatcgatctttacattctagtttgtatggtatatgaaaactaacaagaaaacttaatttaattcagttctaattttaaccctaatattattgagttgcaaattcagtgacataaattattttccatacctcagcctgattgcgtctttatgtcatcttgacaaatcattaagtttaaaatgtaaagcaagtaatctcctattacaactttctttccatccacaagtatgtcatattcaaactctgcctctgaaatactaaaattttgaataattt

SEQ ID NO: 888686 - DNA, 574 bp, Homo sapiens
ccacgcccggctaattttgtatttttggtagagacggggtttctccatgttggtcaggctggtctcgaactcctgacctgaggtgatcccccagcctcggcctcccaaagttctgggattacaggcgtgagccaccacgcccagcaatcctacttacttttaagaactaataatatttataaattaaattgttttagacttagttggattttgtttttgtttaagttatccctttcaaacagatcacactcttcacacacttaatcatgagttgttcaagaaaaagtcttctcttctttcatcgatctttacattctagtttgtatggtatatgaaaactaacaagaaaacttaatttaattcagttctaattttaaccctaatattattgagttgcaaattcagtgacataaattattttccatacytcagcctgattgcgtctttatgtcatcttgacaaatcattaagtttaaaatgtaaagcaagtaatctcctattacaactttctttccatccacaagtatgtcatattcaaactctgcctctgaaatactaaaattttgaataattt

SEQ ID NO: 888687 - DNA, 574 bp, Homo sapiens
ccacgcccggctaattttgtatttttggtagagacggggtttctccatgttggtcaggctggtctcgaactcctgacctgaggtgatcccccagcctcggcctcccaaagttctgggattacaggcgtgagccaccacgcccagcaatcctacttacttttaagaactaataatatttataaattaaattgttttagacttagttggattttgtttttgtttaagttatccctttcaaacagatcacactcttcacacacttaatcatgagttgttcaagaaaaagtcttctcttctttcatcgatctttacattctagtttgtatggtatatgaaaactaacaagaaaacttaatttaattcagttctaattttaaccctaatattattgagttgcaaattcagtgacataaattattttccatacctcagcytgattgcgtctttatgtcatcttgacaaatcattaagtttaaaatgtaaagcaagtaatctcctattacaactttctttccatccacaagtatgtcatattcaaactctgcctctgaaatactaaaattttgaataattt

SEQ ID NO: 888688 - DNA, 627 bp, Homo sapiens
acacaatattaagtatagcacaaaattatggatgcaaataacaagggttaagggatgacaacctgaatttctgaccttaaaataatcataaaaatgacataagtcacctaattgagtaggtaaagatcattccagggctactttaatgaatggtttataattgactaaatayagtctataaacctatatttggaaagctatttctaaaacgcatgaaagcatcttccactccactaaaccatcttccaccccactaaaatcagaatacaaaatccttccgcaatcctacatataccattggattgctctgcagattcatttttcataaatgttgccaatataacattcagccaagtctctaagttaatgaagttccactagggtgtaagaaaacaagaaagtactgagttctcaaagagacttttcagcattgatgcacccaagaaatttataagacatcgaatcatttccttgcctctaaaaaataagcatttccttgacaatcgttcagtactttaattggaataaacacaagactatcaatgtacaccacccaaacggactcgaggagagcacttgagggatcacctttttggctgctaagttagagtaggggagaacttccaa

SEQ ID NO: 888689 - DNA, 523 bp, Homo sapiens
gagaaattcttggcattcctggatttgtggctgcatcattgcagtctctgccatcttcttcatatggctttcttttctgtgtatctctctctattctcttcttataaagacaccagtcattggatttagagcccactctaaatctaggatgatttctaaatttggagtagatcatgttctgaggtttcakgtgggcatgaatgtggaaggcatttttcaacccactacttgtggaatagaagtccaggtctgacaaaataatatgttgtgcccacattctggcccctgtagccttgccaatccatgatgagaaagtgaggccccaaggtatagcctttcctactctattagtctatatcttcactttttgttgttgcaagcaagaaattagatttctcttgccttatcacttattttgagggaatattattgagctctggaactttattactttttaaaaaattctttcaatttgtccaaatgtcattgtactttgcaaaaattctttctcactgttagttac

SEQ ID NO: 888690 - DNA, 611 bp, Homo sapiens
ctgcccctgccttcctcagagtttttggcccaggatatttctaattttgattttccagccccatgacacaatcaaaatctctactggtttcccagttagcagccctctgtttctgcaaagcctggaatctcaatcacctcttgccctggctcagaatgggcaaataccctcagagagaagcagttgcaaatgatcagctcaactcacttctccatcatcttcctctttttttttttttttttttttttgagatgcagtctcactctgtcacctaggctggaatgcrgtggcacgatctcggctcactgcaatctccacctcctgggttcaagtgattcttgtgcctccctgagtagctgggactacaggcgcacaccaccatgtctggctaatttttgtgttttttggtagagaaggggttttgccttgttggccaggctggtctcaaactcctggcctgaaatgatctactcacctgagccttccaaagtgctgggattacaggtatgaaccaccacgtccagcccatcttcctcttttcaaaatttaatccttgttgtgatctgaatgtttgcatcccctcaaaattcatatgttgaaaccaaatcatc

SEQ ID NO: 888691 - DNA, 560 bp, Homo sapiens
aatcttataggctcagatgtatgccatggaacctatccctagaaaaatgcgttatgcacaaatccacaaacttttgcctgcagtttcaaaagagtcaccggctcttaaattaaaggagatataacacattttaaattctttcatatatatggttgttaagttttgaacactttgttaacagttaggctcttttgtatccctaaggatatattcctacttctgaatattttacttttcaccatttcaagttcataacatcacactggattataaaacaaagaaatatgtacaataattgtagcccatgtaatgggtaatggagtataagtattaataattccaataaattccatgttgggacaggtgtgattatccatgtattttttgccccttttttttttttttttttttttaccttaatcaraatgtgttatttcctgattgctttgatggcttttcccaggcttacctggtttgtgacaaccggctgctaaaatcaacaatcatgctgatttcttttagtttttcacgagtgtgctttcttactaggagtattctgt

SEQ ID NO: 888692 - DNA, 614 bp, Homo sapiens
tggtctgcaccatccaaaacctctgtcttatactgtagttatatttattcagtactgtacatgccagtggggtaattttgtacccctagaggcatttttcaatgtcttgggacatatttgattgtcccaactggagagtgcgtgtgctwccagcatctagaaggtggagaccagagataccgctaaagatccacagtgctcaggtaattccccccacaacaaagaaatggtgctcgggctgagaaaccctgattatatcctgcacactgtacatctggtaagtggttaattttatattgcacgttataattacatataactcaatcagttgttttctcagtagctaaaagagtgaatgccaatccaaatgtgcctcctccagaataagtaagtagtttaggtaagaatttggctcaacattttatttttattctatcttggcttaggatgacatgcatacaaactctgttgaatgttttgataaaaactttcagagttggaggtaaactgtcttcataataagctgttttcctagggcttcgttatatacagcacagcatttttttacagcattttattttatgtgcacatttatttttgccactttttaaagg

SEQ ID NO: 888693 - DNA, 614 bp, Homo sapiens
tggtctgcaccatccaaaacctctgtcttatactgtagttatatttattcagtactgtacatgccagtggggtaattttgtacccctagaggcatttttcaatgtcttgggacatatttgattgtcccaactggagagtgcgtgtgcttccagcatctagaaggtggagaccagagataccgctaaagatccacagtgctcaggtaattccccccacaacaaagaaatggtgctcgggctgagaaaccctgattatatcctgcacactgtacatctggtaagtggttaattttatattgcacgttataattacatataactcaatcagttgttttctcagtagctaaaagagtgaatgccaatccaaatgtgcctcctccagaataagtaagtagtttaggtaagaatttggctcaacattttatttttattctatcttggcttaggatgasatgcatacaaactctgttgaatgttttgataaaaactttcagagttggaggtaaactgtcttcataataagctgttttcctagggcttcgttatatacagcacagcatttttttacagcattttattttatgtgcacatttatttttgccactttttaaagg

SEQ ID NO: 888694 - DNA, 617 bp, Homo sapiens
acctttcattaaaactcttttattctttctgctttgctataatgaaaaaatcttaacctgtcacacctgtagtgattatagaagggtctcaactctggtggggagagaagctcagaacaggcatgtataattttcaaagaccacataactgcttcaaaaaaaatgacagctgtcaccaacattttacatccaaaaacaagtttaattgttcagactggtgttttaraaagctccagttattggaaggctcctcaatttttgtatagccagagactcaaataactctaggctagaaggttttatttactgatgagagagggcatattcaatatcaaaaaattgtcatttttatttgtttgcattgaggctgagactaaaaagccaagcagcacaccaaaaggagaaaatttactgtatgcaaattaaaagctaaaataattgcctgccatgaaaagaaaagtgaagcacaggagcctgaggtaggccatacttgacttactcatctttagaacaatcttaatgcccatcgtttcaccttccacatagtaaatagtaaatgtctggtgcatgaataagaataagaggaactgaatagacatttctcaaaataagatata

SEQ ID NO: 888695 - DNA, 593 bp, Homo sapiens
tccacccccatgatccaatcacctcccaccaggccccacctccaacagtgggaattacaattctacatgaaatttgggtggggacacgaatctaaaccatataaaagattgtcatgatcattatgctatttcttattttgtttttaattatttctattctgctttcttaagataatttctaaagatgttatggagtaataagcaggattaattttttaaaaatccaagtgctcatcctggattatccaatggaactggccccactcctactcctactaggaaacctgcatccaatccttcccctagcagcaagggcttcaatttcctattggcctcaaagtctccaggtgttatggagctgttttcccaggattgctgcaaactgcagccgcctaaattctggcagcttggcaataagaagtcttcttgctgataarggcatttttgtgctcattccaaaaaaaaagtaagagcagtaggtgttgttgtcccttgactggagcactctggatctatcgagcccaaaatgcctctgcacagggtggtaacaggtctgctgcctttgtggccatgagttctggccaaaaatatct

SEQ ID NO: 888696 - DNA, 575 bp, Homo sapiens
aagaaaagaaccaccatataaacaaggaaaaaaagatacaaatcatagtagttttcaacaaaaacgcttcaagcctgatgataatacagtgacatctttaatgtgctgaaacaaaaaatagtatctgtcaacaagaattccataccaagtgaagataatttttaataacaaaaaagaaatacagattttttttagaaaacaaaaactgagacaatgcattatcagaagttctgcattacaataaatgttaaagaaagttctccaggcagaaagaatacaacaccagagagaaatgtgggcctacaagaagmaatgacaagtactggaaatgtaataaataaagataagtatgcatgccttttcaaagaaaatgtaactgctctataacataactgtgtaaacacacagtgtcttgtgtattaaaagcatatatgaaggcaaaatgtgttacaaaacaagcattaaggatagaaaggaagaattataagtataatcttctaagattattatactataagtgaaacaatattatattatttgtggtacacactaatgaattaaagaagtatattaca

SEQ ID NO: 888697 - DNA, 601 bp, Homo sapiens
gccagcaagtgtagaaagagatgtggaagagagaacggggaaacagaaattgcatttctcccacgttccaaatgtaggttatccgggttaaatgtaggccccacctgactaggcaaagattttttcctttgttgtgagtttgaaaagaactaaacatcatactgaagtggaattattgaaattggatagacccaggttcaaatgttgactcagttatgtaacatcttgtgaattttgacargttccttaactccactgagtctgtttttatacccatgaaatggatgtaggattgttatgaacattaattgaaaaattatatataaaataagtgtccagcatagttcctggcacatactagtgcttgaaaactaccaatcaacttcatcaatttgtgttatgccctgcatgggcacatatttgtcctgatactcttcaaaatgtagaagtacccacagaaaaattgtctcagttcaagcacagtattattaatattctactgagtactaagtatggtcgttaatagtctaatatgaggaagtcaaaacagtctctggaaaaagtctttctgcaagctttttgaagcttcagggattgctac

SEQ ID NO: 888698 - DNA, 601 bp, Homo sapiens
gccagcaagtgtagaaagagatgtggaagagagaacggggaaacagaaattgcatttctcccacgttccaaatgtaggttatccgggttaaatgtaggccccacctgactaggcaaagattttttcctttgttgtgagtttgaaaagaactaaacatcatactgaagtggaattattgaaattggatagacccaggttcaaatgttgactcagttatgtaacatcttgtgaattttgacaggttcyttaactccactgagtctgtttttatacccatgaaatggatgtaggattgttatgaacattaattgaaaaattatatataaaataagtgtccagcatagttcctggcacatactagtgcttgaaaactaccaatcaacttcatcaatttgtgttatgccctgcatgggcacatatttgtcctgatactcttcaaaatgtagaagtacccacagaaaaattgtctcagttcaagcacagtattattaatattctactgagtactaagtatggtcgttaatagtctaatatgaggaagtcaaaacagtctctggaaaaagtctttctgcaagctttttgaagcttcagggattgctac

SEQ ID NO: 888699 - DNA, 687 bp, Homo sapiens
cacttagtaaaattttaaaattatatttactgtttattctttgtttttccccagtagactgttgtattagtccattttcatgctgctgataaagacatacccaaggctgggaagaaaaagaggttcaattggatatacagttccacatggctggggaggcctcagaatcatggcaggaggtgaaaggcacttattacatgtaggtggcragaaaaagatgagaaggatgcaaaagcagaaacccctgataaaaccgtcagatcctgtgagacctactcactgccatgagaacagtatgagggaaaacacccccaaaattcaaatgatctctcaccgggtacctaccacaaaacatgggaattatgcaagtaaaattcaagatgagatttgggtggggacagagagcgaaacaatatcattctctccctggcccctccaaatcttatgtcctcaagtttcaaaaccaatcatgccttcccaacagtccgccaaactcttaactcatttcagcattaacccaaaagtccacagtccaaagtctcatctgagacaaggcaagtcccttccgcctacaagcctgtaaaatcaaaaacaagctagttacttcctagatacaatagaggtacaggtattgggtaaatacagtcattctaaatgggagaaattggccaaaacaaaggtgttaca

SEQ ID NO: 888700 - DNA, 610 bp, Homo sapiens
tccaaagtctcatctgagacaaggcaagtcccttccgcctacaagcctgtaaaatcaaaaacaagctagttacttcctagatacaatagaggtacaggtattgggtaaatacagtcattctaaatgggagaaattggccaaaacaaaggtgttacagggcccatgcaagtccaaaatccagtggggcagtcaaattctaaagctccaaaatgatctcctttgactccatgtctcacatctaggtcatgctgatgcaagaagtagmttcttatagtcttggccagctctgcctcagtggctttgcagggtatagaccctcttctggcttttttcacgggcagctggagttgagtgtctgtggtttttccaggcacacagtgcaagctgtcattggatctaccattctggggtctggaggacagtggccctcttctcacagcctcactaggcagtgccccagtagggactctgtgtgggggctctgacaccacatttcccttctgccctgccctagcagaagttctccatgagggccccacccctgcagcaaacttttgcctgggcatccaggcatttccatatatcttctgaaatctaggtggacgttccc

SEQ ID NO: 888701 - DNA, 595 bp, Homo sapiens
gcaattttaaaatactatgatataaagtcaatacaagccaagtgcagtggctcccacctgtaatcccagcactccatgaggctaaggcggatagattgtttgagcccagaagttcgagaccagctgagcaatatgaaaaaaccccatctctacaaaaaaatacaaatatcagctgggcatggtggttcatacctgtaatcccagctacttgggaagctgaggtgggaggatctcctgagcctggtgatccggtcaaggctgcagtgagtcgtgattgtgccactgtactccagcctgggcaacagagcgagaccctccctgtctcagaaaaattaattaattaagtcaatacatgttatgtacatgataaaggtataagagaagaaagaaaaccagacatttacttaacagktgtatatatatatatatttgttgataaacatatgtatgtacacacagacatagtcataaaaatcaggagttatattcacagtgatgacagctctcacttgtgtaactggccacatggtcccagctggtgttttgctcacctcttgcatctcttcctctgcattccctgcaacttcagcaagca

SEQ ID NO: 888702 - DNA, 583 bp, Homo sapiens
atcatagaaaaccaaagtcaaagtcttcttatattttttacctttaaaaaaatagtttctgaatttttgacattatggaaatcttctagaggttgtttcatcttctgacttaaaaaaattgacctttaacataagatcctttccttgttaatatttttataattctacaatatgagaccatggtataattaagtttaaaaagcccaagtaaataattaggagagtgttgtacttgagttaaagaaaaaatcagtctatcattgagtaaaacacactagagaggaagaaaacaattaataaatgagatgaagtaccgtaggaaaaaattagcttacgatggcttcttgagaagacagtcaaaataagcaattgatgcagtgacagactttacaggaaacattaaaaagcccagatggctcaagtttacatgtttacagwtaagcttggaaagccagttaaatcttgcaagtgccactcagttaactagaagattttccattctgaggatgagaaaaaagttgaaaagggatgggacaggaaggaagagaagagaaagatgtaggaagagagagtaagatgaaaa

SEQ ID NO: 888703 - DNA, 643 bp, Homo sapiens
cacacaaaaggaaataggacaatgcatatgcactctatacatttctgaaatattgtgttaaataattttccactgatgacccactctgatggagaacagcaatggcacaattcatcaaaacattttaacaatagattaatttgggattaataaattagttagtggagcacctccttggtacttgtttttcgagataaagcagcaaatgaaagagatgaggtccttgacctttttgaggaaagtacaaaagcctgagatgggaatgtacytggaagattcaagaaaaatcaagaggtctgttgctttctgagctgggacacatgaaaggagaagatattagaaaggctttaggaacctcccatttctctatccaaagcatccagaatgattctgtaaatggggaacatctcaagagatgaatgaaagagggcagagaagtaaaatcatgggtgcatttctttttttttctctcagttgcatcttgactgtctcagttaagacactgagcatctttgcattcctggaagtctttgtcagcattctatgtagctactccatttcttttgagcttgtgggctgcaaagaatctaagataacacctgaggttggttctcttccaatattccagtattccaatactcaa

SEQ ID NO: 888704 - DNA, 597 bp, Homo sapiens
tccttttccatgcaaaagctctttagtttaattaggtctcagttatttatctttgtttttattgggtttgcttttgggttcttggtcatgaaatccttgcctcagccaatgtctagaagggtttttccaatgttatcttctagaatttttatagttttaggtctgaggtttaagtccttaatccatcttgagttgatttttgtataaggtgagagatgaggatccagtttcattctcctacatatggcttrccaattgtcccagcaccatttgttgaaaagggtgtcctttccccactatatgcttttgtttgctttgtcaaagtatttgggtgtggctgtaagtatctgcatttatttctgggttctctattctgttccattggtctatgtgcctatttttataccagtaccatgttgttttggtgactatgccttatagtatagtttgaaatcaggtagtgtgatgcctccagatttgttcttttttgctcagtcttgctttggctatgtgggctcttttttggttccatgtaaattttagaatgctttttctaattctgtgaagaatgatggtggtattctgatggggattgca

SEQ ID NO: 888705 - DNA, 603 bp, Homo sapiens
aataaacttctaaagaaatccaggaaataaaggaagagataaatatcttaagaagaaatcaatcagagctcctggaattgaaaaacctacttaagaactttaaaaatgtaattaaaatctttatcagtaggctggaccaagcagaagaaagaattttagagcttgaagactagtatttcaaaytaacccagtcagacaaaaatacaggtttttttaaaataaaatttttgagaaatatgggattgcaaaaagcaaccaaacctatgaattactggcattcctgaaagagaaggagaaaaggcaacatatttgagaaaataaatcaagaaaaattttctaatctgttatcaaggtaaatatccaggtacaagaaatctggagaacacctgcaagatagtatgcaaaatgaacattaccaaggcatatagtcaccagactgtccaaggtcaatgctaaagaaaaaatattactggcagttagagaaaaaggtcaaatcctgtacaaagggaaccccatcatgctaacagcagatttctcatcataaaccttagaaactaagagatacggggggcttattttcagcattcttatagaaaataaatt

SEQ ID NO: 888706 - DNA, 603 bp, Homo sapiens
aataaacttctaaagaaatccaggaaataaaggaagagataaatatcttaagaagaaatcaatcagagctcctggaattgaaaaacctacttaagaactttaaaaatgtaattaaaatctttatcagtaggctggaccaagcagaagaaagaattttagagcttgaagactagtatttcaaactaacccagtcagacaaaaatacaggtttttttaaaayaaaatttttgagaaatatgggattgcaaaaagcaaccaaacctatgaattactggcattcctgaaagagaaggagaaaaggcaacatatttgagaaaataaatcaagaaaaattttctaatctgttatcaaggtaaatatccaggtacaagaaatctggagaacacctgcaagatagtatgcaaaatgaacattaccaaggcatatagtcaccagactgtccaaggtcaatgctaaagaaaaaatattactggcagttagagaaaaaggtcaaatcctgtacaaagggaaccccatcatgctaacagcagatttctcatcataaaccttagaaactaagagatacggggggcttattttcagcattcttatagaaaataaatt

SEQ ID NO: 888707 - DNA, 597 bp, Homo sapiens
ctaaggatatgtatcccataacatgttgtaaaccgcaaataaacacaataacatttatgtaaaaaaaaactttggtgacccctgatacgtactctatcaacacaatgatatcagactttttgatccttgccgatatgagggaagaaaataggtgtttcattttttatgaatgaggttgaaattttttttgtattttctttttgcacaccttgtatttgtatttttttacctcttatttttttcytgaggaaatcagctctttttcagtgtcatgagtaggaaatatgtcctcctatttgttgcttttctttttactttgatcatgaagtttgtttttagcatgcagaaatgttttttacgtgattaaatacatcaatctattgtgagttcagattttctgacatatttataaaaatcttacctatttttttttattttttaccttttaatgtttatacactggatccatttggaattttattgtaaaatgtgatgcagtgatgaagtcttattctttctccagaaggctagtttgttttatgaagtccccttttactgaagagaccatattggaaaaactaattagaaacatcatct

SEQ ID NO: 888708 - DNA, 597 bp, Homo sapiens
ctaaggatatgtatcccataacatgttgtaaaccgcaaataaacacaataacatttatgtaaaaaaaaactttggtgacccctgatacgtactctatcaacacaatgatatcagactttttgatccttgccgatatgagggaagaaaataggtgtttcattttttatgaatgaggttgaaattttttttgtattttctttttgcacaccttgtatttgtatttttttacctcttatttttttcttgaggaaatcagctctttttcagtgtcatgagtaggaaatatgtyctcctatttgttgcttttctttttactttgatcatgaagtttgtttttagcatgcagaaatgttttttacgtgattaaatacatcaatctattgtgagttcagattttctgacatatttataaaaatcttacctatttttttttattttttaccttttaatgtttatacactggatccatttggaattttattgtaaaatgtgatgcagtgatgaagtcttattctttctccagaaggctagtttgttttatgaagtccccttttactgaagagaccatattggaaaaactaattagaaacatcatct

SEQ ID NO: 888709 - DNA, 597 bp, Homo sapiens
ctaaggatatgtatcccataacatgttgtaaaccgcaaataaacacaataacatttatgtaaaaaaaaactttggtgacccctgatacgtactctatcaacacaatgatatcagactttttgatccttgccgatatgagggaagaaaataggtgtttcattttttatgaatgaggttgaaattttttttgtattttctttttgcacaccttgtatttgtatttttttacctcttatttttttcttgaggaaatcagctctttttcagtgtcatgagtaggaaatatgtcctcctatttgttrcttttctttttactttgatcatgaagtttgtttttagcatgcagaaatgttttttacgtgattaaatacatcaatctattgtgagttcagattttctgacatatttataaaaatcttacctatttttttttattttttaccttttaatgtttatacactggatccatttggaattttattgtaaaatgtgatgcagtgatgaagtcttattctttctccagaaggctagtttgttttatgaagtccccttttactgaagagaccatattggaaaaactaattagaaacatcatct

SEQ ID NO: 888710 - DNA, 571 bp, Homo sapiens
tagacactgggcactggggactaccagatggggaaggtggtaggtggttgagggctgaaaaactactcattggatactatattcactacctgggtgttgggatcatttgtaacccaaacctcaaagacatgcggtttactcatgtaacaaacctgcacatacacccattgaacytaaaatacaagttgaaaaaagaagaaaaaggaaaaacactgaagagttttacaataaaggtaaaacagtgccactcttctcacagattttaagaaaatgttcatttttttatgaaccatatgttcatgttagcatataatgggcttatttttgttaaaaaaaagggaaaataagaatcataagcagcatattgaagagggaagggactattacactaagaaggaagaaagggcatttgcagagggtggagttttgatgttgtttttgacgtcaaagatccaatgacctttgatgattatctgtggaataacctagattattgataaagctatacagaaaaggtactctaggagaccacccttgctgcttgcatcacatccctttagcttgccttgaa

SEQ ID NO: 888711 - DNA, 571 bp, Homo sapiens
tagacactgggcactggggactaccagatggggaaggtggtaggtggttgagggctgaaaaactactcattggatactatattcactacctgggtgttgggatcatttgtaacccaaacctcaaagacatgcggtttactcatgtaacaaacctgcacatacacccattgaacctaaaatacaagttgaaaaaagaagaaaaaggaaaaacactgaagagttttacaataaaggtaaaacagtgccactcttctcacagattttaagaaaatgttcatttttttatgaaccatatgttcatgttagcatataatgggcttatttttgttaaaaaaaagggaaaataagaatcataagcagcatattgaagagggragggactattacactaagaaggaagaaagggcatttgcagagggtggagttttgatgttgtttttgacgtcaaagatccaatgacctttgatgattatctgtggaataacctagattattgataaagctatacagaaaaggtactctaggagaccacccttgctgcttgcatcacatccctttagcttgccttgaa

SEQ ID NO: 888712 - DNA, 660 bp, Homo sapiens
gaattgtggctgtctaaagttgggtataatgggaagcatttatcaagcgtatttctttacaaaactcttctagagaattaaacaggaaaattaaactaggggattaaattaatgtgctgtggaacacacttcggaaaatgggtaagggattcagagaaaggcaatatttatgaatataagaaaagtcaacaaaggctttaattgtgaaattttactgggcattaaaatgtgggagaatctagcagaaaagaaggaagtaggcatgtcagatagagaaacaatattggctcagagtcactggaggagaaatgaaagaattaaatcttttttaaaacaaaggggataaatgtcacygtacatgagattggtattttgaaaagtagtagttttgttcattatacaagtaatttttgtggaaatacacataacataatttcagcaccaaaaaagcatttaaaaatatgtttgacaatttatggttttgccattttggcaatttaaacaaatagagaagaaaggagtaggtggagtaaatgtgcatgcagagaagatagacttcgatgagccatgcagtcaagtatttgccaggatctttgcagccatgccagcctgtgacctctgatgaatggtgctcatgttctgtaagagtgccccaaacag

SEQ ID NO: 888713 - DNA, 615 bp, Homo sapiens
gtttgtctttgctctccccactccacatccatgctttctttctgattgctgaccctgctgactttagatgttagcaacaggtgcagaaagtataggcttgtataggctgtttaactagctcccaccattgtgtaaatcaaatctctgtaatatatcccttattagctatctcctggtggttcagcttcctttatcaaagaatcatgtgtaggatctccggttggaatcaatccayggggaattcagccactggattttgagattgtcaagcacccaatggctattgtgggagctaatttgggatgtccaagtatctgaatctgaatgagaaactagacattagtgacagattccactgacaggcattctttgcaaatcaatcctgggaggacagttcctaggtcctgctaagccactctgcaaattggctttaagactcaggacattttaacaatggaggaataggccgggcgtggtggctcacacctgtaatcccagcactttgggaggccgaggcaggcggatcacgaggtcaggagactgagaccatcctggctaatgcggtgaaaccccgtctctactaaaaatacaaaaaattagctgggcgaggtggcg

SEQ ID NO: 888714 - DNA, 615 bp, Homo sapiens
gtttgtctttgctctccccactccacatccatgctttctttctgattgctgaccctgctgactttagatgttagcaacaggtgcagaaagtataggcttgtataggctgtttaactagctcccaccattgtgtaaatcaaatctctgtaatatatcccttattagctatctcctggtggttcagcttcctttatcaaagaatcatgtgtaggatctccggttggaatcaatccacggggaattcagccactggattttgagattgtcaagcacccaatggctattgtgggagctaatttgggatgtccaagtatctgaatctgaatgagaaactagacattagtgacagattccactgacaggcattctttgcaaatcaatcctgggaggacagttcctaggtcctgctaagccactctgcaaattggctttaagactcaggacattttaacaatggaggaataggccgsgcgtggtggctcacacctgtaatcccagcactttgggaggccgaggcaggcggatcacgaggtcaggagactgagaccatcctggctaatgcggtgaaaccccgtctctactaaaaatacaaaaaattagctgggcgaggtggcg

SEQ ID NO: 888715 - DNA, 611 bp, Homo sapiens
tgctttccaagtaagctctttgtactcattttctggcctcaggttctacttttggaaggacctaccaaagttggaggattaaaggataactctagaatgcatggctggactaataggatgggcaggctctgcctaacaaatattggaggaagaacaaagtaggggaagagtaggaggtggcagttgaattttgttcagaacacattgaatttgaggtgtctttggaatatttagctgaagcacaatgatgaggagaagtggggactttgtgagtcatcaccataaaggttgaggaagagaatgaaatcaagcaagggaagcaayggcctaagggagaggatacaaaataagaagagaggtggatagaaccttggggaataccaacattttagaggtgggcaaaggcaaaaattgtgtcatgatcatgataattttgctagccctaaggagtacctggttatatagtaatgctcagtaaatatttgttcaatgactgaaccagaaaagggaactgaatagagtggacagaaggctggagaaccaggaaaacaaaggctgtatggaagagagagtgtacaaatgagagtttcaagtgtcacaacaggttcatc

SEQ ID NO: 888716 - DNA, 579 bp, Homo sapiens
cttttgaaagagggtggtaaaaagtcacacgacaaagaccgtgaatgcagggaggggtgaagaattggggctattaatgtaatcaatggttagatggcagtatttttaaattatttctagccatctcaatcaggtaagttaatataattaaaacccatcattaataatattggctttagtagaaacaatcatattctttctttttcattactttaattttaggggagctttaatatctggttgtacaggctactcttataattcttttttaagattttcttggttattctcacctacagtttttgttcttgcagaactttaggatcrttttgagaagtttaatttcccatgggttttgactagatttgcactaacatctataaactatattgaatcattcaattcacaaacatgttacatctttccatttattcaggtcttcttttatgtaattccataaaatttaatagttctctttccaaaagtcctgcacatttcctagtacctttatgcctaagtcatctatattgctgttgttatagtagatgtaatcatttttaatttttttcttttacttaa

SEQ ID NO: 888717 - DNA, 591 bp, Homo sapiens
ggagcaggttgttcagtttctgtgtagttgtatggttttgagtgagtttcttaatcctgtgttctaatttgattgcactgtggtctgagagactgttatggttcccattattttgcacttgctgaggagtgttttacttccaattatgtggccaattttagaataagtgcaaggtggtgctgagaaaaatgtatattctgttgacttggggtggagagttctgtagatgtctattagttcctcttggtccagagcttatttcaagtcctgaatatccttgttaattttctgtctcattgatctgtctaatattgacagtggggtattaaagtstcccactattattgtgtgagagtctaagtctctttgtatgtctgtaagaatttgctttatggacctgggtgctgctgtactgggtgcatatatacttaggatagttagctcttcttgttgcattgatccctctaccattgtgtaatggccttctttgcctcttttgatctttgttggtttaaagtatgtttttttatcagagactagggtggcaacccctgctttttttttgctttccctttgcttggtaaatattcc

SEQ ID NO: 888718 - DNA, 606 bp, Homo sapiens
gatagttagctcttcttgttgcattgatccctctaccattgtgtaatggccttctttgcctcttttgatctttgttggtttaaagtatgtttttttatcagagactagggtggcaacccctgctttttttttgctttccctttgcttggtaaatattcctccatttctttattttgagcctacgtatgtctttgcacatgagatggttttcctgaatatagcaygtctatggttcttgactctttatccaatttgtcagtctgtgtcttttaattggggcatttagaaagtttacatttaaggttatttttgttatgtgtgaatttgatcctgtcattatgatgctagctggttattcttcccattagttgatgcagtttcttcatagtgtcaatgatctttacaatttggtatgtttttgcagtggctggtaccagtttttctgttccatatttagtgcttccttcaggagctcttgtaaggcaggactggtggtgacaaaaatctctcagtatttgcttgtctgtaaaggattttatttctccttcacttacgaagtttagtttagctggatatgaaattctgggtttacccacaaagggaagc

SEQ ID NO: 888719 - DNA, 596 bp, Homo sapiens
aggtccatttgattcagtgctgagttcagttcctgaatatctttattaattttctgcctcaatgatctgtctaatattgtcactggggtgttaaattttcctgctattattgtgtgggagtctaagtctctttgaaggtctctaaaaatttgctttatgaatctgggtgctactgtgttggatacacatatatttaggatccttagatcttcttgttgaattgaaccctctaccattatgtaatggtcttttytgtcttttatgatctttgttggtttaaagtctgttttgtcagaagctaggattgcaaccctttctttttttctgttttccatttgctcggtagattgtcctccattttttttaaattttttattttgagcctatgtgtgtcactgcatgtgagatgagtctcttgaagacagtgtaccaatgggtcttggtacttgatccaacttgccactctctgtcttttaattgggacacttagctcatttacatttaaagctagtattgatatgtgtggttttgatcctgtcattgtgattctagctggtgattttgcttgtttttatggttgcttcatagtgtcgttg

SEQ ID NO: 888720 - DNA, 590 bp, Homo sapiens
tgtccctaaaaaggacatgaactcatccttttttatggctgcatagtattccatggtgtatatgtgccacattttcttaattcagtctatcattgatggacatttgggttggttccaagtctttgctattgtgaatagtgctgcaataaacatatgtgtgcatgtgtcttcatagmagcatgatttataatcctttgggtgtatgcccagtaatgggatggctgggtcaaatggtatttctagttctagatcctcgaggactcaccacattgtcttccacaatggttgaactagtttacagtcccaccaacagtgtaaaagcattcctatttctccatatcctcttaaaattctaactgctgctgagaaagaggcagccctacagatagcagagaaatctggagatgaacagcatgtctcccatagccagtcaaaaaagaaagagtcaaaaaggggaaagagggtgagaaagagacagaatccccattcccagtaggaagagaggcagtgtcccttgaaaaccttaattggaagcctagtaatcccatagatgagtggaaaataaaacactttcagatgtgtatatcaga

SEQ ID NO: 888721 - DNA, 665 bp, Homo sapiens
aaaattaatcttgcaaaggaaactgtgtgtgtggacatattgaccaaattcaaaagggtgttataagatttttgtaaattgagcactgaaataaaagaacagtaaggttttcttaagatgcaattctgctctttakcaaaatttgtaaaggtttatgaaaggtttgtaagaatatcacctcagtcaaactgattaagattagatagaattctctataaggtttcattaaaaattggggttgacactaatagtaaactaatgcaagggtgaagtttgcctttctccctcttgaaaaggattttcatgtaatagtaaaggctaataaaaggattttgcctttttaaatttttgagtcatcattttgggaaaataaataacttatagtaatctgtaattatatttcataatatcaagtttttatacctctaaatttaacagtctccccaaaattaaatttcagtttcaaaattgtctctcctgatgcctagcttttggttgtgacagagggcctctggagcatccagaaaagaggtaaacaggattatttaacatgtttagatacaagggattgccacagtgatgtgtaatcttcttcagtttttatttcggtaaataatattaatatatgttccaaaatcatatgggatatctaatgttctaatgtc

SEQ ID NO: 888722 - DNA, 665 bp, Homo sapiens
aaaattaatcttgcaaaggaaactgtgtgtgtggacatattgaccaaattcaaaagggtgttataagatttttgtaaattgagcactgaaataaaagaacagtaaggttttcttaagatgcaattctgctctttagcaaaatttgtaaaggtttatgaaaggtttgtaagaatatcacctcagtcaaactgattaagattagatagaattctctataaggtttcattaaaaattggggttgacactaatagtaaactaatgcaagggtgaagtttgcctttctccctcttgaaaaggattttcatgtaatagtaaaggctaataaaaggattttgcctttttaaatttttgagtcatcattttgggaaaataaataacttatagtaatctgtaattatatttcataatatcaagtttttatacstctaaatttaacagtctccccaaaattaaatttcagtttcaaaattgtctctcctgatgcctagcttttggttgtgacagagggcctctggagcatccagaaaagaggtaaacaggattatttaacatgtttagatacaagggattgccacagtgatgtgtaatcttcttcagtttttatttcggtaaataatattaatatatgttccaaaatcatatgggatatctaatgttctaatgtc

SEQ ID NO: 888723 - DNA, 538 bp, Homo sapiens
tggatcatttgaggctaggagttcaagaccagcctggccaacatgctgaaaccctctctctactaaaaatacaaaaattagccaggtgtggtggcaggcacctgtaatcccagctacttgggaggctgaggcagaagaatcacttgaacctgggaggcggtggttgcagtgagctgagattgcaccactgcactccagcctgggcaacaaaatgagactccatctcaaaacaaacaaacaaacaaaaaacaaaataaaataaaataataaaataagagacagcaatatcaactctgcytagtgaaaagttgttgagagagtataagtctgaaagttttttgtgaattctgaagtgtggcctcattgtcatacacattgttgttatgtgacatagtaagcagttgggcatgactttcaagtttctatctggggtagcatctttgatgccctacattatttgcttgaaagctcattacattagccttcttataacattgtatgaatggctgtgatgaatacattgaactatacctataaa

SEQ ID NO: 888724 - DNA, 674 bp, Homo sapiens
tttcctctaggattcttatagaagttttatgcttaaatctttaatctatcttgagttaatttttgtgtacggtgaaagataggggtccagttccatttttctgcatgtagatagcaagctatcccaatggcatttattatataggacctatttcccccattccttatttttcttgactttttcaaagataagatggctgtagttgtgtggctttatttttgggttctctattctgttcctttagtctatgtgtctgtttttgtaccagtatcatgcagttttgattactgtagccttacagtatagtttcaagttgggtaatgtgatggctccagctttcctctttttgcttaggattactttgactattcaagtkattttttggttccatatgaattttagaatagctttcctaattctgtggaaaaggatgttagcagttttataggaataacattgaatctgtagagaactttgggcagtattgccattttagtgatactgattcttccatgaacatggaatgtttttccatatacgtcatctctgatttctttcatgtgggtgttttgtagttcttgtagagatctttcacttctttggttatatgtattgctaggtgttttattttttgtgtgtggctattgtaaatgagattatgttcttgatttggc

SEQ ID NO: 888725 - DNA, 743 bp, Homo sapiens
aatctgtagagaactttgggcagtattgccattttagtgatactgattcttccatgaacatggaatgtttttccatataygtcatctctgatttctttcatgtgggtgttttgtagttcttgtagagatctttcacttctttggttatatgtattgctaggtgttttattttttgtgtgtggctattgtaaatgagattatgttcttgatttggctgtcagcttgaacattattggtgtataaatatccttgtgatctttgtacattgagtttgtatcctgaaactttactgaagtcgtttatcagttctaggagtcttttggcagaatctctagggttttctaggcacagaattatatatatagtgaagagagatagtttcatttcttctttttctatctggatgccttttatttctttctcttctctatttactctggtaagaactttgtattttgttgaggagttttgcatctatgttcatcagggatattggtctgtaattttcttttttattgtgtctttgccaggtttttgtatcagggtgatgctgacttcatagaatgtcttagggaatagtccttcctcctcaatttttagaataattccaatagaattggtatcagcccttctttgttcagctgtgattctaacttgtccaggttttatttgttgttgcttttttcttgtttttggttggtaggttttttattacttattaaattttggaactagatattagt

SEQ ID NO: 888726 - DNA, 663 bp, Homo sapiens
atatgttattcaggttgttacttttttctctctctcagaaatgccaagaattcataggttttgttgcttatgcaatcccatatttctttaagactttgttcatttttgtatgactggaatagttcaaaagactggtcttcaagttctaaaattctttttcttggtccagtgtcttgataaagcttccaattatattttgaaatccctgaagtaactttttttcaattccagaaactctgattgatttctttttaagatgtatatctctttcttaattttctggattgatttagaggtttctttgtgttgattctcaacattatcttggatcttgtttagcktccttgcaatctatgctttgaattctttatctgtcatttctcagtttccaatttcattagggaccattgtggagagtcaatgtgatgcttcagtgttgtcactacattctcatttttcatggtgccagaattcttgccctggttccttcttatctggagatcctggcacttctaatttttgtaattattttcatgtgggcagaattcaatctttctctctctctcctttagacatagttctgctctgtcacccaggctggaatgcagtggtgtgattatgccttactacatcctccacatctttggctcaactgatcctccc

SEQ ID NO: 888727 - DNA, 663 bp, Homo sapiens
atatgttattcaggttgttacttttttctctctctcagaaatgccaagaattcataggttttgttgcttatgcaatcccatatttctttaagactttgttcatttttgtatgactggaatagttcaaaagactggtcttcaagttctaaaattctttttcttggtccagtgtcttgataaagcttccaattatattttgaaatccctgaagtaactttttttcaattccagaaactctgattgatttctttttaagatgtatatctctttcttaattttctggattgatttagaggtttctttgtgttgattctcaacattatcttggatcttgtttagcttccttgcaatctatgctttgaattctttatctgtcatttctcagtttccawtttcattagggaccattgtggagagtcaatgtgatgcttcagtgttgtcactacattctcatttttcatggtgccagaattcttgccctggttccttcttatctggagatcctggcacttctaatttttgtaattattttcatgtgggcagaattcaatctttctctctctctcctttagacatagttctgctctgtcacccaggctggaatgcagtggtgtgattatgccttactacatcctccacatctttggctcaactgatcctccc

SEQ ID NO: 888728 - DNA, 589 bp, Homo sapiens
taccttctgattttagcttccttggctcaggatattttttaaaaaaatttcttgttatttctactggttttaaaagtaatttaatgaacagattcattcactgtacttatgcttgaggcttttattttaagcaaagggtatgatttaaawtttttttcaaaatgactttggttctccagagagtctcttacagggtgggagctgagctgatgtgcaacagaccttcctgaggctgggccgcaagccaaggaaccaaggaaggagcagctagggtgggaccacagcagtgctcagggaccagctttgcttggccacaacgcgcttgcctgtcctctctttatcgactgggaccattctcagtatactgcctcctggtcttcctttttcttgtctttcttgttttccataattgtaaaattggagaaaaagaagaacaaagcctccacagctttgactaattagcttactatatttacaaaaagccaacaattatactttgaaatcaagactggtttcatttatttcccccaagaagagcctgactcagcaacatactcagaccattctgaagcaatggggataaagagtg

SEQ ID NO: 888729 - DNA, 621 bp, Homo sapiens
aatgctgccaggactgggttcttcccttcaaggcagtgagttcccttctggccgagggcatgtctagaaatgtcatccgggaggcagggtctggaaaggggacttcaggactctgactggtgccctatcctgctgtgcctaagctgctatctgattcaagacaaagctctccccattcttccctctcctcaagcagaagtaagggcagtcttttggagccatgagctgtgcagcctggggttaaaggacagtgatgccagcactttctttctttcttttctcttcttttctttttttttttagctggagtctccctctgtcaccctggctggagtgcagtcacgcaatctcagctcactgcatcctctgcctcccaggttcaagcaattctcctgccttagcctcmtgaatagctgggattacaggcatgcaccaccatgcctaatttttgtactgatgccagcactttcttagcaaccccagctggtgtcctagtatgccccctccagtccactgtctctgggcccagttcagcgctaggacttgcttaagagtttcagtccttgtagcctatactgcctttcacgtttatttagagatctagagcactttaaccctcag

SEQ ID NO: 888730 - DNA, 563 bp, Homo sapiens
aactatagtcaccttactgcacaagagaacactacaacctatttctcctatctaactgtaactttgtccctgttgacttacctctccccatttccccctccccctaccatctgtagcctctggaaaccacaattttattctctacttctttaaaatcaacatttttagattccacatatgagtggactcatgtggtatttgtccttctatacttggtttatttcagttaacgtaatgtcctgtrgattaatccatgttgtcacaaatgaaagaattccattcttttcatgattgaagagtattccattgtttatatattccacatttaaaatctattcatctggctgggtgcagtggctcacgcctgtaatcccagcattttgggaggccgaggtgggtggatcacaaggtcaggagatcgagaccatcctggctaacacagtgaaaccctgtctctactaaaaatgcaaaaaaaaaaaaaattggccgggccgtggtggcatgcacctgtagtcccagccactcaggtggctgaagcagaagaatcacttgaacccaggagg

SEQ ID NO: 888731 - DNA, 481 bp, Homo sapiens
ttcttgtgcacaagttcttgcctgctgccatgtaagacatgaatttgctcctcattcaccttccgccatgattgtgaggcctccccagccatatggaactatgagtaaagtaacagtcttttttttttcttaataaattacccagtcttaggtaagtctttattagcagtgtaagaacagactaatacattaaattggtactgggagtggggtgctgctgtaaagataactgaaaatgtgtaagcaaatttgaaactgggtaaaaggcagagggtggaacagtttggaaggctcagagacaggaaaatttggataagtttggaacttcccagagacttkttgaatggctttgaccaaaatgctgatagtaacatggacaataaaacccaggctgagatggtctcagatagagatgaggaacttattgggaactggagtaaaggtcactctcactatgcaaagggactggtggcattttttc

SEQ ID NO: 888732 - DNA, 633 bp, Homo sapiens
ttggcctcccaaagtgctgggattacaggcatgagccaccatgcccggccaaaaactccaacttttagaggcctatttacagcacttgtcccatatttgttcacactttttctgtatgtgtgttgtgaattataaatctggcttttcctacaaatgtggcttttcctgtgtagtcatcattaagcatgattctaagaagtagctcaaaatctcctaagaccaaaaaccacaaaaaacaaaaaaaaaaacaacaaaaaaccaaaaccagaaaagggatacattttgcagaataatttatattttcttctcttcatggcatcagttttctcaggagttctttttttgagatgsagtctccctctgtcacccaggctgtagtgcagtggtgcgatctgcaagctccgcctcccgggttcacgccattctcctgcctcagcctccggagtagctgggactacaggtgcccgccaccacgcccggctatttttttttttgtattttcagtagagacggggtttcaccgtgttagccaggatggtctcgatctcctgaccttgtgatccacctgcctcggcctcccaaagtgctgggattacaggcgtgagccaccgcacccgggctcaggaggtcttt

SEQ ID NO: 888733 - DNA, 644 bp, Homo sapiens
tgcatagtattccatggtgtatatctgccacattttcttttttcttttttttttttatttagtagttctatgtatttattctgctaggtacctccaggttttttttttaaattatactttaagttttagggtacatgtgcataacgtgcaggtttgttacatatgtatacatgtgccatgttggtgtgctgcacccattaactcatcatttaacattaggtatatctcctaatgctatccctcccccctcccccaaccctgcaacaggccccagtgtgtgatgttccccttccaatgtccatgtgttctcattgttcaattcccrcctaggagtgagaacatgcagtgtttggttttttgtccttgggatactttgctgagaatgatggtttccagcttcatccatgtccctacaaaggacatgaactcatcattttttatggctgcatagtagtccatggtgtatatgtgccacattttcttaatccagtctatcattgttggacatttggcttggttccaagtctttgctattgtgaatagtgccgcaataaacatacgtgtgcatgtgtctttatagcagcatgatttatagtcctttgggtatatacccagtaatgggatggctgggtcaaatggtattt

SEQ ID NO: 888734 - DNA, 567 bp, Homo sapiens
attgtctaggcttcactccaaatgactttagacttatttcaatcatcaaatctgtcctgaaatgataatttgtcattttgaggacatctagagaataaagctatgtcctaaagtcaacagagggtttcctaaatttttattaaaaaaagtctcctttgttaaaatgaggattttggcaaggtgcagtggctcacgcctgtaatcccagcactttgggaggccaaggcaggtggattgcttgaggtcagtagttcaagaccagcctggccaacatggtaaaaccccatctctactaaaaatacaaaaattagccaggtgtggtggcgggtgcctataatcccagctacttgggargctgagacaggagaatcgcttcagcccaggaggcggagattgcagtgagctgagattgtgccactgcacccagcctgggtgacagagcaagactctgtttaaaaataataaataaataaataataataaaataatattttatttttaataaaataaaataatataataaataataaaataataaataataaaataaaatggttttcacttttc

SEQ ID NO: 888735 - DNA, 594 bp, Homo sapiens
aaaactttgaaaaaaatttacacgaatgtataactagaataaccaatacagagaagtgcttaaaggagctgatggagctgaaagccaaggctcaagaactacgtgaagaatgcagaagcctcaggagctgatgtgatcaactggaagaaagggtatcagtgattgaagatcaaatgaatgaaatgaagtgagaagggaagtttagagaaaaaagaataaaaagaaatgaacaaagcctccaagaaatatgggactatgtgaaaagaccacatctacgtctgattggtgtacctgaaagtgatggggagaatggaaccaagttggaaaacactctgcaggatattatccaggagaacttccccaatcyagcaaggcagggcaacattcagattcaggaaatacagagaacaccacaaagatactcctcgagaagagcaactccaagacacataattgtcagattcaccaaagttgaaatgaaggaaaaaatgttaaacgcagccagagagaaaggtcgggttacccacaaagggaagcccatcagactaacagcggatctctcggcagaaactctacaagccagaagagaggggg

SEQ ID NO: 888736 - DNA, 699 bp, Homo sapiens
attaagtccacaatattaaaaaatgcttttttatcacccaaactagattccttggtgagaaagggggtatcttgttcactattatataaacagctaagcacaatgcctggaacatctacacacttaatatttttggatgaacaatttgtgaaacacactcagtttctagagctttgctacacagtcttatcttattctttctgcagccctgagagctaagcagggcagaaattattacttttgctatggctgccgccaccaccaatatcccagatgaggaagcaaggccaatggggttaagaacctgctcaatatcatagaacagtccattttaaaaccagggctaatgcctcttttgctgacttctaaaaggatgctcttttcattacatctgattcctytctgaggaaaattcaagttgatgtctcagactataaggacactcctctacccataagcacagagcttggagatgggggttgtatggcctctgccttactaagcttgcaagtggatgggacccagtgagcatggctgatacttggaaagcagggtgtgtaaacagttggataaatgccaccatccatatagccccagatgtttggcttgatgtgtgaacatgttaaatgtctcataaaattaattaagataaaaatgataacagttatgctatataccatgttaatttctaccagccag

SEQ ID NO: 888737 - DNA, 586 bp, Homo sapiens
tttaaaaagcccaaacttggtgacttaaaacaacaatcaattgttcttactgatcttacttagttcagctgatctaagctgggtttggctggagtgacttgactgttctccacatttctctcatcttcctcttgggatcrtcaggccagtcccggcatgactttctaatataatggcaaaggcacaacagcacaagcaaaagctcccaagatctcttgtggtctaggtttggaactggtacattatcatctctgcctcagttttttattgtggtaagagatacataaaatttacaatttcaactctttttaagtgcacagtttgatgccattgcatacatctaccttgttgtgcagctatcatcactgtctccagaattttttcatcaactgaaactctgcactcctcctccctcccttctcccagcctctggtagccactattccactttctgtttctatgaatttggctgctccaggtacctcatataagtggaatcatacaatatttgtccttttatatctgacttccttcatttagcataatgttttcaaggctcatccatgttgtagcatatgtcagaatg

SEQ ID NO: 888738 - DNA, 585 bp, Homo sapiens
ttgggcaacatttgtctgaatcaaatgttgctgaatttttaaaaatcaatacttgaaaagttacaactctggacactactaaacctcaatacacatcctttgggtcaacacatgtgattttgctctactagtctgaactattcactggtgttatttgctctcactcatcaggaaaagaaagttgtcctgaagaaatcagtgagtttaatgtcatcacattctcaagtgaattttgagaaggaaaacaaacattggagactgtctgaacaagagaacacattggcacagaggctgtgattagcacatgctgatmaggaatagcattctttccccaccggctcagtgtaaattttgccattcactttctttaccagctagtgccttgagagctaaatgtcatggacctgtgttaagtttgtaatgttaatttgcccccttctcataagtccacatcttttccttcattcatagcccttcccccttggcaaagacaaacttctaggcttccccgtggattttggagagtttaggtaccaggtccttatgggaccattactgttaaggtgaaaggtactttaagaacta

SEQ ID NO: 888739 - DNA, 622 bp, Homo sapiens
gcttgtttttatcaggtttgtcaaagatcatatggttgcagatgtgtggtgttatttctgaggcctctgttctgttccattggtctatatgtctgttttggcaccagtaccatgctgttttggttactgtagccttgtagtatagtctgaagtcaggtaacgtgatgcctccagctttgttctttttgcttaggatagtcttggctatacaggctcttttttggttccatatgaaatttaaagtagttttttctaattctgtgaagaamgtcaatggtagcttgatgggaatagcattgaatctataaattactttgggcagtatggccattttcatgatattgattcttcctattgataagcatggaattttttttccatttgtttgtgtcctctcttatttttcttgagcactggtttgtagttctttttgaagaggtccttcacatcccttgtaagttgtattccttggtattttattttctttgtagctattgtgaatgggaagttcactcattatttggctctctgcttgtctattattggtgtatagggatgcttgtgatttttgcacattgattttgtatccagagactttgctgaagttgattatcagcttaag

SEQ ID NO: 888740 - DNA, 629 bp, Homo sapiens
tatatttaggatagttagctcttcttgttgcattgatccctttaccattatgtaatggccttctttgtctgttttgatctttgttggtttaaagtctgttttatcagagactaggattgcaacccttgctttttttttctctttgcatttgcttggtaaatattcctccatctttttattttgagcctatgtgtgtctttgcatgtgagatgagtctcctgaatacagcacactgatgggtcttgactctatccaatttgccagtctgtgtcttttaattggggcatttagcccgtttacatttaagattaatattgttatttgattctgtcattatgtgaatttgattctgtcattgtgtgaatttgattctgtcattatgatggtagctggttattgtggctgttacttgatgtagtttcttcatagtgttgatgttctttacaatttggtaygtatttgcagtagctggtactggtttttcctttccatatttagtgcttccttcaggagctcttgtagggcaagcctggtggtgacgaaatccttcagcatttgcttgtctgtaaaggattttaattctccttcacttatgaagcttagtttggctggatatgaaattctgggtt

SEQ ID NO: 888741 - DNA, 641 bp, Homo sapiens
aggaactaacaaatgatgtccttctagaagagtgaaggcctcatggcaatgttctctttaatccatgatgtgtgttaagaggagttttgactgattataaagcaatgtatgaaccactaaactttctcacctacattgggccttcatcttctatcaattaaagtataagtttattcatatataargctggctgcaaaatcattcacaaataaaagtttaccctgtaagtttacataatagacctccttttcatttctattgttcatagaggcataaacacagaaaaaatattcaaagataagagtcttgtgatagtagaagtcttgatccgtgatcttgggaaaagctgttcacatcagggatgccatcttcttctggggagaaactttcctggttagttttaccttaagggtaccaatggaggtacagttccaggagtgtggaggaactcttctcagttgtgagattatgaccccaaagttcaaggctccagttttgctgtagtgtggatggcaaggacagtctttctctgatattctcagaagatccaatcaggttctagattgtgaagggattgtcctcagtgaaccataaagagctttctttacctagtgaaaatacactgtagcataataatctac

SEQ ID NO: 888742 - DNA, 651 bp, Homo sapiens
tataagatctagattagcaactgggtatccttatgaaagaccttccatgaaagagtttcataaccagaagctctcttagaccacagaaaaactcatgctcagtaaaatttttaatgtcttctgatatgtagaatttttttttccccagaacaatcatcagccttcatataccttaaagtgtatatttttttagtcagtgttgaaggacgtgaatagaagcagttcaatttcaatacacgatccctgattctcccaaacattccagggttataatttctaatggtaagaagaaataaagtcagatgagttaaagcatatctctactgaacaaaatagatggtcaaacattttatttacttttctctggaacttcagtgttttcacaggatcagactatttactgaagatgccatccctcattcacctttatttggcactggattttattaaaaagggagaacagatgacctactrggcttgaggtatggtcagagttttcttaaggagtcttcttcacacaatttaaaaatcagatccaatctgatcattcttatcactcagcaaagtaaagtgaaaacattttgtcaaaattcaacctcttagatgaaggagccagcaaacctggtttctgcctccatgcaattaggtggc

SEQ ID NO: 888743 - DNA, 546 bp, Homo sapiens
gattaattttaaaagtattaaaataattatagatctgataccaatgaagatcaactcaatcaagtcagtctctctctctcccgcccctgctttttttttttttttttttttttttttgagatagattctcactctattatccaggttggagtgcaatggcacaatctcagctcactgaaacctctgcctcccggcttccagcrattctcatgcctcagcctcccgagtagctggtactacagatgcctgtcaacatgcccccctaatttttttttttttaggagagacagggttttgccatgttggccaggctggtctggaactcccagcctcatgtgatccgcccaaagtgctggaattacaggtgtgagccaccacacccagccaatgtctctacatccatctctttgattttactcttgaccagtatttctcaaacgtccttttacttgaagaaaaaaaatttatgacttcaatccttctaagtcactttttgaatcacacagcttcttatatatttacaaatataaaagcaggaatgaatcc

SEQ ID NO: 888744 - DNA, 543 bp, Homo sapiens
accaatgaagatcaactcaatcaagtcagtctctctctctcccgcccctgctttttttttttttttttttttttttttgagatagattctcactctattatccaggttggagtgcaatggcacaatctcagctcactgaaacctctgcctcccggcttccagcgattctcatgcctcagcctcccgagtagctggtactacagatgcctgtcaacatgcccccctaatttttttttttttaggaragacagggttttgccatgttggccaggctggtctggaactcccagcctcatgtgatccgcccaaagtgctggaattacaggtgtgagccaccacacccagccaatgtctctacatccatctctttgattttactcttgaccagtatttctcaaacgtccttttacttgaagaaaaaaaatttatgacttcaatccttctaagtcactttttgaatcacacagcttcttatatatttacaaatataaaagcaggaatgaatccatatgctacagatattggtgagttgcagttgtggtc

SEQ ID NO: 888745 - DNA, 543 bp, Homo sapiens
accaatgaagatcaactcaatcaagtcagtctctctctctcccgcccctgctttttttttttttttttttttttttttgagatagattctcactctattatccaggttggagtgcaatggcacaatctcagctcactgaaacctctgcctcccggcttccagcgattctcatgcctcagcctcccgagtagctggtactacagatgcctgtcaacatgcccccctaatttttttttttttaggagaracagggttttgccatgttggccaggctggtctggaactcccagcctcatgtgatccgcccaaagtgctggaattacaggtgtgagccaccacacccagccaatgtctctacatccatctctttgattttactcttgaccagtatttctcaaacgtccttttacttgaagaaaaaaaatttatgacttcaatccttctaagtcactttttgaatcacacagcttcttatatatttacaaatataaaagcaggaatgaatccatatgctacagatattggtgagttgcagttgtggtc

SEQ ID NO: 888746 - DNA, 494 bp, Homo sapiens
tctttgatgagttttgtaatatttttccatttcttttcctttaaacttttttttaacttttattttaggttcaagggtacatgtgcaggtttgttatataggtacacttgtgtcatgggagtttgttgtacagattatttcatcactcaggtactaagcctagttcccaatagttattttgttctgatcctctccttcctcccaccctctaccctcaagtaggctccagtgtctattgttcctacgtgtttacgtgttcccatcatttagctcccacttataagtgagaacatgtggtatttggttttttgttccttttmtaaggatgatggcctccagctccatccatattccacaaagaacatgatctcgttcttttttatggctgcagggctattactaaaaagtaaaaaaataggctggatgcagtggctcatgcttgtaatctcaaaactttgggaggccaaggtgggtggatcacttgaggtcaggag

SEQ ID NO: 888747 - DNA, 662 bp, Homo sapiens
caggacataggcatgggcaaggacttcatgctaaaacaccaaaagcaatggcaacaaaagccaaaattgacaaatgggatctaattaaactaaagagcttctgcacagcaaaagaaactatcattagagtgaacaggcaacctacagaatgggagaaaatttttccagcctactcatctgacaaagggctaatacccagaatctacaatgaacacaaacaaatttataagaaaaaaacaaacaaccccatcaaaaagtgggagaaggatatgaacagacagttctcaaaagaagaygtttatgcagccaaaaaacactcatgaaaaaatgctcatcatcactggccatcagagaaatgcaaatcaaaaccacaatgagatgccatctcacaccagttagaatggcaatcattaaaaagtcaggaaacaacaggtgctagagaggatgtggagaaataggaacacttttacactgttggtgagactgtaaactagttcaaccactgtggaagtcagtgtggcgattcttcagggatctagaactagaaataccacttgacccagccatcccattactgggtatatacccaaaggattataaatcatgctgctataaagacacatgcacatgtatgtttattgcggcactattcacaatagcaa

SEQ ID NO: 888748 - DNA, 672 bp, Homo sapiens
aattacacacacatacataatgatatattgttcacctgtactcggtggccaagaagttaagattcaatcataccctcatatgtgtgaaatgacatatgaacaaggctattcttgtagcattttgtgttagaaaacaactgggacgcgcagtggctcacrtctgcaaacccacactttgggaagctgaggtgggcatatcattgtgaactcaggagttcgagactggcccaggtaacatggtcaaatgctgtttaaacaaaaaatacaaaaaaaaaaaattagccaggcatgacggtttatgcctgtagtaccagttactccagaggctgaggctggagaatctcttgagtctgggaagcagaggttgcagtgaaccgagatcgtgccatggcactccagcctgggcaatacagtgaaaccctgtttcaaaaaaaaagaaaaacgaagaaaaaagaaaagcaaacaactgggaataattaagtggcctagaagtgctattttaaatatatccaaagatttaaaagaaaacatgaatataataaataaccatatgaggacctcattagagaaataaaaattatttttaaaataaccaaatgaaaagtctattacctaaaaatacataacagaaataaaaaagaaatcactggatggacttaacagaagattaag

SEQ ID NO: 888749 - DNA, 554 bp, Homo sapiens
tcaccatgttggccaggctggtcttgaactcctgaccgcagatgattcacccacctcggcctcccaaagtgctgggattacaggcatgagccactgcgcctggccactcttcagtctcttttaatctgaacagttcttcagtctttgtgtttccagggccttgacatttttgaagagtaaataattattttgtagaatgctgcttaatttacatatattcggtgtccttatggttggattcaggttatgcacttttggcaggaattccacagaagtgtttytcagagcacagtgtcaggaggcacatgatgtctgtttgtcccatttactggtgttgggactttggttactattgggtgatacatgccaactttttcctctgtgaagttattatttttcctcttgtaatgaatatatttcttttggagagatacatcgaaactttattagatatcctccttttcatcgtattctttgccctcttattttagcatccattgatattttttgcctgtgacaagcgagaaggacagtatatgatcctgctgttctaa

SEQ ID NO: 888750 - DNA, 568 bp, Homo sapiens
ttctgtctccggcaggctttgaggatgaaggctgcgggcattctgaccctcattggctgcctggtcacaggcgccgagtccaaaatctacactcgttgcaaactggcaaaaatattctcgagggctggcctggacaattactggggcttcagccttggaaactgtgagaytctttctttcctgctctccttctgtccttgacctttcccctgagatgttgaaggtcctggccacactccctgctgtgtcttcccaactacccctgctctgccctcaccgcactcaggggtggctgctagcctaactgtggctctctgggtctcctctccttcctcccctgcccctcatttccttattcctggagtcctgtccttatgacactagccagggaaggggaaaataatgccacctctgctggcattgtggggagtggggggacctgactgttggtctagattaggctcagcccctgactgggtgtacagcttcaggtgtgccatcccagcccccgatgtgcccctcgtgtgccccctgggcgcatgcccgccctgccctgcccaaggtgtat

SEQ ID NO: 888751 - DNA, 568 bp, Homo sapiens
ttctgtctccggcaggctttgaggatgaaggctgcgggcattctgaccctcattggctgcctggtcacaggcgccgagtccaaaatctacactcgttgcaaactggcaaaaatattctcgagggctggcctggacaattactggggcttcagccttggaaactgtgagactmtttctttcctgctctccttctgtccttgacctttcccctgagatgttgaaggtcctggccacactccctgctgtgtcttcccaactacccctgctctgccctcaccgcactcaggggtggctgctagcctaactgtggctctctgggtctcctctccttcctcccctgcccctcatttccttattcctggagtcctgtccttatgacactagccagggaaggggaaaataatgccacctctgctggcattgtggggagtggggggacctgactgttggtctagattaggctcagcccctgactgggtgtacagcttcaggtgtgccatcccagcccccgatgtgcccctcgtgtgccccctgggcgcatgcccgccctgccctgcccaaggtgtat

SEQ ID NO: 888752 - DNA, 440 bp, Homo sapiens
cttctgagccctccaactgttccaacttctggctgttacccaattccaaagttgcttccacattttgagtatctttacagcaacaccccactctcagtggtaccaatttattgtattagtccattctcacactgctataagacatacccgagactggattatttataaaggaaagagatttaactgactcacagttctgcagggctggggaggcctcaggaaacttacagtcgtggtggaaggggaagcaaacayatccttcttcacaaggtgtcaggagagagaagaatgagagctgggcaaattgggagccccttataaaatcatcagatcttgtgagaacttactagtatgagaatggcatagaggaactgccccatgattcaatttcctcacaccaggtccctcccacgacacatagggattatgggaattacaat

SEQ ID NO: 888753 - DNA, 644 bp, Homo sapiens
gcatgtgacagtttgagtgcaatccaagttctggcatttcagggttgtactctaattttcatcagaatttcccaggctatgcatgctctttacatagaaggggcagctctcaagtgaagccgtaagaacaatggattataggaaagttgcaaaacaaaacagccacagcatcaaacatccttagatccagacctaccagaattgagtctcaggcaagtcattttaatacaagcctcttttgagtacatttaatatctctgagcctcagtttcaccctctaaaaatgaatataaaaatgcctaacttawaaggtttttagaaaaactacattagaaagtgtatgtagtgccaaacacatagtaggtcttcaggacatagtagttgctgctgcatctatagttgttgtagacatatctaaggaaaatattaccccttatcacacccttagaatctctgtgaaggaagaaactttattttgttcaccaggaatgagtgaaattctaagacttaatgagttttctcaagttctctgttagaaagtggaaaagtgcttatgaatgaaagtaaaaggaaatatgaattctgtgctagtgttactgggtagactgccagtaaaacactctcttagtaaaagaagacacaag

SEQ ID NO: 888754 - DNA, 526 bp, Homo sapiens
tgttttttgactttttaaatcatagccaatctgactggtgtgagatggtatctcattgtggtttgatttgcatttctctgataatttgtgatgttgagcattttttcacttttttttgggttcttgaatgtctccttttgagaagtgtatgctcatgtcttttgcccattttaaaatggggctgtttgttattcctcattcaattgtttaatttccttatagattgtgaatattagacatttgtcaggtgcatagtttgcaaatattttctcccattttgtagattgtctgtttactctgttgatagtttcttttgtygtgtagaagctctttagttcaattaggttctacttgtcaatttttgtttttgttgtaattgcttttgaggacttagtcacaaatttttccccaaggttgatatccagaaaggggttccccagatttttctccaggattggtatagtttggggtcttacatttaaatatttaatctgtcttgagataatttttatacatgaggacaggt

SEQ ID NO: 888755 - DNA, 763 bp, Homo sapiens
attagccatttgtcctaatgctctccctaccctttcccgctaacccccgactggccccagtttgtgttgtttccccccttgtgtccatgtgttctcattgttcaactcccacttacgagtgagatacatggtgtttgattttctattcctatgttagtttgctgaggatggtagcttccagcttcatccatgtccttgcaaagtacatgatctcattcctttttatggctccatagtattccagggtgtatatgtaccacttttcattatccagtctatcattaatgggtgtttaggttggttccatgtctttgctactgtaaatagtgctataataaacatatgtatgcatgtgtctttgtaacggaatgatttatattcctttgggtatatactcagtaatgggattgctgggtcaaatggtatttctggttctagatccctggagaattgccatactatctcccaaaatggttgaaataatttacattcctamtaactgtgtaaaaacgttcctgtttctccacagcctcgccagtatctattacttattgactttttaagaatcgtcattctgactggcatgggatggtatctcattgtggttttgatttgcatttttctaaaatgatcagtgatgttgagctttttatcatatgtttgttggctgcataaatgtcttcttttgagaagtgcctgttcatatcatttgctttgatggggttgtttgtttttttcttgtaaatttgtttcagttccttgt

SEQ ID NO: 888756 - DNA, 763 bp, Homo sapiens
attagccatttgtcctaatgctctccctaccctttcccgctaacccccgactggccccagtttgtgttgtttccccccttgtgtccatgtgttctcattgttcaactcccacttacgagtgagatacatggtgtttgattttctattcctatgttagtttgctgaggatggtagcttccagcttcatccatgtccttgcaaagtacatgatctcattcctttttatggctccatagtattccagggtgtatatgtaccacttttcattatccagtctatcattaatgggtgtttaggttggttccatgtctttgctactgtaaatagtgctataataaacatatgtatgcatgtgtctttgtaacggaatgatttatattcctttgggtatatactcagtaatgggattgctgggtcaaatggtatttctggttctagatccctggagaattgccatactatctcccaaaatggttgaaataatttacattcctactaactgtgtaaaaacgttcctgtttctccacagcctcgccagtatctattacttmttgactttttaagaatcgtcattctgactggcatgggatggtatctcattgtggttttgatttgcatttttctaaaatgatcagtgatgttgagctttttatcatatgtttgttggctgcataaatgtcttcttttgagaagtgcctgttcatatcatttgctttgatggggttgtttgtttttttcttgtaaatttgtttcagttccttgt

SEQ ID NO: 888757 - DNA, 773 bp, Homo sapiens
tatctcccaaaatggttgaaataatttacattcctactaactgtgtaaaaacgttcctgtttctccacagcctcgccagtatctattacttattgactttttaagaatcgtcattctgactggcatgggatggtatctcattgtggttttgatttgcatttttctaaaatgatcagtgatgttgagctttttatcatatgtttgttggctgcataaatgtcttcttttgagaagtgcctgttcatatcatttgctttgatggggttgtttgtttttttcttgtaaatttgtttcagttccttgtagattctggattttagacctttgtcagatgggtagattgcaaaacttttctcccattctgtaggttgcccgttcactctgatgatagtttcttttgctgtaatttatagatttaatgcttttcccattcaagaaccattgacattcttcacagaattagaaaaaactactttaaatttcatatgaaaccaaaaaagagcctgtataggcaagacaattctaagcaaaaagaacaaagctggaggcatccttctacctgacctcaagctatactacaaagctacagtatccaaaacagcatggtactggtcccaaaacagacayacagaccaatggaacagaagataaacctcagaaataacaccacacatttacagccatctgagtttcaacaaacctgacacaaacaagcaatggggaaaatattccctacttaataaacagtgctgggaaaactggctagccatatg

SEQ ID NO: 888758 - DNA, 638 bp, Homo sapiens
gattctaccctctctctcctacgttgccagctgttggctttgtattggatcattcccatcactcaacaagcttatataatttctctcatctgaagatcactctcatgacccttcttcctccagcttatgtacatttctttgctttccatttgagacaaaactctgaaagatgtcacttgctgtcattaattcattgcttcccactttcttttgattccactctcatcagactagaatccttgaactcaactaactgctcttgtcaagatcaccttgacctccatgttgctgaagccaaaggtccattctcagtcctcatccgatttgacccttcagcagcattggaaaagatttattgagtgcttccaactccttgaaacattttcygcatttggcttctaggacaccacacactgctttgttttctctgtcacctttgccagtttctcctttgtccatgaccttgtaatgtcagctctttgtcttctttttaaagacactcccctttgatgaccccattttgtctcatagctttaaataccattggtatgctataacttccatgtttatatttttaacctaaatcttttcctaaattccagatttatatacccaactgcctactcaacctttccact

SEQ ID NO: 888759 - DNA, 674 bp, Homo sapiens
ccatgcccagtctactaatgagcttatcaaaggcatttgttatttctgttacagtgtttttgatatttatagtttcttcttgattctttctcagaatttccatctctactcacattatcctctgttcttgtatattgcttattttgtcatttagggcccttagcatactaatcatagttttaggaaaatcgctggtcttacaatttcaacatttctgccacatctgactctggttttgatgttcactcagtgycttcaaactttgtttgttttttgccttttaatattccttgtgttttcttctagatacttgaatatgatgtattgggtaaaagggatgcctttaaacaggcctttaatgatgtggtggtaaggtgtgggggaaggggaaatgttctatagtcctgtgattagttttgagtctttcagagagtctgtgactctgggttgtaaactttgtaagtgcttttctgtctccccacttcttaggtgggacatgatggatagacaagtcaggaattgtgtacttctcttctatgtggaagggtagagctgctggagttgggaattttgcttctcccaggcagggtagagtctggtaaaacttaaccttaggttaggttctggctaaatagtttctcctgagggcagatcttgttaaaaagagcagagtg

SEQ ID NO: 888760 - DNA, 614 bp, Homo sapiens
gcctctccgggcctgatgggaggaaggtgtagggagctgtggtgccaagtggccggccctgttctgtgtggcccgcataagaaggagctgcagtcctatcacctctcctaaacttcttcttgctcacctcaacctccttaaagcctccaggggctaccactgtaaaatgggtaaagcctgggctccttagctttatcctcagggaactccgtaatctccatgccttttaatccttagttcccactgttctgttttccataccctgttttcccactgtttccagtttccaccctacatagcccctccatcaggcttttgcttattcarcagcctctggtattgaaattatcaggaataatgtatcagttagctatagctgcataacaaaacatcctcatatcaattgcataatccagcagtcatttgctgttgctcatgtgcctgtgtgttctctgggttcagctggtcagggctgggctttgccaggcagttttgctccaggctgccttggcccaggtagttttgctctcagtgctagtctgtgggtgggcaaggagggctcgactccaccatgcttgttttgagccaaggctgcagcacagtagtgacccagg

SEQ ID NO: 888761 - DNA, 579 bp, Homo sapiens
tccccattgcttcagaatggtctgagtatgttgctgagtcaggctcttcttgggggaaataaatgaaaccagtcttgatttcaaagtataattgttggctttttgtaaatatagtaagctaattagtcaaagctgtggaggctttgttcttctttttctccaattttacaattatggaaaacaagaaagacaagaaaaaggaagaccaggaggcagtatactgagaatggtcccagtcgataaagagaggacaggcaagcgcgttgtggccaagcaaagctggtccctgagcactgctgtggtcccaccctagctgctccttccttggttccttggcttgcggcccagcctcaggaaggtctgttgcacatcagctcagctcccaccctgtaagagactctctggagaaccaaagtcattttgaaaaaaawtttaaatcataccctttgcttaaaataaaagcctcaagcataagtacagtgaatgaatctgttcattaaattacttttaaaaccagtagaaataacaagaaatttttttaaaaaatatcctgagccaaggaagctaaaatcagaaggt

SEQ ID NO: 888762 - DNA, 620 bp, Homo sapiens
tcagagattttaaatcttgtgaattgatgaatgtgaaatattattggaatgttaatttgcgttttccaaataacaaatgatgcttaacttcttgtgtttgctaaccacttaggtttcctattaagtgatcaaacactatttctccatcagctatgtggttacaaatatctttttcaagagtgtaacttttccgtctttgtttctgatactttttgttatacagaattttaatgtatttattatttcctttatggtaagtagttctaaaattacctaagaaaaccttccttacccccaagatgataatgatattctccaaaattttataataaatgttaaacttttcacactgagtcttcaacgcyctatctttgtatatggtgtgaggaagggattcaaatttttttaatctttctataatagaagattgggatcttgtttttcctttcattcaacatgaaaaaaattacctatatatagaacctctgccctaatggtacttacagtcttttgcagaagagaaatcgtaaacaaataagcaaatatataagtagtaatagtgaatatttacataggccttacctgtttgaggcactaagccctttatttaacttatttag

SEQ ID NO: 888763 - DNA, 609 bp, Homo sapiens
aaagatatgttcaagaatgctcacagcagcattattcactgtagaatgaataaataaattgtggtacatggtaattgatgaattgcatgagcaaactattgagggaaagtctagacacaaaagaatacatgcagttgttcctctgtatgtgtgggggatgggtcccaggaccccatttggataccaaaacacaaggatgctcaattcctttaaataacatggtgtagtatttgcatgtaacctacacacattctctatattctttaaatcatctctatattacaagtacctaacacatgtgaatcctatgtagayagttgttataccctactttttatttgtattattttattgttgtattgttattttttattgtctttttttaccaatatttttgatccacaattgggtaaatctgaagatgcagaaccaacaattatggatgaccgactatactgtatttggtttggaatttaaaacatcagtcacctttgaagatgacagaggcaatagtgattggtagggctgttggtaatgctctgtttcttgatctgagtcctgattacatgggtgtgttcgctctgagaaaattcatcaagctatgcactc

SEQ ID NO: 888764 - DNA, 593 bp, Homo sapiens
cctaaattattggggacagcaattcatgcagtttaacaaactacatttccaaattgccttgaaactaggtagtcatgtgactgagttttgagcaaattttactgagagggtcttcagggaaagctccttaaaaagaagacaaaatatctagagaaaatcactttgacccttcctccttccaagaatacagacgtgatggccagagctcaacagccaccatcttggaccatgaggtgcccttgaggttacaaatcatatackagggtggtggagcagaaggatggaaggagcctgggtcttgaattattgtggagctgctagagctgccatgtcttgtctgctactcgaattcttacacttgagagaaaaataaacttccatcttatttaagtcactgttaatttggattttctgctatatatagctaaagctattttgcctgatgtatcagtgtgtatgacacaatctcatcctttcatgcaaggattacaatgtcctatgaaggtcacagataacaagaaggacttattttaaagtaacattatttagttgatatatcctgggcaatgaaaaacattgctgaatggtattcc

SEQ ID NO: 888765 - DNA, 663 bp, Homo sapiens
ttctctgagtcttagtttcctcatctaataaaataactctttgagccttggttttctcctcttcaataaaatacacttttatgatcattatgatagatgatatagaatatatataagcccacagcactgcacccagcagtgggagacacccagtgaacgttggtgtgcatctatcccttcatccttttcttagcctagtagttcacccttctttcctgatttacctcatatttmctaattctttagggcccagtttaaagatcaccttctccacaaaatctcctcccacacctcacccgcccaacttccatggaaagcaatctttcctcccctgtagcctgtcatcttctgaacacctgtggtacttaccactttcttcctggtgtctcagtgattgccgtgtgttattttttccccccagtctgtaaattccatggggtcaaactgcccaccctttactcttatttccccaaagcacccagcagaataatttgtacacaataggtgcttaaaaataataagctgaatatatgtagcacaattctctatatttagaaatcatctttcagttcttttttggatacagggtggtatatataatgcatctttccatttggtccacttagggaaaaaacaaaacaaaaccaaccaaccaaccaacca

SEQ ID NO: 888766 - DNA, 678 bp, Homo sapiens
tgggaggggagagacccttgagagtttgaagaggccatgcctggcttctaccagatctgaggttactgagctggctttgagccttttagatggagtaccagaattaggtttaagccagacttggcttgtcatggaggtacctgtcgaaggatgcaactttacatggctggatggacagctgctattccaaaatattcttttttctagtacttgagagggattgctatgtatttagaaaatttaaaaatctttcagaggttcctgttctaggtgaaggattaacttcaaccagcgtttccacaaaggttccatatcagaaagtctgggaaacactgtctactccatccctctttacaatttattayatgctgcagtacacagcagcataatgaaaactctgagaagtcacgtgataaagagatctattaaacttaactcagaagctctcccacttatttatggaatcagccttgcctttttgctttttctttttttccttgttgttgaaaaattcttagtgacatcctatgaaaccagcatttcacttttaaaatgctgcctttgcagttattacccatcactgtaatggggataaattttcagctaagaatgggacacaaagggatatgcgtgaggggatgggaaaatcaagagaaggataaagtatgttgagggtga

SEQ ID NO: 888767 - DNA, 740 bp, Homo sapiens
aaattattatgggccagattttatccaagcatcttatattatctcatttaattatgtcatccacatttgaggtagatactattattttcatttcatagatgaggaaatcaaggccctgagattaagacatcctatgtagggcccatatgtcatgtcctgaggtaattcagtatgaagggcccatgtgtcatgtcctggggtcgattctccaaatggtaagtaatggtactgtgactcagcatcagttattgtatcctgcccgagatggtaaatctgcccgttagttgggtgacttttcaaagcttgggaaaatgttatagaaatacagagataatgaggtaaatcaaatttgtagtattaatactttggtgtggtttaggaatatgttttatgatcatttggatattttgtgtatattttaaggtgttaaggaatccagcatattggataatctgattgcaatttgaaatgtgtaatttttattagactcatgatactaaytttaaagatgtcatagatttttattaggtttgtaaatggtattgaaatgtttattataacccagtttactaaatttggtttcatttattacattaattgcttagaaattgattaagtgcatagaaaattttgttttctaggattctgtcaggcttttggagtgcttgagaaaatcaggtctgttaaatgtgtaaaatttaaaatgcctgagggaatttaattaactaaatttataaatt

SEQ ID NO: 888768 - DNA, 645 bp, Homo sapiens
gggaggggttccaagcttgggaacaaggggtaattccagttcttagcaggagggggcagccttggcatcctggggtcagcaatgaaaagtcagaaaatggaaggggagtgcctgagagtgggggtgatggcaaactgagagccattgacagggacttggcctgggaaactcttttcccatcccttgtgaagaaagaccaaaacccattttattcttattaaaacacacacacacacacacacacacacacacacacacacacacacacacwctcacacttctagtgaagttgagtttaatcgcactataaatggcttgcaaaaacctttcgggggaaaatgacacttttcatgccttttggtctattaattctatcgtcaagaattaagtataaaaataactgaaaatgcagattaaactttactcagaaaatgatcatttcagtgttattttgaataataaaaagctgagtatctctaataatctctaataacagggaactagttaaatagtaaataagtaaatgtaatgttatatagctgtttaaaaaatcacaagcttagaatgctacaggaaaatagccataatataattctaagctaaagatgaaagatgcatacatacacacaaatagcaatgtaattt

SEQ ID NO: 888769 - DNA, 642 bp, Homo sapiens
ttaacaccatattctccctcctcctttttctttcttttgctccagagtttgtcagaatcagtttctattgcttgcaaaccatgaatcctaacaatccatatgccaggaaacctatgggattaattccattgaataagaaatgggaaggatcagcaggtttaaaaatagattgactcatcttacagtaccacaaattatcaagaaagtcacacagaaaaagccaccaccacaacttttatagattctggatgatggccattctccaggacactggaaccacmcatggaccagagtagacagaggcagaagcgcccaattgtactgatttccactgagatggcagatcagacattgctctcaagaatgttttctctcctgttcaccaccccaaaatatattatgttcaattctgcttctagaagtagactttatgctatctcaggcataaagtgtgagcatttttaaagtttcctagaaatagccaaaaaatcagacacttgaaatgcagtgtttcttacccagtcccactacagagaaacccaggcttgcactgtagtggtgttcttttgatgtcctttgttgaaaaattggggtcttttaaaaacacactcagacagcacaatgctgtcagagagcctcttg

SEQ ID NO: 888770 - DNA, 608 bp, Homo sapiens
atcttatcttcccagacctctcctctgcagattcaccctgctctcctttctaaacctgaacccactgggcccttgaagtcccttggtttagcatacaatataggttcagctgtgccccatgattattttctacagtgttgatgacaacgaagcagctgggccttagtggacagactattgtaggcagcaagcaggagatctgggttttggttttggttttaccactgccctgctctgtgctgtgaggcaagtgacttctcccctgaggttcttcattttttcatggataaaatgagggaattggattccatcaatctctgctgttccttctgcttttgatacttttaaattctgcagttatgcttcatgttgactttgtcaggctcatgtagagggaatggacagagctctgctcttagaattgtctggtgagtttctccagcaggtaggcattgcgttctgtctygaagtgtgtcacttactgttggtcccctcatattttgggtccatgtcattctcaccacttggatctttgagcagggaaggtgagaaacttgaggcctaggcagatgtaaggtgtgtttgtggaaggaagctttgaggcttac

SEQ ID NO: 888771 - DNA, 583 bp, Homo sapiens
ggctgtgcctcatcaatcatattttgaaagtgggtagacagaaaaaaatataaattttaagttagaagccaggcgcagtggcacatgcctgtaatcccaacactttgggaagctgaggcgggcagatcacttgaggccgggagttcaagaccagcctgaccaacatggcgaaaccccgtctctactaaaaatataaaaaattagctgggcatggtggtgcatgcctgtggtcccagctacttgggaagctgaggtgggtgtattgcttgaactggggtggtggaggttgcagtgagctgatttgacaccactgtactccagtctgggtaacaaagcraacgtctgtctccaaaagaaaaaaaataaaaattgagttagaaacatgccgtttaaaatgtgtatttgggcctggtgcagtggctcatgcctataatcccagaattttgggaagctgaggtgggaggattgcttgaggccaggactttgagaccagcttggacaacatagtgagacctccatctctaccacaaaaaaaaaaaaaaaaaattagccaggcatggtggtatgcacctgtagtcccagc

SEQ ID NO: 888772 - DNA, 589 bp, Homo sapiens
gaattaagagggttggaaacgtgaagtaaaatattttggttctgatagtaccaatcagaaagcagaaacagccacacactgcctttattattcttcataaaggctgaggcagaaggggaaagtgacaccgaagtctctgtggcgcaatcggttagcgcgttcggctgttaaccgaaaggttggtggttcgagcccacccagggacgcgctctccttttaygagctggtcgcgggaagttttgcagaaatcgagttcaggcctccgggataagaaggggtggatttccagggaccaagcaaagaaaccaccgacccttacactacgcggccagccggcgagcccttcgctttcggccggtgcagagcggcctcctctcccccgctgtcctctcccggctgcaggtgagcgcggccactccttccccggggtcttcacggcggtctaggcctcgccagggtgctggagcggggacgcgcagaggccgcgcgggcccgtttgccgcgcgcgcccgccgctccagctttgcgcgtccccggaggcccgcgcgtacacggggaaggcggcccgggctggtcttgctcggcttcg

SEQ ID NO: 888773 - DNA, 667 bp, Homo sapiens; identical to SEQ ID NO: 879581

SEQ ID NO: 888774 - DNA, 667 bp, Homo sapiens; identical to SEQ ID NO: 879582

SEQ ID NO: 888775 - DNA, 573 bp, Homo sapiens
ccccgtgagatactatgattgtccctgctttacaaatgaagaaactgaggcactgaggagaagtaacttgccaaagcaagcttttaatattggagaaaagaccctaacaaaaaagaaggcttactatgtgacaatcattttaacaaacactttcatagcatttttyttaatccacaacacaaacctgtaagaaataggtcaaaggcctattttaacgataaaaaatgaggcccttgaagggtaagtgacttgcccattgtcatacgggacgtggcaggtgtgggttcaaagtctaggtctgttgctttcaaagccttctttcctcaacacccagctgcctccctgctcccctaccctctctctgctctcagcttcagatgtgtgcttggcagatccagaaaaatccctcgggtgctggccagctgcctaaatgaggaatgaggtgacagccctgaatttacacatgcccaggcacctccaggcagctgttacctgcacccaagtctatgctgatgtgctttaccacaagccttgggtcagagatgagtgagaaaagtgggcagaaaaggagca

SEQ ID NO: 888776 - DNA, 638 bp, Homo sapiens
ccccagtccatgtttcccagcacccttctgcccaggtttcaaggtgtggtcattgattttcctcactgatctttgttaatttcagtgcaagcttttagaaaacgcggttgcctcttccctgcccactctcacctttctgatggagccacgcaaggggagaagcctgagtccctgaatcactgtatggaggaagctgtccctgggcacagacacccacatgaaactcttaggtgatttgaaaatatccttttggggtcttttctagcattactctaatgaatgaaccagcatatgggatgttaataagagtgcttatctcataggattctttgaaaagcacttagctcagtgccaggcacccagggacactaaatgtcctccctattatagaagtgcaacagaaatagaataattagacttctacattattatacagagagaaaccttctacgttcctcaaatacagatacactacckttaggggatacctatttattcattaagcacacttattgaacatctactatttgtaaacttatataagtcatcttttccttcgacgaggcacctgaactccactggggagagaagccatgtacgtcagtggctatctgtgtataaggcagaatgggatgagt

SEQ ID NO: 888777 - DNA, 628 bp, Homo sapiens
cccagctaatttttgtatttttagtagagacaggatttctctatgttggccaggctggtcttgaactcctgacctcaggtgatccgcctgcctcaacctcccaaagtgctgggattacaggtatgagccacaatgcctggccaatttttactcgtttctattcagtctggatgccttttatttaatgttcttgtccaattgccctagatataacctccagtaaaatgttgattagaagtggtgagacaagacattcttgtcttgttcctaatcttaggaagaaaacattcaaccttttaccactaagtatgctgttagctgttggtttttcttttcttttttttttttagactgagtctcactctgtcaccaggctagagtgcagtggcacgatctcagctmactgcaacctctgcatcccaagttcaagcaattctcctgcctcagcctgccaagtagctgagactacaggtgtgcaccaccatgcccagctaatttttgtttttttttagtagagatggggtttcaccatgttggccaggatggtctcgatctcttacctcatgatctgcccgcctcagcctcccaaagtgctgggattacaggcatgagccaccgcacctggcat

SEQ ID NO: 888778 - DNA, 676 bp, Homo sapiens
cactacttccttgagtgggctgatgcttgcttttactttgaaaccaatcatttttccatatgacaaagatcctttgcttggccaaacttgagtaaggattctaaactttcttctaggcccatctgtgcactttctcacaaaatccagttttagcaaaagaccccctcccatcttcaatatctgatcaggttcttcattttccaccatcccccaggtgatgtctgatcaccctggcttgtcttcagcaagaatcctgttagatgggtttagccagaatcccccttactccaaatgtttcctcttagtagtttaccttcaactgacccctatcctgctccttgcccatgatgtatttggagttgagcccaacctctttcctttgctgcaagaccccgctgcagtgatccctatacttatcgcgatggtcctgaatagtcttttttgcccacctttaacaagtatcagttttttctttaacatgtatttttatgtaaacataaatttttwaaaaatatttttaaggcaatagcaatttctgacatcacttgcagtactttcaaagagttgatcagtgctttaatatgtgccctatttgaccaaaatgtaactcaaacaaaaggctctctcttaagggataatattcaagattccaaggctagccttgaatccagttcaa

SEQ ID NO: 888779 - DNA, 579 bp, Homo sapiens
cttagcacaatccttcccatctctaatttcctcacatacagattctgtgaatacttctgtatttctcttttttttaacacaaatcattctagatgacatctgaagaataaaattctttccatggaacaacattcggctgacagatgaccatatgacacccttcaracagtacagtatgtcactatcagaatgcgactgctggggagtgtatattcaaggtaatatttaatgttcaagtcaaaacataatggaattttaccagcacttaatatgaacacacataaagagaggaacaacattcctcattcaaaaataatttgtgtttgatttgtaaaaatctgaaaatgtgttgttttataaaagaaagctaatcacattttagctataaaattaaaaaacaaattttaagataattttctcaagatgaaaaataataaagatgaatttatcctctgtttcatgttaatggtgtactaaaaatttattcaataaaattaagattgtggcttcaacctcaagcaacagcccccgctaaactcactcaagccctttaatatatgagagctgcattagtgtcac

SEQ ID NO: 888780 - DNA, 579 bp, Homo sapiens
cttagcacaatccttcccatctctaatttcctcacatacagattctgtgaatacttctgtatttctcttttttttaacacaaatcattctagatgacatctgaagaataaaattctttccatggaacaacattcggctgacagatgaccatatgacacccttcagacagtacagtatgtcactatcagaatgcgactgctggggagtgtatattcaaggtaatatttaatgttcaagtcaaaacataatggaattttaccagcacttaatatgaacacacataaagagaggaacaacattcctcattcaaaaataatttgtgtttgatttgtaaaaatctgaaaatktgttgttttataaaagaaagctaatcacattttagctataaaattaaaaaacaaattttaagataattttctcaagatgaaaaataataaagatgaatttatcctctgtttcatgttaatggtgtactaaaaatttattcaataaaattaagattgtggcttcaacctcaagcaacagcccccgctaaactcactcaagccctttaatatatgagagctgcattagtgtcac

SEQ ID NO: 888781 - DNA, 587 bp, Homo sapiens
tcactcatgatgcttattgtgcataagtgtgtttgcaattcaccctggaaaaggtaggacaagaaagcagtaacttgggttcacatgacatttattcttctgtattgatatctaaggtattacacaaaatgacctaattccccattctaatattcttgtgaaattaaaggggaaaggaacatttttctttctttttttttcgacaggatctcaccgttgcccaagctggagtgcagtggcatggtcacagctcattgcagccttgaactcctgggctccagcaatcctcctgcctcagcccaagaagtgctgggaacaggagctagctactgtgcccagcccctgtactcaccccatccgccttttataatgcagggcgagtctgaatctgttccctttttcagtgttgtcctcaatcaggtgagttgtataccrtctttccctatatggtttacctatttcacaggtgttaaccaatgaaaccattccaagggacttgatttctttaaataaattttttgtcttcactcgttgcaacttcttaacacaggacattttgccttttttttcttttcttttttgatttt

SEQ ID NO: 888782 - DNA, 665 bp, Homo sapiens
tgttctaaagatgtgtttgtgttataacttgtgtgtgtgtgcatgtatgcacacgcgtgtgccataggtagattgttgcagtaatggtgcccagtttcttcaaactttcctttatctacacctttgggtggtctccttccacttcagcagagcctgactgtatgacttactttggccaatgggaaaatagcaaatttaatgtaatcagaggcttgaaaagcacctgtgcattggggcttgcctttcttactgctttggaaccctgacaccaccagagtgaggaagcccaggccagcctcctggaggaagagagacacatggagcagcgataaacaatcctagcagaggtgctctagacaagtggttctcaaaatgtgatccccagattatcagcagcagtatcccttgtaaacttgctataatgcaaattctccagcctcaccccaatcctactgaatggaaagctttggatgtaatgcccaataatctatgtyttaaggagctctctaggtaatcttaatacatgttcatgtctgagcatgaagtcatagagccctctgagaaccacttctctagaccaaccagactgccaattgccaaatacataagtggggccattctagacctggggtaggcaaggcacacagtcacagccatgtgtttac

SEQ ID NO: 888783 - DNA, 598 bp, Homo sapiens
actagatcagtccagttaaacagctatatccattaggaggtgacattgcaaatggacaaggcttctatatgtcatgaagacaaacatatttttaataagaggcatttctatagagacagaagaaaaacaaacattaatgttgagcacaatttatccagacatctttagtcatagaggaggaaggcagtgacaatctgacayttttttctctggcctatattacaaggcacaagcttcagcttgcagggcctcagtaaagagggagtagcaatttcattgaggaaaagtcagaaaaataaaagaaacatttgaaagcattaggatggggattgtagccctgaaagaattcaggattcagtccaaattgtgtaaccacccaatgggttcttgcccaaattacaagtccaaattacttgcccaaattacacaattccaaattgtgtaacttgcccactgcctagacagagccaatttatcaagacagaggaattgcaatagtaaaagagtaattcacgcagagctggctatgtgggagactggagttttattattactcacatcagttttcctgataatttggggatcaaagtttaaggat

SEQ ID NO: 888784 - DNA, 679 bp, Homo sapiens
agaggctgaaaaggccttgataaaattcaacatcccttcatgttaaaagctttcattaaaataggtaatgaaggaacatgcctcaaaataataagagtgatacatgaaaaacccacagccaatatcaaaatgaatgggcaaagctggaagcattccccttgaaaactggcacaagacaaggatgacctctcccaccactcctattcaacataatattaaacgttctgaytagggcactcaggcaagagaaagaaataaagagtattcaaataggaagagagaaagtcaaattgtgtcttgtgtgcagatgacatgacagaaaaccccatcatctcagcccaaaagcttcttcagctgataagcaacttcagcaaagtctgaggatacaaaatcaatatgcaaaattcacaaggatttctatacaccaacaacaggcaagcagagagccaaatcatgaatgaacccccattcaaaattgctggaaaaggaataaaatacttgggaatacagttaacaagggaagtgaaagacctcctcaaggagaactacaaaccactgctcgaggaaattagagaggacacaaacaaatggaaaaatattccatgctcatgaataggaagaatcaacattgtgaaactggctatattgcccaaagtaatttatagattcgatgctgttc

SEQ ID NO: 888785 - DNA, 622 bp, Homo sapiens
agtctcttctcaaagtttttgttttgaaatctatttttttcttattcttttggtatcttttaagttcaggcatacatgaggtgcaggtttgttatacaggtgaacttatgtcatgggggtttgttgtacgattattttgtcacccaggtattaagcctggtactyatgagctattttttcctgatcctctccctcctcccatcctccactctttggtgggccccagtgtctgttgttctcctctgtgtgtttattttttcccatttatagcttccacttataagtgagaacatgcagtatttagttttctgttcatgcattactttgctaagtataatgacctccagctccgtccatgttctggccacggagataatgtcattcgtttttatggctgcatcctattccatggtatatatgtactccattttctttatccagtctaccgttgatgggctttttggttgattccatgtatttgatattgtgaatagtgctgcagtgaacatatgtgtgcatgtgtctttatgatagaacagtttatatccctttggctgtatacccagtaatgggattgctgtatcgaatggtagttctgtttttaggtctctgggggatcagc

SEQ ID NO: 888786 - DNA, 785 bp, Homo sapiens
gtagcaaaagctgcatgatgtaactattttgaaactctggagtctattggaaagtttgcaacttccaggagaaggcttggatggtaaattgtggttaattttggtcaatttcagttcttagctcagtaatagctacccattccccactcccagccctgtggcaagcaaccctccatgtgttccaagagcaacttgtaggagccagtgtgggcaaaaaggacactgtcctccaaatattgcaattctatcctctgatcactgcttgctgcttctgatcacagatgtgaagacaaaaaggcaagagaccattgttgttgaacctcccccattgtttcaaccctctactcctccagttgaagtgacatccagaggattcaaagtcctggcatctctttttcctcctctatttctctattttcccccttttgtgagccagacataaagacaaggacattcaaaagcaattgcacatatggggaaaattagaaagccactgtgaatgcccagaaaaaaatgcaagctgagaaaagaagtgaaaagactttaaacttacttctcaggtcaatccttggcacagagaaagcctacaacataacaaaaacaacaacaacaamaaaaaaaaacccagcaaaccctaggaaaggagaattttgtttccagagttaccacattattagattcaaatgttcagtttacaacaaaaagtcacaaggcatacaaacaaacaagacagggcggcccactcaaaggaaaaaaatagaaaccacccctgaaaaagaactgat

SEQ ID NO: 888787 - DNA, 573 bp, Homo sapiens
tatatttgcttaacaaagaagaagaaagaaggaagaaggaagaagaaaagaaagaagaagaagaaatggtctgaattctaagcatgacctctaatggatatgaaataggctagaacaactggggctacaatgagtgtttaagtacttggggaggtgaattgtctctctggaaatagcaccagaaagtcctttcagaaggagatccttttttaaccaaactgaaaggaacatgatgggcatgggcagaggaatgagcatttcagaagacaaaacacgacacgcacataaggcaggggctgggctgggttgcactgcagggagtggacagcaggctgagcggctggattggaatggaatgctcacatgtagtcagaagaagagctaataaggatgcatccctgggaagaagaacggagataagcagggaacgttgaaygactgcccagccctcctaacccctcttaggatctgtccctgggcagggagaagtaaatgagtctgaagtgaataattcaatgtcaagtcacttgtatttcatgcctcccaggtgccacggactggccttccctaagt

SEQ ID NO: 888788 - DNA, 440 bp, Homo sapiens
tttatcaggaaaggcatagaaccacatttcacgctaaggcatgagtgttaaacataccctcacctagccagttaaaaacattgggcaaagctgtaaactacatcacaggagttcaaaatgtcaacagagctgcccccagtcctgtctgtgtttttgcttargacccagtgttgtgtcactactccccattgataataaacaaaacatgcctcatatgttcacagttatttagagtttacagaattctctccttctatcaatttgtttgtgcctgaaggagcaggaaaggtattattttctgcattttatttcagagaaaacagaagctcagctgagtaatttgttcaagatcatccaggctgtggccggagcccacatcatccatgtctctatgtcagctgtctttccactgctccaagccacctgccctgctgccctcc

SEQ ID NO: 888789 - DNA, 440 bp, Homo sapiens
tttatcaggaaaggcatagaaccacatttcacgctaaggcatgagtgttaaacataccctcacctagccagttaaaaacattgggcaaagctgtaaactacatcacaggagttcaaaatgtcaacagagctgcccccagtcctgtctgtgtttttgcttaggacccagtgttgtgtcactactccccattgawaataaacaaaacatgcctcatatgttcacagttatttagagtttacagaattctctccttctatcaatttgtttgtgcctgaaggagcaggaaaggtattattttctgcattttatttcagagaaaacagaagctcagctgagtaatttgttcaagatcatccaggctgtggccggagcccacatcatccatgtctctatgtcagctgtctttccactgctccaagccacctgccctgctgccctcc

SEQ ID NO: 888790 - DNA, 440 bp, Homo sapiens
tttatcaggaaaggcatagaaccacatttcacgctaaggcatgagtgttaaacataccctcacctagccagttaaaaacattgggcaaagctgtaaactacatcacaggagttcaaaatgtcaacagagctgcccccagtcctgtctgtgtttttgcttaggacccagtgttgtgtcactactccccattgataataaacaaaacatkcctcatatgttcacagttatttagagtttacagaattctctccttctatcaatttgtttgtgcctgaaggagcaggaaaggtattattttctgcattttatttcagagaaaacagaagctcagctgagtaatttgttcaagatcatccaggctgtggccggagcccacatcatccatgtctctatgtcagctgtctttccactgctccaagccacctgccctgctgccctcc

SEQ ID NO: 888791 - DNA, 415 bp, Homo sapiens
tttttttttcttttttttttttttctgatatggagtctcactctattgaccaggctagagtgcagtggcacaatctcagctcactgaaacctccacctccctggttcaagcgatcctcctgcctcagcctccagagtagctgggattacaggtgtgcaccaccaygcctggctaatttttgtatttttagtagagatggggtttcaccatgttggccaggctggtctcaaactcctcaggtgatccacatgcctttgcctcccaaagtgctgggattataggcatgaaccactgtgcccagccacattacaacattttctaagagcccttgctctttggcctcctggcagatttgccaatgagaagggttgattgacaactggggggcagaagaaggggaaaccttggagtaggt

SEQ ID NO: 888792 - DNA, 472 bp, Homo sapiens
gcttcaatcaaagcaccaatacctgtttccacttcacatgctggaaccaaggatttctgagtgtgagtgcacgcatgcatcacctttcccccaatacagacccaaatctgagaacaatttgaggaggtgatagctctttccttttctccttctttcctctccttccattgtttttttgttttgttttgttttgttttgttttgttttaggaagtcattctgggactctggatagaagaagaaaagataaccagagctggagcagatggccagaggtaagcaaaatcctctgtggtggccgcagcaagctccaagagcctccttaycagtaaactaaccacatgccacaatttgccatgtgcacaggactctcaatgctctctctctctacatctgtctctcattatagttcccaaccccacctttttgcaccattcacacatttcaaccagtagtaatccccagaccactaa

SEQ ID NO: 888793 - DNA, 589 bp, Homo sapiens
ctagggcaggggcaaaatgccaccagtctctttgctaaagcataacaagaatcacctttgctctaattcacaacaggttgtcatctccatctgagactacctcagcctggatttattgctcatgttgttagcattttggtcagtgccaatcaacaagtctctaggaagttccaaactcccacatcttcctgtcttctgagccctcttagtctctaggaagctccaaactttctcacattttyctgtcttattctagccctccaaactgttccacctctgcctgttacctagttccaaagttgcttccacatttttgggtatccttagagcagtaccccactctaccagtaccaatttactgtattagtttgttttcatactgctatgaggaaatacccaagactgggtaatttataaataaaaagaggtttagtggacttacagttacacacggttgggaaggcctcacaattatggaggaaggtgaagaaggggtagatgcatgtcttacatggtggcaggcaagaagtggcaagaaaaagggggaaaagccccttataaaaccatcagatcttgtgagaactcacaa

SEQ ID NO: 888794 - DNA, 618 bp, Homo sapiens
ttgccaagtgcctttcagatgacaagctaaggagagagaggagagaaaacaaaaacttttacgtgtttatgtgtctggtatcttctcaatgtatacaattatctttactctcatttaagatatgaatatctggatggaaatcagaaacactaagaaaaaaatatgtctgtaygaggatgtgtgaaaaaaattaaagattatgaaattttaagaaatggtgaataaactgtttatgataaggtaaaaaagcaaggttgtacggattttgaacagagatatcttacagaaactttcaagccttatatggaatgtattctacttattgcaacatgggaaataatagttttctgagaatgttgcacactgatcttgttgtaacttcacagtcagtatctggaaatcttatatttttttccaaagaagaataaaaatttgctaattttgtgaaaagccttagaggcctttgggcaaataaagggaaaatttgacccatggtttcaaacaccagctacctacttacagtcttttataatttactctgaatcttgtatcttcatctacaaaataaagaaaaagaacacctttctgaatgtatactgtgagcatggaaagggatga

SEQ ID NO: 888795 - DNA, 585 bp, Homo sapiens
agagggagaaaggtgagagagggtagaagaagagaaaataaatattttctcatcatggtccatgtttctcaaggctggtctaagagttgcttgaaattctgttgcatcctttggaatcagtctgaagcatttcaaacttcgagtattccactcccactggcaggcccgtccctccagagaagatgagatgaaacaggatgtcttagcctgacaccattaaaaatttgatttatctacctctctttgttctgattccatgcacttcaagcaacctcttgattataatccagcttccatggcctccagggacaccgtgtgatggtcaggctgataaaagttttgtaacttgcataggttctatttctcactataaattgatatgctgcaggtcactraatgctttcaaatggtaagtattgtgtgttgaccaacaaattgtctaagtagcaaaaaaaggaggggaggggcagacatgcaaatggaggcacaaaaattcaccggctgacagtgccagactcaaaagaacccacccattccctcatgacatgccaagaggagctggctttcccatggactcacggggtc

SEQ ID NO: 888796 - DNA, 631 bp, Homo sapiens
gaagaaacaaatggagattttagagctgaaaaatacaataacaaatcaaaaactcagtcagtgaataggtttaacagcagactgtagaaaacagaggaaagaaacagtgacctggtagacaggacaatataaattattcaatctgaataacagagagaaaacacattgacaaaaatatgagcagagtcttagggacctgtgggactatacaaaagttctaataatcatgttatcatgaggagaagagaaaggggttggggctgaaaaattacatgataaaataatggcttaaaaattctgaaatttggtgaggagaaataaacttacagattcaagaagcaagaattcaagaagcaagcaagaaggarattcaagaagcaagcaagaaggagattcaagaagcaagagttccacatagaacaaacccaaggaaatctatgaatagactctgatatagtttggctgtgtccccacccaaaatctcatcttgaattgtaatcctcataatccatataatccccacatgtcaagggcgggaccaggtggaggtaattggatcatgggggcagtttctcctacgctgttctcatgatagtgagtggatatcatgagatctgatgggtttataagc

SEQ ID NO: 888797 - DNA, 700 bp, Homo sapiens
cttcatgttaaaaatgctcaataaactaagtattgaagcaacgtacctcaaaataataagagccatctgtgaaaaatccagagccgatatcatactgaatgggcaaaagctggaagcatatcccttgaaaaccagcagatggcaaggatgccctctctcaacactcctatttagcatagtagtggaagtcctggacagagcaatcaggcaagagaaagaaataaagggcatccaaataggatgagagggagtcaaactatccctgtttgcagacagcatgattttatatctagaaaacccccatagcacgtcccaaaagctccttgtgctgataaaaaaaaacttcagcgaagwttcagaatacaaaatcaacataaaaaaatctctagcattcctatctaccaacaacagtcaagctgagagtcaaaccaggaacacaatcccattcacaattgccacaaaagaataaaatacctagcaatacagctaaccagggaggtgaaagatctttacaatgagaattgcaaaacactgttcaaagaaatcagaggtgacacaaacaaatggaaaactattccatgctcatggaaaggaagaatcagtatcattacaatggccatactgccaaagcaatttacagattcaatgttattcctaccaaactaccaacgacattcttcacaaaactagaaatcaggat

SEQ ID NO: 888798 - DNA, 597 bp, Homo sapiens
agtaatgtataattctataaaaagttttaaaaatatacagaattttattaattcttcttgtaccccatgattgataacttaaacaccattcccagtgaatgtgcctaattatggggcctttatgagtatgtgattctttcccaggctttctgctttgggggttgtaggcacatgtggtggccagagcccggagcaattctttggcagaggctaactttggtggggacaaaacagaactaccctgtgcagcctggaccttaaaagaacccctttgagcaccccattttggttggctgaacttttcatttcctttatcacttctggatcaatgagctgaaagtgttcttgtgtgtgctaaaaggtagacttagatccaaaggatttatttgccttggagcacgccctttargaaggcatatccgctctttagatgagagtcttagagttgtttacaataactgctagtctgctttcctatatgagtaatttatctcaggaagtgacttgagtcttcagaaatctggcgcaatgcacatcaacacatctgggcttaggaaaggttgtgttggcaaggcagccatggtgaagtggacttga

SEQ ID NO: 888799 - DNA, 528 bp, Homo sapiens
cttttatttttgatttttcttgttacatcttcaagggagaacattctgctttatctaatctgtatctaatacaatgattgatagattgttaagcacaataataggtgcttagcaaaagaacattggatcatggattgatgaatgagtggtagttgaataataaatacatgatccctgctttgtagaaatttataccccagtgggttagagagatggtttgggagacagaaaaaaactgtcttttttttttattattatattttaagttctagggtacatgtgcacaatgtgcatgtttgttacatatrtatacatgtgctatgttggtgtgctgcacccagtaactcatcatttacattaggtatatctcctaatgctatcccttccccctccaccaactccacaacaggccctggtgtgtgatgttccccttcctgcgtctatgtgttcttattgttcaattcctacctatgagtgaaaacatgcagcgtctggttttttgtccctacgatagtttgctgagaatga

SEQ ID NO: 888800 - DNA, 758 bp, Homo sapiens
tcctaactatcctagaggttaaggtgggaggatcgcttgaggacagaagtttgcagtgagctatgattgcacctgtgtataatcagtgcactctagcctgggcaacatagtgagacctcatctctgaaaaaaaaaaawaataataaaggacgaaagaaagagtaaaaacaaaccccaattcaccctctataaaataacaaatgaaatgggaagtggaaaaaagggaaaaattaggtaagcctatatgatacagtagaaaacaggctgcactcagatttgcaaataagctgttttgcatttatttacaatgcttatagaatgcacttctttggtgaagggactctgaagagatattgcgtaataagacttatatactaagcattgatatgaacaacccaaagtcactccttggattggctcttgtctccatccctctgtgaccccactcaggtttactgtcatcccactttgttaccctacattttttaggctcatgtggcttgtgtggaatggtgagggaaactcttactgatgacagagacacagagacagactggccactaccacatggtaacctgagacttggaagcagtgagcgagagtggtccattctgatgggttccggaccaactctctctgcaaatgttaattgtcatactccttgtaaacagatctggttttccacagaggactccgccttttggaatagccccaacaaatcctctcaaagcatattctgtccaaaaggcccaacagac

SEQ ID NO: 888801 - DNA, 654 bp, Homo sapiens
tagccctatgagattggtgcttcagagtagagcttgactgtgtgggagctgaacaagacagttactctgccaggacagaggaagaggaggaaggtgcttgagacacctgtctcaggtaatggccttcctggctgcctaggaactgggactggggagctaagataaggggcaggccctggggcagccattacccacaagaagggaagccctttcagtgggttggggcctgtgaggggctgcagtacagtaatgcccctctaggaaacgggaacatagggacagtggaggagtttgttttgcaaggagagaactggacacaggaagaagttttgacagagatggagaaagatctagaacacatggcytcagaggcaagagaaaagggagagatgagggaaatgggttagtattgtgggtggccaagcctgagtgtacatgggctgccaccttcaggggccttgcagctttagaaagtacatctaagttgggaaagcagcccacctcaactgtctcgggggtccagaaaccactgcacagacacccctcttttggaagtgactgcaagtggggtcaggggtcagagcccaggccacagtgcttcctgggcttcctgtcacaggagagcaccgggtttggataatcttggctcagcat

SEQ ID NO: 888802 - DNA, 583 bp, Homo sapiens
gttgctttcaaattaatagccattgatctgtttttttttttttcccacaattctcctctgtccttttgtcaaattatctagacatcggtccttgggacaaaacccattgcaccatttatattgaccatggtttaatgagtgacctggtcttcctgtttgcatagattgtaataggcccatccatctgagagtctgtcagccagactgagatgtgtaacctctaygtatatttagtttctaactgggaagactttaaaatgaaaaccaagtaattgtgttacggtggccatttgcatttatttcagatactgatcgggaggagtcctattaatcacagtagtaatagatcttcaaattatgacctactgagcaaggtcatcccatatgagatgaataatatatattcacaatgctcagcttgcttctcatgggcagtacttcataccaaatggcttttagggaaatatgtatggtataatttttcagacaaagaattaaaattcctagttgtgatggttaaaaaaaaaaaacctctccagtggaaattagaaatacatattctcaatagctataaaatgaacta

SEQ ID NO: 888803 - DNA, 669 bp, Homo sapiens
tggattaagaaaatgtggcgcatatacaccatggaatactatgcagccataaaaaatgatgagttcatgtcctttgtagggacatggatgaaattggaaatcatcattctcagtaaactatcacaagaacaaaaaaccaaacaccgcatattctcactcataggtgggaattgaacaatgagaacacatggacacaggaaggggaatatcacactctggggactgttgtggggtggggggaggggggagggatagcattgggagatatacctaatgctagatgacgagatagtgggtgcagcgcaccagcatggcacgtgtatacatatgtaactaacctgcacaatgtgcacatgtaccctaaaacttaaagtataataataaaaaataaataaataaataaataaataaataaaaagaaaataaacagttgaagatagtgaatctgacacatttagtaatgagcaaatcctattgtgtkccccagtatttaggcacacctatgcaaaaaagtcatttcaggaaactatggctttatatctgagtaaacaaaagtggagggaaagggtttggcagtgaagaacaacttgttcacatcccttgttaaagtaatcccacataaccttattccatttcaagccaagactgtttagaatcttatgtcctgtt

SEQ ID NO: 888804 - DNA, 628 bp, Homo sapiens
gcaggatgaaggataatcatcagaaagaatacaaagtgggccaggcatgctggttcatgactgtaatcccagtgctttaggaggtggagctgggaggatcacttgaggccaggagtttgagaccagcctgggaagcctagagccccatctctacaaaaataaaaacaaaagactacaaagtagaaaaatcagagtgaaatagaatcttcaatacaaacagtagggggattttagcaaacagtagctgactaacatcagatggtgctaagatttgtatggagttcagtgcagagaggtctttttaacaagcaatttaaatgtgaacattgccttgtttacayagctcacataaagtgcagtataatgtgcagggaaaaaaagtaaaaagcttaaataatctttattcttaggacagtgtttttcaaataaggattatggctcacttttggatcataacataaaataattttcttgtggctccaagaaaaagaaaacccaagtttaagaaggcttaacaatggaggttacctgtatcatataagaagtcctgagttatacatctactaacaatagatccatggcaagacacatgttagaatttgcactttggaatggtctttctctcaca

SEQ ID NO: 888805 - DNA, 628 bp, Homo sapiens
gcaggatgaaggataatcatcagaaagaatacaaagtgggccaggcatgctggttcatgactgtaatcccagtgctttaggaggtggagctgggaggatcacttgaggccaggagtttgagaccagcctgggaagcctagagccccatctctacaaaaataaaaacaaaagactacaaagtagaaaaatcagagtgaaatagaatcttcaatacaaacagtagggggattttagcaaacagtagctgactaacatcagatggtgctaagatttgtatggagttcagtgcagagaggtctttttaacaagcaatttaaatgtgaacattgccttgtttacacagctcacataaagtgcagtataatgtgcagggaaaaaaagtaaaaagcttaaataatctttattcttaggacagtgtttttcaaataaggattatggcycacttttggatcataacataaaataattttcttgtggctccaagaaaaagaaaacccaagtttaagaaggcttaacaatggaggttacctgtatcatataagaagtcctgagttatacatctactaacaatagatccatggcaagacacatgttagaatttgcactttggaatggtctttctctcaca

SEQ ID NO: 888806 - DNA, 670 bp, Homo sapiens
aaaaagtaaaaagcttaaataatctttattcttaggacagtgtttttcaaataaggattatggctcacttttggatcataacataaaataattttcttgtggctccaagaaaaagaaaacccaagtttaagaaggcttaacaatggaggttacctgtatcatataagaagtcctgagttatacatctactaacaatagatccatggcaagacacatgttagaatttgcactttggaatggtctttctctcacatttctagtctcatggtygcaagatgacagattatcccaggcctcgtgtttacattcgcagactaaaaaacactgtggtagataggaaaagcccctccccagagatgactcccaagtcctcactcccagacctgtgaatttgttgccttacagtcaggcaacaaatcaatctacagatgtgattaaattaaggatctggaaatgaagggattaacctgtcttacctgggtgagttcagtgtagtcataagagttgagtgagccaggagatttggcgagggaggtgtgaccctggaagcagaatgatgtggattaagaaagactcacctagcgattgctggttttaaagatggaagggtatcatgagccaaggcacatgagtgcctcttgaagttggaaaaggcaaaggaacaggttct

SEQ ID NO: 888807 - DNA, 629 bp, Homo sapiens
aaactaaggccagtttaaaaattaaagccagtcaaaaaatagattacagaaaatattttttaaataataattgattataaaattatagctaagaaaactctaggcctctttcaagcaaagtaaattccaaataaagcatgttcctcatataacttcttgacagtgaccagaatatgatttagacacaacagttaaccaaacttataaaatgcacctcttacttcgtgattctgaggaaatttcagagagtgaaattccagcctctgtttcttttgttttgtggtctttcaaatatataacatccctgaggagaacgtaggaagctcttctactttgtgtcaaggctccgggtgattcatttggaatcttctacctttgattcacacatatacttttaggttcaagagtatgccttactttattaccatagcctgtcgcaggmtcgattaaaatttctggaaacaaatgaaaaattgtgttatgaaaagaatatgattctaagaatcaggaggctcttattggaatattagaattatatacatacagatcattgcacttaagatatttccacttagtctgtgcctctgtctacaccttgatttctgctacttccttggcccccaagtatg

SEQ ID NO: 888808 - DNA, 619 bp, Homo sapiens
agtagatcattcccatcatttgaattcactattatgattttaattaaaacctttgttaatatctagattggtatcttataaagacatagagaaaaggatgggttcatttcatctgaaaggttagggttttctttggtttgatatgtttagcttggcttttaaaattcttgaacagactttatttctrttcttaatgtattttttctattttaattattctggctttttctcaagtaaatctgctatttttagaatagatttctatctatcatctcccatagctgtattggctctcattttattcttggttcttcatttctgcattctgggaaagtatctcaaatttgtctttcacaacattgactggacttactgtagtttccactagcacaaatgtatattttaattatgctttctttttccatttttgtctctctccagaaatatttcctaacggtcatacttgtaattactttatgttagtttttcatctggggatctcctttgctaggatttttgcatttatttcagagaaatcagctgtcatttagcctgcaaaaaatgccagctgattaaatgatacctctgttgttcaagggcatatgatttctgtgaccat

SEQ ID NO: 888809 - DNA, 644 bp, Homo sapiens
aaaccctgtctctccaaaacaaacaaacaaacaaaaaagaccaaaaaaacaaaacaaaaaaatttgccaggcatgatggcgcacgtctgtagtctcagctactcgggaggctgaggcaagagaatcacttgagcctgggaggcagaggttgcagtgagccgagatcacgccactgcactccagcctgggtgacatagcgagactctatctcaaaaagataaaaaaaaagaatgcttacttgagatatggatattatgctaagttttctctaacattatacatgaccaattggtctataatagaaaacatccattcaaaaacatttgcagatgatattacttgttaaagattgactccacacttgtattttattatattttcctgagaattgttccatgtaaatatyattgtggagaaacatttctcttttcccttctgccaccaatgggaattttgatttatggtaaatgacttggaccttatgtttatcaggacaaacatagattcaacaggacacttgactttgtcctaagataatcacgttgcaatgtgtgtgttttaaaaagaaaatcaattaatctcagtaattttaatagtgttagtttttctaaggttaatgttttttcagtttgtgattaattggt

SEQ ID NO: 888810 - DNA, 620 bp, Homo sapiens
gttataacaaactaccttagactgagcaacttataaacgacaaaaatttatctcttacaattctagaggctgggaagtccaagagaaaggcagtggtagattgattgtctagtgagggcccactttctggttcatagatgtcttctagttsggtccaccttggtggaatgggtgtgggacctcaatcccattcataaaagctctgcccttttgaccttgttacctcccaaggccccacctaatccttatcacattggggattaagtttcagcatacgcattttcggggatatagacattcagaccatagcaaggggtttctccctaaatggggctaggatgtatcagaaaaagaaatatttaacaagccctaaggctgggaggagaagcgtgcacctgttcaaataactgaagggaatgaaagaagctggaatgtggagcagcaagtgggagatgcgagaaacataaagctggagagctggacaggagtgaaactatgctctttgacaacatgttcataacttaatgtttcatctttctggcaacttcaattaattgattttaaacagaagcattatttttaaaggacttttagtgcaacactccagagagtggagtgaa

SEQ ID NO: 888811 - DNA, 606 bp, Homo sapiens
ttcaacaaatggtgctgggacaactgaatatccatacacaaaaggattaagttgaatccctacatcacaccatatacgaaaaattaatccagagtgtatcataaacataaagtagtatctaaacctattaaacttttagaaaaaatgtaggaataaatctttgtaatttaggattaggcatagccttattagatatgacatcaaaagcacaagttccaaaatgaaaartagataaattagacttaattaaaattcaaaaagtttgtgcttcaaaggataccatcaagagtgaaaaaacaactcacaatgtgggagaaaatatttctaaaacctgtatctgataagaaactcatatgtaggacatacaaagaaattatacaaatcaataatagaaaataacccatttaaaatacaaatgtatttacatacagatgtaaatacagatgtaaacttgggttactataagtcaaaaaggcactttaacttatattttcaacttacgatggtttattgggacataacccatttaagtaagcacactccactgtatttaaccctatttaagtaagtacacttcgtgtaagtcacgccgttgtaagtcaagga

SEQ ID NO: 888812 - DNA, 635 bp, Homo sapiens
attaatgtattgagtttatttaagaaaaactgagggatcccactcattttctttcttcttcatctcttattcctatatttttgggtggtcagagcattctttccttcaggaaagtcatggctcctttaaaagcatttcgcacctgaggtctttgtctgaatgggatggatgaatagcctgaagccctacctttgacctgctgtcaaaactccagccattgtatagttattctttttgacctctccacctagttcttttcaatcagggcasgatctgtctccaatttgtttccaagcctcaaatctacatcccttattaacatatttcctccaatccagtcagaggcttaggggtcaaatgtctattggctaaactattttaagtttttctagatatatatggtataaataacactttataaatcaatgtattattttctgctgaaaatttcattgtttagcacaaaattatttttgattcattcatttcaagccaaaatatactcagtatccagcctaaacataggtaagattattttaagtattcttctaagagaatttcttacagaatattatttggaaattttctttttttaatttttaattttaatttttgtggatacatagtaggtgtat

SEQ ID NO: 888813 - DNA, 480 bp, Homo sapiens
ttagctaatgacctccaggtctatccatgttgttggaaatgacaggatttcattccttttatggctgaatagcactccattgtatatatgcaccacattttctttttctattcatctgttgatggacacctaagttgtttccaaattttggctactgtgaatagtgctgcaaaactagttttttatttcctgattgctaaagaatgctaactagccacaaatggaatgataccagtttagtgaaaagtcccaaaccactaaggtataaacragacatggcttgatagttttccccaatcattcctttcatttgtacaatcaaatttctttttaaccctgtgaagtacatgctttaatgacatctttgccaagttccataacttgcctcttctagtttagagcgcaatcccttttctaaatgtaagagacagtactttggtattagagaattcacaacacacaattcaaaatgtacctctt

SEQ ID NO: 888814 - DNA, 622 bp, Homo sapiens
tggtgttgttaatagctctctaacattagatcaacatacatttaatcattcccctgttgataggtatttaggcttattctacttttctgttaaaacaatacaacaccgaacactgaaggcctctgagattccagatttagaaatgctttactttgacataccaaggttcacaatggaagcttcagttttccccagaatttgttcattttatttagagaatacccctcttctccttccctaagacccatgattatatatctggccatcagtcctatgtgtataggtgggacagagcactgaaagtcactctatattatacccatggtgaatacccctgttgagtcttgattctcattcttaccctttctacagccaactctgagcctgctctttgcagatcctacaaaaaagattggccacctcttctatgacagtgacctcctctgctgtactgcttttctcakaaatttcaatcagctttccatattttaaaaaatatttctcaaatagtcctgatctttctttcagtctctttataagttccatatacccttagatgggagactagctaaaatgtcaaggataagacttatgatgcaaaattatatttattttaaaacaa

SEQ ID NO: 888815 - DNA, 549 bp, Homo sapiens
atagtgcatcagatggaaaaataggaattactgatctgagagtggaatgcttgagattataatggcagagctagtgttgtaattggagataagagttcatgattcacgtagtatggaggagcagacagttgatgccgaggatgtcaagcagctcagatatcaaggtgatagatgaattacttatatgaatgttatgcctgcaataataatacaggcacagtagtagagaaatcaactaaactgatgcaatcagtacatgaattataaacaattgactaagaggtgagtaggttatattaaaaaggagaaaaagcctgttgccrtgtgttgagaaagtggcagagtttggaaaaagtaagagaaagaaatggtttgggtacagaaaacggtgacacctacctctaggtcctaaagaagataagatgttcctccaaaaacaagctttacatgattaggattctcaagatcagtcaagcatacatttgaagagaaaggtgaagggatgaaacatgtaacttggaaaactggagaaaaatgaaaagggatatg

SEQ ID NO: 888816 - DNA, 637 bp, Homo sapiens
tcggcccttttaagaccaatgacaagcactgagtgacagatctatcattgtcttactaataatactgcaggtatcggagtctttatttagttttttgatttatgcattatgtattctcttacaatagacttgttaaatgtagtttaaattgagaagctcctggcctagagatactgcttcaattacccaggcaacatcaactgaatcaattttagaaatgaatccattattaacctgtaaataatatacacattataccttaagaagaaaaaaatatgtagttgtacatcaaaaaatagaaaagtttacagctttttaaaattcttatagttgcgttaaattcaatcatttcacacagttgaactccaacttgttttaggaagtatgctatattatttttctattacttccataataattaccacaaacttagtgtcatacaacatcacccatttattatctcatagttcttaggttgtgtrtttaactggactcaattgggtcctctgtataaatctcacaagactgaaatcagtcaagttatccaacaagctgaactctgattggttggttatgagaaggaattccaacttccttcaggttattagcagaaatgggatgaatccttctcctgctg

SEQ ID NO: 888817 - DNA, 652 bp, Homo sapiens
gccaattttgtacgatgagtgaaaaaaagacttgaaggtaataatggagtttggtcgacctgccgtgtggttcaaactctgtaggaaaggaaatgagcccaaagatgtgataaaatgggaaattggacggatcctgagattggaatgataaatttttaaatacatacataggtatagaaggaatgcctacacagcaggtattgtctggaagagggatattagttcaatagatgtatatgtttttgagagggcacagtttgtgtcaggaataacctgcagaaatcaaaagagtcagtttgatgygagaagcaagaaaaagggaaaagttatttatctaataaatatttattgagcagcctctgtgtgccaggaattatacaagctgctggagttacagaaatgagtaagactcaattcagggtctcaattagatcagcctgctggaatgattgatgtttccagccttgaaatcactgtggttgagaaggtggcagtttcaaaaggcagtactaaatattagtattcatttaataagagaactgatgtaacaaaccaagtggtaatacaaaccagacaagccagatagaatgcttaattgtgaaaagaagtattgcatacggaaaacctaggagagtaataataggatggccct

SEQ ID NO: 888818 - DNA, 675 bp, Homo sapiens
tcttttgtggagtgctggttcaaaccttttgcccatttttctattgggttgtctatattttctgtattgatttgcaagagttctttatggattctggatatgattctcttgataggtacatgttttgcaaacaacttctctaactctgccagttgtctttccagtctgttaactgtgagttgttgacaggggctattatcattatcacttatatttttccctcatggttatttgtcttgtttttaaaaatgtggtgtacaccaaggtcatacaaatgttttcctatgtttattcagaaagctttattattttacctgttacatttatatttgcagtaaatcttgaataatttttgtgtaaagtgtgatgtatgggtcaatctacmctttttaaaacatttatacagttgacccagcacgattttgtgaaaagatgatctttttacattgtaggacagtgccactttatcataaatcaggtaatagtgtaactgtaggtctgtttttggactctctggtttgttctattggtctatttgtttatcattgcactgataccaccttgtcttaattgctgtggtttagaataggtctcgattactggcagtataaatcctctagttttattattcaggattccttgactatagttgccccttcatattttcatttaagt

SEQ ID NO: 888819 - DNA, 700 bp, Homo sapiens
tcttctcctgcattattttgctgagggtaacggcttccagttccatatatgttcctgcaaaagataggatttcattcttttttatggctgtataatattccatggtgtatatgtaccacattttctttcaccaatctgtctttgaygggtattgaagttgattccaagtcttttctattgtgaatagtgctgcaataaacattcgcatgcatgtgtctttatggtagaatgatttatagtcctttgagtttatatttagtaatggggttgctgggtccaatggtaattctgtttttagctctctgaggaattgtcacactgttttccagaatagttgaactaaattgcactctcaccaagagtgcataactgttaccttttctctgtaaccttgccagcatctgttatttatttatttttttactttttaataatagccattctgacgagtgtgagatggtatccgattgtggctttgatttgcatttttctaatgattagtgatattgagtttttttttcataggcttgctggctacatgtaagtcttcttttgaaaagtgtctgttcatgtcctttccccactttttaataagattgtttgtttttttcttgtaaatttgtttacattccttatagatgttggatattggaactttgtcagatacatagtttgcaaatattttctcccactttttagg

SEQ ID NO: 888820 - DNA, 527 bp, Homo sapiens
tttgggaggctgaggtgggaggatcactggagttcaggagttcaacaccagcctgggcaacatagtgagaccttgtctctacaaaaaatttaaaaattaccctgctgtggccgggcgcggtagctcacacctgtaatcccagcactttgggaggccgaggcgggcagatcacgaggtcaggagatcgtgaccatcctggctaacacagtgaaaccccatctctactaaaaatacaaaaaaaaaattagccaggcgtggtggcgggcgcctgtagtcccagctactcgggaggctgaggcaggagaatggcgtgaacccgggaggctgagcttgcagtgagccgagatcgcaccactgcactccagcctgggygacagagcgagactctgtctcaaaaaaaaaaaaaaattaccttgctgtggtggcaaatgcttgtagtcccagctactgaggtggctaaggtgggaggactgcttgagcctgggggttcaagcctgcagtgagccatgatagtgtcactgcactcc

SEQ ID NO: 888821 - DNA, 661 bp, Homo sapiens
gatgagtaacccagagtctcaaggcccagatatatttagcagatagggccaattttgtgattctgtgccagagagatggggaggctttctaaagcggatcttaagtgaagtcaagagatgtagaaaaaagggaagagaaacctgaagggcagtttcttatcactttagttgtattagtccttcttcatgctgctggtaaagacatacccgagactgggcaatgtacaaaagaaacaggtttaatggactcacagttctacttggctggggaggcctcacaaacatggcagraggtgaaagacctgtctcacatggcggtacacaagaaaagagagcttgtgcagggaaactcccctttataaaaccatcatatctcataagacgtagtcaccatcatgagaatagcatgggaaagacctgcccccatgattcaattacctcccactgggtccctcccacaacacggaactgtgggagctacagttcaaaatgagatttgggtggtggcacagccaaaccacatcgttactcatatgtctcagtaatcacataaaggcacccagcaaatatttgtggatcttccctgctctgtgcaaagccaacagaagagcatataaaacaaaaacaacactaaccttgtgtgtttacctaattgcagagg

SEQ ID NO: 888822 - DNA, 661 bp, Homo sapiens
gatgagtaacccagagtctcaaggcccagatatatttagcagatagggccaattttgtgattctgtgccagagagatggggaggctttctaaagcggatcttaagtgaagtcaagagatgtagaaaaaagggaagagaaacctgaagggcagtttcttatcactttagttgtattagtccttcttcatgctgctggtaaagacatacccgagactgggcaatgtacaaaagaaacaggtttaatggactcacagttctacttggctggggaggcctcacaaacatggcaggaggtgaaagacctgtctcacatggcggtacacaagaaaagagagcttgtgcagggaaactcccctttataaaaccatcatatctcataagacgtagtcaccatcatgagaatagcatgggaaagacctgcccccatgattcamttacctcccactgggtccctcccacaacacggaactgtgggagctacagttcaaaatgagatttgggtggtggcacagccaaaccacatcgttactcatatgtctcagtaatcacataaaggcacccagcaaatatttgtggatcttccctgctctgtgcaaagccaacagaagagcatataaaacaaaaacaacactaaccttgtgtgtttacctaattgcagagg

SEQ ID NO: 888823 - DNA, 623 bp, Homo sapiens
cctgcaactcagcagcaacaacaaaacaacctgattcaaaaatgggcaaaagacatactaaatagacatttctccaaagacgatctacaaatggtcagtaagcacatgaaaagatgttcgacaccattattgactaggcaaatgcaaaccaaaaccatagtgagatactacktcatactcattaggatatatgttaatttttaagggaaaaaagggagaaataaccagtgttggtgaggatatgaagaaattggaaccttcatacattgcagatgggaatgtaaaatggtacagctgcaagtttggtggtttctcagaaagttaaacacagagcaatcatttgatccaggatttccacttttaggtttatgctcaaagcattgaaagcagggactttcatcagatagtgtataccactgttcatagcagcattaatcacaataaccagaggtgaaaacaatccatgaacatcaacagatgaatggataaacaaaatgtgatatctatatatatatctatatagatatatatatagatatgcatagagtggagtatatttatccataaagaatgaaataggctaagtgaaataagcctggcatgaaaggatacatattgtatgg

SEQ ID NO: 888824 - DNA, 615 bp, Homo sapiens
tattcctccattcctttattttgagcctatgtgggtctttgcacatgagatggtctcctgaatacagcacactgatgggttttgactctttatccaatttgccagactgtgtcttttaattggggcattttgctcatttacatttaagattaatattgttatatgtgaatttgatcctgtcataatgatactggctgtttattttgcacattagttgatgcagtttcttcacagtgtcattggtctttatattttggtgtgtttttgcagtggctggtactggttttcctttccatatttagtgcttccttcaggacctcttgtaagacaggcctagtggtgacaaaatctctcagcatttgcttgtctgtaaaggattttatttctccctctcttacgaagcttagtctggctggatatgaaattctgtgttgaaaattcttttctttaagaatgttgaaatattggcygggtgcggtggctgacacctgtaatcctagcactttgggaggccgagatgggcagatcacgaggtcaggagatcaagaccatcctggctaacatggtgaaaccccatctctactaaaaatacaaaaaattagccaggcatgatgg

SEQ ID NO: 888825 - DNA, 633 bp, Homo sapiens
ggtagcctctgggcttcttggcttgtctctcccagtgtggaacctccaccttaagagaaaagctggtgacagcaattgggccctggaattctcagtctgatacaccctgggatagaatatccaccctacaagtggggctgtgtggcagagggagtcccactctttctgtagtattcacttgaaagttagcctctataatatgaaactcgggggatgaaaggtgccagtggcctacttctcctgkgggtggtagcagctttaactggggatttagtgtcttcttggccacacccacccagagatcccatcacaatgagctggctgggagagaaggaaggaagttgtgactcaagtgctgcagactctcattattcttgaaaaaaataaatgtagttggaactagctgatgtaatcagtatctggtttctctccccccatcttggcttcttcagtattacctgatagttgccaattcaacaagagccagtttcactgcaattacctcagggagccaggaagcacacagaagaactttccttatggtgctaatttgaacacaaattagaaacaagtaaattaaaattaaatcattaaaagggttgaggttccaggatggccgaataggaacagctc

SEQ ID NO: 888826 - DNA, 612 bp, Homo sapiens
gcaatctcaataaaattccagcaagctattttgtaaatatcaaccaactgattctaaagttcatatgaaaatgtaagagatttagaatagctaacacaataccaaagaagaacacagttggagaattcacactacttgatttcaagacttaatataaagctacagtagttaagaccttattatactggggaaagaatagacacatagaacgatggaaagaatgtagagcccagaaattgaccaacacatatgtagtcaacttatctttgacaaagaagcaaagaaaattcaatggagaaagaagagccttttcaacaaatagtctagaacaattagatgtccatgcaaaaacaaaaaaaacaaaacaaaacctggagagaaaaattacatctttcacaaaaattaactcaaattgcattatggacytaaatgtaggatgcaaaacataaaacttctgtatgaaaatatcagcaaaaatctaggtgaccttcattatagtgatgagtgtttagatacaacatcaaaagcacaatctatgaaagaaaaaaattgatgtcattaaaattaaaaacttctgctctgtgaaagactatttatttgcagaattaaaag

SEQ ID NO: 888827 - DNA, 597 bp, Homo sapiens
actggaaaaaaaaatagtattcttagtgtagattgcaaaaggaaagaggatatgttagatgatttgcccaaaatttaaacaggattcgctttttaaattcaagcctttttgctttcattcagatctggtcaccagacttactttttccttaaggcatatatgaatcatcttgttctttcattcagaaatcaaaagttcargcctagatcagtatttaccaaaactggtggaacactacctttccactgagagtgcattacctttttttgagtctttgaaaagaatgtcagctgaacatggtctggaagtggccaaaactctgtgggtggggagaaaggaagaaataacctatctcccatttaaaaacctaccacctattaaataaacggcagtcttgttctgtggagtattcatttgggttatctattctgatgaacaaatacaaattcttggtagggttttcttgcttctggataaaatgcttagtgttgctttttgttgttcaatcttaggttttgtttcattttgtttttcagggtctcactctgtcaaccaggctagagtgcagtagcgcaatcatggttcgtggcagcctca

SEQ ID NO: 888828 - DNA, 593 bp, Homo sapiens
ttatcactcagatattcagcctagtacccattagttatttttcctgatcctcttcttcctcccaccctctgagaggccccagtgcgtgttgttcccctctgtgtgtccatgtgttctcatcacttagctcccacctataagtgagaacatgtggtatttggttttctgttcccgtgttagtttgctgaagctaatggyctccagctccttctgtgtccctgcaaaggacatgatctcattcctttttatggctgcatagtattccatggtgtatatgtaccacattttctttatctagtctatcattgataggcatttaggttgatttcatatctttgttattgtgaatagagctgtcataaacatatgcatgcatgtgtttttttttttttggtagaacaatttatatttctttgggtatttacccagtaatgagattgctgggttgaatgatatttctgtgtttaggtcttagaggaatcaccacactgtcttccacaatggttgaactaattccacaatggttgaacactcccatcaacagtgtataagcatttgtttttctccacaacatcactagcatctgttagttt

SEQ ID NO: 888829 - DNA, 593 bp, Homo sapiens
ttatcactcagatattcagcctagtacccattagttatttttcctgatcctcttcttcctcccaccctctgagaggccccagtgcgtgttgttcccctctgtgtgtccatgtgttctcatcacttagctcccacctataagtgagaacatgtggtatttggttttctgttcccgtgttagtttgctgaagctaatggtctccagctccttctgtgtccctgcaaaggacatgatctcrttcctttttatggctgcatagtattccatggtgtatatgtaccacattttctttatctagtctatcattgataggcatttaggttgatttcatatctttgttattgtgaatagagctgtcataaacatatgcatgcatgtgtttttttttttttggtagaacaatttatatttctttgggtatttacccagtaatgagattgctgggttgaatgatatttctgtgtttaggtcttagaggaatcaccacactgtcttccacaatggttgaactaattccacaatggttgaacactcccatcaacagtgtataagcatttgtttttctccacaacatcactagcatctgttagttt

SEQ ID NO: 888830 - DNA, 629 bp, Homo sapiens
tgcgtcagagaatattttataactaattggtttatacaccataaaatgtcattattaaagtacagtttaatattattacttttgtctggatttgtaccagtaaaacaggtatagaaggaaagaactaatgtatttgcctctggaaaactagtttgttactcaaagctactaaaattctacttgtgggtattggtttattatttttaactcaaatttcagggtgataataaaaaatgcaaatctaagttttattcttcatgattacaaaatatgcagggagatagggtattatgaacataaattcaatccctcattgggcatgtcttatcctccaaaatttcctgtattcattttgaagcagaaragaagtgtaatatgtgagaaatattaaaaagtagtgtggtaaagttctacattaaaatatttttaaacttaaaaaaactgtaaatttacaagaattaaaaatggaaaaattgctatcacatgaaatgtagagattattcaaatactcagactcactagtaatatgaagttaatgtaaaaataacccttcctttgcctatggatctattattctacagattttgcagttaaagtttcacagagacatgctacatttaaacaactca

SEQ ID NO: 888831 - DNA, 673 bp, Homo sapiens
ctccatggatgtctgaataggagtgtgctgcaaatgggtcagcatcacaacaaacagcagagactcaaaatatatgttagcaattaccacagctaaaccacagaggatgagaaagataggggcctatggtcttatcaaaatggtcttctttcagtagttcacatcactgtttcctggattattaatggctttggctgakccaggtgggatgtggtgttcagatggccagatgagctaagaagtatccctcggactttggatcctaggctgcagagtggaagaagtacacaaacccagcccttcttgtttcatgtgagcaatggtgcgtgttttaaaaagacagccaataatattagctttaattatgatagtagttgctgtttgttttgtcctagcacagaacagtaggaatgtaggtacaggaaaaaatggcacaataaacatttgtcttgggctgggcatggtggctcacacttgtaatcccagcatatgctcctatagtcctagctatctgggaggctgaggtgggaggatcatttgagcttgggaggccaaggctgcagtgatccatgactgtgctactgcattccagcctgggtgacagagcaagaccatgtctaaaaaagaaaaatagtctgtcctcccacattctcttattttaaaatggaatttt

SEQ ID NO: 888832 - DNA, 677 bp, Homo sapiens
gacggctctaataaagacacttgcaaatcctcccaaatgacctggtaaagtaatgactgcttgttccgtccccaagtttatgggcaagtagagttaccaaattgtagcatcaaacgatagaaactgattgagtcagatacagtaaattggccagtggggctcagcagtggccttcagatccacctttgccactgactcaccagaatgtcatagaagcaccatccaaaaagctgtggtcctggggatcttaccaagatgaacaaggtcatgatcgggttttragcaccttgagaaacacttgcttgggtgaatttcatctggaggtaaagatcaggaagggctcatattctataattcaactgaaatgaaagtaaggtattgagaccatcctttatgcgaaatgagcatgagggtagaaatattaaggtacaagataatcatttctctttaaagttcaaggatagtgtctctgaggtaaataaccgttcattgaaatggaagttcttggtatccagacatcagggagagtgagtagttcggagtagccttctaagtgggaggaggcttattattcgatctcacttagattttaaagtcaggtggagaagaggaactgcagaagaatctaagctaccctggtctgcttccagcttctattctctcaccaacttctgccc

SEQ ID NO: 888833 - DNA, 685 bp, Homo sapiens
aacagattgtacactcatgttcacagcagcactatttacagtggccaaaaggcggaaacaacccaaatgtacatcaacagatgaacagataagcaaaatgtggtatttatatacaaggaatattatcctgccctaaaaaggaatggaattctgacacatgttctataacacagaggaaccttgaaagcattttgctaagtgaactaagctagaaacaaaagaacaaatactgtatgacgccacataactgagtgttatggacttgaaagttcatacgttgatatcctaacccctaatgtaagtgtatttggaagtgggacctttgggaggtaattaggtcatgagggtggagccttcatgaatgggattagtgtccttatatgagagaccccagagagctccttccacttctttctgccatgggaggacaccacaggaagctgactctctacagcccagaagagggccctcaccagagtctgaccatactggcaccctgatatcagatttccagcctccagaactatgagaartaaaggtctgctgtttaagccacacagtctatggtaatttgttatagcagcctgaattaactgagacagcaaggtacctggagtagtcagatgcattgagactgaagggtggttaccaggggcttggaggaaggaagaatggggagttactg

SEQ ID NO: 888834 - DNA, 576 bp, Homo sapiens
tcaaagaattgtatattaaagaagtcaattttactgtatcatgatttttttaattgtactttaagttctagggtacatgtgcacagtgtgcgggtttgttacatatgtgtacatgtgccatgttggtgtgctgcacccattaactcgtcatttacattagatatatctcctaatgctatccctctcccctccccctacctcacgacaggtctcggtgtgtgatgttcccctttctgtgtccaagtgttctcattgttcaatttccacctatgagtgagaacatgcggtgtttggttttctgtccttgaggcagtttgctgagaatgatggtttccagcttcatccatgtccctatgaaggacacaaactcatccttttttatggctgcatagtattccrtggtgtatatgtgccacattttcttaatccaatctatcattgatggacatttgggttggttccaagtctttgctattgtgaatagtgctgtaataaacatgtgtgcatgtgtctttatatcagcatgatttataatcctttgggcatatacccagtaatgggatggctgggtcaaat

SEQ ID NO: 888835 - DNA, 705 bp, Homo sapiens
gtgtctttgcgttactacctggtgggtaaattaatatttgtagaatgaattttcgttgaatagaagaatcgagggcatgtgtaagggcagtaaattatttactttttaatgatctgtatgtgtggcagggctgagggaattctaaacccctgcgatccaagccatgtccacgaatctttcatctctagtaatcatagaaagttagttgggagcagtaggaaccagtgtctcattgattgaaataaacacagaaagatatgtggggtttcagtgtggagaggtccaattagttacaagrttttttgtctgagtagaattaaagcattcatttagctgagtaattggtaaatttacagacaagcagatgggctaggctagtttgtacctctctgtgctctgagcttgagcatgtactacccaggagatacaaaattcaagtaacagataggatctttgctttttaaagcttccacctaagtgcacaaagcaacaagagaaattgttataaagtagcacattacccagagaaagaaaatataaacactcaacagaaacttcaaaaaaaaaaaaaaggatttgatcagcattgtgtgggtttttcactaaatttgcatgaagaaagtctacctactgctttactttagccacagtttcaatgttctgagatgatttcctgagcatatttttaaactattctctcctagc

SEQ ID NO: 888836 - DNA, 705 bp, Homo sapiens
gtgtctttgcgttactacctggtgggtaaattaatatttgtagaatgaattttcgttgaatagaagaatcgagggcatgtgtaagggcagtaaattatttactttttaatgatctgtatgtgtggcagggctgagggaattctaaacccctgcgatccaagccatgtccacgaatctttcatctctagtaatcatagaaagttagttgggagcagtaggaaccagtgtctcattgattgaaataaacacagaaagatatgtggggtttcagtgtggagaggtccaattagttacaagatttttygtctgagtagaattaaagcattcatttagctgagtaattggtaaatttacagacaagcagatgggctaggctagtttgtacctctctgtgctctgagcttgagcatgtactacccaggagatacaaaattcaagtaacagataggatctttgctttttaaagcttccacctaagtgcacaaagcaacaagagaaattgttataaagtagcacattacccagagaaagaaaatataaacactcaacagaaacttcaaaaaaaaaaaaaaggatttgatcagcattgtgtgggtttttcactaaatttgcatgaagaaagtctacctactgctttactttagccacagtttcaatgttctgagatgatttcctgagcatatttttaaactattctctcctagc

SEQ ID NO: 888837 - DNA, 583 bp, Homo sapiens
gcaatcttgactcattacatcctccgcttcccaggtggaagtcattctcctacctgagccttccaggtagctggaactataggcatgcactaccacacccagctaattttttttttttttttttttgtatttttagtagagatggagtttcgccatgttggccaggctggtctcgaactcctaacctcaagtgatctgcccayctcagcctcccaaaatgctgtgattacaggcgtgatccactgcaccaggcctcatattgattccattcagttgaatagtggggtaactttaagcatttcttcaactttttctaatattgtgcataaaattataacaatttcaaataaattaaaaaaaacacaatttgaattgcacttgaattactctccagggggctcaattgtaatcactatattcaaatatagaagtattaataactaatgactaaggtagcataatttatatgaataaagattttcattaggtttaataaaatatactggttcttcttttcttatatctttgataaaacagtctcatcatatcttatgtctctctcttcaccaaattcttaataata

SEQ ID NO: 888838 - DNA, 595 bp, Homo sapiens
aaaataaaggaaatacatagaatctttgagagcaggatagtgtccataaatttttgtttcagattttaattttctctaatgatgtcaagaattttacacttcaagctttgctctccttgttttagtttgagcttataatttcttgtttattagggagaattctcaccatcacataaataaagaactattaaaaatacatgaaacagtcattacatgaataacattcataatktctcttaaaatttctatgccatgaaagctgtattggttgcgtcttttgtaagaattaaagttggtttcaaaaagcaaatgatagatgatgacaaggttgaagtatggcaatactagggcatctttttgttacattgatatacattgaatgtgtgccctctcaactgtcattttccttatctcgtcattttcattgcttccattttttataataaattctctacatattcttagtctgtttcaatccaccttaatccaatatgtttgtgactgtaagaagttgtcatttgaggacacttagagagatgatgtccataaaaggatatttttccagtggtataattaacaatctcatatgcacatc

SEQ ID NO: 888839 - DNA, 623 bp, Homo sapiens
gcaatcccacttctatttatccaaaagaattaaaatcagtatctcaagagatatctgcagtttcatgtttattgtagcattattcagaacagcaaagaaatagaaatcacctgaacattcactgacagatgaatgaataaagaaaatgtggtatatacgtataataatgtattatttagcctttaaaaagaaggaaatcttttcatataagaaaacagggatgaaccttgagaacattataccaaataaataagacaatcatagaacgacaaataatgcatgatcgtacttatgcattattaatatacttatgaggtatataaaatgtcaaaatcagagaagcagaaaataaaatggtgctggccagggattgtgggggagaaatagggagtaaaattttacctttgtattcattacaaaatkgaataaaagtgatgggagtgaaaatccttaccttgctaccaatcgcaggtgtgtggaggggtgctcattcagtccttcctcattaagtataacacatgtaagtcttttgtggaaactctctatcaggttaaaaacgtttctttcttgtttggttggaatttataacttaaataattattgcattttgcaaaatacttttt

SEQ ID NO: 888840 - DNA, 727 bp, Homo sapiens
tctgtctttctgtgcctggcttatttcacttaatgtaattacctcgaattccattgatgttgctgcaaatgccataagttcattctttttcttttaattgccaagtagtattacagtgtgtatatataccacattttctttcattaagttatcagttggcacttaggttgatactatctttgctattgtaaatagcgttgtgataaaaaggcaagtgaaattatctatttgatatacagatttctttttctttggaaaaatactcagtagagggattgaagggtcatctggtagctgtacttacaaattttgaggaatctccatatggcttcccacagggattatgccaatttacattcccacaaacaaggttctgtttttttctccccatcatccctaccatttgttattttgttgttgttgttgttttatcaattgccattctatccaggataagatgatatgccattgtggttttgatatgcatttccctggtgcttaacgatgctgaacaytttttcaaatacttcttggccatttatctgtcttattttgaaaaatatctattcatgctcttagcccagtttttaatacgattgttatttttgttgttgtgtaattgttgatttcttgtatattatggagattagtcctatgttggataaatagcatgcaaccattttctctcattaaacaggctgtctcttcactctgttgattttttcct

SEQ ID NO: 888841 - DNA, 607 bp, Homo sapiens
tgctctgctttttcccccatcagagctctaattatacatctgttagattgcttgtttgatattagctcacagctcattggtgcttttctcaattttttacaatcttttccatttctgtttccttttaaatgtttctactgttgtatcttyaagttagttcattggtcttttcttttgcaatgtttaatctgctgttattctcatcaactgaatttttcatttaagatataatattttttatccctcagaattagattgggggcttttatgttccatgttgttcatcatgtttatgctttcctttatcttcttgaagataaggagtatgttcataatagctgctttaacatccctgtgtgctacttctaccatttgtatctttttaaaaatctatttaggccaggtgcagtggctcacacctgtaatcccagcactttgggaggccgaggtgggtggatcacctgaggtcaggaatttgagaccagcctgaccaacatggagaaaactggtctccactaaaaacacaaaattagcttggcatggtggcttgtgcctgtaatcccagctactcaggaggctgaggcaggagaatcacttgaacccagga

SEQ ID NO: 888842 - DNA, 607 bp, Homo sapiens
tgctctgctttttcccccatcagagctctaattatacatctgttagattgcttgtttgatattagctcacagctcattggtgcttttctcaattttttacaatcttttccatttctgtttccttttaaatgtttctactgttgtatcttcaagttagttcattggtcttttcttttgcaatgtttaatctgctgttattctcatcaastgaatttttcatttaagatataatattttttatccctcagaattagattgggggcttttatgttccatgttgttcatcatgtttatgctttcctttatcttcttgaagataaggagtatgttcataatagctgctttaacatccctgtgtgctacttctaccatttgtatctttttaaaaatctatttaggccaggtgcagtggctcacacctgtaatcccagcactttgggaggccgaggtgggtggatcacctgaggtcaggaatttgagaccagcctgaccaacatggagaaaactggtctccactaaaaacacaaaattagcttggcatggtggcttgtgcctgtaatcccagctactcaggaggctgaggcaggagaatcacttgaacccagga

SEQ ID NO: 888843 - DNA, 622 bp, Homo sapiens
ggttccaagtctttgctattgtgagtagtgccgcaataaacatgcgtgtgcatgagaacacaggttttgataataggagttttattacttagctcaagtaaggaggacactgggagtattctccaaagcagtttctccctgagggaaagtgacagagggcgttarggggtgatggagagcagagaggatgcggcatggcatgtagaggaggggtcccagctgtgcagatccagtgagttatcatgccaacacacaggttgcatgttttgatgatgaagctacagcttctcccaggatgaagactttagcacggtaaggagggaagatcacttgggttcatctgcaagtttccgggcgtctttcaggagctggcttaaaccaacaaggtgaccgcagggtttggggaagaacaggctgcagggcaagaggctgccaaacaggctgattgctcaagtggattaaatttttatagtccccagagatcctcccttgtctgcttatacttctagctgtgattcacccttccctgtgaccaggactgcactgcctgcaccctggagtgtctttgtgtcctatctcccttgtaggacatcactacctggcccccgaccctgcctttgct

SEQ ID NO: 888844 - DNA, 618 bp, Homo sapiens
gtagttctcaacagatgttgatttactctgttgtgaacattctaggagggtttggtgtgcatgtaacaaaaaaagaagaggaaggagaaggaggaggaataggagaagctgctgtttcccaaattatctctatttcatttagtttatgcacttagaaaacaagcaataatacaggaggggttcagatcttaacacacaaaaaaaaaccacatatgcacaaaatgaagctcactaaattttcatttaagaagaaaaactctttttagtgagcatagacagtgaatctgctgtgtatgatttattgaagttacactccagttgtagttaattgacctgatcaggaattcccacttgacagatggaagcgcacaccagtgtgaccaccctatagagaagattctattaggtttttcttggtcaaatcatggtttgttsttccacactaaggatgttggaattgggttctcattggtattcaagatatatggcttggctaaaatattttagataggtaagttacactcacacccttgaataaacaaagtataaaaactactgatgcctataacctacctgcacatgagagatggtgcatgttcccgtcccagacatgggcat

SEQ ID NO: 888845 - DNA, 658 bp, Homo sapiens
cttgcctagggtcacaaagtttccaagtggtagaagaggagtgtaaagacagattgattagactcttaaatcctttctctttccttctgtcctatacctttggaataactgagaagggaaaccaggagggaggcacattggatccaagcattctttctttcacttctctgtttcacaaatacctgctggatctccctcatgctgggccctaagaatggagtcaccactagaaaatagtgtctgtgtcaaggagctctcctggcagaggagtgtcaaggggacagrtgattatatatcctgacctttagcaggagtgagcagaggttgacactggagcactcaattcagccttaagaagtcaggaaaggaagcgtttgcctaaacgggttcctaaggaattagcctagagaaaggtgggcaggtggacaaaagtgtttcaggaagatggaacagtgaggctgtataatggtagttccagagaaatcaggtatttctaggactgaagcatagagagtggaaggtcaggagatgcacatggagaggggaacgattaggaggcccttgaaggccatggaaagagtttccattttttccttgaagcaatggggaatcattgaatgattttaggtaaagaagaaaaaggcttaggttcgaactt

SEQ ID NO: 888846 - DNA, 667 bp, Homo sapiens
ctttgtctgttccaggatcgaatccaggatcccacaatgcatttagtttttatgtttcctttgactcctacaatctgtggcaattcttggacttgtcttgctttcttgaccttgacactttgagagtactgatcagttgtgttctagaatacctcacaatttgggattatctgatgcctactcatggacagattgagtttaggcatttttggcaacaataccatagaagtaatgtacccttttcaatatgaggggtacatgatgttggtatctgtggggttctttacataattaataatagttagggatatgagacacatttgagggtgctatattagtttgataaggctgccatagaaagtatcacagatgtggtgggcagatcaccagttcaggagatcaagactgtcctggcttacatgatgaaaccccatctctactaaaaatacaaaaaaaattagccgggcatggtggcacatacctgtagtcccagctactcrggaggctgaggcagaagaatcgcttgacagggagtcggaggtgcagtgagcttagaccgcaccactgcactccagcctgggcgacagagcgagactccgtctcagaaaacaaacaaaaaaagtatcacggactgggtggtttaataaataaaatcttattttctcag

SEQ ID NO: 888847 - DNA, 581 bp, Homo sapiens
agcagtgtataagcattgccttttctctgcaacttccccagcatgttttttttttttttttgactttttaataatagtcattctgacttgtgtgagctgatatctcgttttggttttgatatgcatttttctcataatcagtgatgtagagcttttttatatgcttgttgtctgcgtgtatatcttcttttgaaaagtttctgttcatgccctttgcccgtttttaatggggttgcttgcattttttccttgtgaatttgtttaagttcctcatagattctggatattagtcctctgtcagatgcacagtttgcaaaatttttctcccatgctgtaggttgcctgtttactctgttgatagatgcatttgcagtgctgaagcyctttagtttaattagatcccatttgtcaatttttgcttttgttgcaattggttttggagtccttgtcatgaaatctttgcctgttcctatgtccagaatgatattgcctaggttgtcttccagggtttttatatagactcagttattgtaataatcttctgaacctaaagaaggtgataggaacatttaactagaagt

SEQ ID NO: 888848 - DNA, 577 bp, Homo sapiens
ttatcatcataacagaaaaagattttttatctctttctgtgcagcatacctgcattctgacacaaatgtgccaggagaatgctaaacagttttgttcccttttaaatggaaatagatctggatctgatgggaaaaggttagtgagcaactgctgtcaccaaaaagagagaaggaatcaaaacccaatcttttattgtcaagttttttttaatctgggtttataataaacagaagcagcagctcttattgttaaaaggtatcattccaagataaccttaggatgttatcttctttgtaggtgccatcaaatgagttgctttaacacttaatacatcataacagaattgaatatgataaagaacacataacagacttttaagaaattacatcatctgacattagtatgtgccmtttttaaaacctgcttgtagaaactgttaggaaattcagggaatggtacatataagattcatataggccaggtgcaggggcttatgcctgtaatctcagcactttggtaggccaaggtgggcggattgctcgaggtcaaaagtttgagaccagcctggccaacatg

SEQ ID NO: 888849 - DNA, 575 bp, Homo sapiens
aacagaatagagacctctgatataaatccatgaatttacaaccaactcatctttgacaaagatgcaaaaacatacaatggggtgaagacagccttttcaagaaacagtgctagaaaaactagagagctatgtacacaagaatgaaagtagaccctgaatctctcaccatacacaaaaaaatcagatcaaaatgaattaaagacttgaatctaagacctgacatcatgaaactgctagaagaaaayattggggaaatgctccaggacattggtcttggcaattttttttttgtatacgacttcgaaagcacaggcaaccaaagcaaaaatatagaactgggtttatatcaagctaaaaagtttcttctgcaaatgaacaatcaagacattgaagggacaacacatagaaaggaagaaaatattggaaaaccatccatttgacaagtgattaataaccagaatagataaggagctcaaacaacttaatagcaaccacaacaacaaaaaatctaattaaaaaatgggcaaaagatgtgaatatttctcaacagtgacatacagatggcctacagctct

SEQ ID NO: 888850 - DNA, 603 bp, Homo sapiens
cattctgaccggtgtaagatggtatgtcattgcggttttgatttgcatttctctaacaatcagtgatattcagctttcttttcatatgcttgttggccacatgtatgtcttgttttcagaagtgtatgtttatgtcttttgcccattttttaatggggttgtttgttttttctcttgtaagtttaagtttcttatagatgctggatattcgaacttggtcagatgcatagtttgaaaatattttctcccattctataggttgttgttcaccctgattatagtttcttytgctgtgcagaagctctttagtttaattagatcccatttgtcaatttttgctttcattgcttttgccattttcatcaggaaatctttgcctgtgcctatgttttgaatggtattgcctagattttcttctacagtttttaaagttttagattttacatgtaagtctttaatccatcttgagttgatttttgtatatggtgtaaggaaggggtccagtttcaattttctgcacataactagcccattctcccagcaccatttattaaataaggaattcttccccattgattgtttttgtcaggattgtcaaagatc

SEQ ID NO: 888851 - DNA, 592 bp, Homo sapiens
tggagaaataggaacacttttacactgttggtgggactggaaactagttccaccattgtggaagtcagtgtggcgattcctcagggatctagaactagaaataccattttacccagccatcccattactgagtgtatactcaaagaattatgaatcatgctgctataaagacacatgcmcaagtatgtttattgcggcactatccacaatagcaaagacttggaaccaacccaaatgtccaacaatggtagactggatttcatgcaccatgaaatactatgcagccataaaaaaggatgggttcatgtcctttgtagggacatggatgaagctggaaaccatcattctcagcaaactatctcaagaacaaaaaaccaaacaccacatgttctcactcataggtgggagtcgaacaatgagaacacgtggacacaggaaggggaacatcacaccctggggcctgttgtggggtggggggaatggtgagggatagcattagaagatatatctaatgttaaatgacaagttaatgggtgcagcacaccaacatggcacatgtaacaaacctgtacattgtacacatgtaccctga

SEQ ID NO: 888852 - DNA, 592 bp, Homo sapiens
tggagaaataggaacacttttacactgttggtgggactggaaactagttccaccattgtggaagtcagtgtggcgattcctcagggatctagaactagaaataccattttacccagccatcccattactgagtgtatactcaaagaattatgaatcatgctgctataaagacacatgcccawgtatgtttattgcggcactatccacaatagcaaagacttggaaccaacccaaatgtccaacaatggtagactggatttcatgcaccatgaaatactatgcagccataaaaaaggatgggttcatgtcctttgtagggacatggatgaagctggaaaccatcattctcagcaaactatctcaagaacaaaaaaccaaacaccacatgttctcactcataggtgggagtcgaacaatgagaacacgtggacacaggaaggggaacatcacaccctggggcctgttgtggggtggggggaatggtgagggatagcattagaagatatatctaatgttaaatgacaagttaatgggtgcagcacaccaacatggcacatgtaacaaacctgtacattgtacacatgtaccctga

SEQ ID NO: 888853 - DNA, 592 bp, Homo sapiens
tggagaaataggaacacttttacactgttggtgggactggaaactagttccaccattgtggaagtcagtgtggcgattcctcagggatctagaactagaaataccattttacccagccatcccattactgagtgtatactcaaagaattatgaatcatgctgctataaagacacatgcccaagtatgtttattgcggcactatycacaatagcaaagacttggaaccaacccaaatgtccaacaatggtagactggatttcatgcaccatgaaatactatgcagccataaaaaaggatgggttcatgtcctttgtagggacatggatgaagctggaaaccatcattctcagcaaactatctcaagaacaaaaaaccaaacaccacatgttctcactcataggtgggagtcgaacaatgagaacacgtggacacaggaaggggaacatcacaccctggggcctgttgtggggtggggggaatggtgagggatagcattagaagatatatctaatgttaaatgacaagttaatgggtgcagcacaccaacatggcacatgtaacaaacctgtacattgtacacatgtaccctga

SEQ ID NO: 888854 - DNA, 520 bp, Homo sapiens
ttctagtaaatacaatttactccctcccattatactattattacatttcatactattgtacaacgtttatttatttatttatttatttatttatttatttatttatttatttatttttgagacagagtctcgctttgttgcccaggctggagtgcaatggtgtggtctcagctcactgcaacttcctccccggttcaagccattctcctgccacagtctcccaagtagctgggactacaggcatgygccaccacggctgggtaatttttgtatttttagtagagacagggtttcaccatgttggccagactgatctcgaactcctggcctcaggtgatccgcctgcctcggcctcccaaagtgctgggattacaggtgtgagtcgctgcgcctggcctattgtataatatttaaatggagacctttcctccctcagttttggctgagtctacaaaagctatgtacaatagaggaggcatcaaaggcccaaacatcctagacagaaggattagagtgcaca

SEQ ID NO: 888855 - DNA, 629 bp, Homo sapiens
agctatgggctcaccttcttgtgctacttcccacattcttgctgagatccaggggtaaaaaaaagtgcacagagggagacagggaaggcacatgtgtattgagtgccttctcaagatgaggcatgtaacgggggctggttagatcatgtagctgaggcttatatgtaacacttccagaaatatctagctttctaatcgttatgaaatctctcttcgttctccctgaatgaaaacttgaatctgtacctggtttatttttcaggaagagagtaactttcccttttcaaaatcccagacatcttgacgtgatttctgcctatggcaggactggaggcaggctccccttgtgcagcaccyttcattattttccaagaaataaaaacacggactcttcatctcactgtcatctttcataggcccaatgcaggacactgtcaccatggcaactgcagcagaatttaggatatagaggatatttaggccttgcttcatctttgaccaaaagttatgccatgtgactgttacagtattgtaactggctaactgtcttcccccctcacagttaaaagcatttgggtgaatcgctttctctttttggatacttgccactcacacttgctacctagttt

SEQ ID NO: 888856 - DNA, 639 bp, Homo sapiens
ccatcagatcttgtgagatttattcactatcacaagaacagcatgagaaagacctgcccccatgattcagctacctcccactgggtccctcccacaacatgtgggaattcaaggtgagatttgggtggggacacagccaaaccatatcattccasctctagcccctcccaaatttcatgtcctcacatttcaaaatgaattatgccttcccaacagtcccctaaagtcttaactcatttcagcattaactcaaaagaccacagtccaaagtcttatctgagacaagtcaagtcccttctgcctatgagcttgtaagatcaaaagcaagttagttacttcctagatacaatgggggtataggcattgcctaaatacagcccttccaaatgggaaaaattagcccacacaaaggggctacaggccccatgcaagtcaaaaaaccatcaggggagtcaaatcttaaagcttcaaaatgatctcctttgactccatatctcacatccaggtcacactgatgcatgaggtaggtccccctggtcttgggcagctctgtccctgtggctttgcagggtaccacctccctcccagctgctttcacaggctggcgttaagtgtctgcaggttttccaggcacacagt

SEQ ID NO: 888857 - DNA, 583 bp, Homo sapiens
catttctcttgggttcttttctttttgagatttgcttccttatctgtagaattcagcggtttgttgtgctgcacgtgagtgtgcatttccttagctttatccaattcaggtttaccgagtctcttgaatctgtaggtttgtgtctcttgtgaaataagtttttagccattrtttttgcaaatatttttcttcactgaactctttctcctctatgtctgaaactttaataacagacatgttaggtgttttgttgttgtttcatggttccctgagactctgttcaatggtgttgtctctattgttcagattggataactgctattttcctgtcttcaagttcactggatttcttctatcatctccattctgcttttgaactatccagtggctttttaatcttaatgaccttatttttcaggccaaaaatttccgttttgttctttatatcttctatttcctccttaaggctttctagcatttcatttgtttcaaaagtatctgcccttattgttggaggatttaaataatccttgctcttaaatgttttttctgataattccaacaccttcatcatctctgtact

SEQ ID NO: 888858 - DNA, 704 bp, Homo sapiens
atcttaaagctctcctattaatttcaagtccagggaacttagctaatacattttccattgataggcactctaaatcgctttcatatatatgctatggtgatgaacatttgtctttggaaattgggagagctttggtggtaaataagaaaagtcttcatttttttcttttttgaggcaaactgatgactctgagaacttagtgcctttttctttcttgtcacaccccaaagacttagccgattgattattagaaattaaaaatgtcataactatatctatcttacarccaacacagttaaaatgaacaaaattaaatagaaattacattacttcttggggccctaaacattcccctactccttttctcttttttccaccactggaccttgctatcttcactccactgttagctctaaaatgttgaaactagatgatctctaggcccccttccaggcctgatattctctgagattgtttacctatacataatttttcaaatgtttcattaacagctagttgagtcaatgtagaatgaatatgcacatgtttggcatcacatggccaaacatttggatatttaaacttttttttttttagtatctaaaggtgtttaattttttgaagatactgtgtgcactctgaacttctgatttaattccagaaaggtggaatgttagtgctaaccgatctctaaggaatactgt

SEQ ID NO: 888859 - DNA, 652 bp, Homo sapiens
tacccaaaggattataaatcagtctactataaagacccatgcacacgtatgtttactgcagcactatttacaatagcaaacacttggaaccaacccaaatgcccatcaatgacagactggataaagaaaatgtgccacatatacaccatggaatatgatayagccataaagaaggatgagttcgtgtccttcgcagggacatggatgaagctggaaaccagcattctcagcaaactaacacaggaacagaaaaccaaacagtgcatgttctcactcataagtgggagctgaagaatgagaacccatggacacagagaggggaacaacacacaccagggcctgtcgggaggtggggggctaggggagggatagcattaggagaaatacctagtgtagatgatgggttgatgggtgcagcaaaccaccatgacatgtgtatacctgtgtaacaaacctccacgttctgcacatgtatcccagagcttaaataaattaaaaagagagagagagagagaatatgagaactcaaggaaaagaactgggataatttacaagtggttccatagtataggaaataataaactgttcacaattgcaaaagaaaaaaaaaactcataactagagtgagactaaaagtgtgcagggaattaga

SEQ ID NO: 888860 - DNA, 652 bp, Homo sapiens
tacccaaaggattataaatcagtctactataaagacccatgcacacgtatgtttactgcagcactatttacaatagcaaacacttggaaccaacccaaatgcccatcaatgacagactggataaagaaaatgtgccacatatacaccatggaatatgatatagccataaagaaggatgagttcgtgtcyttcgcagggacatggatgaagctggaaaccagcattctcagcaaactaacacaggaacagaaaaccaaacagtgcatgttctcactcataagtgggagctgaagaatgagaacccatggacacagagaggggaacaacacacaccagggcctgtcgggaggtggggggctaggggagggatagcattaggagaaatacctagtgtagatgatgggttgatgggtgcagcaaaccaccatgacatgtgtatacctgtgtaacaaacctccacgttctgcacatgtatcccagagcttaaataaattaaaaagagagagagagagagaatatgagaactcaaggaaaagaactgggataatttacaagtggttccatagtataggaaataataaactgttcacaattgcaaaagaaaaaaaaaactcataactagagtgagactaaaagtgtgcagggaattaga

SEQ ID NO: 888861 - DNA, 623 bp, Homo sapiens
ttggaaattaaacttaatattttttccagtgaggaatttcattttatatgtgtgcatgtatattatacatatacacgtgacacatatttaaacctcttttctcaattttagagtcaaactctatatagtcagtctactcatcttttctgtaatgtaagtctagcctatcttttcttgctgtctcacattttctagttttattgatatattctatgagtttagagagattattaataaattattattacattgccaagattttgtgtgtatgttttttttattgttgttttttctttttacctacatcctatctcattgagatttcctttggaattcatcattctcctttttaaaaatttgcttatgaattgcctgggaaacatacttaaatggtacaatttttgtgtctttgcttatcctttaatgtgtacctggagcctctaggtgtgmatattagcttggctcaagagaagtgctatcttctacaatttagtgttatacaatatatcttatacaatatagaatcaatgtggtgtcaataaatttatttcttttgcgggtattatattttcacattttatttctggaatcagagtttttttctctatccctgaaacacagaa

SEQ ID NO: 888862 - DNA, 653 bp, Homo sapiens
aggagagctaaacagctaataatcatttttgaaatgtttaatttcattattctttaggaaaacacaaacgaaaatcacagtgatattctgtacatactaattagactagcaaagaatagaaagacatgaaaatattgacttggtgaaatgtggagcyactggaactctcctacatggctgatggaactgtaaattgcattaactactttgcaaaagtgtttgagagttaacattaagccatgcttactctataacccagaaattccacttctagatgtaactgacaaaaatgcatatatttgagcctaaaagacatgcacaaatgtttgtatcagcactatttgtagcaactaaaaactggaaacaattcacacacccataaaccatgaaactgataaattaactctggaatatttatacaatagaaattataaagcaatgaaatgagcaaactaccgctacacgaaataaccaatataaataaatctcagaatcacaagtctgtgcaaacaaaacaaaaaacagacacaaaataatagtgtgtataattctatttacaaatggaacaaaaacaggcaacaacaatctacggagttgaagtcaggagtatagttagctttgacagaaaaggcaatgatggggttcaggattca

SEQ ID NO: 888863 - DNA, 495 bp, Homo sapiens
gtttatatccttcgcccactttttgatgggattgtttgtttttttcctgtagattctggatattagccagcccgttgtcagatggatagattgcaaaaattttcttccattctgtaggttgcctgttcactctcatgatagtttcttttgctgtgcagaagctctttagtttaattagatcccatttgtcaattttggcttttgttgcaattgcttttggtgctttagtcatgaagtccttgcccatgcctatgtcctgaawgatattgcctaggttttcttctagggtttttatggtttggggttttacatttacatttacattaagtctttaatccatcttagccagaaaaaaatcatgtcctttgcagggacatggatgaagctggaagccatcattcccagcaaactaacacaggaacagaaaaccaaacaccgcatgttctcactcgtaagtgggaggtgaacaatgagaacacatggacacagggaagg

SEQ ID NO: 888864 - DNA, 625 bp, Homo sapiens
tgtccagggaagataatcccaaaagcagaggcagcaagatgatttgggaattgtgttcattttgcacgtgggtcatgtgtttccataggataaaaatgagcagaggccgggcgcggtggctcacgcctgtaatcccagcacttttggaggccaaggtggtcagatcacttgaggacagaagtttgagactagcttggccaacatggtgaaaccccatctgtactaaaaatacaaaaattagccaggtgtggtggygcgtgcctgtaatcccaggtacttgggaggctgaggcaggagaatcgcttgaacccaggaggcagaggttgcagtgagccaagatcgcacccactgcactccagcctgggcaacagaggaagactccgtctcaaaaaaaaaaagaattgtttgcacctgctgtgtaaaacactaatgtgattatttctatttccgtatccagaaataaaaccccagtattaataaatatctgttcattaagagttttcttctaataacataacccccaaggtcctgttgcttgttgctatgcatttaggtgcaaacatctcctgctggcaggtgtgcccgggccgtgcaaatgagccatggtcctgtgtgttctcctgct

SEQ ID NO: 888865 - DNA, 625 bp, Homo sapiens
tgtccagggaagataatcccaaaagcagaggcagcaagatgatttgggaattgtgttcattttgcacgtgggtcatgtgtttccataggataaaaatgagcagaggccgggcgcggtggctcacgcctgtaatcccagcacttttggaggccaaggtggtcagatcacttgaggacagaagtttgagactagcttggccaacatggtgaaaccccatctgtactaaaaatacaaaaattagccaggtgtggtggcgcgtgcctgtaatcccaggtacttgggaggctgaggcaggagaatcgcttgaacccaggaggcagaggttgcagtgagccaagatcgcacccactgcactccagcctgggcaacagaggaagactccgtctcaaaaaaaaaaagaattgtttgcacctgctgtgtaaaacactaatgtgattatttctatttccgtatccagaaataaaaccccagtattaataaatatctgtycattaagagttttcttctaataacataacccccaaggtcctgttgcttgttgctatgcatttaggtgcaaacatctcctgctggcaggtgtgcccgggccgtgcaaatgagccatggtcctgtgtgttctcctgct

SEQ ID NO: 888866 - DNA, 633 bp, Homo sapiens
ctcatactatctccacatggagtgctagttttttgtattttgttatttttaatttcatattggcattatggagcatgaagtgccagagaatgtataagcttaacacctgccatttaaaattaattatgaaacacctcatttaacattataaacacattactctatttcatgtgcttgaaattttattttgaaatgtgggtggtcttatgccacttarcttaattggttggactctggtgctgatgagcctggagtcgctagttgatttttctataaggtcacattagcttcccacagataaaacaaacaaacaaaaaaacaaacagctcttttcctacactgacatttcacagttaagggggcatgttatattttatgaaaaatattttctcaaatatttttccttgcgttcacaacaaccccagtaggaaagattgaagagtatttttatttttatcctcatttttcagattatgaattttggaagaaattcatacctaataggattaacttagttgacagagccagaaatttgctaggccaggttctctgactttaaatctcttctctgttatatcacacaacaactcaaaaactgtagtctgatgttgatgtgcctttgtcccagaagtg

SEQ ID NO: 888867 - DNA, 633 bp, Homo sapiens
ctcatactatctccacatggagtgctagttttttgtattttgttatttttaatttcatattggcattatggagcatgaagtgccagagaatgtataagcttaacacctgccatttaaaattaattatgaaacacctcatttaacattataaacacattactctatttcatgtgcttgaaattttattttgaaatgtgggtggtcttatgccacttagcttaattggttggactctggtgctgatgarcctggagtcgctagttgatttttctataaggtcacattagcttcccacagataaaacaaacaaacaaaaaaacaaacagctcttttcctacactgacatttcacagttaagggggcatgttatattttatgaaaaatattttctcaaatatttttccttgcgttcacaacaaccccagtaggaaagattgaagagtatttttatttttatcctcatttttcagattatgaattttggaagaaattcatacctaataggattaacttagttgacagagccagaaatttgctaggccaggttctctgactttaaatctcttctctgttatatcacacaacaactcaaaaactgtagtctgatgttgatgtgcctttgtcccagaagtg

SEQ ID NO: 888868 - DNA, 625 bp, Homo sapiens
tatttttaggggtgctcaaaatcaaatcacgaacagaaattgacaattgcttttcagcttttctccttttatgaaaaacaatctctttttctcaggaaagttaaaggtttacagaagagtttgggttattaatgtttcctcattctacctggtrtatgttaaaacacacacacacacatgcacaatttgaaattctataataacagttaatattggaatttttcagaattttctcagcattcagctagagtcttttcattttgacctaccatttcagtagatcaacagtgttttaaatgctgacattacatcactaagtgctgagatgtttgagaactgtttgccctcttagaaacctaataataaagtaaactttgattttagcttttacacttctagcattttcataccttaataattttggtcttcttcagtaattaatcttaaaagaaattttgaaggccttgaattaagaaacatatgtgcatccattaccttacaagacttttgagggggcacttctaaattatttttttatttctctaaattagaggacagaagtaaatttaagacaggcactggacattcagtggagagtaaatgtcagccaatgcacactaggcct

SEQ ID NO: 888869 - DNA, 644 bp, Homo sapiens
tctgtaatggagcctttgtctgcctcattcatctctctatttctggcagctagaaaagctcttagtacaatgactgctcaacaaatacgtgttgaaagcaatgaagagagagatataacttaaatagataaagcaacatttttctgatcagagcaggttgagcagacccatctgcatggtagctcagaagctttctgaggatgttaagaagccccctcggacacayatacatgaaactctgtgctctgcaatttgaaaatcactgggtttaattctctcattttatgtataagaaaataaagctgtcttctggaatcccaagtttcaatatatatttttgtagctaggtactatgtatttatgggagttggaaaataacattctatgataagcttatgggccattttgttttcagagaaattatttcaggaagacaaatcataagagaatactctataacctatttgctctgaatctaaatggttataacacatgccttaataatttatacttctaacaaaaatatgtaatattctttcaaaagtcaggtgtgttattccttacatatactaaaaacaaatcatgattactgtaattaaatgtaggaaatagcttgctgcccatccattattaaaaggagattt

SEQ ID NO: 888870 - DNA, 575 bp, Homo sapiens
caactttattcttttgcatgtgaatatcctgttttcccagcatcatttgttgaaatgactgtcctttcatcaatgaatggtcttggcaccattgtcagaaatcatttgaccatatatgcaagagtatatttttgagctctctattctgtttcattggtctatatgtctgtctttatgccagtaccacactgttttgattactgtagctttgtaatatttttgaaataagaaagtgtgatatctcttttttttaaattaaaaattttttttatttcaatagctttaggggtacaagtggttttcagtcacatagttaaattgcayagtggtgaagtctgggcttttagtgtatccatcacccaaatagtgtgcactgtacccaacaggtgattttgtatccctttccaacctctctccctcccccattctgagtttctaatgtctgttataccactctgcatgcctttgggtacccatggcttagctgccactcataagtgacaacatgaggtatttggttttccattcctgagttacctcagttaggataatgacctccagtttcattgaagttg

SEQ ID NO: 888871 - DNA, 597 bp, Homo sapiens
  misc_feature 483: n = A,T,C or G
tgctttaaagagagagatctgttctgttccgttggtctatatctctgttttggtaccagtatcatgctgttttggttactgtagccttgtagtatagtttgaagtcaggtagcgtgatgcctccagctttgttcttttggcttaggattgtcttggcaatgcaggctcttttttggttccatatgaactttaaagcagtttttttccaattctgtgaagaaagtcattggtagtttgaaaacaaagcactgcatgttctcactcataggtggaaattgaacattgagaacacttggacacagggtggggaacatcacacactaggggagsgggggagggatagcattaggagagatacctaatgtaaatgacaagttaatgggtgcagcacaccaacatgacccatgtatacatatgtaacaaacctgcacgttgtgcacatgtaccctagaacttaaagtataatttaaaaaaaagagaganaatttctgtctcgatagtattttcctgttaattttaaatatattcacttataaattgcatttatttttctaaaaacaggcttttatatttctggccaatttttccccattaatt

SEQ ID NO: 888872 - DNA, 617 bp, Homo sapiens
ttttatgcttatcaaggtagtttcacttacaagatttaattaattgttatgacaactctttatgatagatgaaacctagaaacaaaatgaaagatgaagcactggtagaaagtctcacaagtaaacgattgtgctagtactaaaacaaattgggctctgaaagttttgtccccagatcagttttttctcaattctgcgggcaaattggaattatctgaggttactactttattttttttttttttaaatgcaagtgcctgggtcccaccccagactaattggatcagaatctctcatggatgggcgctgggtgtctggattttttttttaaagcttttcaragcctgtgttgagaatcactgcaacatagcatacatttaaagttcttaatttttgttccactgggtttgatttcctcttctgcaataatagctaacatttttgtagcattctggcagggatgtggaattcattttattttagctctccactgaacagaaacagtgctactgtgtatacaagtatcttgtaacgcaggttaccaaattcctattaaattgctctctctaacagtaaaaaaattaaataaataaacataatctcttccaccttatgct

SEQ ID NO: 888873 - DNA, 597 bp, Homo sapiens
attgagcttcagatttgacaaagctataccaactccaaataaaatgtcatttatttttggaaaatgttatgttttccattctttgttatgccaagtagatatttgtgcgaattatttaaataaacaaaaaaaactttagataaaatataattgtgttatttgttaaacaattacattctccacaaacttttctttttttttctttctttttttttttttttttttgagatggagtctcactctgtcraccaggctggagtgcagtggtgccatctcggctcactgcaagctctgcctcccaggttcacaccattctcctgcctcagcctcccgagtagctgggactacaggtgcctgccaccaagcctggctaattttttgtatttttttagtagagacgggtttttaccatgttaaccagaatgttctcgatctcatgaccttgtgatccacccacctcggcctcccaaagtgctgggattacaggcgtgagccaccgcacccggacctctccacaaacttttaaaagtaaaagaagaattcagagaaggggtgggatgccatgtcatatgaggatttatagccattgtttagata

SEQ ID NO: 888874 - DNA, 586 bp, Homo sapiens
atgtacccaagggaagccaccaattaattctgcagagatcaccgttgctcttaacctatcccatggcttattcctcaatggccagtccactgggtctgcaacaaccagtcagtgctgaggctgcatatctgaggttgtattggagcaccgggagctccctgggggtgtgctgctgcccctggctttgcagagcaactgtgtcactcacagaagctgtgagaggcagctcagcagtgtgaactctgggagctagtctgcctgggttcaatccctggctgtgccattttctagctataagaccttaagcaagttatttcacctctcaattcctctgtttctttgtctctaaaaggagtacgrgaacaatggtaacagtacctactcctagggttgttatgaggattacatgagccgaggctggtaaagtgcttacaatagtagcgagcattagtgttacagtgtgtttgttaaatgaaatgagagaagtcctctctctccctgatctccttctcaccctgaggattactgcacaattggatgggggggattacaggctttgttttgccatcttctaagaggcagcaac

SEQ ID NO: 888875 - DNA, 655 bp, Homo sapiens
atcattgaattcccagtgcctggaatgtattaatagttgatggcaataaatatttggtgaataaatgaatggcatttatcacactctgcttatagctttgtgtgcacagtgtatgtctcattcactcttcactgtctttaagaatatarctgatataggacgccctttgtattcccccaacactttcaacagtgccttgtccatagtaggtactcaaacaaatagttgttaaacctgttcctctaatgggcaagtaatctaaggcatgtgatggtgagtcagtggcatcacatttgattcaaaagaaaacacatttagtccaataaatcaacagataattactaagcactctttatgcaaaaagtatagggttctttatctgtctatctgtctgcctatctatctgtccatctgtctgcttgtctaggattagagaagtggttgtagagatagtgcagggtctggttttgggtccatctttgctcctgagtgtctatatgatcttgagtagttagggccctctaaatgtcagtttccagtttcttcaggctttaaaatgagcataaaatttttagttaacagggaaattgtgaggattgaaagaaggggtgtatctgaaagccttttgtaaaacatgaagtgtaataacatgtat

SEQ ID NO: 888876 - DNA, 655 bp, Homo sapiens
atcattgaattcccagtgcctggaatgtattaatagttgatggcaataaatatttggtgaataaatgaatggcatttatcacactctgcttatagctttgtgtgcacagtgtatgtctcattcactcttcactgtctttaagaatataastgatataggacgccctttgtattcccccaacactttcaacagtgccttgtccatagtaggtactcaaacaaatagttgttaaacctgttcctctaatgggcaagtaatctaaggcatgtgatggtgagtcagtggcatcacatttgattcaaaagaaaacacatttagtccaataaatcaacagataattactaagcactctttatgcaaaaagtatagggttctttatctgtctatctgtctgcctatctatctgtccatctgtctgcttgtctaggattagagaagtggttgtagagatagtgcagggtctggttttgggtccatctttgctcctgagtgtctatatgatcttgagtagttagggccctctaaatgtcagtttccagtttcttcaggctttaaaatgagcataaaatttttagttaacagggaaattgtgaggattgaaagaaggggtgtatctgaaagccttttgtaaaacatgaagtgtaataacatgtat

SEQ ID NO: 888877 - DNA, 628 bp, Homo sapiens
ggattagaaagtttaagactgctcagtgttatgatataaactgaaatctataacaattcaaaaggaaatattagaaagctatctttatgttattgagattcaaatatgttaaagatattaaatatttcatgttaataaagttatacaaattttttcattgggatatttgtcccaatttataaaatgtgtatagatatcgatttttttttcttggaacaaaataaaactaattttataaaattgacatttgtcaaataatgacttaacttgaaacatatttatttaccctaaattaacacttattaaaacataggctgggtgcagtggctcacacctataataccagcagtttggaaagcccaggctggagtatcacttgaagccaggagttcaagaccagcctgagcaacacagcaagaccctgccatctccmcaagacacaaaataataacagcaataataataattatcaccaaacttctagcaattaattgaaatcagctgcaatgcaattttgatgagcaagaacgcatataggcaggaaaagatgatcaatgaacattttcaggcatataatattatagtaggaggatgacctaaggaactccggacttggaaactttgagaa

SEQ ID NO: 888878 - DNA, 662 bp, Homo sapiens
cacaagaacaaaaaaaagaaacataatacagtttctgatcaatgacaaaaagctcttaaacagataattgtatcatgcatcaaaatctgttatcgttttaaaaatgaaaatacacgcccaaaaatattaagcttctttccaggaagtaattttctttcacagattatcataacaaatactgaagaagtgtgcactggccttgaaaatttacattcatcctttcttatgattatttaatgtactgctcataagcaaactttaataagaggctttcagtagaaacttatctactgtcctgtgaatttcttaagcactaatggtctaaaacatcatgttttatgcacataatgggttgtctgtaayaaagttttaactctaaaagtcatctgtttcctgctatgtactaaatgtactaagaggatatattttaaactatttctattgctctatactgtggcctttggtgtatgatattctcatgcctgatcttttcactttagaaatacctatcacacctgctgtatacaatttgttttcaaaatgtaatgtgcttggttttcaccttttactatatttccttgctcacatattattattttactttagcattatctttgaattgcgcactctcctttaacaatgctgctatttatttttgtggt

SEQ ID NO: 888879 - DNA, 650 bp, Homo sapiens
acaaaaaaaagcatgaacaacagggacaagatattttagaattattcctaccatcatgggtttattgtgtgaagttttattgacctatactcttactaactgtatactctgtattcaatttaaaaatttatttaaaatgcatatataagtataaagaaaagagaatagctgaagaactacaaaagaagacataatataagttcaaattcaaaaagaatattttgccaaagtttatgagctttagttaaactaaacactactagtctagcttattgctaagtacatgtacggtaaaaatacccaacgctttgccctggattagactttggtttacaatttcaatattgatgtatcttagggacgagggagggccctccttagggctccctagtccctaagatacattagtattgaaatcaggccagttcataactctacattggcctctaagtattcaaattaaaaaaaaagttgctcatctatcactttaaatcaaaatyataattttgaatgtgtggtattgaacaataagactttgtagagaatccataattaggtgcatgaaaataagaaactttggtgtatgttacaggtggtaatatagatcagtgaggaaaaagaaactttcagtacacagtcctatgacaatt

SEQ ID NO: 888880 - DNA, 658 bp, Homo sapiens
atatgtaataattgtttaatagaatatatagacagctaaaatttactagaacattatctcattctaaccttaagcccaattttctatataactatctcaaaatatttaaagtattcattaaaaaggaagcttaaaattttagaatgttatatgcatttttgaatagcattttgtgtattgaatattttatatgtaaaactaattctggaaataaaactctgctctgggtttataaaatagttgccacttgaatattcgtctgaagcccttccagacttcacctacagaccacagcaccctcgcccactagtaatgaactgcctccaaaaattatctcaacataatccacattatctcattctaaccttaaacccaatcttctatatgactagctcaaaatctttaaagtattcattaaaacggaagcttaaaattttagaatgctatgtgtattcttgratagcattttaatgctattagattgaatatattatatgtaaaaataattctggaagtaaaacctctgctctgggtttataaattagtcagcacttgaatatttgtctgaagtccttccagacctcacctatagaccacagcaccttctcccactaacagtgaactgccttcaaaaattatctcagcataatccatgaaa

SEQ ID NO: 888881 - DNA, 554 bp, Homo sapiens
aacacagtactaactttccctagagaatgatgcaatgaaatgtactacccaatgaacataaatagaaattattactgaagccttatttggcctttgtgacaagtgagaaaatatatgtaaatctaaatgattacaataaaaagayctataattgttaacaggaaataatatccaaacaagagactaccttcttaacagtgtagagtttaaggaaaatgcaagtagaataagtgaagaaagaaaaacaaaattggcaagagtggtataaagattaacaactacagtgaactgtagctattttcctattgtcagatgaaatccttagatttgaggaaaagagctgtggtccacacccaaacaccaccattgctttggattgctgaaacaacaggaaataaagctaagacatttctggtacaaaatgacagctcttcattttagtgtcactcaggttgacaactgatgcacaggatacatgtcacaactcatcactgcctatcttgagggtatgggccttgcaagcctccagcaaaaatgaaaactctgaacaacac

SEQ ID NO: 888882 - DNA, 622 bp, Homo sapiens
tttggatgtgacatcaaaagcacatggaacaaaaggaaaaatgaactgagaccacatcaaactaaaaagcttttgcaagcaaagggaaaaaatacacaaaataaaaaggcagcttatggaacgggtaaaaaacttgcaaattgtatatctgataatgtgttaatattcaaaatatgtaaggaactcccacaactcaatagcaaacacacagacacacacacacacacacacacacactccaattaaaaaatgagcaaaggcttgaatagagaatagggaaccctgtacacccttggtgagaatgtatattggcatagccattatgaaaacagtaaggaagatttttcttacattaaaaatagaagtgcygtatgttctagcagtctcacttttggatacccagtcaagggaagcgaaataaatgtatcagagaaatatctgcaccccctgcacctctcattttcattgaagtaatagtgatgttgccaagatgtggaaacatagtgacattgtcaagatatgtccccccactgggaaatgggggaaatagaaagatattagtcaaacggtataacctttcagttataagatgaacaagttctgagtatctaaggtacagcgt

SEQ ID NO: 888883 - DNA, 611 bp, Homo sapiens
atgaatggaacctcagagactttcagttgtagagaaaaatagacacagtcttgaagagcagccataggtgacagacgagtcgtgcagcccctgtcagtcacatatcccacagccatcgccctttcttttttgcttctctaagactgattatgtcagggggcattgtgctcaccaccaagggatgaatcacaattagcacttttccctggtgtaggggtgggtgtaagacccatttctagccaatgtgatttatgragatttctgaaaaaaaaaaaaaaaaaaaagtgttttccctgattaaaggagcagaagggccattttgcctcagcctcctgccttcttagagctacacagccatcttttgcgtaagagacaagacattgctagaagacagacaatgacaatggagggatgcaaagaaccttgagttcctatttgagtcaccaaaccagccttaggacttccaacttctggacttcttgttaaataatcaataaatatcctgttgtttacaccattgttagttggttattctactgtttacaagtaaaagcaacttaacctatacaccaaactcaatgaataataagaaaatttaaaggcaagagaca

SEQ ID NO: 888884 - DNA, 588 bp, Homo sapiens
gaagctgcagtgagccacgatcgtgccactgcactccagcgtgggcgacagaatgagaccctgtctcaaacaaacaaaccaaaaagcagtcatcctcagctttacttccagtatgtctcaccattctgtagagtgctaattgtaattcacaattctcactgccaactttgttcaactagcgttcacgttaaaatttcaagtttagatgacaatgcaaaacttgctatatttcactaatctgagctaatctcataattaatgactaaaagttttatatataatatgctaggctatttagattttcaggtctttcatcctgatataggcaccttggtctgcccttttcaacaaggcagccataaaattacaggtttgtaattatcttcattctttaggacttcataaggagccattaaaatagttaaacracattttatagaataatgtactgcgcagacttttcactatgatgacaatttggccgtagagcatgttctgatgtctgggttttttttttttttttaatcagtagagagtgcgtttggcctatgcattagtagattactactagtcttgaacagttccatc

SEQ ID NO: 888885 - DNA, 668 bp, Homo sapiens
gccatctgtgctcggcaaatctcggaccaagaaaggcctcggtgtttcctaggaacagttctgttgcatgtgtaatggagttgggtaagactttcccatctccccagagaaggtgatgattagtttgggaaagaacaaccaacaggaaaccaaggttggctgtgctgaaatacaaatgatgggtgcaaataaccaacagaaagctttaagtggtattttgaaaatcctgatatctatttgagaaataattagggagctgttgtaaagagccaggagcctgcccaggagaaagggtagagtgaattgtgaaggatgcttctaccaattccgtaatattctatttaaaattaaaaaatgaaactgcagcaaactatttagatatttcaaaatatagtcagtacatgggtgttatttatmtcattctctgaactttttgtgtttgcaatggtttataataattcccagaactctatgaaggattagattccaaggcttcatagatcaaataaaaattactgttttagtggaatcattgtgatagaagtggtagtaaaaagtgaatcccaattcaattctgattaatcttaattctccttactaccatttatgtcaggatcattttacttaaaggtgaaaacagaaaatttaccacttattttcttctccag

SEQ ID NO: 888886 - DNA, 664 bp, Homo sapiens
acaaacaacacaataataagtaaattatatgctgtagaaggtaattagtgccggtaataaagaagaagtaaagcatgacctaccatagaaaggaaggttggaattggaggacagcaagatggtggaaggggaaatggtaaaagtttagtattaatattgtcagtagaggccactttgcaaaggtgaaatttaagcraagacttgagttagagagggagtcagccaagcagttatctgaggcaagagaatccaaaggagtggaaaacataacaaacataccctaaggggaagcatgattgacctgtctaaggattgtaaagggtcatggtggctggaggaaatgagggcaggttgaacaagaagtatgaggaagtagcaaatgcaaaagaactgaaaccataacaaacagtctcttgggccacagctcaaacaaattagaattcaagattaagaaatgcactcaaaaccacacaaccacatggacattgaacaatctacttctgaatgactcctgggtaaataatgaaattaaggcagaaatccagttctttgaaaccaatgagaacaaagagacaatataccagaatctctgggatacagctaaagcagtgttaagagggaaattgatagcactaaatgcccacatcaaaaagctagaaagatc

SEQ ID NO: 888887 - DNA, 586 bp, Homo sapiens
ctacatctagaaaacctcatcatctcagcccaaaagcttcttaaggtgataagcaacttcagcagtctcaggatacaaaattaatgtgccaaaatcacaagcattcctatacaccaacaatagagaagcaaagagccaaatcataaattaactcccattcacaattgctacaaagagaataaaatacctaggaatacagctaacragggaagtgaaggacctcttcaaggagagctacaaacctctgctcaaggaaatcagagaggacacaaatgaatgggaaaatattccatgcccatggacaggaagaatcaatattgtgaaaatggccatactgcccaaggtaatttatagattcaatgctattcccattaaactaccattgatattctccacagaattagaaaaaaaactttaaatttcacatggaaccaaaaaagagaccttatagacaagataatcctaagcaaaaagaacaaagctggaggcatcacactacatgacttcaaattatacgacaaggctacagtaaccagtaaccaaagcagcatgttactggtacaaaaacagatacatggcccaatgg

SEQ ID NO: 888888 - DNA, 598 bp, Homo sapiens
cagctacacaggaagctgaggcaagaggatcacttgagcccagaaactgaaggctgcagtgagctgtgattgcaccaatgcactcccatctggacaagagaacaagacccccattccttgccccagaacacttattttgtgtatgtacccagaagttggtttgctggatcatgtggtaattctatttttaatcttttgagtccatactgttttccataatgaatatcccttttcacattccccaaaaagtggtcaagtattccaacttattttatcttgatcgatacctactattttctgttcttttgttagggaccattctgttggtgggaattgatatctcattgtggttttgatttycatttccttgataattagtgacgttgagcatcttttcatgtttttcaataactatacggtttttcatgtttttcatgtttttcaataactatacagttattggccaactgtatatcttcctttgaaaaatctctaagtcctttgcccaatttttaatcaggttatttggttttttgttgttgacttgtaaaaattccttatatattctagatattatccacttaacagatatgtgatt

SEQ ID NO: 888889 - DNA, 598 bp, Homo sapiens
cagctacacaggaagctgaggcaagaggatcacttgagcccagaaactgaaggctgcagtgagctgtgattgcaccaatgcactcccatctggacaagagaacaagacccccattccttgccccagaacacttattttgtgtatgtacccagaagttggtttgctggatcatgtggtaattctatttttaatcttttgagtccatactgttttccataatgaatatcccttttcacattccccaaaaagtggtcaagtattccaacttattttatcttgatcgatacctactattttctgttcttttgttagggaccattctgttggtgggaattgatatctcattgtggttttgatttccatttccttgataattagtgacgttgagcatcttttcatgtttttcaataactatacrgtttttcatgtttttcatgtttttcaataactatacagttattggccaactgtatatcttcctttgaaaaatctctaagtcctttgcccaatttttaatcaggttatttggttttttgttgttgacttgtaaaaattccttatatattctagatattatccacttaacagatatgtgatt

SEQ ID NO: 888890 - DNA, 660 bp, Homo sapiens
aaagtaggcaaagatactgtttgagcacagagagaactacttggttcattttgggtttagggatgacttttttgggaaaaaatatttattttaatttttaaattttttaataatacactttaagttctagggtacatgtgcacaatgcgcaggcttgttacatatgtatacatgtgccatgatggtgtgctgcacccattaactcatgatttacattaggtacctctcctaatgctatccctcccccytcaccacaccccacgacaggccccggtgtgtgatgttccccttcctgtgtccaagcgttctcattgttcaattcccacctatgagtgagaatgtgcagtgtttagttttctgtccttgtgatagtttgctgagaatgatggtttccagcttcatccatgaccccacaaaggacatgaacccatcctttttcatggctgcatagtattccatggtgtatatgtgccacgttttcttaatccagtctatcactgatgggcatttgggttggttccaagtctttgctattgtgaatagtgctgcaataaacttatgtgtacgtgtgcatgtgtctttatagcagcatgatttataatcctttgggtatataccccctgacttcaagctataatacagggctacagtaaccaaaac

SEQ ID NO: 888891 - DNA, 657 bp, Homo sapiens
  misc_feature 227: n = A,T,C or G
gcaaagattgctagcagctattattccagcatacttggtgtataggcaggcctaccttattatttattgtgcaactcaggccctttgaaagtaaaagagtgatctgtaagtacagtaggataacaagcataaaccaagacagcctgacaaactggaatatgtagttaccctaactataagttatgttgtaggagatgtcgttgggaaagtgagttggggtcatttgntgattatttatctcttggaagcaaaaattaggcttattctgtcaaattttgrttttaacatctgcatgtatacaacctggctaggcaataatgataatcacaatagttactatttactgagtgcccactttgaggtttctaacttacattctcattgatccttacactgactctgcaaggtgcctattatgcctgtattcatgcccagtggctgcccaaaataatgactgcaaactttgtggcttaaaacaacagaagtttattcctcatagttctggctaaagtctgaaatcaaggtgtctatagggccacactctctctgaaggttctaaagggagaatttgttccttgccttttccagcttctggtggccacgtcacttcaatctctgcttctgtggtgatactgactccttctcctctgcatgtct

SEQ ID NO: 888892 - DNA, 704 bp, Homo sapiens
cttcatgttaaaaatgctcaataaactaagtattgaagcaacgtacctcaaaataataagagccatctgtgaaaaatccagagccgatatcatactgaatgggcaaaagctggaagcatatcccttgaaaaccagcagatggcaaggatgccctctctcaacactcctatttagcatagtagtggaagtcctggacagagcaatcaggcaagagaaagaaataaagggcatccaaataggatgagagggagtcaaactatccctgtttgcagacagcatgattttatatctagaaaacccccatagcacgtcccaaaagctccttgtgctgataaaaaaaaacttcagcgaagwttcagaatacaaaatcaacataaaaaaatctctagcattcctatctaccaacaacagtcaagctgagagtcaaaccaggaacacaatcccattcacaattgccacaaaagaataaaatacctagcaatacagctaaccagggaggtgaaagatctttacaatgagaattgcaaaacactgttcaaagaaatcagaggtgacacaaacaaatggaaaactattccatgctcatggaaaggaagaatcagtatcattacaatggccatactgccaaagcaatttacagattcaatgttattcctaccaaactaccaacgacattcttcacaaaactagaaatcaggatccta

SEQ ID NO: 888893 - DNA, 561 bp, Homo sapiens
cctttgtagggacatggatgaagctggaaaccgtcattctcagcaaactatcgtagggacaaaaaaccagacgctgcatgttttcactcataggtaggaattgaacaataagaacacatagacgcaggaaggggaacatcacacaccagggcctgttgtggagttggtggagggggaagggatagcattaggagatatacctaatgtaaatgatgagttactgggtgcagcacaccaacatagcacatgtatayatatgtaacaaacatgcacattgtgcacatgtaccctagaacttaaaatataataataaaaaaaaaagacagtttttttctgtctcccaaaccatctctctaacccactggggtataaatttctacaaagcagggatcatgtatttattattcaactaccactcattcatcaatccatgatccaatgttcttttgctaagcacctattattgtgcttaacaatctatcaatcattgtattagatacagattagataaagcagaatgttctcccttgaagatgtaacaagaaaaatcaaaaataaaag

SEQ ID NO: 888894 - DNA, 601 bp, Homo sapiens
cttgtcaagtccacttcaccatggctgccttgccaacacaacctttcctaagcccagatgtgttgatgtgcattgcgccagatttctgaagactcaagtcacttcctgagataaattactcatataggaaagcagactagcagttattgtaaacaactctaagactctcatctaaagagcggatatgccttcytaaagggcgtgctccaaggcaaataaatcctttggatctaagtctaccttttagcacacacaagaacactttcagctcattgatccagaagtgataaaggaaatgaaaagttcagccaaccaaaatggggtgctcaaaggggttcttttaaggtccaggctgcacagggtagttctgttttgtccccaccaaagttagcctctgccaaagaattgctccgggctctggccaccacatgtgcctacaacccccaaagcagaaagcctgggaaagaatcacatactcataaaggccccataattaggcacattcactgggaatggtgtttaagttatcaatcatggggtacaagaagaattaataaaattctgtatatttttaaaactttttatagaattatacattact

SEQ ID NO: 888895 - DNA, 587 bp, Homo sapiens
accgaggccaagatggggaaggtccctcatcagagacagtaacagctggaactagaacccaggactcctgactcccagtgcatgcctcagtttccccctctgtaatatgaagttgataacctcggctcttttctcctctgccactcctagggccattgtgacagttgagagacgggatggggtgctcatgcaccatattttacaggtgaaaaaacaggttcagagagggaaagtgacttggccaaggctacacagcaaattaacatgtcctgtgcaagaagcccattcagaacccagccccaccccttcccaggagcacaccttagaaagctctttatggttcatcaggtgcttcctctgggcctcccctygtccccagaggcagagagtatagattcaataatgtggaagggggaatgtgggttcagagagaccttgttcccactgagggccacggagcacactcagggcaaagctgcagccactgcccctgtggacagctgggtctgcctctctgcaggcttaggccccagccccattgctttcaagaatgctcccatccctggcagctacaagaaagaaagatt

SEQ ID NO: 888896 - DNA, 511 bp, Homo sapiens
tacatttcttatgtactttatttttattattacattgtgatatataatgaaataattatacagctcaccataatgtagaatcagtgggagccctgggcttgttttcctgcatctagacagtcccatctgggggtgatgggagacagtgacagatcgtcgggcattagattctcgtaaggagtgtgcagcctagatcccttgcacgtgcagagttcacaacagggttcacactcatgagaatctaacgctgccgctgatctgacaggaggcggagctcaggcggtgatgcgcscgatggggagcggctgtcaatacaaagcttcactccctcacccactgctcacctcctgctgggaggcccagttcctaacagcccacaggtccacggctggggggttggggagccctgctctactcattttccaaattactttcccaaacatccacagagcgccacactgaagaacgtgactgtctcatgttctaacttgtctgaggatatttttgtcca

SEQ ID NO: 888897 - DNA, 545 bp, Homo sapiens
aaagcaatttagacattcaatgctattcctatcaaactaccattagctttcttcactggagaaagctaatttaaatttcatatggaaccaaaaaagagcccgtatagtcaagacaatcctaatcaaaaagaacaaagctgcagacatgacgctacctgacttcaaactacactacaaggctacagtaacgaaaacagcatagtactggcaccaaaacagatatatagaccaatggaacagaacagaggcctcagaaataacaccacacatctacaaccatctgatctttgacaaacgtgacaaaaacaagcaatggggaaaggattccctatttaataaatggtgctgggaaaacyggttagccgtgacagtagatttctcatcagaaaacaaggaagtgagaaggaagtggcaaaacatttttcaagtactgaaagaaaagagctatcaaccatgaattttatatcatgtgaaactgtccttcaggaatgaagaggaaataaagacattctgaaaggaaggagaactacaagagtttgcagcta

SEQ ID NO: 888898 - DNA, 644 bp, Homo sapiens
tcatttggaacaagaacatttccccgatgcctgttccctcattgtatcttgaaagtaactaacttgtttttgattttacaggctcataagtggaagggacttgccttgtcttagatgagaatttggacttggacttttaagttaatgctggaataagttaagactttgggggattgttgggaaggcatgattagttktgaaatgtgaaaaggtatgagatttgagaggggctgaggtggaatgatatggtttggctctgtgtcagctcatctcgaattgtaatccccaacatgttgagggagggacctgataggagatgatgggatcatgggggcagtttccctcatgctgttctcatgatagtgagttctcatgacatctcatggtttaaaaagtgtttggcagtacctctcaaccacctccatataagatgtgccttgcttccccttctgctatgattgtaagtttcctgaggcttccccagccatgtggaactgtgagtcaattaaacctttatttctttataaattacccagtcttatgtagttccttatagcagtgtgaaaacagactaatacactatttttatgtctaaatgaactgagatcagatattaaagccaatctcacggggttaacaagaat

SEQ ID NO: 888899 - DNA, 644 bp, Homo sapiens
tcatttggaacaagaacatttccccgatgcctgttccctcattgtatcttgaaagtaactaacttgtttttgattttacaggctcataagtggaagggacttgccttgtcttagatgagaatttggacttggacttttaagttaatgctggaataagttaagactttgggggattgttgggaaggcatgattagttgtgaaatgtgaaaaggtatgagatttgagaggggctgaggtggaatgatatggtttggctctgtgtcagctcatctcgaattgtaatccccaacatgttgagggagggacctgataggagatgatgggatcatgggggcagtttccctcatgctgttctcatgatagtgagttctcatgacatctcatggtttaaaaagtgtttggcagtacctctcaaccacctccatataagatgtgccttgcttccccttytgctatgattgtaagtttcctgaggcttccccagccatgtggaactgtgagtcaattaaacctttatttctttataaattacccagtcttatgtagttccttatagcagtgtgaaaacagactaatacactatttttatgtctaaatgaactgagatcagatattaaagccaatctcacggggttaacaagaat

SEQ ID NO: 888900 - DNA, 584 bp, Homo sapiens
aaaaatggacatttatttcccctgtatctttcggtcttcattttgaaagctaccatgtcgtgtaaaactataataaaaaatcgtatgccttttctcctattaatctgccttttgtcaggaattttcagtgaacctctagaggatcatggggaagtttccccttacccctacagtgtctttgatggattaactgtttatttttttgtgactctactttatttccactattggctttttggcatacctttttgttttagtttttagtgattgccctaggctttacaatacatgtctttgacttactacagtctgccctcaaacaatattatgccacttcattctagtttttcccttttgtcctttgtgctattgttattatatattttacttctacatatattataagccccacaatttactgtcactayatttgctttaaacacctatcttttaaagagtttaaaaatgaagagaaaaaaggcctttaaaaatattatctgtgggttttttgtttgtttgccattctagttacaccatctatatattttttgattgttttgtttctcatgtttgttttggaaaga

SEQ ID NO: 888901 - DNA, 657 bp, Homo sapiens
tctggttggaatggtggcagcatgctgaagccaagtgctcacaggccttggttcaagggatggaaagtcgtccgtaaagatggcaatgccagtgggaccacactgcctgaagctctggactgcgtcctatcactaacttgtccaactgtcaggcccttgcatctgccactccaggatgtctacagacttggtggtactgatactatctttgtgggcagagttggtggtactgatactatctttgtgggccgagcaaagcctgggtttctcaaacccggcatggtggtcacctttgctccagtcaacattgcaactaaagatgtgttgaaatgtaccatgaagctttgagtgaagctcttcctrgggacaatgtaagcttcaatgtcaaaaaggtgcctgtcaaagatgttcattgtggcaacactgctggtaacagcaaaaatgacccaccagtggaagaagctggcttcactgcccaggtaactgtcctgaaccatccaggccaaatcagtgttggttatgcccctgtaatggattaacacacaactcacattgcttgcaactttgttgaactgaaggaaaagatggatcaccattttggtaaggagctggaagatgatcctaaattcttgaagtctggtgatgctgctatttttg

SEQ ID NO: 888902 - DNA, 657 bp, Homo sapiens
tctggttggaatggtggcagcatgctgaagccaagtgctcacaggccttggttcaagggatggaaagtcgtccgtaaagatggcaatgccagtgggaccacactgcctgaagctctggactgcgtcctatcactaacttgtccaactgtcaggcccttgcatctgccactccaggatgtctacagacttggtggtactgatactatctttgtgggcagagttggtggtactgatactatctttgtgggccgagcaaagcctgggtttctcaaacccggcatggtggtcacctttgctccagtcaacattgcaactaaagatgtgttgaaatgtaccatgaagctttgagtgaagctcttcctagggacaatgtaagcttcaatgtcaaaaaggtgcctgtcaaagatgttcattgtggcaacactgctggtaacagcaaaaatgacccaccartggaagaagctggcttcactgcccaggtaactgtcctgaaccatccaggccaaatcagtgttggttatgcccctgtaatggattaacacacaactcacattgcttgcaactttgttgaactgaaggaaaagatggatcaccattttggtaaggagctggaagatgatcctaaattcttgaagtctggtgatgctgctatttttg

SEQ ID NO: 888903 - DNA, 602 bp, Homo sapiens
acaggaaaaaaataaacaactacataaaaatgtgggcaagagacataaacacttttcaaaaggaaacacacatgtggccaacacacatatgaataggagctcaatatcacttattattagagaaatgcgaatcaaaacctcaagataccatcttgcaccagccagaatagctatcattaaaaagtcaaaatayaacagatgctggtgaagttgtggagaaaatggaaggcttatatactgttggtgggaatgtaaattaattcaaccattgtggaagacaatgtggcaattcctcaaagacctaaagacagaaataccattcgacctagcaatcccattactggatatatatccaaaggaatataaatcattctgttataaagacacatgcatgtgtatgtttattgcagcactgttcacaatagcgaagacatggaatcaacctaaatacccatcaatgatagactggataaagaaaatatggtacatatacagcatagaatactatgcagccataaaaagattgagattatatcttttgtaggaacatggatgaagcaggaacagaaaaccaaataccacatattctcatttataagtgg

SEQ ID NO: 888904 - DNA, 559 bp, Homo sapiens
tagaaatgtataaagcaaatttaggaataatatacccatccacataagcgcttgtcatgttatgtacatttaggataaagtttggtagttactatcagccctggcaggtatttattcaagatatttggaaagcctatttaaaaaaaaaaaaaaggaatagagaaagagtcaagaatccaagtcatgtaagattaaatgacgaagttccccagaaacctcttcaacttcctgtgtgtgtgtttggaagtcaatcattctcagggttagtaagttcaagtcagatcagcagaggacattaaatagccaccagtcagaaaagcaartatctaggtaagcatgattgtcagcattcacggcagataagaggcagctgtgagactggccagaaaaaaagcaggaaaagtacagatgtaaccagaatttaaaataaaacagaaagatgctgcatcatcagaggattaggcaccaggtttactgaggccattgagcaataggactggaaagggtaggagcaagatacataataaaagacctctgagcatagttctatcaggaaggc

SEQ ID NO: 888905 - DNA, 624 bp, Homo sapiens
atctaaatacaatttttaagtataaagtctctcatttagtttatttagttttctcttctcagcatatacccttctttctcaatataatgaaaactaacttgtggatatctgagcactaagtttagatgtttgagtgggaaggatgtttctgtggggctggctctcattttctggtagaggacacttaaactcagaaccttttcaagaacctccctttatctctttatctctggctgttgggtgtgaaaaatcagtccttttccctaacatcacaggcttcaactagcaaggcatgaaggttcagtaaatttaggctgcaggcagctaacacagttccyttaatgaacttcagctgagctgcttgcaaaatgtgaaactgcttgagttttttatgactttgcagcttttgaaaattatagcctacaaatttgtagatttttattcagtttggttttgtttaatgttcataattagaataatgttatagacttttgttataattgttgaattgttttttagtgcttccataacataataccaaacactgggcggttaaacaaagaaatgtattgtctgatgattgtggaggctggaagtcagagatcaaggtgtcggcagggctgg

SEQ ID NO: 888906 - DNA, 649 bp, Homo sapiens
cactggatgtttatttctcaagttcactctgaggttgtcataggttggctgagtcctgcaccccaaaacacagctcccctaaaggctttgcctttttattgttctctcccaggtgtgccttctgtatctttccaggggtctcattgggaagcacagtacatgttcttaaatccatttttaatggatccttcaccaatattaatctttctgaagcataattttcagcacttcacttcaataagatatcaatattcctatgaaggaaaattcagaatgttaaatcttcttggtgagatatgatgcaatccagcttctcttgttttaattgtttttgcttttccttttaatttttcytatcaaagttaattttaaaaactaagaccaaatgttgcttttgtcatttcttaattggatgacctttggcaagttagtgaatatgttaattcataagttaataagttaatgattagttaatgtataattttaaagattaaatgacataatatgggtaaagagcttatgccattctctctgcactgatgtattttttcaccattcccaaacattgaaagcctacacgtactctgaggtccagctccaatgtcatcatttttaatttcaccatgcagtcataagctcttttcttcct

SEQ ID NO: 888907 - DNA, 564 bp, Homo sapiens
ccccttgctccatgtggctctcaggtgggctgttgcaccagcctacttttctttgctctccatgggtaacaccaactgcctagtcagtcccaatgagagaacctggatacctcagttgccagtgcaggattcacttgctgttttcattcttctcagtgggagcctctgacaatggctgtttctagttggccatcttggcccctcctctgcagtgccttttttagtaccttagttgttcctgttttcttcagtcatatcacgtttattatcaatagtcttraatacttctacataccactctcctaacagatgatccaaaataagagaggtaaaattatgctgagtagcactcagagtcgaaattatgcctctgcaaatgagcttccaagagaataaatgagcttccaatagaatcagtggcgaagatctggacaatagtgatgatctttcctgcagctttggctgagagaaaataaaaaacaggattgagggtaaagaataatagtcttcagattcccagaaatagattgacaattgcacagccatggttagtgttagggttag

SEQ ID NO: 888908 - DNA, 576 bp, Homo sapiens
tcctttgggtatatacccagtaatgggatggctgggtcaaatgatatttccagttctagatccttgaggaatcggcacactgtcttccacaatggttgaactagtttacagtcccaccaacagtgtaaaagtgttcctatttctccacatcctctccagcacctgttgtttcctgacttttaatgatygccattctaactggtgtgagatggtatctcactgtggttttgatttgcatttctctgatggccagtgatgatgagcattttctcatgtgtctgttggctgcataaatgtcttcttttgagaagtgcctgttcatatcctttgcccacttttcgatggggttgtttgattttttcttgtaaatttgtttaagttctttgtacatcctggatattagccctttgtcagatgggtggactgtaaaaattttctcccattctgtaggttgcctgttcactctgatgatagtttctttagccgtgcagaagctctttagtttaattagatcccttttgtctatgttggcttttgttgccattgcttttggtgttttagtcatgaagtccttgc

SEQ ID NO: 888909 - DNA, 635 bp, Homo sapiens
tcgtgtctgtcagcccttgccaaaacagtagtgcagcagtgtgtcatctcctggcagcacaatgctgggcaaggtccaaccgtcctgcctggtatacaggcttatggagcagcctcctttgaagatctccaagtagacttcaccgagatacccaaatgtggagatctcatccctaggtttggactgcctttatgaattggctcagacaacgggccagcgtttgtcgctgacttggtacagaagacagcaaaggcgatcgggtgtagatcaaggattagaatgcagcccccttgcaaccacagtgaaaaggaccccagactgtcgtcttgaccactcccacagccgtgaaagtagaaggaatcccagcctggatccactacagcygcatgaaacccacagcacctgagacctgggaggcgagaccaagcctggacaatccctgcaaagtgactctgaagaagacaacaagccctgctgcagtcacacccggaagctgactggtccatgcatggccgaagcatgaggaaactcaccatgggacttattttccttatattttggacttgtacagtagggacttcaactgaccttccgcaaactaaggactgttaccagtgtatacatcaggtcactaa

SEQ ID NO: 888910 - DNA, 579 bp, Homo sapiens
caatgtggctcatcttacaaatgtaatgaaaattgggtgtcttatgtgacagtgcttctatttgatgtatgggacatttgattttccatgttcttctttcctgtcttcatgcagcatggtgagcagtggagcgaaaatgcctgcaccacgtgtatatgtgaccggggtgaggtcaggtgtcacaagcaggcctgcctgcccctgagatgcggaaaggtatttgagagtgtgtaccttacttgtttaagctcttttctgggtcatttaaggaatgcacttcttattccrgtgtgtcctttgggggaatcaaaagttttataatgtttgcaaagttacataaagatatgaaggctctgcttcctaggaagaagggttgaggtgcaagggaccctgcccatcgtgggtcgggccagagaaagagccatgtagagctttggtattttgggtcctcctgcctctgttggcttgggtgtttcaccgtctcctgaggactgcccctcaccttcctctctgtgtcctagggtcagagcagggctcggcgtcatgggcaatgctgtgaggaatgtgtgtctcctgccg

SEQ ID NO: 888911 - DNA, 657 bp, Homo sapiens
aagttgacttagctattcataagctttagagcacatttactgaattcttaagaaaactcaactgggtctggatgtggtggctcacacctataatcccagcactttgaaaaggccaaggcaagaggatctcttgagctcaggagttcgagaccaggctgggcaatatagtgagacctcatctctactaaaaataaaaaaaaaaaattagccaggtgtggtgatgtgtgcctgtagtcctagttcctctggaagctgaggcaggagaatcacttgagcctgagagattgaagcagcagtgagccatgatcgtgctgctgcactccarcttgggtgacagagtgagaccctgtctgaaagaaagaaaaagaaagaaagaaagagagagagagagagagagagagagagagagagaaagaaagaaagaaagctcatcaactggaatttttattgatattacattggagttatagattagtttgggaagaaattacatcttcctaataattttatttagatttacaaatttccctctgggtgtaactttaggtgtgtcttaaaatgtttgatatgcaatgcttttattgttggtcaattctaatttccaaaaattgctgcaatttttcatttcttggaaattgcatttagcttttagattac

SEQ ID NO: 888912 - DNA, 594 bp, Homo sapiens
gttatactatgaacttccctggttctcctggttgctgatagcatatcatgggacttctcagcctctataatcatgtgagccaattccaaacatgaacatcctcttatgtatctctaaatgtcctattgattctttctctggaaaaccctggtttatctgctatatctaacaggtgtttctaatattagaaatatctaacagcatctaacatattcaataatgtactgttattgttggttttattacagttgaattttaagtttcatctcaaatgttagatctttcatagaaacatctaacagcatcttaacagattcaataatgtactgttattgttggttttattacaggagaatttaagcttcatgatagtagacatttactcctctgtttggctcactactgttttctcagcacccagaacagtaactggcacacagtaggcacttcatarctatttgctaaccgacaaccaaatgaataacaaaagtaaaagaactgctgaacagtgagccaagatcatgccactgcactccagcctgggcaacagagcgagactccgtccaaaaaaaaaaaaaaaaaggaactgctgaa

SEQ ID NO: 888913 - DNA, 591 bp, Homo sapiens
gcttcaatttaaagtcaccagctgcatttgctcctaaaaagagagtcagacttgcttttgaagctctggaaacaggcattgacttttttttttttttttttttttttttttttgagacaggctctcactgtatcacatcactacactccagctcagggtcacccaggctggagtacagtgacatgatcatggctcactgcagcctcaacctccccaggctcaggtgattctcccacctcagcctcctgagtagctacctcccatcaccatgcctagctaatttttgtattttttgccatgttgcccaggctgctctygaactcttgggctcaagctatctgcctgcctcagcctcccaaaatcctggaatgagaggtgtgagctaccataagtggctgacttctttctggctatgaaaatcctagatggcatctccttccaatagacggatgtttcatctacattgaaaaatctgtgttcagagtagccaccttcatcaatatcttggtagatcttgctgaagcttccacatcagcccttgctgcttcaccttgcactttacgttacggaaatggcatccttccttacatt

SEQ ID NO: 888914 - DNA, 372 bp, Homo sapiens
tcataagtgaaggagaaataaaatcctttacagacaagcaaatgctgagagattttgtcaccaccaggcctgccttacaagagctcctgaaggaagcactaaatgtagaaaggaacaacaggtacaagccatggcaaaaacatgccaaattgtaaaggtcatctwtgctaggaagaaacagcatcaactaacgggcaaaataaacagctaacatcataatgagaagatcaaattcacacataacaatattaaccttaaatataagtgggctaaatgccccaattaaaagacacagactggcaaattggataaagagtcaagacccatcaatgtgctgtattcaggagatccatctcacatgcagagacacac

SEQ ID NO: 888915 - DNA, 609 bp, Homo sapiens
gaaccattcttgcatccctgggataaatccatttggttatgatgaatgatctttcttttttaaattattattatacttcaagttctggggtacatgtgcagaatgtgcagatttgttacatagatatatgcatgccatggtggtttgctgcrcccatcaaccctcatctacattaggtatttctcctaatgttatccctcctctaacccccaaccccaacaggccccagtgtgtgacgtccccctccctgtgtccatatcttctcatttttcaactcccacttatgagtgagaacatgcagtgtttgattttctgttcttgtgttaggttgctgagaatgatggtttccagcttcatccatgtccctgcaaaggacatgaactcatccttttttatggctgcatagtattccagagagtatatgtgccacgttttctttatccagtctattattgatggacatttgggttggtaccaagtctttgctattgtgaacagtgctgcagtaaatatacgtgtgcttgtgtctttatagtagaatgatttataatcaaactgaatccagcagcacatcaataagcttatccaccatggtcaagttggcttcat

SEQ ID NO: 888916 - DNA, 609 bp, Homo sapiens
gaaccattcttgcatccctgggataaatccatttggttatgatgaatgatctttcttttttaaattattattatacttcaagttctggggtacatgtgcagaatgtgcagatttgttacatagatatatgcatgccatggtggtttgctgcgcccatcaaccctcatctacattaggtatttctcctaatgytatccctcctctaacccccaaccccaacaggccccagtgtgtgacgtccccctccctgtgtccatatcttctcatttttcaactcccacttatgagtgagaacatgcagtgtttgattttctgttcttgtgttaggttgctgagaatgatggtttccagcttcatccatgtccctgcaaaggacatgaactcatccttttttatggctgcatagtattccagagagtatatgtgccacgttttctttatccagtctattattgatggacatttgggttggtaccaagtctttgctattgtgaacagtgctgcagtaaatatacgtgtgcttgtgtctttatagtagaatgatttataatcaaactgaatccagcagcacatcaataagcttatccaccatggtcaagttggcttcat

SEQ ID NO: 888917 - DNA, 585 bp, Homo sapiens
taaagtttccactgaaaaatctgctgccagacatgttggaactccattgtgtgttatttttttcttttcttttgctgcttttggcatcctttctttatccttgacctttgggagtttgattgttaaatgccttgagatagtcttctttgggttatatctgtttggtgctctataaccttcttgtacttggatattgatatctttctctaggtgttggaaattctctgttattatcattttgaatagactttcttctcctctttctatctcctctttaaggccaatacctcttagatttgctctttagaggctattttctagrtcctgtaggcatgcttcattctttttcattcttttttattttgtctcctctgactgcattttcaaatagcttgtttcattcttttttattctgtctcctctgactgtacattttcaaatagcctgtcttcaagttcactagctcttttttctgcttgatcagttctgctactaaaagactctgatgcattattcagtatgccagttgcatttttcaactccagaatttctgcttgattctttttaattatttcaatctcttgt

SEQ ID NO: 888918 - DNA, 615 bp, Homo sapiens
gctttgtctccccaaaggctggtattagatgaatgagaataaaaatcgtcttcagggaagagaggaaagagaagaccagaggacaatgacctttcagaagacaggaggaggaaatggcaccagcaatggagagaactgtcaagaaatccatgaaaggctataaacctactgggtgacagaaaaggtggccacatcaattacactagatggcagatgtgaaaatttgtcatgcacaagattttgagataacttgactagcacaggctactatataaattgtatatgtgcttgcttagaatagaaataacaggcattcctcatctgaattaaatttaaaaaatactttgaatagcagttttcaggtggtaggagcttatcatatataattttaattgggaaaattaatatgttcccaactcatccaaatacctgtccaatgtcctcaaatatgaataaaatcactgtaaacacctgcrtagccatccaaatccagcaaggatttctgatttatataaattaagttgtttgaaatatcaattacctaattctttaacacataatgaactgtttggagagtatgtttgtatgcagtacacaaagaaaccttccttatag

SEQ ID NO: 888919 - DNA, 659 bp, Homo sapiens
acatctcaaataaatggtgtcaaagggtttacatgacctcgtgctgaaacacagcagggttaatcaacgttatggcagttgggtaccacaaagaccttccttaggctttatttatttaatttaattaatatcactcagtggggttattatcacccttctgctctctccctctgtcatttygcccaccatttgtactatttgttgtaaacttttgctttggttaaagtgtggaaggtaggaagtagagcctctgttaccactgaggcttttgtggataaacgatagtgttacatctatttccactgtttgaattcctctagaagatgttgagcttccaccgttgtgttccaagatggggtgcctcctgggagaggatggagcagcaagcctacaatcctattcaaagaattttcagtggtacatgaatttaatgatttactaaaacccatctactctcaaaaatggtcagaaaggggatagcagtggtaagtttgagctgggtctatttaatcattttgtcagtcccccaaggcagacatattctcctgcctggtgataaccacttgcctactggaaactgtttttttaatttttttttacttaacaccaccttgggacagaagtcaatcctctgagaacaatttgttgtaacattacta

SEQ ID NO: 888920 - DNA, 589 bp, Homo sapiens
atttgccacatttctatcattttgttttatttaccatgctttttcttttcattttttctcctttttctttttttgttggattaataaacttttcctcctctccacccatatttcccccaatagttctatttttattctttcartgattgtcttttgtttatatgcacagacacaaattaatacttgtcaaccaagtctacatcaataccaccttcttcccaaataatatttttaaaaacttagtcacttccatccaaacttccctttcattgtggttttatttcagcattgcttttattcatctccctgctttattttttcaggccatatctatttagctttaccagcacattttgtaatgtccactgcttcttcttggaaacattcttttcttcttatttaatttccataagtacattttttggtgaagatctatagattgtacatttgttccctgtgtctgaaatgtccagtttcctttatagtcaagtgctggttaggctgagccagatttctatctaggctgacaataattttacacgagtattttaaaatatattactcattagtgcacttttgattctttaga

SEQ ID NO: 888921 - DNA, 697 bp, Homo sapiens
ttctatgtaaccctaactactggtggagagcagaagtgaaaatgagagggaaaccaaacaataaaaaacatgatgaggagacaggccagttgacagaggaccaagccagcagagaagcaagtgcaagagctcagtctggatttagaactcattgaagctctaagttctctctgacttacaaagacaagatatggtttccttctacctactgctgaaaagcaagctccagacagaagcgaagttctatgtgtcataggtttcaatcacaaggctggacctaggtaaacagatatctctaagatttacctttggagttacttgtctytagctggcttgtgctcaatgtcataagctacagtgaccttggacaatttacttaacaagctacagtgaccttggacaatttacttaacattttatgtttaatattttatattcaaaattgggataattcttgagcaaatgccataggtcattttgtgagggttcattgagataaggcatataaattctccgtaaatgttggttattgttattcgtgataattggtgctattctgactggtagagtctttattctttttttgattttaacagctttattaatatatcattatcatatcagatgactcaccgacttgaagtgcacagttcaatggttattaatatattcacaggtacatgcaaccatcaccata

SEQ ID NO: 888922 - DNA, 723 bp, Homo sapiens
ttacaattcttcaagaaataggtaatgtttggaggaaaattcaataatcaggttgtttagagaattatgcacttacagatatttggaagtagacttattaggcacattcctgagcaaggaatgaaggacaaggctgtgtgccagattcagattctggctttaatagtcaagttttcagtacaaaggcattgtatctattccaattaatagaccttaaaatttaccctagctttgagaaaactttatacactgtcttttatagtatttagcatttaggatcccrgtaaactatcaccgacttggtgccaaatttcctatggtaccaaggagttttgtatttccagttgagcaattggtggcagtatcatttaacttagtcacattaatgttatggtagaaacaatccctaaacctcagatgcttacaaaaacaaaggtttatttttcactcacagtgcatgtcttttgggttggccatgggcttcatattgatttcattataggccttaactgaaaggaacagtccctcttggggacattagtcatcttgtgacaggggaaagaaaatggcaggatttggaggtggtcttcatctcttccactcatataccacttgatgtgccatggcatcaagaaggcagaatgtataatccttctttgaggggagaagtgaatactttgaacaaaaataaaatcaactacaaggatgcagacaggatctata

SEQ ID NO: 888923 - DNA, 723 bp, Homo sapiens
ttacaattcttcaagaaataggtaatgtttggaggaaaattcaataatcaggttgtttagagaattatgcacttacagatatttggaagtagacttattaggcacattcctgagcaaggaatgaaggacaaggctgtgtgccagattcagattctggctttaatagtcaagttttcagtacaaaggcattgtatctattccaattaatagaccttaaaatttaccctagctttgagaaaactttatacactgtcttttatagtatttagcatttaggatcccggtaaactatcaccgacttggtgccaaatttcctatggtaccaaggagttttgtatttccagttgagcaattggtggcagtatcatttaacttagtcacattaatgttatggtagaaacaatccctaaacctcagatgcttacaaaaacaaaggtttatttttcactcacagtgcatgtcttttgggttggccatgggcttcatattgatttcattataggccttaactgaaaggaacagtccctcttggggacattagtcatcttgtgacaggggaaagaaaatggcaggatttggrggtggtcttcatctcttccactcatataccacttgatgtgccatggcatcaagaaggcagaatgtataatccttctttgaggggagaagtgaatactttgaacaaaaataaaatcaactacaaggatgcagacaggatctata

SEQ ID NO: 888924 - DNA, 603 bp, Homo sapiens
aagtagaagtcaaattgtccctgtttgcagatgacatgattgtatatttagaaaaccccatcgtctcagcccaaaatctccttaagctgataagcaacttcagcaaagtctcaggatacaaaatcaatgtgcaaaaatcacaagcattcttatacaccaataacagacaaacagagagccaaatcrtgagtgaactcccattcacaattgctacaaagagaagaaaatacctaggaatccaacttacaagggatgtgaaggacctcttcaaggagaattacaaacattgctcaacgaaataaaagaggataaaaacaaatggaagaacattctatgctcatggataggaagaatcaatattgtgaaaatggccatactgcccaaggtaatttatagattcaatgccatccccatcaaactaccaatgactttctttacctaattggaaaaaactactttaaagttcatatggaaccaaaaaagagcccacattgccaagacaatcctaagcaaaaaggacaaagctggaggccacacgctacctgacttcaaactatactacaaggctacagtaaccaaaatagcataatactggtaccaaaa

SEQ ID NO: 888925 - DNA, 601 bp, Homo sapiens
atctctgctcttttgtaaggcttctttcatgcgtaagcttaaatttaatagtttttcacaatgtatttaatggaagctatatcataagaagtggtgtagaaaaaagagtggtcctgtttcaaagaagaaagaaggtaacattcattgttattttgaaatggctaaagttgaaaatgtttttwattgatctatttgctagttagaattttaattgtgataattgtagatttacatcagctgaagaaacaatgtagctttacctggtctcccctagtgataacatttagcaaaactgtagtacaatatcataactaggattgatattgatgtaatctaccaatcttactcagatttccatagttttacctgtactcatttgcgtgtgtgtgtgtgtgtgtgtgtatactcagttgtgtgcagttttatcacatatataggtttgtatatctaccactacagtaaagatgctgaactgttacagcatggatccctcctattgtttttttgtagctgtacccagtttcttctcaccagtctcctatccttatcccttggaaactacttattgggtctccatttctaataaacttcatatatgtaa

SEQ ID NO: 888926 - DNA, 601 bp, Homo sapiens
atctctgctcttttgtaaggcttctttcatgcgtaagcttaaatttaatagtttttcacaatgtatttaatggaagctatatcataagaagtggtgtagaaaaaagagtggtcctgtttcaaagaagaaagaaggtaacattcattgttattttgaaatggctaaagttgaaaatgttttttattgatctatttgctagttagaattttaattgtgataattgtagatttacatcagctgaagaaacaatgtagctttacctggtctcccctagtgataacatttagcaaaactgtagtacaatatcataactaggattgatattgatgtaatctaccaatcttactcagatttccatagttttacctgtactcatttgcgtgtgtgtgtgtgtgtgtgtgtataytcagttgtgtgcagttttatcacatatataggtttgtatatctaccactacagtaaagatgctgaactgttacagcatggatccctcctattgtttttttgtagctgtacccagtttcttctcaccagtctcctatccttatcccttggaaactacttattgggtctccatttctaataaacttcatatatgtaa

SEQ ID NO: 888927 - DNA, 718 bp, Homo sapiens
agttcccagaataaagtgaaacttgcatgttatttttttaagttgaggatgaagcaaaatatagccaaggaaggaatacatctgcatatttaatggccaaataaataaatataatacaaccactaagattttcaggagtttacagttactgcaatgataaaatttggtttgtttttctttcaggttattcttttctactttttcctctgatagagcagttgaagcagttaaaaggatttcttaaaaaatctgacaacactgcacatttatgctgaatacatacagtatctaatttaaagtaaaaggaactaaactttttcccctcacttttgattcttaatattctttatcagctggttgaagagttcctagctctgactgttcatgcttgcaaatacgagttaaaaatactgtgagagttcatttaatttccacttaaaattcacaggaagtcatacttgttaccaggaaacactgtacttcttttagagaatatctaatccagataggctaaattatatccattacactckatcatggctagttggtaaaagctgccaaggaataccttagctatttttgatgagtacaacacttcagtggtgtctcatttccatactgacataagggctaaacaggctttcttcagaaaaacaccttacagaaatctctgaagtgtgctatgcctagatcttccttgagaaaaagatattataga

SEQ ID NO: 888928 - DNA, 477 bp, Homo sapiens
tttggtgtcttcacttggtatttatgtgacgtcattaacacttatttttatattttgttagaaaatcttgcacttctgtagtttccaagagctctcttcagttagctgtaaaaagtttgccaattagtaaagataaatgctagagacacacaagcaagactaggaacaatgacaaaagtagcagattcaagcaaatgactgtggcagtttagaacaagtcactgcagacagaagaagccacttaatggaaatgtgaataacaaatacataaatgtaaatggaaataattaggaagctctgtggccaaatgrtgaggtaaccacatggaatggagcagaacctagcaacaaacctatagaaaaagagaggttttttttttttttttcagagactgagacactggattggtgcctgaaactggtacacacagtgggaggaacggatgagagcaagcatggacaaccacatcccttgcca

SEQ ID NO: 888929 - DNA, 552 bp, Homo sapiens
acaatgacattttggttcccctggaatcaacgtcaactcagaaccagtgtccagtagtccccaaaatgtctgataattttcctttccccattgcacagttacattggtaaaaggccagaggtctcctcgggggaaggataggmaaaagattcactgcataaagtgttggtaatgtagtggagtccttcctcaaggtgacctagcctccccttcattcaaagggttctgggtctgtaaactggctcaagtctggaaattgattgaggggcagttttgttcattcaacctggaaattttctatttttataatttaagtaggaatgcagtaggcttcctatcaatttcacttctaggaacagcatgataaattagccaatgccagagctctacacaagtcagactattatgattgtcactttgcctctgctgtccattacggtagctatacccaccttgcctttgactgtttagtgttgtcacatggcccctgccacctcgggatccgattattctcattgtatttaaattttgtagttgagtgactgtgatttc

SEQ ID NO: 888930 - DNA, 552 bp, Homo sapiens
acaatgacattttggttcccctggaatcaacgtcaactcagaaccagtgtccagtagtccccaaaatgtctgataattttcctttccccattgcacagttacattggtaaaaggccagaggtctcctcgggggaaggataggaaaaagattcactgcataaagtgttggtaatgtagtggagtccttcctcaaggtgacctagcctccccttcattcaaagggttctgggtctgtaaactggctcaagtctggaaattgattgaggggcagttttgttcattcaacctggaaattttctatttttataatttaagtaggaatgcagtaggcttcctatcaatttcacttctaggaacagcatgataaattagccaatgccagagctctacacaagtcagrctattatgattgtcactttgcctctgctgtccattacggtagctatacccaccttgcctttgactgtttagtgttgtcacatggcccctgccacctcgggatccgattattctcattgtatttaaattttgtagttgagtgactgtgatttc

SEQ ID NO: 888931 - DNA, 567 bp, Homo sapiens
tttgtaatataagtttagagataattaggagctcactggatatttctgtgactggcagcttgattagagaacaatcctgggatctataaaaatgtgctgactgttacgcacatctccccatcttctctctgtgaccacaacttttaaataaattaaaaatctcaaccactgaaacagaaatccataagaagaccactttgactaaattactaatgcttcagagtgaggattatcctctgggtccctaattccaaagcatctggtgctccagctagaggaaatsatccgttactcccaccaggtattaattaccaagcatcgtcttcagcagaatgtatgttttctgtctctccatttcccttggttttatagccagctccttttaattcacctttctttttttaatagaaaaggaaagtcacttttaaaattattgttctaaaggcttctatctcagggtttttgttttgctttttaatcttgtttttcatcttttacaaagcaattgggattatgttttgtaccaacttgacaagaatgacatgagtcttgctttaattgcagtaa

SEQ ID NO: 888932 - DNA, 567 bp, Homo sapiens
tttgtaatataagtttagagataattaggagctcactggatatttctgtgactggcagcttgattagagaacaatcctgggatctataaaaatgtgctgactgttacgcacatctccccatcttctctctgtgaccacaacttttaaataaattaaaaatctcaaccactgaaacagaaatccataagaagaccactttgactaaattactaatgcttcagagtgaggattatcctctgggtccctaattccaaagcatctggtgctccagctagaggaaatcatccgttactcccaccaggtattaattaccaagcatcgtcttcagcagaatgyatgttttctgtctctccatttcccttggttttatagccagctccttttaattcacctttctttttttaatagaaaaggaaagtcacttttaaaattattgttctaaaggcttctatctcagggtttttgttttgctttttaatcttgtttttcatcttttacaaagcaattgggattatgttttgtaccaacttgacaagaatgacatgagtcttgctttaattgcagtaa

SEQ ID NO: 888933 - DNA, 580 bp, Homo sapiens
aaaatgccaccagtctctttgcatagcaagagtaacctttactccagtttccaacatctgagggaagtccatctgagactacctcagcctggactttattgtccatatcactatcagcattttggtcaaagccattcaaaaagtgtcaggaagttccaaacttttctacatcttcctgtcttctgagccctccaagtctctaggaatttccaamctttcccacattttcctgtcttcttctgagtcctctaaactgttccaacttctgccggttacccagttccaaagttgcttccacattttcaggtatctttacagcagcaccccactcttgatatcattttactgtattacttcattctcatgctgctaataaagacataccacagactgggtaatttataaaggaaagaggtttaattgaatcacagttcatcatggctggggtgggggcctcaggaaacttaacaattataacagaaggggaagcaaacatatcgttcttcacataacagcatcaagggaaaggtatgagcaagaggaggaaaagctccttttaaaaccatcagatcttgtgaaa

SEQ ID NO: 888934 - DNA, 580 bp, Homo sapiens
aaaatgccaccagtctctttgcatagcaagagtaacctttactccagtttccaacatctgagggaagtccatctgagactacctcagcctggactttattgtccatatcactatcagcattttggtcaaagccattcaaaaagtgtcaggaagttccaaacttttctacatcttcctgtcttctgagccctccaagtctctaggaatttccaacctttcccacattttcctrtcttcttctgagtcctctaaactgttccaacttctgccggttacccagttccaaagttgcttccacattttcaggtatctttacagcagcaccccactcttgatatcattttactgtattacttcattctcatgctgctaataaagacataccacagactgggtaatttataaaggaaagaggtttaattgaatcacagttcatcatggctggggtgggggcctcaggaaacttaacaattataacagaaggggaagcaaacatatcgttcttcacataacagcatcaagggaaaggtatgagcaagaggaggaaaagctccttttaaaaccatcagatcttgtgaaa

SEQ ID NO: 888935 - DNA, 580 bp, Homo sapiens
aaaatgccaccagtctctttgcatagcaagagtaacctttactccagtttccaacatctgagggaagtccatctgagactacctcagcctggactttattgtccatatcactatcagcattttggtcaaagccattcaaaaagtgtcaggaagttccaaacttttctacatcttcctgtcttctgagccctccaagtctctaggaatttccaacctttcccacattttcctgtcttcttctgagtcctctaaactgttccaacttctgccggttacccagttccaaagttgcttccacattttcaggtatctttacagcagcaccccactcttgatatcattttactgtattacttcattctcatgctgmtaataaagacataccacagactgggtaatttataaaggaaagaggtttaattgaatcacagttcatcatggctggggtgggggcctcaggaaacttaacaattataacagaaggggaagcaaacatatcgttcttcacataacagcatcaagggaaaggtatgagcaagaggaggaaaagctccttttaaaaccatcagatcttgtgaaa

SEQ ID NO: 888936 - DNA, 603 bp, Homo sapiens
acacaccaagactctcagggtttctgactcctgtttctgtatttttaatagcataccagcctctttagggatacaatacacagacacatgaaaggggcttaagtacacatagaaaccaacacaatacacctgaaggttttacaaactgatagtgcactctccctcggtaaggaccaatttgaaaggaaaaacagaaactccaaggtggagtctgrcagaaggaagatctggcttggaggtaaataagaggatattctaggtcatgagaatgttcccacaaagacactagagggaaggattagcaagcgaatttgtttcgctggaaagagaatgtattggaaagtataatacaataagattttgtattcatcccctggggtctaatcttgaagatgttacaacattcaaacaacccacttagctgaagctagctgaagaatagaaacagaactgtaataatggtggcaaacagatgtttactagcacaatgaaatatctttatctgtttgcacatgcaaggtagaacagccaatacctactaggtggttgggcacaaaaaggaaacgaacctcattacattattacatttattatcatttttta

SEQ ID NO: 888937 - DNA, 603 bp, Homo sapiens
cttgtccttaaaagttaattgggagcatcaggggaggagtgagtgctgggaacagctatttccatttcccagaacagtagttgaatcctctcatctttccagggtaattttaggaaaacctcagtcatttactctactttcattgcctagattttaggttttcagtactttgaaatgacagcttttcaaaaagatactacctaaagagaaatgagatgtagatttaaacaaaagatgaatattgaagtaatccatttaagataatagctgaaaatatttattccgttattatgtctttcactggattttatttcatctgaaaatgttagatagaggagactctggatttggaaaytggaccccagagtggtgaaaggacttcccaagaggtggccttgggaccaggctaagaactcagttctcctgaccacccctctctatgccacattgtcctgctagatctaaacatgaggaatgttcacatggatgatgtcaccaattgacaccatccaacatggcttaatagaaaaaccatggacttgtagccagggaaattcaaacttaagtctttatctcacaaggttgcatgaactaattgaggta

SEQ ID NO: 888938 - DNA, 705 bp, Homo sapiens
cgattgtattatcttctattatggtaggtaaaaatcatgctgtcttaacattcccacatcatttttctcccatcctttcaacagttatataacccaattttttgataattcactgtttacactatttaacaatgtaaatattgttcattgatgagcagctgtaatttcrtttatttttttggtcaactttttttcccacgagttaattgccttacattttaattttctttgtttctttgtgtgtgtatatctctagctgattcttttctaattcactgacagatctatgaaatctttcaaaacacggtcaacatataagataatatatcagttccattttgttcattttaaatcagagatctcccttttggctttgtcttttctaatcaggactggttgttccgttgcattttatacatttgtcatcctgggaccttgcttcactgctgccccaggagttcatttacatctttcttgtgttgagttccctgtttctagatcctatgttgttttcttccttggcttatttccttgttttactaggacatatccttctgtagctttctgagtaaggatccaaggaacccttggaataatttttaaattccattcatgtctaaaaatatccctattctgccctctaacttaattgatattttggctgggtatagactcagatataaatcattctgaaaacactatttc

SEQ ID NO: 888939 - DNA, 606 bp, Homo sapiens
ttaaaacatggactattggcttagaagttttttatgttgaagggttctttctttccattctagtttattctattttagttaggcgtagagaattatgtagttaaggagaatgaggatgtttgcaatgttcatcaatgactgtctcacacaggctttgggattaagggaaataaaaggaactttgaagcaactcagccttttagcaacaaaactgccctcaattaccagggaaaattagccctgaatccaascactagttttaaaactcttgaagctgcaaacctgtttggataagcaatgcataatcgaacttttcttattccttaaaaaatatataaatgtatagggacaaacatgaatttgagcccaaaccatgatccaaaccatggacgttgaacttgtaaagttctggagaaaatgaggcaactgtttgggaaccactcaagaggaagaatttaccaggatggctttgaagagtcattgttgggagaatttcccagtgtggtcaattgggaggaacctccatagacttctgctgacactccatcctcctggcagaactagggaagaacaggcttgccatttacactcatgacccagttcaat

SEQ ID NO: 888940 - DNA, 632 bp, Homo sapiens
tctgggaatgaatgatcacacttcaggtcataagagataagatacacctctgtttactgtccaaactgaaagaaattatgcaccactcccttcaataaatacatctgctaagataaatgtaggcatgtgcttttaaacctatacatatgcaggacacatatgtaggtatatgaaaaataaaacaagctgggtgcagtggctcacgcctgtaatcccagcactttgggaggcagaagtgggcagataacctgaggtcaggagttcgaggctagcctggccaacatggcgaaacactgtctctactaaaaacacaaaaattagccagtcgtgatggtgggtgcctgtaatcccagctacttgggaggctgaggcataagaatcgcttgaacctgggaggcggaggctgcagtgagccgaaatcgcaccactgtactccagcctgggcgatagagcaagactccatcaaaaaaaaaaaaaaaagggggggrgaaaaaaagaaaggaaagggaagggggatggggaaaggggaaaggaaaaggaaaagaagaaaaggaaaattatctgctaaaataaaggcaggtatagtttggtgctgtgctgatatgtacaagatacaggtataatcaagctgt

SEQ ID NO: 888941 - DNA, 632 bp, Homo sapiens
tctgggaatgaatgatcacacttcaggtcataagagataagatacacctctgtttactgtccaaactgaaagaaattatgcaccactcccttcaataaatacatctgctaagataaatgtaggcatgtgcttttaaacctatacatatgcaggacacatatgtaggtatatgaaaaataaaacaagctgggtgcagtggctcacgcctgtaatcccagcactttgggaggcagaagtgggcagataacctgaggtcaggagttcgaggctagcctggccaacatggcgaaacactgtctctactaaaaacacaaaaattagccagtcgtgatggtgggtgcctgtaatcccagctacttgggaggctgaggcataagaatcgcttgaacctgggaggcggaggctgcagtgagccgaaatcgcaccactgtactccagcctgggcgatagagcaagactccatcaaaaaaaaaaaaaaaaggggggggraaaaaaagaaaggaaagggaagggggatggggaaaggggaaaggaaaaggaaaagaagaaaaggaaaattatctgctaaaataaaggcaggtatagtttggtgctgtgctgatatgtacaagatacaggtataatcaagctgt

SEQ ID NO: 888942 - DNA, 636 bp, Homo sapiens
aattatatcatatctgctaaactatatactataattctcccatttgttgtcccatttttcaagttaaaaattgagatggtcagggacacataaacataaaggtaaccctctgtgcttttcaaattattatgaagttttatcacatattttggaaaactrgaacctaaaacatctccagctgcacgaacctcaagactttaatagcagtccatgcaactatttacttgtgatgaacttaagtgaatagtgaagtcttagcccatccagacacaatgtaaatcatgagactttgatcactttaattattcatattccatagctagaaatggaattctggccaatgggagaatgggaaagagtaattagcaaatagatgcctcgtttatattatgtaccatgattgctaaaagtgcttgctttttaaggaataagcttttcacttctatatgaggaaatgaatgtgtgttggcatttttataagcaaaatgatttcttaaatcttaacactcagatgaggaaaccaattccaaaaatgattttatgagttaaaacataaaaccaaagaaaggagctttacatgaaaaatggaaggaggtgggagagaggcaatgagggggtggggggagaagagggggt

SEQ ID NO: 888943 - DNA, 568 bp, Homo sapiens
aaatgaaggatcttgaggtggggagattatgctagattatctgggtggcccaattcaatatgagagtcttataagaactgccttgtaagagagaagtaagagaatctgagtcaaagacatgtggacaatggaagcaaagggtaaaagagagagagagggagactggaggatgctacatcactgtttttgaatatggaaccacaccaagaatactggtggcttcttgaagctagaacatgaaaatatatgagttcttccatagagccttcaaagaaatgtagccctgctgacctacttgaagacttttgacctccagaattctgagagaacaratctgtgctctttttttgagccactgaattggtggccatttgttacagcagcaatatgaaactgttaaacatacatgacacatacaaatgtttcccctttgcagcaacatgatgcagctggaggccattatcctaagtaaattaacatagcaacagaaaactaaatactgcatgttctcacttataagtaggagataaacactgggtcaacacggacattaacatggcaacaatag

SEQ ID NO: 888944 - DNA, 613 bp, Homo sapiens
tcagcacagtgggaacatgtaaacaaacttacctgaaaactcaggaataacaaaagaaaatacatccagaaagaatttagcacaccaatattctgttctacaggcatggctcattcatctgcagtgtggggctcccaaagtgctcaaaaagaacggtttgtggtcccactgttacacatgaggggtctcctttgggcagaaaatgaccctcaaaacacaaattccttttttaattctcaggggtaaacaatgtgtcatttaataaactttcatttatatatgtgatcaagaactatttacaaataacctattgagttattaaatattagatcaaccaacttgggttgttcatttggtattgaataaaattaattataagtttatattcatcaaataagtgactaaatagttggattccctcaagggatttattctacaaataagtctgtgggccatatatttggcagcrttgcaaagctccagctgataattacaatactattattgtaataataataattattaaataattacaatactattattaaatgtacataaatgtacacagaagagaaagggggctttggcttgcctacgaatatagcagtgcaaa

SEQ ID NO: 888945 - DNA, 608 bp, Homo sapiens
taaaaaatgataataaatgtaataatgtaatgaggttcgtttcctttttgtgcccaaccacctagtaggtattggctgttctaccttgcatgtgcaaacagataaagatatttcattgtgctagtaaacatctgtttgccaccattattacagttctgtttctattcttcagctagcttcagctaagtgggttgtttgaatgttgtaacatcttcaagattagaccccaggggatgaatacaaaatcttattgtattatactttccaatacattctctttccagcgaaacaaattcgcttgctaatccttccctctagtgtctttgtgggaacattctcatgacctagaatatcctcttatttacctccaagccagatcttccttctgycagactccaccttggagtttctgtttttcctttcaaattggtccttaccgagggagagtgcactatcagtttgtaaaaccttcaggtgtattgtgttggtttctatgtgtacttaagcccctttcatgtgtctgtgtattgtatccctaaagaggctggtatgctattaaaaatacagaaacaggagtcagaaaccctgagagtcttggtgtgtgaact

SEQ ID NO: 888946 - DNA, 552 bp, Homo sapiens
gatgcacccttgttatgctcaccagtctcccaggctatcaccactgttcttgggaaagctcacactattggtgggcccaacttgttcttgtactctgtttgttgttgttgttgttgttgttgctgttgttttgagacggagtttcgctcttgttgcccaggctggagtgcaatggcatggtcttgggtcactgcaacctccacctcctgggttcgagtgattctcccgcctcagcctctcgagtagctgggattacaggcacacgccaccacgcccaggtaattttgaaattttagtagagatggggtttctccatgttggtcaggttggtcttgaactcccaacttcaggtgatctgccctccctggcctcccaaagtgctgggattacaggcatragccaccgcaccagcctcttgtactctctccaaggggtggcaagtttttcttactcacctgcctattgggaaccaacttaatatttttattgtggtaaaatagacataacataaagttgaccattttaaccatttttgagagtacaattcagtgg

SEQ ID NO: 888947 - DNA, 533 bp, Homo sapiens
ttcatttctccatttttcaccaaatgatagcatctctttagtcttaccacatttatttagcacaaaaaacggtagtaggaacttttgcccataaaactctcaatgcggaaagctaagcagaaaaatatagggccaggtgtgatggctcatgcctgtaaacccagcacattggggggctgaagcgggcagatcacttgaggtcaggagttcgagaccagcctggccaacatggtgaaaccctgtctctactaaaaatacaaaaattagcagggcayggtggcatgagcctgtaatcccagctactcaggaggctgaggcatgagaatcgcttgagcccaggaggcagaggttgcagcgagccaagattgggccactgcactccagcccaggtgacaagagtgagactctgtctcaaaaaaaataataataatgataataaataaaataaataaataaaataaaaaagagaaatacagtcctgggatcaaatcttaatgtcactagacattttcctgaagacttagtgctctaga

SEQ ID NO: 888948 - DNA, 576 bp, Homo sapiens
taggcacctaattgacctcacctagtcctggccctccccatgtgtgatagagtctgattttttactaaacatgtgtaaacagagaagataatagagaaacaacaaaatgtgtcctagtgaactttgatttttatcccccataaatttaggaacatgcttttttttcatcttttcattgagtactgtactaatcagaacagaaatagagaaaagaatgcactttcttctcgggaatgcaggtgccttgagaaagggaaaatctatgattgccatatttttattagmggttatttgagtccacagtaataaaaaagttatgaaattgcacagtaaattttgaaaacctttagaatataattgttttctctacttgctactgttagacttcatattcaatacaattcagtgcagttcagttcaattattaccactttgcttctcaaatatgcaaaggtcatttagttatctgggaaacttttcctaggtttgaagagttaatattcaaagactagctgagaggtggcaagctgtaggcatcattcacacattcagaaaccgtaccttgaacctccacct

SEQ ID NO: 888949 - DNA, 586 bp, Homo sapiens
atcctccggaaaaataacaacataagaagcccctgcttcctcagctttctggctatgtctgatatatgggaactggaaacttagaattttttcctataaactacctcctgtgtgatgttccccaaagggacagtgcctgatacggggttattcgatatggggattttatgaattaatgtgatgagcttgctggcaaaatgaattctgtccttttctaatttcctgaagctgrgtgtcaactaaagcactttcactgtgaggtttaattctggaattactttcctcaaaatgtcacacacacacacacacacacacacacacacacacacaaagatgggaagtgagctaaaaacagtatctctcgttctttattttactgtctctcttctatttcaaaggagttactcttggcagtggggttttaagaaattccacgtaggactgcacactattccacatcttgttcttaaatccacaacactgccatgactccttattgttaaacagcgaacgtgttcaaatgccagctgttgactataaggggtcttctttgtaaccgagagggctgattgcattaattccacgg

SEQ ID NO: 888950 - DNA, 626 bp, Homo sapiens
ggcttgtgccagttttcaaggggaatgcttccagcttttgcccattcagttgatgttggctgtggatttgtcatacctggctcttcttattttgaagtatattccttcaatgccagcttactgagggtttttttttttaacataagctatgttgacttttattgaaagcattttctgtatctattgagataatcatgtgttttttgtccttaatactgtttatatgatgaatcacatttattgatttgtatatgttgaactaaccttgcatcccagagaaaaagctttattgatcatggtgaattagctttttgatgtgctgctggatttgttttgctagtattttgttgatggtttttgtatcagtgttcatcaaggatattggccttaattttcctcttttgttatgtctctgccaggttttgatatcaggatgatgtcagcytcatacaatgagttagggaggagccattccccctcaatttttggaaaagtttcagtaggaatggtaccagctcttctttgtacatctggtagaatttggctgtgaatccatctggtcctaggcttttttttttattggtaggctatttattactgattcaattttgaagctcattataggt

SEQ ID NO: 888951 - DNA, 601 bp, Homo sapiens
ggataaacactaagtgcaatgttcaacagcagtggtgtaagtgggcatacatatcttgctccagtcgtgagaaaaaagaccttcagaattaggctaggaggcacaatggctgactacatgcagcaagcaggaatatatgccactgaggtaccaggacattggaaaggctggcacactccaagcagagctttggagggaagacatggagagtggacaaagggaagacaaaaatagtggctgaagttggaggaagatggaaattcagcatggggtaccacacactgggactcatttctggccaccagtgacttctggggaaggagtaagttgagcagttaagaagcaacccactctcaccacaaacctttsgaatcctggcagcaggaaaacccatgaccctcacagacaattgagttgtgtgggagagctgcttagagaggtggtagaagcagaactccagccagtctgaagcccagagggtttggtgtgggagtatctgtagtggagcacaaccagagattcccatcctacaaggctttaattagcacccacacccaactgtgccacaccacaatggctacaactgtgaaatcctgaatat

SEQ ID NO: 888952 - DNA, 573 bp, Homo sapiens
acaaagaatgaaatcctgtaatttatggcaacatggatcagcccaggggacattatattaagtgaaataagtcaggcacaggaagataagtatcatacgttctcactcatatgcggaagctaaaaaaaaaaaaattcatggcgctggagagtagaatagaggttattaggaggcagagcaagatgggataatagaaggctccagattttggcccccaccytatgcaaggacaccaagttaagaactatctacacagaaaaaagcaaacaaacacttcataagaacccaaaattagctgagcagtcatagtacctggatttaatttcatatcacagaaagagacactgaagagatagaaaaaacagttctcaatcccagacaccactcccccatggccccctgccccaccatccgcagcagtggcctggtgcggagagcatctctgggtattgggagacaacaaacactgcaattgtgaggcatttaagtcagtgctggcctgttagagcagaaaggaaaatttgaccaaattcagctgatgcttgctcatggagggagcatctgaaccagctc

SEQ ID NO: 888953 - DNA, 572 bp, Homo sapiens
ctctattatttgtgggcatttaggctggttccaagtctttgctattgtaaatagtgctgcaataatcatacatgggcatgtgtctttatagtagaatgatttataatcctttgggtatatattcagtaatgggatcgctaggtcaaatggtaattctggttctagatacttgaggaatcaccaaactgtcttccacaatggttgaactaatttacactcccaccaagagtgtgaaagtatttctatttctccatatcctcaycagcaactgttgtttcctgactttttaataattgccattctaactgatgtgagatggtatctcgttgtggttttgatttacatttctccaatgaccaatgatgatgagttttttttcatatgtttgctaaccgcataaatgtcttcctttgagatgcatctgttcatatacttcgcccactttttgatggggttgtttgtttttttcttgtaaatttgtttaagtttcttgtagagtctggatattagatctttgtcagatgaggagcttgcaaaaattttctcccattctgtaggttgcctgttcactg

SEQ ID NO: 888954 - DNA, 612 bp, Homo sapiens
gggtaaatgtaaacgtgtaccatggtggtttgctgctcaaatcatcccatcacctagatattaagcccagaatccattagctattcttcctgatactgttactccccccactgacccccagcaggacccagtgtttgttgttgcccttccatgtgtccatrtgttcttatcattcagctcccatttataagtgagaatattcagtgtctgattttctgttcctgcattagtttgctaaggataatggcatccaactctatccatgttcctgcaaaaaatatactcttgttccttttcatggacgcatggtattccatcttgtatatgtaccacattttgtatccagtctatcattcatggtcatttgggttgattccatgtctttgctattggaaatagtgttgcaataaacatatgcatgcatgtgttttatagtagaataatttatattcttttgggtatatatccagtaatgggattgctgggtccaatggtatttctgcctctaggtctttgagaaatcaccacactgtctaccacaatgtttgaactaatttacagtcccacagtgtaaaagctttcctttttctctgcaacctcaccaatgtctat

SEQ ID NO: 888955 - DNA, 612 bp, Homo sapiens
gggtaaatgtaaacgtgtaccatggtggtttgctgctcaaatcatcccatcacctagatattaagcccagaatccattagctattcttcctgatactgttactccccccactgacccccagcaggacccagtgtttgttgttgcccttccatgtgtccatgtgttcttatcattcagctcccatttataagtgagaatattcagtgtctgattttctgttcctgcattagtttgctaaggataatggcatccaactctatccatgttcctgcaaaaaatatactcttgttccttttcatggaygcatggtattccatcttgtatatgtaccacattttgtatccagtctatcattcatggtcatttgggttgattccatgtctttgctattggaaatagtgttgcaataaacatatgcatgcatgtgttttatagtagaataatttatattcttttgggtatatatccagtaatgggattgctgggtccaatggtatttctgcctctaggtctttgagaaatcaccacactgtctaccacaatgtttgaactaatttacagtcccacagtgtaaaagctttcctttttctctgcaacctcaccaatgtctat

SEQ ID NO: 888956 - DNA, 618 bp, Homo sapiens
tcaagtggaagaaacaatatcagagattgataaaagaaggtggaagacaagatcaacttaataaaagaaggttgaagacaagcctccaagaaatatgggactatgttaaatgaccaaacctatgaccgattggtgtacctgaaagtcatggggagaatggaacaaagttggaaaacacacttcaagttattatccaggagaacttcccccaaccaagcaaaayaggccaacattcaaattcaggaaatacagagaacaccactaagatactcctcgagaagagcaaccccaagacatataatcgacagattctccaaggttgaaaaaaaggaaaaaatgttaagggcagccagagagaaaggtcaggttacctacaaagggaagcccatcagactaacagcgatctctctgcagaaactagaagagagtgggagccaatattcaacattcttaaagaaaaaaatttataatccagaatttcatatccagccaaactaagcttcagaagcataggataaataaaatcctttccagacaagcaaatgctgagggattttgtcaccaccaggcctggcttacaagagcttctgaaagaagcactaaatatggaaagaaaaa

SEQ ID NO: 888957 - DNA, 620 bp, Homo sapiens
tgggtagccagttttcccagcacgatttattaaatagggaatcctttccccattgcttgtttttgttgggtttgtcaaagatcagatggttgtagatgtgttgtgttatttctgaggcctctgttctgttccattggtctatacctctgttttggtagcaataccatgctgttttggttactgtagccttgtagtatagtttgaagtcaggtagtgtgatgcctccagctttgttccttttgcttaggattgtcttgacaatgtgggctctttttttggttccatatgarctttaaagtagttttttcaagttctgtgaagaaagtcattggtagcttgatggggatggcattgaatctataaattactttgggcagtatggccattttcatgatattgattcttcctatctatgagcatggaatgttctcccatttgtttctatcctcttttatttagttgagcagtggcttacagttctccttgaggaggtccttcacgtcccttgtaagttggattcctaggtattttattctctttgtagcaattgtgaatgggagttcactcatgatttggctctctgtttttctgataatggtgtataggaatgcttgtgattt

SEQ ID NO: 888958 - DNA, 590 bp, Homo sapiens
gcaaagtttccagatacaagattaatgtacacaaatcagtagcccttctatacaccaaaagtgaccaagcggagagtcaaatcaagaactcaaccccttcacaatagctgcaaaaataacaaaatacttaggaatatacctaaccgaggaggcaaaagacctctacaaggaaaactacaaaacactgctgaaagaaattatagatgaaacaaacaaatggaaacacatcccatgctcatggatggatagaatcaatattgtgaaaatgaccatactgccaaaagcaacctacraattcaacggaatccccatcataatatcactatcattcttcacagaattagaaaaaacaattctaaaattcatatggaaccaaaaaagagcccgcatagccaaagcaagactaagcaaaaagaacaaatctggaagcataacactaccttatttcaaactatactataaggctatagtcaacaaaaaagcatgctactggtataaaaataagcacatagaccaatggaacagaatagagaacccagaaataaacccaaatacttacagccaactgatctttgacaaaacaaacaaaa

SEQ ID NO: 888959 - DNA, 631 bp, Homo sapiens
tgaatggaggtgccaaattaataaggaataactgtctatatgcagaaaactttgatccatgcctggtaccttaggcaaatctggcttgaaatggataatatacctaaatataagaactgaaaacataaaacttcaagaaaaacgtaggagaaaaacttgtaacttcgattaaaatccattagataggcaagaataaaagaaaaatatgggccaggcgtggtggctcacatctgcaatcccagcactttgggaagctgaggcaggcagatcctgaggtcaggagttcaagaccggcctgaccaacatggtgaaaccctgtctctaataaaaatacaaaaattagccaggtgtggtggctgacgcctgtaatcccagctactcaggaggctgaggcaggagaatcacttgagcccgggagacggaagttgcagtgagccgagatcgcaccattgcactccagcmtgggtgacaaggtgagactccctatcaaaaaaaaaaaaaaaaagaaaaaaagaaaagaaagaaaaatatgaataaattagactgtatcaaaattaaagacttttccacaacagacaggattaaggaaatgaagaagcaaacatcggccaggagaaaatatttacaaaac

SEQ ID NO: 888960 - DNA, 592 bp, Homo sapiens
gtcccagctacaagccctcctgcctcagacttgcttctctaaagttagaactctggtatgccgtccaggctaggccctggagccaggcaggaagcagtcaggaaactaggagcctgcagcctgggacaaaactcaggagtatcacatgtctttgatagtgtgaggtccactgctcccagatactgccattctgtgtgacactggcagtgccatgtggatagcccaggtaaggagaacatggaccagtaagtccatgttcaaaagtctaagcttttgaaaagttgctgctgctactacagatcactaaagaccmaactgtctaggttctgattaaccaaaaaatctggagaaagaactaaaatgccatctggatgtacaattacttgcaagttcctggaagccaagaagaatcacattcttcctgtggaatggtggctggagtactgcacaagtagaatgggatcatgtaacttcccagtgggtccttcctacccattgcacagacacaatcaattagctgggaccacagcattgcagtaaagaaagagtttaattgacatgaagctggccacaccacgtaggagatggagtt

SEQ ID NO: 888961 - DNA, 591 bp, Homo sapiens
aagaggatgaaaatggctggccagaaggtttgactgagaaattcacactttttggcttccctttggctctcctgctttctttatccacattagggggatgtgtatctccacatgttctgctagaggcagtaaactacactgccctggtggaaacatccattcttaactacagtggaaagatagaggaagtcaaactatttgtgtgtgttggagggggttgttagagtgatccagttcaatgtttgtttctaagagataacttagggaaatagatgaaactaggagaaacyattgtgcttgggaaagaatgttacataactcagagtagaaagggcggtatagttaagatggctggggatgccaggagaagagcgtagccatgtagacatataacgtgctgtagtagctaagaagcacatctcaagctggtttctttgattgtaaaaaatttggttttagaggtgctagaaaagaagtgactctgttgaatttagtttgttggatcacatcaattaagagaagccaaaattaactcttgaaagggagttccctggccattgatggagaattccagataccccaaatcagatt

SEQ ID NO: 888962 - DNA, 591 bp, Homo sapiens
aagaggatgaaaatggctggccagaaggtttgactgagaaattcacactttttggcttccctttggctctcctgctttctttatccacattagggggatgtgtatctccacatgttctgctagaggcagtaaactacactgccctggtggaaacatccattcttaactacagtggaaagatagaggaagtcaaactatttgtgtgtgttggagggggttgttagagtgatccagttcaatgtttgtttctaagagataacttagggaaatagatgaaactaggagaaactattgtgcttgggaaagaatgttacataactcagagtagaaagggcggtatagttaagatggctggggatgccaggagaagagcgtagccatgtagacatataacgtgctgtagyagctaagaagcacatctcaagctggtttctttgattgtaaaaaatttggttttagaggtgctagaaaagaagtgactctgttgaatttagtttgttggatcacatcaattaagagaagccaaaattaactcttgaaagggagttccctggccattgatggagaattccagataccccaaatcagatt

SEQ ID NO: 888963 - DNA, 566 bp, Homo sapiens
tttttaactctttctcaggaaaggttgccccttttcctgatacataaattcaggtgtcaaatacattaatcaacgttgctttaggtcattaacaaccttcctgtctgaatcaagaagcaggaagtttgggtttttattggataggctactacttttcttttttttttttttttttttttgagacggagtctcgctctgtcgcccaggctggagtgcagtggaaccgtctcggctcactgcaagctccgcctcccgggttcaagccattctcctgcctcagcctccgagtagctgggactataggcgcccaccaccmcgcccgactaattttttgtatttttagtagagactgggtttcactatgttaggcaggatggtctcgatttcctgacctcgtgatccacctgcctcggtctcccaaagtgctgagattacaggcgtgagccaccgcgcccggcctaggctactacattttatttttattcattcattcaagaaacatttactaagaacttactccctgataagtactgtgtggtatgcagggataagttgatggctcatgt

SEQ ID NO: 888964 - DNA, 680 bp, Homo sapiens
gttggaggctgcagtaagccatgatggcgccaccacattcctgcctggatagcagagcaagactctacctcaaaaataaaaaaggaagaggtgatctgacccatttgaccatttgcaggtcataagacccccattccagagacagccccatacccagaaggaaggactgatgcgcagagaggccaagaagaatccagacacacaggctgtgctggccctccccactcaatcagcataaggtcaggacctttttgtccaatcacatttctgcacagctgtccatactctgctgcacctgagcataaaaatggacaatttcggctgggcgcggcagctcacaccygtaatctcagcactttggggtcacctgaggtcaggggttcgagaccaggctagccaacatgatgaaaccccatctctactaaaaaaaatacaaaaattagccgggtgtggcggcacgcaccagtaatcccagctgctccgggggctgaggtatgagagaatcgcttgaacccgggaggtggaggttgcaggttgcagtgaaccgagattgcaccacttcactccagcctgggcaacaagagcgaagctcagtcttggaaaaaaaaaaaaaagaaaaaaaaaatggacaatttcccctgtatctttgggtcttcattccaagggctcctgtgtcatgt

SEQ ID NO: 888965 - DNA, 614 bp, Homo sapiens
atatggggttaacaaggaataatacaaactgtcattcattgagcatctcatttgtactgggcatcttacaagtgtccttacatatacagatgctcaaagacaggttatttaatgggccaaaaccattctactcatcaatgataacactatgattcacgtccagcaggggtgtgtgtgtgtgtgtgtgtgtgtgtgtgtgtgtgtgtgtgtgtaattccaaagctggtgcttttaacctctaccttgcaatgacttaaggtccctgggtatgaaggagaaaacrggatgagttatctgtgttaccgcatgtcattagaggtgaggacataggtgagctttctactcattttacaatctagaaaacaagaccagagggaacctgtgtcctgtcagtgaaccataacagaacttgaatccaggtctctcacctcctcctccctgcctaccccatctccatgggttggactgattgattacctgagagatcagttgggcacaacacagtattccacacttctaggggcttggaagagggcatacataaacaccaaccagtgccctgccagtagggcagatggcatgggaatttgtcctactgttaaggaacagctagt

SEQ ID NO: 888966 - DNA, 554 bp, Homo sapiens
ctcaagtaatattctcttctgtctctatagaaacagtctttctgtctctaacacatcatcagaggagaatacttgttacttctctcttcaaaattattgttctcttgagcccatccccctatacttattgataacttcttctgctatcctttaaaacaaaatggaaaatcgggtcactcccaccctaatactgcgcttttccaacgggcttaaaaatcggcacaccagaagattatatcccgcacatggctcagagggtcctatgcccagagtctcgctcattgctagcayggcagtcccagatcaaactgcaaggcagcagcgaggctgggggaggggtgactgccattgccgagttagttgtttgattaggcaaacaaagctgcccggaagctcgaactgggtggagcccaccatagctcaaggaggcctgcctgcctctgtaggctccacctctgggggcagggcacagacaaacaaaaagacagcagtaacctctgcagacttaaatgtccctctctgacagctttgaagagagtagtggttcttccagc

SEQ ID NO: 888967 - DNA, 659 bp, Homo sapiens
aatggcaaagacaacattaagaaaatgaaaaggcaagccaccaacagaaagaaaatattcacaatatgcacatgtaacaaaggacaggtatcccaaatgcataaagagttctgataactcaatcataagaagaaaataacgcaacaaaaatgggtaacggatgttagtagaaatgtcacaagatatgcaaatgattgataagcagataaaaagatgcccaacatcattagtcattagaaaaatgcaaatgagcaccagaaagagattccactgcgcatccaggagaatgatgaaagtgaaaaagccaagtgttggtgargatgtatttagagttttgaatattgacctttattaaatttatcctcaattaacactcaaagtgttctggacactttggacaccaaaagtcttttcttaattaaacaatttgttgcagtaaatagaaagagaggatgtaagaaattttacataatacattatgatactgctatctgttaaatataagtttatgacatttgagcttggtaactatgttgcccagtgtttacttgaaaaaatatggatatccacgacttaggatggttcaacttacaatttgtcaatcgtgcaacagtgatacacattcaatagaaactgtactttgagtatccacacggcca

SEQ ID NO: 888968 - DNA, 659 bp, Homo sapiens
aatggcaaagacaacattaagaaaatgaaaaggcaagccaccaacagaaagaaaatattcacaatatgcacatgtaacaaaggacaggtatcccaaatgcataaagagttctgataactcaatcataagaagaaaataacgcaacaaaaatgggtaacggatgttagtagaaatgtcacaagatatgcaaatgattgataagcagataaaaagatgcccaacatcattagtcattagaaaaatgcaaatgagcaccagaaagagattccactgcgcatccaggagaatgatgaaagtgaaaaagccaagtgttggtgaggatgtatttagagttttgaatattgacctttattaaatttatcctcaattaacactcaaagtgttctggacactttggacaccaaaagtcttttcttaattaaacaatttgttgcagtaaatasaaagagaggatgtaagaaattttacataatacattatgatactgctatctgttaaatataagtttatgacatttgagcttggtaactatgttgcccagtgtttacttgaaaaaatatggatatccacgacttaggatggttcaacttacaatttgtcaatcgtgcaacagtgatacacattcaatagaaactgtactttgagtatccacacggcca

SEQ ID NO: 888969 - DNA, 658 bp, Homo sapiens
aaaaaagacacaatgtaccagaatttctgggacacagctaaagcggtgtttagagggaaatttgtagcactaaatgcccacaggagaaagtgggaaaggtctaaaatcaacaccctaacatcacaattaaaagaactagagaagcaagagcaaacacattcaaaagctagcagaagacaagaaataacgtagaactgaaggagatagagacatgaaaaacccttcaaaaaaatcaatgaatccaagagctggttttttgaaaagatgaacaaaatagattgacttctagccagamtaataaagaagaaaagagagaagactcaaatagacacaataaaaaatgataaaggggatatcatcactgatcccacagaaatacaaattaccttcagagaatactataaacacctctatgcaaataaactagaaaatctagaagaaatggataaattcctggacacatacaccctcccaagactaaaccaagaagaagtcaaatccctgaatagaccaataacaagctctgaaattgaggcaataattaatagcctaccaaccaaaaaaagcccaggaccagacggattcacagtcaaattctaccagaggtacaaagaggagctggtaccaatccttctgaaactattccaaacaatagcaa

SEQ ID NO: 888970 - DNA, 658 bp, Homo sapiens
aaaaaagacacaatgtaccagaatttctgggacacagctaaagcggtgtttagagggaaatttgtagcactaaatgcccacaggagaaagtgggaaaggtctaaaatcaacaccctaacatcacaattaaaagaactagagaagcaagagcaaacacattcaaaagctagcagaagacaagaaataacgtagaactgaaggagatagagacatgaaaaacccttcaaaaaaatcaatgaatccaagagctggttttttgaaaagatgaacaaaatagattgacttctagccagaataataaagaagaaaagagagaagaytcaaatagacacaataaaaaatgataaaggggatatcatcactgatcccacagaaatacaaattaccttcagagaatactataaacacctctatgcaaataaactagaaaatctagaagaaatggataaattcctggacacatacaccctcccaagactaaaccaagaagaagtcaaatccctgaatagaccaataacaagctctgaaattgaggcaataattaatagcctaccaaccaaaaaaagcccaggaccagacggattcacagtcaaattctaccagaggtacaaagaggagctggtaccaatccttctgaaactattccaaacaatagcaa

SEQ ID NO: 888971 - DNA, 674 bp, Homo sapiens
tccaccattgtatgtcatgcattggataacttaaggagtattttattgcttttcttaaaaaatgatctgtgaaaattagtttgagagttgatatgcacaggtacagtgctttcgaggctgtgtgtgccctctccacacagtctcatttttcatatccagcaaaatcaagaatgatgacattgttggcatccacagagcatgttatattcagaaatcccaaatcgctttcttatctgaccttgtacaaagcagaatttggcactgttatggcgcttcttttggactgtcatgtctctaatcactttttcttatttatattttgttgtttttgttgggttctctttttatgtgtattattaaaggtcaatgctccctgggtcctttatctcccaccacttaaaacmtagggaatggaatttctaggatggaacatatcttgatgattttatttggataatgaggatgtgggatgttgagggttaaatgaggaatgcagctcaaagtgctgctgatgtttataactcagacatttttgcctctcgcaaaaggttgaatcctaaggttgaatcctgggatggattggctttgagccaggttctagcaattcatgcacctttcttattcattttcactcttttccctggggttaagctattaaacatggtggcacttat

SEQ ID NO: 888972 - DNA, 644 bp, Homo sapiens
ccaatgacaaacaatcttaaaataaatcaagaaataatcctgtttacaataggtacaaataaaacattttctttataaaacaataggtacaaataaaactatagaaagacagactttgcatgttctgacttatttgttggagctaaaaattaaaacaattgaacttagagtagaagygtcattaccagaggcaggaaaggtatttacgggaagaggaaatgtttaaaaatatagtttgatggactataccacaaggctacagcaaccaaaatagcatggtactggtaccaaaacagatatatagaccaatggagtagaacagaggcctcagaaataatgctgtacatctataaccatctgatctttgataaacctgacaaaaggaatggggaaaggatttcctatttaataaatggtgttgggaaaactggctacccatgtgcagaaaaccgaaactggaccccttccttacaccttatacaaaaattaactcaagatggattaaagacttaagcataagacctaaaactataaaaaccctagaagaaaacctaggcaataccattcaggacataggcatgggctaagacttcatgactaaaacaccaaaagtaatggcaacaaaagtcaaaatcgacaaatgg

SEQ ID NO: 888973 - DNA, 644 bp, Homo sapiens
ccaatgacaaacaatcttaaaataaatcaagaaataatcctgtttacaataggtacaaataaaacattttctttataaaacaataggtacaaataaaactatagaaagacagactttgcatgttctgacttatttgttggagctaaaaattaaaacaattgaacttagagtagaagtgtcattaccagaggcaggaaaggtatttacrggaagaggaaatgtttaaaaatatagtttgatggactataccacaaggctacagcaaccaaaatagcatggtactggtaccaaaacagatatatagaccaatggagtagaacagaggcctcagaaataatgctgtacatctataaccatctgatctttgataaacctgacaaaaggaatggggaaaggatttcctatttaataaatggtgttgggaaaactggctacccatgtgcagaaaaccgaaactggaccccttccttacaccttatacaaaaattaactcaagatggattaaagacttaagcataagacctaaaactataaaaaccctagaagaaaacctaggcaataccattcaggacataggcatgggctaagacttcatgactaaaacaccaaaagtaatggcaacaaaagtcaaaatcgacaaatgg

SEQ ID NO: 888974 - DNA, 601 bp, Homo sapiens
gaagttaaccaagaaaggggaaggcatgggggtcctgctatcaggagactccacacagaaaagaggcaaaaggaagtctctggatgctggtgcagggaagttccaagatggcgtctgcaagcaggccttgagagccgccaatctggactgaactggaggaatcagagctctgggaggaaagtctctagaaaaaatttaaaaatgaaacataagactatatggcaaattgcactaagaagttgtaagaaagttgtggaaagaattagtaatctttacaaataaaactcatcaaatgacaaaacaagctaattattaacttcaggattatcaaaaatttgtacaagaaaagaaattattgtgcagtatttggcagagtaagaacaacattcacataatcatagtaatttaaacatagaatatttsatttaccctttatgggaaagaagcagtgcaaggaagagactggatttcaagttaaattgtctgtcttcaaataaaaaggtaatggccaaacctcactaataaataaaagcagaataagaatactagctacaaatatgaaagcggatgccagagaaacaggtaaaagagttaaatgtga

SEQ ID NO: 888975 - DNA, 600 bp, Homo sapiens
agaactatctcagaaaagtcactaaaaaaacaacaagaacagcaacaaaaaccttgggggagtagggagaatctgatttccagagtttccatataattttaaacatcccgttttcagcaaaaaattatgaaacatgcaaagaagcaagaaagtatggtctatacacaggaaaaataaacaatcaataggaactccctaatgaagcccagaagatgttggctgcaaacttcccagatttgatgaacaagattaatctataaatctaagaagctcaatgaatttcaagtaggataaactcaaagaaatccacaactagacacatcataatcaaacagtagaaagtcaaaaacaaagagcatctcacccaaacaaaagtgactcgccatatacaatggatcttcaataatactaaaaagcaatytctcattagaagcaataaagggcaaagggatgaaaaaaagttggttaatgggcacaaaaatagttatatagaagaaatatgttctagtgtttgacagtacagtagggaaattatagttgacagtaatttattatatatttcaaaatagctgaaaagaagaattgtaatgttcccaccac

SEQ ID NO: 888976 - DNA, 659 bp, Homo sapiens
ctgacaggacatgttgtagtgatagaggaaaagagggccttatggtcctccccttttccctggtaccctggtaccctggaacccaacaaggcagcctggttgaggttcctcttggtgttctgtgtatcccatcattgctgctgaggctggcactggggccctgagaagccctgcgagcccctctgccacctgccaaatcaacttaatggatgcaactccaaatgcaataaaagagcactggacttgggtcccctcctcaggaaatgtgccctatgcgcaacttttgtgactggcaattgacttttttaycgtaaacaattccaaactggagagatcttaattttttccagttggtaacaaagaactgatcaacaaccatgaggaaacagcactacttaaaccattatcaactaggatagaaaggcaattttggtgggagaaaaggggccagttactgcttggagttcaaaagcttattctcttctaacactgccagaaaataaccagggacaacagttgaggtaaactggattctgaaaggcaagaggtgggaccaggggctccatagaccaagtgattttttttttttaaccagtaaaataaaagagaaggctgcaagtgatcaaaatctcttgacaacaacaagttgctgactggcc

SEQ ID NO: 888977 - DNA, 609 bp, Homo sapiens
acctggcaaagattttatgatgaagatgtcaaaagcaattgcaacaaaagcaaaaattgataaatgggacctaattaaactaaagagcttctgcacagcaaaagaaactatcaacagagtaaacagacaacctacagaatggaacaaaatatctgcaaaccatgtacctgacaaaggtttaatatccagaatctataaggaccttaaacaaatttataagcaaaaagcaaacaactccattaaaaagtgggtagaggacaggaacaggcacttttcaaaagatgacatacttgtggccaacaagcatatgaaaaaatgctcaacatcactaatcattagaggaagtgcaaatcaaaaccacaatgagatgccatctcacacycatcagaatggccattattaaaatgtcaaaaaataacagatgctgataaggttgcagacaaaaagtaaatttttctgatggaagtgtaaattagttcagcctctgtggaaagcagtgtggtaatttctcaaataaataaaaacagaaataccattcaacccagcaatcccattactgggtatatacctaaggaaatataattcactctaccataaagacacatgcac

SEQ ID NO: 888978 - DNA, 677 bp, Homo sapiens
cataacaagcaataactcatgtaagcttcttaaaaataagacgaagaaggtatttttattatattctacaattgataacagtagtttgactccagataacacattcggagccattgtactgcatagcctttctgaggttcattgctatctccaacatacatggaaccccctggacacctgggagaggtaaagtgttaaaagtgatggtggtaaagctaagggggttgggtagaggggttggtgcagaggtaggatttaaaatgaaatgtacagccaggcttggtggctcacatctgtaatcccagcactttgggaggctgaggmgggcggttcatgaggtcaggagtttgagagcagcctggccaacatggtgaaatcccgtctctactaaaaatacaaaaaaaattagctggacatggtggcggacacctgtaatgccagctactcgggaggctgaggcagaagaatcgtttgaacgtcagaggcggaggttgcagtgagccgagatcgtgccactgctctccagcctgggtgacagggcgagactctgtctcaaaaataaataaataaataaatcatacatgacttcacttacgttctcaccagtgcattttttgtgataggaaaagaaaggaaaactatatctacatgatgttttggataaaataattatttag

SEQ ID NO: 888979 - DNA, 677 bp, Homo sapiens
cataacaagcaataactcatgtaagcttcttaaaaataagacgaagaaggtatttttattatattctacaattgataacagtagtttgactccagataacacattcggagccattgtactgcatagcctttctgaggttcattgctatctccaacatacatggaaccccctggacacctgggagaggtaaagtgttaaaagtgatggtggtaaagctaagggggttgggtagaggggttggtgcagaggtaggatttaaaatgaaatgtacagccaggcttggtggctcacatctgtaatcccagcactttgggaggctgaggagggcggttcatgaggtcaggagtttgagagcagcctggccaacatggtgaaatcccgtctctactaaaaatacaaaaaaaattagctggacatggtggcggacacctgtaatgccagctactcgggaggctgaggcagaagaatcgtttgaacgtcagaggcggaggttgcagtgagccgagatcgtgccactgctctccagcctgggtgacagggygagactctgtctcaaaaataaataaataaataaatcatacatgacttcacttacgttctcaccagtgcattttttgtgataggaaaagaaaggaaaactatatctacatgatgttttggataaaataattatttag

SEQ ID NO: 888980 - DNA, 612 bp, Homo sapiens
ctacatggagaacacaggcacattggctaatatctacagataactctcagacacgtaagtaatgttattgtggactatccagctccagttgaaccataagaggactatagacacaggagtgactacaggcaatatcaacagaagaaccaccagctgaacacagcccaaataacagaatcatcagcatataaatggctgttaccttagtcaktaggtcttaggatagcctgttaccaaaaataaataactgatacactttttttttctttttatacacactcaagcacctgtgtgtatacatactattctctgccaacatattttcacgtattatctgctcttgacactgaaagaaaatgttacaaaatgtctaagccatatttctcgatattgtgtgaatcattgatattgctgtctttttggttgcacttctataaaccttatgaatatgtcacaaatacaaatttactgcactgtggtataaaactagcaaatatgatgcatactaaaatataaaatgttatttcatttaaacatttacatataaaaatatttagtccctatcttcctcttttagtgattaaaaaataaaagacactcataagatgggta

SEQ ID NO: 888981 - DNA, 598 bp, Homo sapiens
gttatgtgatatccagatgccacctatcactggttatggagtccccattacatggtgatcagtggataatccactccaaaatttcattttagagttaactacctcaaaccactttgaaaactatttcagatgtaagaagttccctgattaagaaagtcagaggtgaaatttattttggggagttctcagcatcaacacctgtgaaagaatgagcaaagcaggattagactgagggagaagcacagccatgatgcaccgcaattgtaacctctgccaccaccaaaggaattaataaagatagaacaaaccttccgaggtttctcttcttggarccattggggccagaccttttcaaccctgcattgagcattcactgtatgcaatctgtctctagggagtaagcataccttggaagaaacagctcccttaagccaagattaatagttggaaaggggattagctataaactatcaaccgacaataccccagtgactgagaaatgaatgtctgttctgagggaatgaatgaaggaatcaagccacagcattgactagaagctcctatccaaacactatcctcttgctattcctcatgttgc

SEQ ID NO: 888982 - DNA, 598 bp, Homo sapiens
gttatgtgatatccagatgccacctatcactggttatggagtccccattacatggtgatcagtggataatccactccaaaatttcattttagagttaactacctcaaaccactttgaaaactatttcagatgtaagaagttccctgattaagaaagtcagaggtgaaatttattttggggagttctcagcatcaacacctgtgaaagaatgagcaaagcaggattagactgagggagaagcacagccatgatgcaccgcaattgtaacctctgccaccaccaaaggaattaataaagatagaacaaaccttccgaggtttctcttcttggaaccattggggccagaccttttcaaccctgcattgascattcactgtatgcaatctgtctctagggagtaagcataccttggaagaaacagctcccttaagccaagattaatagttggaaaggggattagctataaactatcaaccgacaataccccagtgactgagaaatgaatgtctgttctgagggaatgaatgaaggaatcaagccacagcattgactagaagctcctatccaaacactatcctcttgctattcctcatgttgc

SEQ ID NO: 888983 - DNA, 633 bp, Homo sapiens
tttgtgaatgtataaggctgaatgctttcaaacttaaccaggttacctcttgaatgctttgctgcttagaaatttcttccaccagataccctaaatcatctttctcaaattcaaagttccacggatctctagggcaggggcaaaatgccascagtctctttacaaagcatagcaagagtgacttttgctctagttcccaataagtttctcatctccatctgagaccacctcaccctggacttcactgtccacatcattatcagcattttggtcaaaaccattcaacaagtctctaggaagttccaaattttcccacatcttcctatcttcttctgagccctccaaactgtttcaaagtctgcctgttacccagtttcaaagtgacttccacattttcaagtatctttatagcagtataccactgcctcagtaccaatttactgtatttgtctgttttcacactgctataaagaaatacctgagactgggtaatttataaaggaaagaggtttaattgactcacagttctgcatggctggggaggcttcaggaaacttaaagtcatggcaaaaggggaagcaaacacatcctcctttgcaaggcagcaggagagggaagagtgagtagtgaaag

SEQ ID NO: 888984 - DNA, 633 bp, Homo sapiens
tttgtgaatgtataaggctgaatgctttcaaacttaaccaggttacctcttgaatgctttgctgcttagaaatttcttccaccagataccctaaatcatctttctcaaattcaaagttccacggatctctagggcaggggcaaaatgccaccagtctctttacaaagcatagcaagagtgacttttgctctagttcccaataagtttctcatctccatctgagaccacctcaccctggacttcactgtccacatcattatcagcattttggtcaaaaccattcaacaagtctctaggaagttccaaattttcccacatcttcctatcttcttctgagccctccaaactgtttcaaagtctgcctgttacccagtttcaaagtgacttccacattttcaagtatctttatagcagtataccactgcctcagtaccaatttactgtatttgtctgttttcacactgctataaagaaatayctgagactgggtaatttataaaggaaagaggtttaattgactcacagttctgcatggctggggaggcttcaggaaacttaaagtcatggcaaaaggggaagcaaacacatcctcctttgcaaggcagcaggagagggaagagtgagtagtgaaag

SEQ ID NO: 888985 - DNA, 617 bp, Homo sapiens
aatcccagctacttgggaggctgaggcaggagaattgcttgaacccgagaggcagaggttgcagtgagccactgcactccagcctcggtgacagagtgagacttcaactcaaaaaaaaaaaaaaaaaagttttttctccatggtaactatcaaaaattaaagagatgatcatttaaaaagattttgatcagccaggcgtggtggctcacacctttratcctagcactttgggaggccaaggagggtggatcacttgaggtcagggattcgagaccagcctggccaacatgatgaaaccccgtctctactaaaaatacaaaaattagccaggtgtggtggtgggtgcctgtaatcccagctacttgggagactgaggcaagagaatcacttgagcccgggaggtggaggttgcagtgagccgagatcaaaccactgcactccagcctgggtgacagagtgagactccatctcaaaaaaaaaaaaaaaaaaaaaaaaaaatcttgatcaagaactatgtgcaggagcaatgatcaggaactatttttaacacaaaacttgatatttaaaagagactccaagaagaatgttatcaggaaattttacccaaagttgatatt

SEQ ID NO: 888986 - DNA, 613 bp, Homo sapiens
ccaggttgaaggagcaagtgctacatttttcaaatgttgctttaaaaaattttgtattggctgggcggggtggctcacacctgttatcccagcactttgggaggccgaggcaggcagatcacatgaggtcaggggttcgagaccagcctggccaacatgataaaaccctgtctctactaaaaatacaaaaattagctagatgtggtggtgcacgcctgtaatcccakctacttgggaggctgaggcaggagatcacttgaatccaggaggcagaagttgcagtgagccgagatcacaccactgcgctacatgccactgcactacagcctcggcaacaaagtgagagtctatctaaaggaaaaaacaaaaaacaaaaacaaaaaaaacctttgtattgaaatacaacatgtatacagaaaagtgcagaaatcaaaagtgtatagctcagtggctttcacaaagtgaacacacccatgtaaccaatgcacagacaagaaacagaacatgaccagtgcgccaaaagtcccctcacccccatctagtcaccatctcactttcaagggttgctactgtcagaggtgtgtaaaccagaaaactccatcttaaataggag

SEQ ID NO: 888987 - DNA, 562 bp, Homo sapiens
aataagggttaaacacccattcccccaccacacacacactcacacacgcacacacatttgctctgaaaacctgcaagtgttctatagaaacacaggtgatcacaaggaagwttctactctattggctgagatgtgccagatgtatactaggtttgtagcctaggagtagtaggctatcctatattgcctaggtgtgggtaagtgcactcgatttaggtttgggtaagtgtactctgtgatgttcttatgaacatgaaactgcttgacacatttttgtgaacatgtccttgtcattaagtgatagatgactatatttataaatgtgatacaggaatccctctctgtactctagccccgggcaccagaaaatcagtcatgaacctgattacaatgacagtctacttagcaaataaaggaagaaaacactcaggaaagccatcttaataaacaactaattggaataatttaatttccaaatatttgatttgtttttagcttgtttctccccctttgggtgagctgaattgacaagttacctggtctaaaaaaatggcataaatag

SEQ ID NO: 888988 - DNA, 562 bp, Homo sapiens
aataagggttaaacacccattcccccaccacacacacactcacacacgcacacacatttgctctgaaaacctgcaagtgttctatagaaacacaggtgatcacaaggaagattctactctattggctgagatgtgccagatgtatactaggtttgtagcctaggagtagtaggctatccyatattgcctaggtgtgggtaagtgcactcgatttaggtttgggtaagtgtactctgtgatgttcttatgaacatgaaactgcttgacacatttttgtgaacatgtccttgtcattaagtgatagatgactatatttataaatgtgatacaggaatccctctctgtactctagccccgggcaccagaaaatcagtcatgaacctgattacaatgacagtctacttagcaaataaaggaagaaaacactcaggaaagccatcttaataaacaactaattggaataatttaatttccaaatatttgatttgtttttagcttgtttctccccctttgggtgagctgaattgacaagttacctggtctaaaaaaatggcataaatag

SEQ ID NO: 888989 - DNA, 584 bp, Homo sapiens
caatctagcaagacagtccaacattcaaattcaggaactacagagaacaccactaagataccccaccagaagatcaaacccaagatacaaaatcctcagactctcgaaggtggaaatgaaggaaaaaatattaaggggagccatagaaaagggtcaggacacctacaatgggaagcccatcagactaacagtagatctctcagcaaaaaccctacaagccagaagagtgggggccaatattcaatattcttatagaaaagtattttcaacctagaatttcatatccagcacaccaagcttcataagcaaaggagaaataaaatcctttccagamaagcaaatgctaaaggatttcatcagcacaaggcctgccatgcaagagctcctgaaggaaacactaaatgtggaaaggagcaatcagtaccaatcactgcagaaaacacactaaaatataaagaacaatgacactatgaagaaaatgcatcaactaatgtgcaaaatagccagctagcatcatgatgacaggatcaaattcatatataacaatattaaccttaaatgtaaacgtgctaaatgcccgaatt

SEQ ID NO: 888990 - DNA, 604 bp, Homo sapiens
ggaggacagtggcccttttctcactgctccactaggcagtgtcccagtagggactctgtgtgggggctccaaacccacatttcccttctgcactgccctagcagaggttctccatgagggacccacccctgcagcaaacttctgcctgggcatccaggtgtttccatacatcttctgaaatctaggtggaagttcccaaacccccattattgacttctgtgtacttgcaggctcaacaccacatggaagctgtcaaggcttgggrcttacacactctgaagccatagccagagctgtaccttggtcccttttagtcatggctggtgcagctgggacacaggagaccaagtccctaggcttcacacaacatggggaccctggacctggcccataaaaccatttttttctcctaaacctttgggcctgtgatgggaggggctgcagcaaagttctctgacataccctagagatattttccctattgtcttggtgattaacattcgcctcctcattacttatgcaaatttctggagctagcttgaatttctcctcagaaaatgggattttcttttttagcacattgtcagactgtaaatttctcgaa

SEQ ID NO: 888991 - DNA, 707 bp, Homo sapiens
agagagtttgtttccaatgctcaaagagcgtctggcatttattagttgctcaataagaatttagtcaatgaataaattaatacactatctgacctcctaattttgtcttagattgcttttggaaaataaaactaatactcattatataacaaaattttataagtaaacatatattccaccatgtaaagaaataatatatagaaataatcataaattcaccagaatttaacatcgtgaattaagtctatatgttgaaataaaatcacaaattaagayagaataaacacatttttactagagtttactaaactatttttatgaaggcatgacttgataaaagatattacaacttgaaggacttgagtcttgataggacaatgagaatttaaaagatgacaagatttgtcaaagagttgcttaggcagataaatttagataagaacatccaacagatccttcagtcagtgagggcttagatgaggcatagctttgttagttgctgagaactatatcaggtaaatcagcaaatctccttgtccttaaagtagggcattatattagagttaatataattttaatgttcattcctcaagcataaacagtaaaaagttaaatctaatatatgagacaagctgtaattaaagccttttcagagtacccagactggtagtcaattaatatttgaaagttattacgacaaatgttgt

SEQ ID NO: 888992 - DNA, 707 bp, Homo sapiens
agagagtttgtttccaatgctcaaagagcgtctggcatttattagttgctcaataagaatttagtcaatgaataaattaatacactatctgacctcctaattttgtcttagattgcttttggaaaataaaactaatactcattatataacaaaattttataagtaaacatatattccaccatgtaaagaaataatatatagaaataatcataaattcaccagaatttaacatcgtgaattaagtctatatgttgaaataaaatcacaaattaagatagaataaacacatttttactagagtttactaaactatttttatgaaggcatgacttgataaaagatattacaacttgaaggacttgagtcttgataggacaatgagaatttaaaagatgacmagatttgtcaaagagttgcttaggcagataaatttagataagaacatccaacagatccttcagtcagtgagggcttagatgaggcatagctttgttagttgctgagaactatatcaggtaaatcagcaaatctccttgtccttaaagtagggcattatattagagttaatataattttaatgttcattcctcaagcataaacagtaaaaagttaaatctaatatatgagacaagctgtaattaaagccttttcagagtacccagactggtagtcaattaatatttgaaagttattacgacaaatgttgt

SEQ ID NO: 888993 - DNA, 704 bp, Homo sapiens
aatagacgggatgttggtgaatgtgataaggtcatccttgtttgctaattatcctgtttggataggaggctgctatcctccaaccgagacttggagaaaatgctgctgtctctttctatgattaaatttcagaggtatgactctcaggtacttgagaaagacattcttaggttgcaagaayagcagagggctgggaaagatgtatatctcaaaagggcttcagaaacaatttacataggcaagtttttaaaaataaaaattatttaaaaagcgaggtcatgatcctatctatagtcagaaaaaacttgtctaaagtttagctaagctgggaagaatgttttattttggtcaatgccttttataattttcaatgtaatacaatatccttctctatcaggattaagttcataatatttctactatataaaactataccctcttccttgcctgaatgaaaggagaaggttacagtgttaaggtcataaacatgaaatatcatatgataattttaacttttagattttaattgagaattaatggttcttaataataagaggggaggaacccaagtccctatgaaggacataaacacatgaaaagtgaacagttagaagcaaaatgatcctggtgtatggttctctctaacaacatcattagcctcaagatgaagtagacatgggaaacaacagcacagaaaaataacc

SEQ ID NO: 888994 - DNA, 624 bp, Homo sapiens
aattttagggatctgaggtccagaatgatttatttattttttttggaaatgtatcacaaagtttattagaacaggactggggattatattgtctcactcaaattatgatgaaatatctaccatcaaatttatcacatgtaataatgccaaaaactatagggatcgataatcttggaaactgtaaccttctatcattttcttctggaaaataacartgggaactcatcttctatggcttctgccagtgaaacatactttcagaattgttttgtgaggactgttgatggttactcccattagcaaaaaaaaaaaaaaatcattccttcaacattcccatgagcttttttgttgttattgttcttgcatatttgaatgcgttttggttttggggtgtgtctacattatcatggaattgggaaatttacttggacaagatgaagaataatgctaatcaatttagtaattacaggaggaaataaaaacaagaagagatgagtcaatatatagttacagatttgtgtttataagaaataaatcactaaaaggtacaaataaacttcattaatattttaaatagagtatatcttcatgtttgggataagtttgggttttgcagatctttag

SEQ ID NO: 888995 - DNA, 630 bp, Homo sapiens
acaggtgggaattcaagatgagatttgggtgggaacagagccaaaccatataattccacccctggcccctcccaaatctcatgttcttacacttaaaaagaaatcatgccttcccaacagtcccccaaattcttaattcatttcagcattaactcaaaagtccacagttcaaagtctcatccaagacaaggcaagtcccttccacctatgagcctgtaaaatcaaaagcaggttagttacttcctagatacagtggaggtacaggcagtgggagaagttggccaaaacaaaggggctacaggccccatgcaagttkgaaatccagcagggtagtcaaatcttaaagttccgaaatgatctcccttgactctatgtctcacatccaggtcatgctgatgcaagggggtgagttcccatggtcttgaacagctctgctcctgtggttttgcagggtacagcctccttcccagctgctttcaaggactggtgttgagtccgtgaaattaagtttggagataaacaaaattaaacttttgtttcttgcaggacttctcaaagcctttaatatgctcatgtgcaatgtgaatctccaagtggacaatgtagtatgcattgattcccacataagcc

SEQ ID NO: 888996 - DNA, 480 bp, Homo sapiens
aaagtctcatccaagacaaggcaagtcccttccacctatgagcctgtaaaatcaaaagcaggttagttacttcctagatacagtggaggtacaggcagtgggagaagttggccaaaacaaaggggctacaggccccatgcaagtttgaaatccagcagggtagtcaaatcttaaagttccgaaatgatctcccttgactctatgtctcacatccaggtcatgctgatgcaagggggtgagttcccatggtcttgaacagctctgcycctgtggttttgcagggtacagcctccttcccagctgctttcaaggactggtgttgagtccgtgaaattaagtttggagataaacaaaattaaacttttgtttcttgcaggacttctcaaagcctttaatatgctcatgtgcaatgtgaatctccaagtggacaatgtagtatgcattgattcccacataagcccaaaggggaattctttttta

SEQ ID NO: 888997 - DNA, 643 bp, Homo sapiens
actttttaatgatcgccattctaactggcgtgagatggtatctcattgtggttttgatttgcatttctctaatgacgagtgatgatgagctttttttcatatgtatgttgtccgcataaatgtcttcttttgagaagtgtctgttcatatcctttgcccactttttgatggggttgtttgttttttcccttgtaaatttatttaagttccttgtagattctggatattagmcctttgtcagatggatagggtacaaccccgttctgtgggttgcctgttcactctgatgatagtttattttgctgtgcagaagctctttagtttaattagatcccatttgtcaattttggcttttgttgccattgcttttggtgttttagacatgaagtctttgcccatgcctatgtcctaaatggtattgcctaggttttcttctagggtttttatggttttacgtcttacatttaagtctttaatccatcttgagttaatttttgtataaggtgtaaggaaggggtccagtttcagttttctgcacatggcaggctagttttcccaacaccatttattaaatagggaatcctttccttattgcttctttttgtcaggtttgtcaaggatcagatggttgtagatgtgtggc

SEQ ID NO: 888998 - DNA, 621 bp, Homo sapiens
gcaccatctgttgaaaagggtgtactttcccttcatgtttttgtttgctttgtccaaggtcaattggctgtaaatatttgagtttatttctgagttctctattctgttccattggtctatgtgcctatttttataccagtaccatgctgttttggtgactatggccttatagtatagtttgaaatcagatagtgtgatgcctccaggtttgttctttttgtttagttttgctttggctctgcgggctcttttttgattccatatgaatttcagaattgctttttttctaattctgtgaggaatgatggtggtattatgatggggattgcattgaatttttagattgcttttggcggtatggtcattttcacaatattgattctacccatccatgagcatgggatgtgtttccatttttttgtgtcatctctgatttctttcagyagggttccatagttttccttgtagaggtcttttgacgcctttgttaagatatattcctaagtattttttttttttttttgcagctattgtaaaaggggttgagttattgatttgattctccacttggttgctgttggtgtatagaactactactgatttgtgtacattattcttgta

SEQ ID NO: 888999 - DNA, 598 bp, Homo sapiens
tccatgctaagctcttggcgtgccttattttatttattcatcatgatacttaagaggtgtctacttattgtttctattctgtagcagaggagaatgaagctcacaatgttgaataacttgtccaaagataactgttaagtggaacggatgggagtcaaccttgagtctgttccagactttaccctccttagttgttattagaatatttgattcatttattcttcctttctgatcattgttctcagtgacattggctttcttactgaaagttcatcaagcaagctttacggactcatagtatcaacagtcgcagcattccactctccctgtttagctgccatgctctggaattgctcatcatataccgctgaaatctgagttggtgggctcattgcagacacactgttttgcttgccatstctccctcttctttatccccattgaacctaactctcagtatctctcctctcctgatccacactcccttttagtttattttattttgccccagtatttcatgtcttttgatgacatcatctttccccagctgaatgatgaggctgtctctagttttagtggctcatacacatcagtctag

SEQ ID NO: 889000 - DNA, 631 bp, Homo sapiens
aattgcttcaaagagaataaaatacctaggaatccaacttacaagggacgtgaaggacctcttcaaggagaactacaaaccactgctcaatgaaataaaagaggatacaaagaaatggaagaacattccatgctcatgggtaggaagaatcaatatcatgaaaatggccataatgcccaaggtaatttatagattcaatgccatccccatcaagctaccaatgactttcttcacagaattggaaaaaactactttaaagttcatatggaaccaaaaaagagcccgcatsgccaagtcagtcctaagccaaaagaacaaagctggaggcatcacgctacctgacttcaaactatactacaaggctacagtaaccaaaagaacatggtactggtaccaaaacagagaaatagaccaatggaacagaacagaaccctcagaaataacgccgcatatctacaactatctgatctttgacaaacctgagaaaaacaagcaatggggaaaggattccctatttaataaatggtgctgggaaaactggctagccatatgtagaaagctgaaactggatcccttccttacaccttatacaaaaattaattcaagatggatgaaagacttaaatgttagt

SEQ ID NO: 889001 - DNA, 548 bp, Homo sapiens; identical to SEQ ID NO: 888205

SEQ ID NO: 889002 - DNA, 613 bp, Homo sapiens
caaaccactttttatattactttctgtgattgagatttgcatgacatttgggtagtacaaatttacacctcaattatgtacatggatagagtcaatgtttacaaatactgaaggaagacttttcccacccatagttcaggtagaaaggcaagtttctttgacattcctattagtgatagcttcaggtttataaagccatcttcaattcaaattacccactccctattggcctaagaccctggtttctgatgtcagccttctttctccatcccacactcctatgtgtgccccaggattagctcataagcttttatttcgattttcatttacttctttgttttgggtccttagatattttccttacatttttgyaaatttatgcattaaaaggagtatgtattatattttatccagaatctctaagtagattttagaaggagagattttaggctttctggacagctatagtgggagaattgaaagtctgagtcattttacatttccctctcctgtactaatgcaattaatttgtttgttattattgtgctgcaagactttttattgatccctgttactttttaaaattgttattgttaggtttggttctctcatt

SEQ ID NO: 889003 - DNA, 631 bp, Homo sapiens
tgagaagcacaatagtggggagtgcctggagaatgagctgaacaggaatgacataggaatgtaggcctcagctggccatcaggaacatagggcagggctcctttcccctgccagcctcagcttcaggcaccaatgcctaggatagaagcgggctagaccctcacaccaataccctcacggagataactaggaagctgctgttggatattattatcactagagtctagagaagtctagagatctctccaggcattgcagtcctttgatgaaaacagcaaaatccaatgtctgcctccagggagggttgaggcagctaaaaatgggacattcattgcaaatattgagtctacaaatactacaaatcctttcacatcctgcktaaagcacatttccttagtgaaacttccagtcaccccaacggaagtaaatcactcttcctttttggctttctcagcatttggtctgtgtctttagtagtttgtcttgtgtattgtgcatcatttcgccaactgaactataagcttcttgaagtcaggaatcctgtctgatccattgatatattcccacagtaattatcaaagtgctttgtatgtgacaggtgcaaaatacatatggaattaaaaaccaaatt

SEQ ID NO: 889004 - DNA, 559 bp, Homo sapiens
ttttaatttgcattttcctgaagacatatgacatggtgcaccttttcttttctttttttaattatactttaagttctagggtacatgtgcacaacgtgcaggtttgttacatatgtatacatgtgtcatgttggtgtgctgcacccattaactcgttatttacattaggtatatctcctaatgctatccctcctccctcccccgaccccacaacaggccccggtgtgtgatgttgcccaccctgtgtccaaatgttctcattgttcagttcccacctatgagtgagaacatgcggtgtttgtttttctgtccttgcgatagtttgctcagaatgatggtttccagcttcatccatgtccttacaaaggacatgaactcatscttttttatggctgcatagtattctgtggtgtatatgtgccacattttcttaaactagtctatcattgttggacatttgggttggtcccaagtctttgctattgtgaacagtgccgcaataaatatacgtgtgcatgtgtctttatagcagcatgatttataatcctctgggtatatg

SEQ ID NO: 889005 - DNA, 591 bp, Homo sapiens
accatgctcagcctctctttaattttgagttaatgttttatatgatgaaaggcaggggtccagcttcagtctttcctatatggctatctggttacccagccccatttattgaatagggagtcctttccccattgcttgtttttgttggtcttgtcaaagatcagacggttgtaggtttgtggctttatttctgagtgtctttgatttttgacaggtcaatcatactatgttttggtgaggtcttctttagggtgaatgaattgaagacttttgagctttatatacctggatgtttacattgttccctagatttgggaagttttcagcctctatattttaaataagctttctgtcattttgtttctcttctccttgtagaaattctgtaatacaaatttaattmttttgatggtgcccatagattaaacaggctttcttcattcttttttctgaaaagaaaaataattataaatcatcctctgactgggtttatttattttttattcttcttgttctatctatctctctctatctctgggtttatttatgttttattcttcttgttctagtctgctgttgaagttccctatt

SEQ ID NO: 889006 - DNA, 490 bp, Homo sapiens
gggctcttttcacttcagagggcccccacaacatctgcagcccccaccccacctttggttctgaggatgctgctaaacataaccgcgttttggggaacccaagaagcacctgggctgtcaccctgccgacttgctcgtaccttctgaaacccacccagaaaacaggaattcacatgtggcctggctcgcttccgcgggacagacacctgcaggctggaaagtgtcctggtgttgccccatcatgggtttcagaaaggtggtcctgaagtcaagagccccggacaggagaagagatgcctgggccccrgtccagctccaccagtgactttccagatgatctttggtatcctgagagtggatagtacagccactctcagggtactggtttcctcatttgtaaactgcagggacaggactggatgctctctaaggtctcagaacgccctgacgtgtccagtgacacttggtaaaccaggaggagtgcagggat

SEQ ID NO: 889007 - DNA, 652 bp, Homo sapiens
cagaactagaaataccatttgacccagccatcccattactgggtatatacccaaaggactataaatcatgctgctataaagacacatgcacacgtatgtttattgcggcactattcacaatagcaaagacttggaaccaagccaaatgtccaacaatgatagactggattaagaaaatgtggcacatatacaccatggactactatgcagccataaaaaatgatgagttcatgtcctttgtagggacatggatgaagctggaaaccatcattctcagcaaagtatcccaaggacaaaaaaccaaacactgcatgttctcactcctaggygggaattgaacaatgagaacacatggacattggaaggggaacatcacacactggggcctgttgcagggttgggggaggggggagggatagcattaggagatatacctaatgttaaatgatgagttaatgggtgcagcacaccaacatggcacatgtatacatatgtaacaaacctgcacgttatgcacatgtaccctaaaacttaaagtataatttaaaaaaaaaacctggaggtacctagcagaataaatacatagaactactaaataaaaaaaaaaaagaaaaaagaaaatgtggcagatatacaccatggaatactatgc

SEQ ID NO: 889008 - DNA, 638 bp, Homo sapiens
aaatttgataatttgtcttcttatgcacatcttacaactgagcagtagaaaccattttgttctttattaaaatataaagaaatagagaagtggtaatatgctctaggtacaatgaactgattgtcactgttatgctgctcttaactcacttagcaatactggatactggaaaccaaaataactccagaaggtaattatttgaagacttattgtacttccattatggcccttgctcatctacagtaccttctaggaggatatatttgccaatagtctctactgtagagccagctcttaggcagccatgttctgaaccatgtgactmcaccctctagccacagtggaacaaactggaagttggcacctgacccaaaagaaaccaatctgtcacaatggctagcaatccacgtcatgtgaaaaacatgaatcgacccaatcagatttcctcagtttgaaactagaactaagaagtaacgagaaaaagatgagttagtgagaaccaaagctagaaggattctatgaggtttgtcatgacaagctaaagtcataaaggaacataaacacacggaaaagattcacagagagagaggaaggcagaagatttttgtttttgtttttgttttgtttttttaagaggt

SEQ ID NO: 889009 - DNA, 682 bp, Homo sapiens
tagcaagtggattcctgtgtcagggtctggggaagggattggaaattgattgctcaggggcacgagagacctttctggggtagtgggaacgttctaaagccagatcgtgctggtggctgcacaggcctgcagatgtactaagagtggttgaattgtacagtggataagcattgtgatgtgtacactatatgtcaacaaagctgggaaaaggaagygatcagaggtgatccagaagcgatgctgcccccaactgaggcaaaggaagaagaaagaacttagaaatgttcccagagcaaaaacagccgttttctaaagaatgaccccacaattggttcaagtcgaagagcctccctgaggaataacagcttcgtcacccatctagtttgggggttgtttctatagtaacctgtgacatggcccccttcccaaaaacaaaacaaaacaaaacaaaaaacagaaacaaagacaatgaatccctgagaacagtgagaaagagaaagctcttgcttcttttggcctatggaagggtgtggctgttgagctgagccttggagttcctgggtttgccggtttccccgtctggcagtgctgggggctttgagccagcaacctcaaagaacgcccacgccagggaggccagtgtgcacgcaggtattgatgttggctttccacgggtgcagtg

SEQ ID NO: 889010 - DNA, 682 bp, Homo sapiens
tagcaagtggattcctgtgtcagggtctggggaagggattggaaattgattgctcaggggcacgagagacctttctggggtagtgggaacgttctaaagccagatcgtgctggtggctgcacaggcctgcagatgtactaagagtggttgaattgtacagtggataagcattgtgatgtgtacactatatgtcaacaaagctgggaaaaggaagcgatcagaggtgatccagaagcgatgctgcccccaactgaggcaaaggaagaagaaagaacttagaaatgttcccagagcaaaaacagccgttttctaaagaatgaccccacaattggttcaagtcgaagagcctccctgaggaataacagcttcgtcacccatctagtttgggggttgtttctatagtaamctgtgacatggcccccttcccaaaaacaaaacaaaacaaaacaaaaaacagaaacaaagacaatgaatccctgagaacagtgagaaagagaaagctcttgcttcttttggcctatggaagggtgtggctgttgagctgagccttggagttcctgggtttgccggtttccccgtctggcagtgctgggggctttgagccagcaacctcaaagaacgcccacgccagggaggccagtgtgcacgcaggtattgatgttggctttccacgggtgcagtg

SEQ ID NO: 889011 - DNA, 591 bp, Homo sapiens
ctcgggacaccccaacccctgcaccctctgtgcttgtcttggggcattcacttttcaactccatggaaaatattgtgacagtaacgtgggagcagcaagaacccaaataaaagaacgtgtcattcacgctgcctccctttctcctgagctgcaggtaccagcacatccgggcactttytccatggtccgctgtcctaatcctgactatttcagcacccagagagcaagccgaaaacaaaaacacccatcacccatgcccggcattagaaaatctcattggtatatgttcagattattttaaaaggaaattaaactcacagatatagccaggagtagatggagtttgtggggcttaaaatatacgtaaactttaggggttactttaaataataatagcaatatgaatccaagttagatatgaaaagaaatatttatttgaagtgataaaaaatcacaaggctcgcacatgaaaaagctgataggtgcaataaacatcaccaaatggaagaaaaaaaatttgattagttacttccaggcatacctctatcaaactatttttttctatatctctgggctgctaccccttgatta

SEQ ID NO: 889012 - DNA, 591 bp, Homo sapiens
ctcgggacaccccaacccctgcaccctctgtgcttgtcttggggcattcacttttcaactccatggaaaatattgtgacagtaacgtgggagcagcaagaacccaaataaaagaacgtgtcattcacgctgcctccctttctcctgagctgcaggtaccagcacatccgggcactttttccatggtccrctgtcctaatcctgactatttcagcacccagagagcaagccgaaaacaaaaacacccatcacccatgcccggcattagaaaatctcattggtatatgttcagattattttaaaaggaaattaaactcacagatatagccaggagtagatggagtttgtggggcttaaaatatacgtaaactttaggggttactttaaataataatagcaatatgaatccaagttagatatgaaaagaaatatttatttgaagtgataaaaaatcacaaggctcgcacatgaaaaagctgataggtgcaataaacatcaccaaatggaagaaaaaaaatttgattagttacttccaggcatacctctatcaaactatttttttctatatctctgggctgctaccccttgatta

SEQ ID NO: 889013 - DNA, 589 bp, Homo sapiens
atgcagaaaactgaaactggaccccttccttacaccttatatgcaaattaattcaagatggattaaagacataaacgtaagacctaataccacaaaaaccctagaggaaaacctaggcaataccattcaggacataggcatggacagagtcttcatgactaaaacaccaaaagcaatggcaacaaaagccaaaatttacaaatgggatctaattaaactaaagagcttctgcacagcaaagaaactatcatcagagtgaataggcaacctacagaatgagagaaaatttttacaatctatccatgtgacaaagggctgatatccagcatctgcaaagaacataaacaggtttacaaggaaaaaaacaaccccatcaaaaactgggctaaggatatgaacagatacttctcaaaaaaagacatttatgtggccaasaaacatatgaaaaaaagctcatcatcactggtcatcagagaaatgcaaatcaaaaccacaatgagataccatctcatgtcagttagaatggtgatcactaaaagtcaggaaacaacagatgctggagaggatgtggagaaataggaccactttt

SEQ ID NO: 889014 - DNA, 656 bp, Homo sapiens
acataacaatattaaccttaaatgtaaacaggctaaatgccccagttaaaagacacagactggcaaattggataaagagtcaagacctgtcagtgttctgtattcaggagatccatctcatgtgcaaagacacacacaggctcaaaataaagggatggaggaagatctaacaagcaaatggaaagcaaaaaagtaggggttgcaatcctagtctctgataaaacagactttaagccaacaaagataaaaaaagacaacagcattacataatggtaaaaggatcaatgcaacaagaagagctaactatcctaaatatatatgtayccactacaggagcactctgattcataaagcaagttcttagagacctacaaagagacttagactctcacacaataatagtgggagacttcaacaccccactgtcaatattagatcaatgagacagaaaattaacaaggatattcaggacttgaactcagctctggaccaggtggatctaatagacatctacagaactctccatcccaaatcaacagaatatacattcttttcagcaccacattgcacttattctaaaattgaccacataattggaagtaaaacgctcctcagtaaatgtgaaagaacagaaatcataataaacagtctctcag

SEQ ID NO: 889015 - DNA, 628 bp, Homo sapiens
cctcagtaaatgtgaaagaacagaaatcataataaacagtctctcagaccacagtgtaatcaaattagaactcaggattaagaaactcactcaaagttgcacaactccatggaaactgaacaacctgctcctgaacgactactggctamataatgacattaaggcagaaataaataagttctttgaaaccaatgagaacaaagacacaacataccagaatctgtgggacaaagctaaaacagtgtttagagggaaatttatagcactaaatgcccacaggagaacgcaagaaagatctaaaatcaacaccctaacatcaaaatttaaagaactagagaagcaagagcaaagaaattcaaaagctagcaggcggcaagaaataattaagatcagagcagaactgaaggagacagagacacaaaaccccttcaaaaaaatcaatgaatccaggagacggttttttgaaaagattaacaaaatagatagactgctagccagaataataagaaaagagagaagaatcaaatagacaaaataaaaaatgataaaggcgtatcaccacttattcccagtgtttctgctttcatgtcctcctcattggagagatttggaaacccattatgtggat

SEQ ID NO: 889016 - DNA, 628 bp, Homo sapiens
cctcagtaaatgtgaaagaacagaaatcataataaacagtctctcagaccacagtgtaatcaaattagaactcaggattaagaaactcactcaaagttgcacaactccatggaaactgaacaacctgctcctgaacgactactggctacataatgacattaaggcagaaataaataagttctttgaaaccaatgagaacaaagacacaacataccagaatctgtgggacaaagctaaaacagtgtttagagggaaatttatagcactaaatgcccacaggagaaygcaagaaagatctaaaatcaacaccctaacatcaaaatttaaagaactagagaagcaagagcaaagaaattcaaaagctagcaggcggcaagaaataattaagatcagagcagaactgaaggagacagagacacaaaaccccttcaaaaaaatcaatgaatccaggagacggttttttgaaaagattaacaaaatagatagactgctagccagaataataagaaaagagagaagaatcaaatagacaaaataaaaaatgataaaggcgtatcaccacttattcccagtgtttctgctttcatgtcctcctcattggagagatttggaaacccattatgtggat

SEQ ID NO: 889017 - DNA, 632 bp, Homo sapiens
acatgtttgtggatgtatatagaatacatttctgctagctttcttgggcagattacttggacagtctagctgagcaagaaaatcttgagctcaggaatcagtttccatcccagttacagcacttactagcaatctttggcaattatttagtttctgtattagtctgctttcatgctgctgataaagacatacctgagactgggtagcttataaagaaaaagaggtttaatggactcacggttccatgtggctggggaggcctcccaatcatggcagaaggtgaacgggatgtcttacatggcagcagacaagacagaatgagaaccaaktgaacggataaaccccttataaaatcatcagatctcctgagacttatttgctaacatgaaaacagtatgggcgaaaccaccccatgattcaattgtcttccacagggtccctcccacaacacatgggaattatgggaactacaagataatatttaggtgaggacacaggcaaaccatatcattccaccctgacccctcccaaatctcatgtcttcacatttcaaaagcaatcatgccttcctgacagtctctaaaagtcttaactcattttagcattaactcaaaagtccatagtccaaagta

SEQ ID NO: 889018 - DNA, 568 bp, Homo sapiens
ttttccccattgtcttagtgatttacatttggctccttgttacttatgtaaatttctgcagctggcttcaatttctcctccgaaaatgaatttttcttttctattgcatcatcaggctacaaattgtccaaacttttatgctctgtttcccttttaaaaatgaatgcttttaacacacccaagtcacctcttgtatgcttcactggttagaaatttcttccaccagataccctaaatcatctccctcaagttcaaagtttctcaaatctctagggcaggggcaaaaatgctgccagtctctttgcatagcaagaatgacctttactcctgttccctaaaagctcctcatctccatctgagaycacctgtgcttggatttcattgtccatgtcactatcagcattttggtcaaagccattcacaagtctctaggaagttccaaactttcctacattttcctgtcttcctctgactcctccaaactgttccaacttctgcctgttacccagttccaaagttggctttcaaattttcaggtgtctttacagcagcaccccactctccatac

SEQ ID NO: 889019 - DNA, 650 bp, Homo sapiens
actgactcacagatttttaagcaaagccttttctttcttgttttttgtttgtttctttcttgtttttattggctttttttttttttttttttttttaagacagagtctccctctgtctttcaggctggagtgcaatggcctgatctcagctcgctgcaacctgcacttcccaggttcaagcgattctcttgcctcagcctcctgagtagctgggactacaggcatrtgccaccatgccaggctattttttgtatttttagtagagacagggtttcactatgttggccaggctggtctccaacttctgacgtcaagtgatccgcccacctcagcctcccaaagtgctaggattacaggcatgagccccatgcctggctgcaaacccttttcttatagctggaaaattatatactacatgactcttgatggaaggctgccacttaccaccgctggcagctggagtatagaccatgacctaggccaggtgtaccaggtgtatctactgggacataacaaatctcctgaaaatgtattggctttaaacaacaatctttatttgctcacataacttcataatctggagtctggtgcctttcaattatggaaaactatagtcactatttcttcctctctcttttctttttctgaaa

SEQ ID NO: 889020 - DNA, 652 bp, Homo sapiens
tttctcactttaaaggaggaattgtaccacctgataaaatgatagtgaagactagagaaaatcagtgtagcataaaacaaagtatagcccttagcacaaagtggtaaaccctcaattaatgatatctatcattattatatatctctatcgcaggctagaaaacgatgacatcaaaagatgactaagttgccttgtgagtctatctaggtgagtgtgtccttattctaggagcaagaaacctaggtttgatagtccccaagagtgacttctctgttttcagtattctttcccctggctctaatccaggggtacagattaatccactgctccttggtaaagtgacaytttctgtatttcgaatatttcagctttgggaatagaacagtaaagattttcaaaatcccaaagtagtgcctgagttttctgattttatttgaaatgaatggtctcccaagtcataaattctccatatcatcaactagttctactcgtgagtgctatgggagagatttgtattattgctgacactaaatctacaccaaacacctcttactcttgctatagaaattaccatgaatatggcacaatttagaagttccacttctaagtgttctatggcagggctaatgtccagagaatgaatagtgaggga

SEQ ID NO: 889021 - DNA, 652 bp, Homo sapiens
tttctcactttaaaggaggaattgtaccacctgataaaatgatagtgaagactagagaaaatcagtgtagcataaaacaaagtatagcccttagcacaaagtggtaaaccctcaattaatgatatctatcattattatatatctctatcgcaggctagaaaacgatgacatcaaaagatgactaagttgccttgtgagtctatctaggtgagtgtgtccttattctaggagcaagaaacctaggtttgatagtccccaagagtgacttctctgttttcagtattctttcccctggctctaatccaggggtacagattaatccactgctccttggtaaagtgacattttctgtatttcgaatatttcagctttgggaatagaacagtaaagattttcaaaatcccaaagtagtgcctgagttttctgattttatttgaaatgaatggtctcccaagtcataaattctccatatcatcaactagttctactcgtgagtgctatgggagagatttgtrttattgctgacactaaatctacaccaaacacctcttactcttgctatagaaattaccatgaatatggcacaatttagaagttccacttctaagtgttctatggcagggctaatgtccagagaatgaatagtgaggga

SEQ ID NO: 889022 - DNA, 627 bp, Homo sapiens
gtcttacataggttatctcatttaatactcacaataatcacataagataagaattgtttctctcagtttatgaaagactgagcttagtctagtgctcagaacctgaaaaaggtcaaaatagagaaattagctaataatgtgttcttttcataggtcagtctccattctcagttgattagctaaaccaatgtattgacgcatgtgttcattcattcatgcattcattcataaaatctttactgastgcctcccctgtgctgaacattgtattaggcactggggaaacagtcgtggcccagacagacactgtcactgccctcataaagattacataaagatgggggaggcaagtacccaccagcgttttagtagatcccaaagtaaaggtgggtcaacaggtaaacagatgaacaagctgtgatatattcatatattccaataaaattctactagaataaaatacacaacagaatactgtcaccatggagtactactcagcaataaaaataattgagctacaaatacagctaacagcatggatacatctcagaaagtgttatactaagaggccatatggtgtgtgatttcactaacataaaatacaagaaaaggtgaagctataataat

SEQ ID NO: 889023 - DNA, 562 bp, Homo sapiens
aatgtatgttctcaaaggatttgttttaactgggacatcaggctagaacacattccaaaagacattaatctgtgtgtgtgtgacagtcacagactgatatagctgaagggaccatagacatcatagaagacctttgctgacagattattcaggtggttttgtctttggaaagtcaatgagagtttagcttaagtaaagggagggataagtacccccttattccttatgggaattttcaggttattccttacttagcttctccctgcaccagagacagggcatgttacyggttgggaatctttgaagactgatgtaattctctctgtctcaatttcttcatctgtacaatgatgctaatagtagtactgatttccttttattgttatgaaaattaaattagttcatatctataagatgctctagaacagtgtctggcacataataaatgttatgtgactgtttgctgttattgtttctcttattgtagtaatgttttccacttttttgttttacatatttcagttctatttttttgtcagtcattgttgttagagattcattg

SEQ ID NO: 889024 - DNA, 643 bp, Homo sapiens
tgctggaataatattcttgatatattatgctaaatggctactagagaattacatatgtgccttgcgcatgtggctcatgttatacttccgtaggacagaactgattagctagtgacagaatattactaatactttttttaacctttaattttraaatgagtattgattcacaggcagttgtcaagaaatatacagggaggattcaagcatcttcacccagccttctccattgtcaacaacctgtgtaactatagtatgatatcaataccaaagaattgagaccggtacaagccaccaaacgcaagatgaggagggcttttaatagaagattgtatatcttcagtctattcctggctgaagagatacttcatcttctattcatttatttaataaattcattcatctaaaatatatttacattcctcatgtcaggcactgtttaaggctctgggaataatacagtgagtaaaaaagatctgatccctaccctcactgagcttttattctagtttggatggcagaggacaaacaaataaatttgtaatatggcaaagtaatgccataacatggcatgaaaaggagatagttatgggtaggaaatagaccttttctttttctttttcaacttttattttaggttcag

SEQ ID NO: 889025 - DNA, 660 bp, Homo sapiens
gggcttgttatagctagatttttttttaaattttgctaataagaatgagcctaatgctacaacagcaatgcctttgaaagcatgatttcagatgcagagcgcaaatgttcctcttcaaattttctttataattttmattttagatgtttccttccaactagcttcagagttagataaattatgagagaggccaatgctttttatcttcgtggcaattgtttgagtgacatcttgcagcttgttttcaaaagaccagtggcttcttcatgaactttcctcaatgaatccttcaatcattctagttgtcttccgtggcctgcaatacagagccttgaagatctggaaaattgatgttggttgtctatagattcaagggcctgtggctagattcacttactcataggtgtcaaagaggggcttatatttcacaagtagtgatactaaatggtcatggctaagctcttgattcaagcctcagctccaccctttcctaggtttgtgatcttgggcaagttagttaacctatctgaacctaacctcaatttcttatcgggacatagagatacaggtagtatttgcctcattggggtttatgagaagattaaatgagataagatatagaaagtatttaggccagtgggtagcacatagtgagctcta

SEQ ID NO: 889026 - DNA, 586 bp, Homo sapiens
tggaggtttcatacctccctgggatggagcacccagcaggagggtggaccaccatctttgctgtttgggacttagctgtctcaccctttgggctttggagaatccagggcatctggggactgaagcagatccccagaacagcacagctgctctatgaaaacatagccagacctgctggttcccaataccattccttctcactggatgggacctcccaatggggtctccagcaacctcctacaggtgtcttccagccagcaacaggtctgaacctctctgggagggagctcccaaggggagaggaaggctgccatctttgctgtttcacagccttcactgttgatacccctaggtaccagaaaagccaaggtgactagggattggtatggactgctggcatactgcagcacccctayggaaaagtggcctgttcctgtacctcctcaccaggcaggtcctctaggcatgggcctccagccaccccctgctggggctattgagccagtagcagctctgcaactccctgggcagagcccacaggggtaactgaaagctctctgccaccacctctgcagtggacgtgccc

SEQ ID NO: 889027 - DNA, 630 bp, Homo sapiens
ggtcaggggttcaagaccagcttggccaacatggcaaaaccccatctctacttaaaatacaaaaaaaaaaaaaattatctgggcatgatggtgcacacctgtagtcccagctactctggaggctgaggcaggagaatcgcttgaacttgggagttggaggttgcagtgagccgagatcgcaccactgcarttcagcctgggagacagagcaaaattctgtctcaaggaaaaaaaaaaaaaaagtgacaatttaagagccctttagagaaactcaaagacaacagggagacaaaaacaagcacatcagatgaaagtttaactttcaacacctactgctacagcaaacacagccaaagtccttgccagaaaaacataaaacctcataccaaaggcctgtttatagcagtttcttttaccaaggatatcatgtccagctttcaacaaaaaaatcacaaggcatatgaaaagacaaataaagtgacagatctgtggtattattgaatagactattaaaagcataaattaatcttcccagacactagcctttgtttgctctctaagcctgccccactcgataggagctaaaggctgcttttctaggaccatcaaccaggagctagggcacgtgga

SEQ ID NO: 889028 - DNA, 596 bp, Homo sapiens
ttgatagaggaagagacactgggtcccactcaaaaataaagtatctcaactttttcactgaatttacattcccaaagaatagattgtaaaataagtaagaatcccagacttttcggtacttgaaggtcactatgaggtcacctggmatagtgatctactgcaagaacagcctgactggtcttcactgatgctacattctattttgtactctgtctcaagctagctgaacttgagagacttctaagtctatccaaggacatttgaaacatttgtgataaatgcagagtatttatctctgttaacaatgaagaaaagtcaccttccagaagaattgctgtgaaagcccacatcgtgtgcactattttttaaaaagtaacatagaaaagctgtttaacataccaggaaagtcaaggagaactttaaaaaaattataaccataatacctaatttcatcaaaatgatgtaagcaacaaagatctaatttatattgagataaactatataggctcagactattcaggcaaggaaccagtaaatgcttatttcatactgaaatttacaggacatgaatgacttagcaatatatattgaccctg

SEQ ID NO: 889029 - DNA, 596 bp, Homo sapiens
ttgatagaggaagagacactgggtcccactcaaaaataaagtatctcaactttttcactgaatttacattcccaaagaatagattgtaaaataagtaagaatcccagacttttcggtacttgaaggtcactatgaggtcacctggcatagtgatctaytgcaagaacagcctgactggtcttcactgatgctacattctattttgtactctgtctcaagctagctgaacttgagagacttctaagtctatccaaggacatttgaaacatttgtgataaatgcagagtatttatctctgttaacaatgaagaaaagtcaccttccagaagaattgctgtgaaagcccacatcgtgtgcactattttttaaaaagtaacatagaaaagctgtttaacataccaggaaagtcaaggagaactttaaaaaaattataaccataatacctaatttcatcaaaatgatgtaagcaacaaagatctaatttatattgagataaactatataggctcagactattcaggcaaggaaccagtaaatgcttatttcatactgaaatttacaggacatgaatgacttagcaatatatattgaccctg

SEQ ID NO: 889030 - DNA, 604 bp, Homo sapiens
atgaacatatgtagggcaggattgatgcccctgcccccatgagactcttttttaaaattattttgcaatctgaatctctgaccagagaccaattttggggcaactttttagactactggttgggatttgttttagtcttctttcatgaagcagagtttactttttcagtcacagttttatacagcgtctcaatttcaactttttattttgcctcttgtaaaaaaaggtatttttctcccctgaaaagatagtaaagccatattcttaatcacaaagaataaaagtttggattaaatattactactgtcctctttggtgttccygataaaatttgtcattgttctttgtgtctggaatttaagaatctccttttaattttagctttttttcttagggtgtatgtggttttaactgccaatatgacagaactaaaaaaaatcatacatcagggcaaacattaaatggggcactatgtcaggtaagtaaggatggattggtggtgtagggcaaatctaaactcagcaagtaggtaaaaatagatgatatggtttgaatttgtgtccccaccaaatctcatgtcgaactgtaatccccagtattggaa

SEQ ID NO: 889031 - DNA, 655 bp, Homo sapiens
gctcttgtgttttatcaaagcttatatttttttaagttgttatactggtatacctgaaggggcaggaagagaagatgcatgtccttgagggccagaaaggagaaggaaggagcatattcctcaaaactagaaaagaggaacaaaatgattaggtctttctattaatggagacatatgtcctgttgggtggcagatcttctgtgaggtagcggaacctsaaaggtgatgaccacatgggggcaccaaaagaggctgaaccttggaccctgcaactccaagccccatcaaagtgtgcctgtgccctaattgtgacacagaaacagcttagccatgggaacttgaagggactttgtgggctgcacacaaagggctgcagagctaaccagtatagatcagcaccttgagggcctctttgatgcactaagatcccgtaggggagccccaataatcacgactgggaatacatttcctgtggcccaatgtgatggtggctttaatgccatacatacattcactttaaaattaaaaaaatgtaaaagtgatcctttttctctgcaactttgccagcatctgttgtttctggactttttaataatcgccattctgactgacatgagatagtatctcattgtggttttgatttgcatttctaatg

SEQ ID NO: 889032 - DNA, 562 bp, Homo sapiens
ctagatttcagtgcttatacaaatctatctatctatctatatatatatatatatatatatatatatatatatatatatatatatatatatattcatattcaattttgagaggtatatgggagattatggtcaagtagccctttgacccagaggtaaaacaatatagtttcaaataaccaaatacamccttatttgtctttccttatttggattttccatgtatttagaataacctagcagattaatattctttgtccctttaccctatttggagtctatgtcaaaatatgtaatttgacagctacttggagaagttccctgacttacagaccatgttagttctttggctcatgggactaaagattcttggagctggaaagcactgtagaggttactcagtctttccagttacagatgagggaaccaaagatcagacaagtaacttttttgtggttccagagaaaacaaaagaacctgggtaagaatacagagctctcccaagtccagtggattcttactcttttagcgtttaatacttgatatgcactagaaaaaatatata

SEQ ID NO: 889033 - DNA, 595 bp, Homo sapiens
aggggataaagacaactaagtaaatcaactgtagctacaagcaaataaatgtcaaactattgatttttctctctctctcttctttgcagttttaaaatgcttatttacagaacaagacttagaatgacagcatgaggaactgcatgaacgctcttccaatcaaatcaactatcaccaatgaaaacatgttttttaactatttcgaatctctggaaattgttctcagatcaacaccaagtgaaaatacacatttattcaataaaatctaccaaatcttaagtagaaacagcagattcctgtggttcctgagacttgcccacctcttgcctcattcatcttccaacttagcataatggaaattccaccacaagtcggcgtggccaaggagatggggctccctctyctgcaggctccaagttgagggctgcggtatcctccttggacagggagtctgacagcatcactcatcccccgccagctctgtgctgtagaggctaaatttcaagcaagcatgactgagagggttggggcttccctcttactcctagaccagagtgtgaaggttctgccaagagcatgacaggccaagaatatt

SEQ ID NO: 889034 - DNA, 595 bp, Homo sapiens
aggggataaagacaactaagtaaatcaactgtagctacaagcaaataaatgtcaaactattgatttttctctctctctcttctttgcagttttaaaatgcttatttacagaacaagacttagaatgacagcatgaggaactgcatgaacgctcttccaatcaaatcaactatcaccaatgaaaacatgttttttaactatttcgaatctctggaaattgttctcagatcaacaccaagtgaaaatacacatttattcaataaaatctaccaaatcttaagtagaaacagcagattcctgtggttcctgagacttgcccacctcttgcctcattcatcttccaacttagcataatggaaattccaccacaagtcggcgtggccaaggagatggggctccctctcctgcaggctccaagttgagggctgcggtmtcctccttggacagggagtctgacagcatcactcatcccccgccagctctgtgctgtagaggctaaatttcaagcaagcatgactgagagggttggggcttccctcttactcctagaccagagtgtgaaggttctgccaagagcatgacaggccaagaatatt

SEQ ID NO: 889035 - DNA, 613 bp, Homo sapiens
ctgagatttcagtacatctgtcactcaaacagtgaacacggtacctaatgtgtagttttttatccctagctcccccctaccctcccccttcttagtctctgaagtccattatatcactctgtatgcttttacgtactcatagcttagctcccacttataagtgagaacatatgggtttttggttttccactcctgtgttacttcacttacaataatggcctccagctccatccaagttgctgcaaaagacaataytttgttccttttaatggttgaatagttttccatggtgtatacataccactttttctctatccactcattacttgatgggcacttaggtggttccacatctttgcaattgtgaattgtgctgtgctgttcatgctcattcttatgtgcttataaaaatattaaacttccattgtccaagatcttttgaaagtagaaagataaatttctaatctgtccaacccaccttcctatgcaaaatgtagatgatgcaattgctattgttaatccttctttcagtaatctaggaagaatatactcagtgttaaaataaattctcagccaagatttaaccctatcaaagattttgaaaatgggaaat

SEQ ID NO: 889036 - DNA, 572 bp, Homo sapiens
ctgataagcaacttcagcaaagtttcaggatacaaaatcaatgtgcaaaaatcactagcatccttatacaccaataacagacaaacagagagccaaatcatgagtgaactcccattcacaattgcttcaaagagaataaaatacctaggaatccaacttacaagggatgtgaaggacctcttcaaggagaactacaaaccactgctcagtgaaataaaagaggatgcaaacaaatagaagracattccatgctcatggataggaagaatcaatattgtgaaaatggccatactgcccaaggtaatttgtagattcggtgctatccccatcaagctaccaatgactttcttcacagaattggaaaaaactactttaaagttcatatggaaccaaaaaagagcctgcatcgccaagtcaatcctaagccaaaagaacaaagctggaggcatcacgctacctgacttcaagctatactacaaggctacagtaaccaaaaaagcatggtactggtaccaaaacagagatatagaccaacggaacagaacagagccctcagaaataataccacacgt

SEQ ID NO: 889037 - DNA, 675 bp, Homo sapiens
gtaatgcaatttaaaattggttccaactgatatagtcaagcaatgtttccatttcctctagcagaacagtcagaaaaatacagttaaaaattataatttttagcactgcacagaaatggttattttgatattatttgctctctatttattacccaaccaagcatcagacccagtaaccttttcttagctttagcgaaagctccaagtagtcatcagcagtgatgggttctccatctacttccagttccagggtgaaatctctgagagtccacacaaatgctggaaaaaagctcacaaagtcagctgagtcgtctacagaattgttaccaggtgaggagtttgccttgattcgatctgtcagctctgtcacatagctgagatgctaaattaagaaaactacagaaaatgccactctttatactacattttatcctaatgcttacctaaaataatttggtttcyttttattagctcattcattcattcacaaacatttatttacagaattcattcactcacaaacatttattgagcacctactatgaaccaagcactgccctagggactaagaacgctgtaatgaatgagacaatgctaccactatagagcttacattctaatgatggagacaaacaatgaacaggtaaacaaaaataaattatcaggtattgataa

SEQ ID NO: 889038 - DNA, 675 bp, Homo sapiens
gtaatgcaatttaaaattggttccaactgatatagtcaagcaatgtttccatttcctctagcagaacagtcagaaaaatacagttaaaaattataatttttagcactgcacagaaatggttattttgatattatttgctctctatttattacccaaccaagcatcagacccagtaaccttttcttagctttagcgaaagctccaagtagtcatcagcagtgatgggttctccatctacttccagttccagggtgaaatctctgagagtccacacaaatgctggaaaaaagctcacaaagtcagctgagtcgtctacagaattgttaccaggtgaggagtttgccttgattcgatctgtcagctctgtcacatagctgagatgctaaattaagaaaactacagaaaatgccactctttatactacattttatcctaatgcttacctaaaataatttggtttctttttattagctcattcattcattcacaarcatttatttacagaattcattcactcacaaacatttattgagcacctactatgaaccaagcactgccctagggactaagaacgctgtaatgaatgagacaatgctaccactatagagcttacattctaatgatggagacaaacaatgaacaggtaaacaaaaataaattatcaggtattgataa

SEQ ID NO: 889039 - DNA, 679 bp, Homo sapiens
ttgttccttttgctcaggattgctttggctattcgggatattttgtgattccatacaaattttatgattttttttctagttctgtaggaatgtcattggtattttggtagagatagcactgaatctgtagattgccttgggtagtattgtcattctcctatccataagcatgagatatctctctatttgtatcctyttcaattttgttatcaatattttgtagttttccctgtagagatcttttacttccttggctaaatttgttcctaggcactgtttttttgtatctattgtaaatgggattgctttcttgatttctttttcagctagttcattgttcatgtgccttaatccatttgtgttgctataaaggaatacctgaggttgggtaatttatgaagaaattaggtttatttggctcacagttctgcaggctgtaacagaagcatggcactagcatatgcttctggtgagggcctcaaagcttccactcatggaagaaggcaagacggagctgcctcacatggtgaggtgaagggagagagaaagatggaagaaaggtgccaggcttttaaaatataatcagttcttgctcattaccatgaagatggcaccaagacattcattagggatctgctcccatgctccaaatacctgccattaggccccacctccaaca

SEQ ID NO: 889040 - DNA, 660 bp, Homo sapiens
aattcttccttttgcttgctgaaacctgctattgaaaacttctagtatgttttttgttttaattattgcacttttcagctccagaatttctttttggttcctttttataatttctgtctctattgatttctctttcatgtattgttctcctagtttcctttagctctttgtctrttaattcctttagctctttgagcatatttaacacagttgctttaaagtctttgtctaatacgttcaatgtctttgcctcagggaaagttgctgctcatttcttctgtaagtgggccatacttgtttccttaaatgtctcataatttttagttaaaactggacaatttgaatactgtaatctggtaattatggaaatcacaatctagttctccttagaatttgtttttattgcttgttgtaggctttatctatttgttcagtgatttttctaaactatttttgtaaagtttgtattctttgtcatgcatggtctctgaagtctttgttccttgcttgcattgagctagtgttttgatgaagatttccttgaatgccaggagccaaaaggcatgaagggaggggcaagagagaaggagagaaagggcatgagggagagacagggagcgggagagaagagaaaagcaaagaaataaaaaataaaaaata

SEQ ID NO: 889041 - DNA, 668 bp, Homo sapiens
gtggccccagcagcatgaccttctctgcacatagcccctccagtgtgaccctattaaacttccctgaagctcttgcctctttgccaacagccccttctctgctgcgctgcccattgcttccttgcaatgtactttccctctaataaactttytttctttaactcactactattttggtaaattctgttaccacccttgacgccagccccagtcagttggcacccagaacagtttctagcttctgagggagatgggagaaagagtgatgaatgatagaagggcatcacttattgaacatgtgccatggccccagctgtgcccaggatccagtgtctgtgactggtcagtccttgcaacaagccttgaagtgagtcctattatacagatgaaaattatttatagatgaggaaatggacgctaatgtggctaagtatgacttgcaacattggcttagatcaccccaccaatgtggctcatgtgagaagagagaggtggggggctgtcttgggagtcattttaaatgcaaaataaatgatgatggtgagtttgaaaaacctcaatgtgtctctaagtccagagcttaagaaaagccccaaaaagtgcaaaatagcctttttactgtaagccaaaaagtatctgagacaggtctaaatcaattgagaaattta

SEQ ID NO: 889042 - DNA, 668 bp, Homo sapiens
gtggccccagcagcatgaccttctctgcacatagcccctccagtgtgaccctattaaacttccctgaagctcttgcctctttgccaacagccccttctctgctgcgctgcccattgcttccttgcaatgtactttccctctaataaactttttttctttaactcactactattttggtaaattctgktaccacccttgacgccagccccagtcagttggcacccagaacagtttctagcttctgagggagatgggagaaagagtgatgaatgatagaagggcatcacttattgaacatgtgccatggccccagctgtgcccaggatccagtgtctgtgactggtcagtccttgcaacaagccttgaagtgagtcctattatacagatgaaaattatttatagatgaggaaatggacgctaatgtggctaagtatgacttgcaacattggcttagatcaccccaccaatgtggctcatgtgagaagagagaggtggggggctgtcttgggagtcattttaaatgcaaaataaatgatgatggtgagtttgaaaaacctcaatgtgtctctaagtccagagcttaagaaaagccccaaaaagtgcaaaatagcctttttactgtaagccaaaaagtatctgagacaggtctaaatcaattgagaaattta

SEQ ID NO: 889043 - DNA, 668 bp, Homo sapiens
gtggccccagcagcatgaccttctctgcacatagcccctccagtgtgaccctattaaacttccctgaagctcttgcctctttgccaacagccccttctctgctgcgctgcccattgcttccttgcaatgtactttccctctaataaactttttttctttaactcactactattttggtaaattctgttaccacccttgacgccagccccagtcagttggcacccasaacagtttctagcttctgagggagatgggagaaagagtgatgaatgatagaagggcatcacttattgaacatgtgccatggccccagctgtgcccaggatccagtgtctgtgactggtcagtccttgcaacaagccttgaagtgagtcctattatacagatgaaaattatttatagatgaggaaatggacgctaatgtggctaagtatgacttgcaacattggcttagatcaccccaccaatgtggctcatgtgagaagagagaggtggggggctgtcttgggagtcattttaaatgcaaaataaatgatgatggtgagtttgaaaaacctcaatgtgtctctaagtccagagcttaagaaaagccccaaaaagtgcaaaatagcctttttactgtaagccaaaaagtatctgagacaggtctaaatcaattgagaaattta

SEQ ID NO: 889044 - DNA, 666 bp, Homo sapiens
tgcttgaggaaggtttgctgaggcttgaccggcagtgcagagccagacaggtgatgatgaggggatggggaggggagtgtgggcaatctaggttgggacagtgtgactttctctactactatgccctccttaccttctgcttccaaggggaagctggataggrcctcctatttgaaaggagtgagaaaaacagaaggaggaaaatggaaggaggaaaaccagaagtagtcagtcattagtcaacagagagaccaggagaaccaggattgaaagaatggcctgggacatttccccagactgcttcatgagcacctctgaaaaatagcaagatgcccagccactggccctttgcaggtaatgagtgcaatttggggcttcaactctaaagaagatcttctgggtggcaccactgttgttattttgctttttttaaaaaaaattaaaaaaaatttttttagagacacagttttactctgtcacccaggctggaggcagtgggatgatcatagctcactgcagcctcaacctcctgggctcaagtgatccttctgcctcagcctcccaagtagatgggactacaggagcatgccaccatgcccagttagttattattattattagtagtatttgtagagatggggtgtaactatattgcccaggctagtc

SEQ ID NO: 889045 - DNA, 666 bp, Homo sapiens
tgcttgaggaaggtttgctgaggcttgaccggcagtgcagagccagacaggtgatgatgaggggatggggaggggagtgtgggcaatctaggttgggacagtgtgactttctctactactatgccctccttaccttctgcttccaaggggaagctggatagggcctcctatttgaaaggagtgagaaaaacagaaggaggaaaatggaaggaggaaaaccagaagtagtcagtcattagtcaacagagrgaccaggagaaccaggattgaaagaatggcctgggacatttccccagactgcttcatgagcacctctgaaaaatagcaagatgcccagccactggccctttgcaggtaatgagtgcaatttggggcttcaactctaaagaagatcttctgggtggcaccactgttgttattttgctttttttaaaaaaaattaaaaaaaatttttttagagacacagttttactctgtcacccaggctggaggcagtgggatgatcatagctcactgcagcctcaacctcctgggctcaagtgatccttctgcctcagcctcccaagtagatgggactacaggagcatgccaccatgcccagttagttattattattattagtagtatttgtagagatggggtgtaactatattgcccaggctagtc

SEQ ID NO: 889046 - DNA, 666 bp, Homo sapiens
tgcttgaggaaggtttgctgaggcttgaccggcagtgcagagccagacaggtgatgatgaggggatggggaggggagtgtgggcaatctaggttgggacagtgtgactttctctactactatgccctccttaccttctgcttccaaggggaagctggatagggcctcctatttgaaaggagtgagaaaaacagaaggaggaaaatggaaggaggaaaaccagaagtagtcagtcattagtcaacagagagaccaggagaaccaggattgaaagaatggcctgggacatttccccagactgcttcatgagcacctctgaaaaatagcaagatgcccagccactggccctttgcaggtaatgagtgcaatttggggcttcawctctaaagaagatcttctgggtggcaccactgttgttattttgctttttttaaaaaaaattaaaaaaaatttttttagagacacagttttactctgtcacccaggctggaggcagtgggatgatcatagctcactgcagcctcaacctcctgggctcaagtgatccttctgcctcagcctcccaagtagatgggactacaggagcatgccaccatgcccagttagttattattattattagtagtatttgtagagatggggtgtaactatattgcccaggctagtc

SEQ ID NO: 889047 - DNA, 593 bp, Homo sapiens
ccctccctctcacccagggtcaggcacagggctctggatatcatcagtctgcaatgatccataggccatggcttgatcaagtggtgtaagcagatgtcacctcataatgttttgaaattggctaagaattaattctgggcactgtctgagtgaagacagccccagtgttgaggaaataaggatcaaatttgataaaggaagaaacaaggtgcccacacttaccccactcccagaaggagacttacctctgggttcagctcccatttcttggccagttctccccattctattccatgtgataactttatttctaggtyccctggaccttcttccccttcccctcaaccctctctaaccaggaagaaggtgaaaaaggtgcctagatattagtaacactggtgtcagtggttacttaatgtcttttccttccagaggcctgtgtagggcaataccttaacccagaaggataggcatgggggagtcttcagccctgtctagagtccgggctctggaaaatcatgcaagagctctgtcttcacagcccttcctattaaatgcaatcctcatggcctatatcactgttttaattttac

SEQ ID NO: 889048 - DNA, 658 bp, Homo sapiens
gacactgtatgttcattcttggctttccaaccccattctttcacccacagtagccaactcgctgtccccaatgtgctgtgaactttcacacctccaggcctttcattcattcgttcaacatacatttagtgagttccttctatgtgccagactactctagctccaagacacagggatgagcatatgaccccaacctggccaagcagagcatttcattctcctggccacagaaatgcattacagatggtgggaaacacaaagcatgccattgaaactcaaatctgagacttgggtggggactctctggaaagccacacgtactttcctttggagttgtttaatagtaggtgtcagcaggrgccactgggggccacccacgaacgggaagaatcaagtcaccaccaaggaaagcagatctcagaggcagagggctggagattcctggtgacatcattgagtacctagatccagccaattctgaactacctctgaaattttcagtaaatgagctcatcagttcccttctctgcttaagccagtttaagctggacttctgcaatatacaagcagtgttctcaccaatacgaaggtaacacatgccttcatggaggtgaaaactgatcctttgccctctgagatgctctaaacctgggtctat

SEQ ID NO: 889049 - DNA, 644 bp, Homo sapiens
aatctccctgttctggtcctagcaggaagtgcctaattgatgtggagcctctcctttttgtatctgatttaagttgcctctgtagcaccatggtttttcttttttatccagttctcagtggtctactcttattaattattatgaaaatrcttctaccagttgaagcactatgtcttctacaaggccaactctaaaaactccatgtgtccatgatcctctttcccattaaccctttataactgtttaacacttttttggccctttttggatttttttccacatttgccacttgtttgctgggactacctgagatttcccaaaaggatatctctaatgaaggccaaaattgaggttcaggaggatagaggatggttcatacttcttaaacgccccttattgtacaacaatattgggtcatgtattaggtatttagcagttctgcctaagatgatctgcaacggaccctctagatgaggggtcagtaagctacagcctgcagcttactgcagggtaatattcatcccaccatttgctgtgttttttttaaaaatagtttattggaccacagcaacacccattttaaagcattggctatggatgcttctgtgttataatgacagagttgagtatttgcaatgacagtg

SEQ ID NO: 889050 - DNA, 644 bp, Homo sapiens
aatctccctgttctggtcctagcaggaagtgcctaattgatgtggagcctctcctttttgtatctgatttaagttgcctctgtagcaccatggtttttcttttttatccagttctcagtggtctactcttattaattattatgaaaatacttctaccagttgaagcactatgtcttctacaaggccaactctaaaaactccatgtgtccatgatcctctttcccattaaccctttataactgtttaacacttttttggccctttttggatttttttccacatttgccacttgtttgctgggactacctgagatttcccaaaaggatatctctaatgaaggccaaaattgaggttcaggaggatagaggatggttcatacttcttaaacgccccttattgtacaacaatattgggtcatgtattaggtatttagcagttctgcctaagatgatctgcaayggaccctctagatgaggggtcagtaagctacagcctgcagcttactgcagggtaatattcatcccaccatttgctgtgttttttttaaaaatagtttattggaccacagcaacacccattttaaagcattggctatggatgcttctgtgttataatgacagagttgagtatttgcaatgacagtg

SEQ ID NO: 889051 - DNA, 691 bp, Homo sapiens
gtctactcttattaattattatgaaaatacttctaccagttgaagcactatgtcttctacaaggccaactctaaaaactccatgtgtccatgatcctctttcccattaaccctttataactgtttaacacttttttggccctttttggatttttttccacatttgccacttgtttgctgggactacctgagatttcccaaaaggatatctctaatgaaggccaaaattgaggttcaggaggatagaggatggttcatacttcttaaacgccccttattgtacaacaatattgggtcatgtattaggtatttagcagttctgcctaagatgatctgcaacggaccctctagatgaggggtcagtaagctacagcctgcagcttactgcagggtaatattcatcccaccatttgctgtgttttttttaaaaatastttattggaccacagcaacacccattttaaagcattggctatggatgcttctgtgttataatgacagagttgagtatttgcaatgacagtgtatgccctgcaaagcctaaaatacttactatctggcctttacagaaatattttgctgaccccctactctagatcttcttctgttgatgtgtttcaaggtccttcctcagctccaagaagacactgaggaattaactccctgaattccactaggtaagctccacagtt

SEQ ID NO: 889052 - DNA, 646 bp, Homo sapiens
caaaacttcattttaacaaggagagagctgagactcagggaagggaagtgtcttgtctctgggagttcatggcataacaggtattagaatccatatctacacatttccatgtaactggctcatcttctaccaataatttcctctggtacaggggcagcatctcagaggacccttcaagaggaaagaggatgatgggrccataaaagttccaattttatgtttggtttattttgaagaaaagattttgctccttaaaaagatatgaaagtcactgcagcaaaacatgctaactcttgatttggggaaattgaaaaccttaaaaaaaccctgaaaagtcattttataattggtttccatttactgcatgtctactgtattccaggaacttgacactcagtggcccatttaatcttaagaacattcctatgagtcacatgttatgaatctattttgaaaggaaagactaagtaccatacagttaaaaaacctactccaaggatacacagcaagtaagtggaggaactggaatccaaacttacatctttctttttgtaaaatttctttcatcattactcttagctttttcatgtcattctatctccttccttgatggccagctaccaagtgaaattccagcttttgtaaa

SEQ ID NO: 889053 - DNA, 584 bp, Homo sapiens
gatcaaattactctgagctaaaggaggaagttcgaacccattaagaagaagtcaaaaaccttgaaaaaagattagatgaatggctaactagaataaccaatgcagagaagtccttaaaggacctgacggagctgaaaaccatggcacaagaactacatgacgaatgcacaagcttcaggagccgattcaatcaactggaagaaagggtatcagtgattgaagatcaaatgaatgaaatgaagtgagaagagaagtttagagaaaaaagaataagaagaaataaataaagcctccaagaaatatgggactatgtgaaaagaccaaatcaatgtctgactggtgtagctgaaagtgactgggagaatggaaccaagttggaaaacactctgcaagatattatccaggagaacttccccaatctagcaaggcaggccaacwttcaaattcaagaaatacagagaacgccgcaaagatactccttgagaagagcaactccaagacacataattgtcagattcaccaacgttgaaatgaaggaaaaaatgttaagggcagccagagagaaaggtcgggttacccacaaa

SEQ ID NO: 889054 - DNA, 617 bp, Homo sapiens
ccctactcattctgcattaatcctccctactcattctgcattaattcaccctgttttattttcttcattgctctcttggctatctaaaattatcttgtttatttgtgtacttcctctcaccaaaacagagaccttgtctctcaagtttatggttgcaatctcaatgtctaaaacaattcctagccctcaagttctctacatgagtttgttaaataaatgaattagtgattgartgactaatttatttgaatattgcttcagtcagattcatactcttggaggccaaagatcatacaattattatatccttagcacattatatcataaaagatggtgtttcattctagaaatatgcaaactataattgaattagcttaaacactaaggcattcttatgagatgacagatattgataatactgatctttacaggttttgaacatttcaggtgatggttacggttccaacttgccgaaatggataattatttttgccttcagactacaataaacatttgcaaatatccagtttatttatactactatacattcatccataggtaaaacctacaaattcactcaattggtaagaaaaaagattgcaaacctagcatcttca

SEQ ID NO: 889055 - DNA, 587 bp, Homo sapiens
acaatggggtgttacaatctcccactattattgtgtgggagtctaaatctctttgtaggtctcttagaacttgctttatgaatctgggtgctcctctattgggtgcatatatacttaggatagttagctcttcttgttgcattcatccctttaccattatgtaatgcccttctttgtcttttttttkatcttcattggtttaaagtctgttttatcagagactaggattgtaaccctgctttttttgctttccgtttgcttggtaaatattcctccatccctttattttgagcctatgtgtgtctttgcaggtgagatgggtctcctgaatacagcacaccgatgggtcttgactctttatccagttttccaggctgtgtcttttaattgggggcatttatcccatttatgtttaaggttaatattgttatgtgtgaatttgattctgtcattatgatgctagctagttattttgcccgttaattgatgcagtttcttcatactgtcgatggtctttacaatttggtatgtttttgcagtggctggtaccagtttttcctttccatatttaatgcttccctcaggag

SEQ ID NO: 889056 - DNA, 589 bp, Homo sapiens
gatagtgaggaatctctgcctcatcacaaagcacgctagcgagaagtttgtgaatacctgctcacagcagcaggaaagaggcctgaagcaaattccaccaaaagtgtctgctatgcaagctgttaccagaagtgcattgtccacagatattgtgtattgtcaccagaaatgtattgtccatgttaacatgaacatcacagattgggttcaggaataaattcgcctttcgcaacaagctggataccttttgtggcagtccccttaggctgccctggaattcttctagggccacaaatatgagctggtggatgtatggygtctgcgagttatcctctatatactggtaaatggatccttatttttcgatggacagaacttcaaggagctataggagcaggtactgagcaggatgtattccattccctcccccatgtccccggagagtgaaaacttgctgaagaaatttctcattgtcaattgcaggaagagaggcccttcagagcacactgtgaggggtccatggatgaatgcgagtcatgaaggtgaggaacttaagcgctgtgtgcagccactctcccactgggaggac

SEQ ID NO: 889057 - DNA, 629 bp, Homo sapiens
ctctgttgagcaagtctattagcaccatttttcaagcagcgtgtgattacttcatatctctgtgtcacattttggtaattctcataatagttcaaacttttccttattattatatctattatgatgatctgtgatcagtgacctttttatttatttatttttatttatgtatttattttgatacagtgagatacggagtttgatacagaggttgctcactacaacctcaaattcctgggctcaagtgatcctcccacctcagtctcctgagtggctagaactacaggcacaaaccaccaggcccaggtaaaaaaaaaaaaaaaaaattatagagatggggttgctcaggctggtctcaaactcctggaatatctttgatattactattgtaatattttgggggaacagccatgcctatataatatggaaaactttttttgtgtgtatgcgatagagtcttgctctgtctcctggrctggagcacagtggcatgatcacaggtcattgcagcctcaacatcctggactcaaatgatccttgcttaattgataactgttgtgtgtgttctgactgtttcaccaaccagccattccactgcctctgtcctcttcttgggcctcccttttttc

SEQ ID NO: 889058 - DNA, 629 bp, Homo sapiens
ctctgttgagcaagtctattagcaccatttttcaagcagcgtgtgattacttcatatctctgtgtcacattttggtaattctcataatagttcaaacttttccttattattatatctattatgatgatctgtgatcagtgacctttttatttatttatttttatttatgtatttattttgatacagtgagatacggagtttgatacagaggttgctcactacaacctcaaattcctgggctcaagtgatcctcccacctcagtctcctgagtggctagaactacaggcacaaaccaccaggcccaggtaaaaaaaaaaaaaaaaaattatagagatggggttgctcaggctggtctcaaactcctggaatatctttgatattactattgtaatattttgggggaacagccatgcctatataatatggaaaactttttttgtgtgtatgcgatagagtcttgctctgtctcctgggctggagcacagtgkcatgatcacaggtcattgcagcctcaacatcctggactcaaatgatccttgcttaattgataactgttgtgtgtgttctgactgtttcaccaaccagccattccactgcctctgtcctcttcttgggcctcccttttttc

SEQ ID NO: 889059 - DNA, 617 bp, Homo sapiens
ttacaaaaagactccaagaaaacctctcaagaactagttctagagatagctgacacttaatattcacgaaatcaaggtaatacaaagaaaagatttaacaaaaattgtgtatttgggacgtcatgtgcaggtaaaatgagttaatttgcgtttgcagtatgccatttacattatgatgatgctaagactctcaaaatattttggtttctgaggaaagaagtgatatatacaaacatacgtggaggactataatgaaggatttaatggtccggtgatctctaccttctctgtaggtggagtaaaagcaattggcttcatacaagcaaacaaaaatgatgtgggtgacatgtaaaaaattatccaattgttaaatatgaaatcgtgtattgggttgtctaattttcyttattgcagatttcagagcagccaagttttcatcttagtttaggtagagctctttgtttagatgcagagctgggaagttaatcctctaatgtagaggtcagcaaactttccgtaaagggccagataatccatgtgttcagtttccagggccatgtaacctctgttgcagtactcatctctgctatggcaggatgaaaacagccataagcaat

SEQ ID NO: 889060 - DNA, 693 bp, Homo sapiens
agggtcttccctcaaaagtgtggaataggtaacccagcagttaaacacttttaaatattcagtttttcaaaaacgtaagtagagatgtgaaagatataaaaaagatctaaatcagacttttagatcaaaactacaatgtggaagatgaaaactgcactgacttggactgatgtaagttttgatatcatggcagaaaagatgaataaagttgaaggcatggtactgtaatagactattcaattgaaatgcagagaaaaagaaatgtaaaaacatgaacatcagtgagctgtgggacaacttcaagtatactaatgtacctgttattgcccctaaggtgggtgaggagaaaaattctaaaaaaaaaaaatggctgaaaatttgtcatatatgatgaaaactgtagatccatggaaccaggaaattcaaactccgtacagtggaataaagagcactggaaatggtaactacatcagttaatgcataagatgttttccttatttatctctcttgtagatataattgactattaaaacaaaaaytgtattatggggcttataacctatataagtaaaaatgtaaaaaatagcataaaaacaaggatgggagaaattgaagtacattactggaaatttgttatactgtatatcatagtatagatgaaggtgtgttgtggtaagttaaaaacgtagtcta

SEQ ID NO: 889061 - DNA, 580 bp, Homo sapiens
atgtacaagaaaaaaacaaacaaccccatcaaaaagtgggcgaaggatatgaacagacacttctcaaaagaagatatttatgcagccaacagacacatgaaaaaatgctcaccatcactggccatcagagaaatgcaaatcaaaaccacaatgagataccatctcacaccagttagaatggtgatcattaaaaagtcaggaaacaacaggtgctggaaaggatatggagaaataggaacacttttatactattggtgggactgtaaactagttcaaccattgtggaagacagtgtggcgattcctcaaggatctagaactagaaataccatttgacccagcaatcccatattactgggtatatacccaaaggaatataaatcatgcwgctataaagacacatgcacacgtatatttattgtggcactattcacaatagcaaagacttggaaccgacccaaatatctatcaatgatagactgggattaagaaaatgtggcacatatacaccatggaatactatgcagccataaaaaaggatgagttcatgtccttcacaggggcatggatgaagctggaaa

SEQ ID NO: 889062 - DNA, 640 bp, Homo sapiens
taatgctgaaatgaattgagactttggggaacagttgggaaggcatgatttgttttgaaatgtgaggacatgagatttgggaggggctggggtggaatgatatggtttggctatgtccccacccaaatctcatcttgaattgttcctatcctaatccccatatatcatgggagggaactggtrggaagtaattgaatcatgggggtgagtttttcccatgctgttatcttgaaagtgaataagtctcacgagatctgatggttttataaagggcagttctcctgcacacgttctcctgcttgctgctatgtgagatgtgcctttgcttctcttttgccttccgccatgattgtgaggcctccccagccatgtggaactgtgagtcaattaagactctttcctttgtaaattacccagtcttgggtatgttcttataacagcatgagagtggactaatacagccatcgaagctgcttatggtacacctggttcagctgcagtctcacagggagccagtgcccttgccagtgcctagagctgtcctcccttctgcagctggtgtgccttgctgcacacagtgtgtggaccccacactcactcacacacccccactgctccacacttggcttgcccttggcag

SEQ ID NO: 889063 - DNA, 646 bp, Homo sapiens
ctttccttttatcagaggcatttaaaccagagtggctccattttgtgtagagtctgagtaaaatgaagctgagatctactgggctgcattcccaggaggttaggcattctaatcacaggaagagataggaggtcagcatgagatccaagtcataaagaccttgagagtgacctctggttgtctcactggtctttatatggtaattataatgcattagcatgctaaaagacactcccaccagcaccatgacagtttacaagtgccatggcaatgtcaggaagttactctatatggtctataaaggggaggtaccctcggttctgggaattgaccackcctttcccaaaaatctcatgaataatccaccccttgtttagcatacaatcaggaagtaacaagaatccttggttgagcagctcaagctgctgctctgcctatggagtagccactccttatttcgttacttaataaatttgctttcactttactctatgaattcatctcaaattctttcttgagcaagatccgaaaaccctgccttggggtatggattgcgacacctttctggtaacactttcagcacttgaaaaatattgtatcacttctttctgggctccatgattttatataagaaatatactattat

SEQ ID NO: 889064 - DNA, 593 bp, Homo sapiens
ggcaaacttccagccactgacaaagcctttggccaacaataaacagtgatccgattttgatcctttctttgttatggtatctcttattttcattttctgatgctcctaatctcagtacagcagtttcttatcaggaagaactccaaaagtcagcttgtttygtaagtgaggatgcacacacagccttgagtgctgggagaggactggctgagtgggtgagtgtcagcctgttgcaagatagaagcccctccaagtgaagaaatgcaaaacaccataggattccaatcgactcagcatagagtagaggatgaggatgaggttttccttctttctagagcacatggacaaagacctgggttttttttaaatataagaacttaaatgaaagtttagatcattgtgactatgcctttgtgctacagtaagaatggcccttttcctttctggccacctttagatagcttattgagaacttatatgttagctagtatgctaaccactactccaatattcagtgtaggtctgttaataataacagtggtgatggtggtaatataatgatattttcttaataatagccagtagtgattgaa

SEQ ID NO: 889065 - DNA, 660 bp, Homo sapiens
cctttagatagcttattgagaacttatatgttagctagtatgctaaccactactccaatattcagtgtaggtctgttaataataacagtggtgatggtggtaatataatgatattttcttaataatagccagtagtgattgaacacttacactattctgtttgctttataaatattaacccatttcatctgcctgacagtgctaatagatggtaactactattatgcctgtcttaacaattgggaaactggagtgataatactaaataagttaatcaaggccacacagctgatagccagagaggctggaattcaaasttaagcagcattacaccataaaagatcttcttagctgttaagctataactactagacacttctatgactgtttaatcttttgtaaaatcaaggagttggaccacacaacaacaatgaaaataacacaacaacaacattacaacaaatataccagtaatggcgagtaaaattgactgaattcttactgtggtttaaaatctgggccatatgcttggtacgtatttttttcatatagctgttaccacattctatgtgggaagaaccattattatctgtattttatagtactgcagaaatgtgaggtgacttactaaatagtacacagcaaataagtggtggcatc

SEQ ID NO: 889066 - DNA, 602 bp, Homo sapiens
ttcagagattaaggttgagtagagatcaggtctcagaattcacccatgaagagttctcttagggtaggccaagtggaaagccaactcccaatatgttatttagaagggttgggccctcctggtattgcccttgttctcctgtctcatttatgagtcaaaataaataataaaaaagtggtttctatctcgttcatccccacaaacctctccaactgagtgatggtaagctagagatgaaggagcacaggtcacagggaatacacagccrcagatcataggtggttcctgtagttaattcagagagctatagctacctttgtgagctcctaaatgcctctgtatatgtcatactatgggcagggcttacctgtctgcacaccctgtcactctatatacacccatgcagactttacaaatactgattctttttaaaaacctcattgtctaactagtaacagaatcatgataggtactttacaaatatttgttgaataaatgaatgcatgaatgtataacagtgtagggatgtctcagatacatctaaactggttgattggtttcaaattgtcgatatacagaagtggaatagacttagggatcag

SEQ ID NO: 889067 - DNA, 509 bp, Homo sapiens
atttttaatagaaaataattatttagcctacaaataaacctgtatagaaaactttatgcaaccaatactaattgtggaatgttagtttagaagatacagtttgtgtcatctaagaagttttggcattaatttgtttgtttcctactacacacccttaagtaaacatatagaattctcttttaaaatttcagaggctaggagtggtatgggtacgtgtgtgttggggggatgaagaaagattggtcagtgggcacaagcataaagttagattaaaaaaagaaataagttctaatgttccatagcagagtaaggtgaccatagttaacaacaaygtattgtatatttcaaaacagttagaagtcttgaaatatcctcaacacatagaaatgataaatgctgaaggtgctgagtatcagaaatactccaacttgattattacacattctctatgcatgtaacaaaacctcatatgtaccccattcatatgtacaggtattttgtgtgtgtgt

SEQ ID NO: 889068 - DNA, 620 bp, Homo sapiens
cgtatgttctacttgctccccacacaaaagatggtcagtgcttttaattttaactattctgatgggtatatattatggtttaatttgcatttcccttataactaatgaagttgaacgtattattatatatccattttgattatttggatatcctcttttgtgaaatacctctctcatcaattttgtattagctagtctctttttcttatagattggtgggaacttgtatacattctgtatacaagtcctttgtcaattatacatatggtatgtgtcttttcctactctacagctttcttattcatgctcctaatggtgtgttttawttatgggaacttctaaattttaatgtagtctaaaatgtatttatgtttttccgtttatggttaatgcatcttgtttaggatagtttgtgtactttaagatcacaagtatagtctcatgttttcttttaaaagtgttactgttttatagttcacatttggatgtaaaatcactcagttatttgttaattagtgtggtatgaaggtcaaaattcattttctttcatgtaaatatccagttaatccaacacaactaattgaaaagactatcctctccccactactatgcagtactgc

SEQ ID NO: 889069 - DNA, 617 bp, Homo sapiens
gatctcacctgaaagtctgagaaccatcaactctctttctccttggcaggtcctgaattctaaattcttctatacagctctggaagatttgcttctcagtcactttgccactattttcctcttggcttctctgtccctggattctctccctgcttgggtgtttagtgtctaggatcaaagactgggtcatagatgataatgtaatcatgagttatagatgacattgtctcctcctaatctccagaaaatgtttcacgcctgtatttacaatttatgaccctcaaaattatccctcctctgttcatcctctgaaatatctcttcattgtgtttagaattttgtaaaaagataagtagagcyctaacataaaccctattgtgtatctcaataaagcatcctgccaagttatttgtaagcatttgatttgggcatattttagaaagccataacatgtgttgttggtatactatatttgattaaaccatttagtatatcacatctataaccatttttcttccacacttgcagacaaactcttgatcttcaaagctgtactagatgataacgctgcttccatatgaacatgcaatccaacttttaacattttgatttcaatg

SEQ ID NO: 889070 - DNA, 646 bp, Homo sapiens
atcacttattagtaaggaaatggtgctaaaccactcatgaggatcttcctgcatgatccaatacctctcagaaggtcccacctctaacactggaaatcacatttcaacatgagatttggaggggacacaaatccatacaatatcacttttaattgaggactctttaaaataccaggtgaaggttgtgcaaaaggattccagacaaaaagaagatgaggacaaggtgttgaggcttgaaagggcttggcatgttctaggaaggagtataaacccagggatcttgagcagtaggagcaaatgagaaagtagcatgagatgtgcttaaaggaactgtcaagcgtaaaatcatgcagagcctggttagtcagaataaggagtttttatttaayttgaaatgcaatggaggccacttgtaggagacgtctgggttggtcaacgacaaggctgaagcagacagatcactctgatgaacgcatctatttttcagaaaatatggtagtttggaacatgttggaatggagacaaatggaaaggacaaattttggaggtagaactgacagcagttgaagatggaaactcccgggtttgtttatttatttattcattcagttggtatattatgccctatcaaatgcccagcttatgc

SEQ ID NO: 889071 - DNA, 634 bp, Homo sapiens
tcccactcctaatacctgcaagagccttggaagtttattctctagagaaattggactagaaaaatctcagtgattaggaatgaggagccccgaagaggataagctggaggttttgtgttgattataataccatgaagtagaagtctttaaatcaaaaggtgagaactacctttcctgcctgtagtcctgcctttagatatacccsttcccagacataacattggaggttaattttgtggagcaccaaaatgatctacagaaagaataccaggagattcatagttttgagctagcagcaaagatgctagtatctctacttggttctatgcaaagatgcagccatcttttcatctaatcacctgagagtcaacctcccctatgtacaaaccccacaaacataaataaagcttccattcaactatttgttgttttactgttaagtaaatggatgaacaagcaacatcagccatttgaggaaatcctactacagggaagatatggaacataacaaacaagaacaaagaagtctgaaaaagaagacgtaatatagggaagaaaagactgctttaaagaaattcttattaatcatgttaaaaagatatataaagatattataaccattgcatattaaaat

SEQ ID NO: 889072 - DNA, 634 bp, Homo sapiens
tcccactcctaatacctgcaagagccttggaagtttattctctagagaaattggactagaaaaatctcagtgattaggaatgaggagccccgaagaggataagctggaggttttgtgttgattataataccatgaagtagaagtctttaaatcaaaaggtgagaactacctttcctgcctgtagtcctgcctttagatataccccttcccagacataacattggaggttaattttgtggagcaccaaaatgatctacagaaagaataccaggagattcatagttttgagctagcagcaaagatgctagtatctctrcttggttctatgcaaagatgcagccatcttttcatctaatcacctgagagtcaacctcccctatgtacaaaccccacaaacataaataaagcttccattcaactatttgttgttttactgttaagtaaatggatgaacaagcaacatcagccatttgaggaaatcctactacagggaagatatggaacataacaaacaagaacaaagaagtctgaaaaagaagacgtaatatagggaagaaaagactgctttaaagaaattcttattaatcatgttaaaaagatatataaagatattataaccattgcatattaaaat

SEQ ID NO: 889073 - DNA, 634 bp, Homo sapiens
tcccactcctaatacctgcaagagccttggaagtttattctctagagaaattggactagaaaaatctcagtgattaggaatgaggagccccgaagaggataagctggaggttttgtgttgattataataccatgaagtagaagtctttaaatcaaaaggtgagaactacctttcctgcctgtagtcctgcctttagatataccccttcccagacataacattggaggttaattttgtggagcaccaaaatgatctacagaaagaataccaggagattcatagttttgagctagcagcaaagatgctagtatctctacttggttctatgcaaagatgcagccatcttttcatctaatcacctgagagtcaacctcccctatgtacaaaccccacaaacataaataaagcttccattcaactatttgttgttttactgttaagtaaatggatgaacaarcaacatcagccatttgaggaaatcctactacagggaagatatggaacataacaaacaagaacaaagaagtctgaaaaagaagacgtaatatagggaagaaaagactgctttaaagaaattcttattaatcatgttaaaaagatatataaagatattataaccattgcatattaaaat

SEQ ID NO: 889074 - DNA, 637 bp, Homo sapiens
aagaagtattttgtgtcataacgcatagcctatacttgaaaaataagtgtatcatgttgctgtgaagttttttatagacatttattagtttattttggtttgtaatgttgctcaagtgttctatatccttcttaattttctatctagttatttattcattcctgaaagstaggtattgaaatcgctaactatgaatattgaattgtctgtttttcctttaaattccaccagtttatgcttaagatattttaggacactattgctatgtgtttatatgtttatagtttgtaaacttttctgatgaattgatacttcatcattataaaatgcctctctatgactcttggacaattttttgtaaaaacatatcttgttcgataatgatagccactcagttgttttggtgactctttatttagcatggctttttccattcttttattttcaacctatttgtgtctttgaatccaaagtgtgccttttgtagatagcatatgtttatattgtgttgttttaattcattatgtgaatgcttactctttaattggagcatttaacccatttatatttcatgtaatttctgataaagtagaatttctgccattttgccatttgttttcagtgtgtgactgcacat

SEQ ID NO: 889075 - DNA, 637 bp, Homo sapiens
aagaagtattttgtgtcataacgcatagcctatacttgaaaaataagtgtatcatgttgctgtgaagttttttatagacatttattagtttattttggtttgtaatgttgctcaagtgttctatatccttcttaattttctatctagttatttattcattcctgaaaggtaggtattgaaatcgctaactatgaatattgaattgtctgtttttcctttaaattccaccagtttatgcttaagatattttaggacactattgctatgtgtttatatgtttatagtttgtaaacttttctgatgaattgatacttcatcattataaaatgcctctctatgactcttggacaattttttgtaaaaacatatcttgttygataatgatagccactcagttgttttggtgactctttatttagcatggctttttccattcttttattttcaacctatttgtgtctttgaatccaaagtgtgccttttgtagatagcatatgtttatattgtgttgttttaattcattatgtgaatgcttactctttaattggagcatttaacccatttatatttcatgtaatttctgataaagtagaatttctgccattttgccatttgttttcagtgtgtgactgcacat

SEQ ID NO: 889076 - DNA, 579 bp, Homo sapiens
acttttgggagaggtgcagattttgggggaagatcttgagttcagttttgaatctgttgagtttgaggtgtctgtggttgatggctttcacaaatggtcccacttattctctcccagtgttcacacccctttgcaatgtgactttgcagttcctccattgaatggaggagtcaattttcacatccctgggctggccttgtgacatgtttggcctgcaggatgtggaagacgggacaccctgccagctataagcctgtctcaggagtccttacaagcttccactaactcttttagagccctccaggatctccaagtggasaggctcatgctgacctgttgaatgatgagagaccacatggagcaagatgagccatcccagctgagcccatcctaggctacctggctctagctgaccttgaatgagatcagccaagatcaaaataactatccagctaattccagcctgagttactaacttcagaatcatgagcaaactagctggattttagggatggtttattatgcaccagtagctgataaagtcccttgagccagccaaatagagatgggaaaaggcaa

SEQ ID NO: 889077 - DNA, 664 bp, Homo sapiens
taccgactggagatttgacacggggactgggagttttggaagtgtcaaagatgagtcatagcttcttagctttcagagctagttagctaagaagatggaaagatgaaaagggaacactggaaatgaactagtttgtttggtggagggaaatcatgagytcagttttgaatatgttgaatacgaagtgccactcagtcatctaaaagaaagtatcaataataagagtgtacagctcagagaagtctgggttggagatcagtgactcattcatacgcagttgacaacagaagctgtgatgtggatgagatcacctataaagacagagaaataatatttatactttttctgccaggtcttgaactttgtaatcaactgtcatgattagcaatacaccaagattgaaagactgtttttgcttaagatggaaattttagtcctcacaactctgaaagggctcatttcctacttctaaagcaatcacaggcttctatctacttggtgtgtagatatatcttacgtgttttactcatctttaagttggagcttattttctgcttacaggctctaagtttggaaaattaaaagcaaatttaaaagttcaagatttagaatgaaattggaactaattttctcttggtcctataatcttataatagttattcac

SEQ ID NO: 889078 - DNA, 664 bp, Homo sapiens
taccgactggagatttgacacggggactgggagttttggaagtgtcaaagatgagtcatagcttcttagctttcagagctagttagctaagaagatggaaagatgaaaagggaacactggaaatgaactagtttgtttggtggagggaaatcatgagttcagttttgaatatgttgaatacgaagtgccactcagtcatctaaaagaaagtatcaataataagagtgtacagctcagagaagtctgggttggagatcagtgactcattcatacgcagttgacaacagaagctgtgatgtggatgagatcacctataaagayagagaaataatatttatactttttctgccaggtcttgaactttgtaatcaactgtcatgattagcaatacaccaagattgaaagactgtttttgcttaagatggaaattttagtcctcacaactctgaaagggctcatttcctacttctaaagcaatcacaggcttctatctacttggtgtgtagatatatcttacgtgttttactcatctttaagttggagcttattttctgcttacaggctctaagtttggaaaattaaaagcaaatttaaaagttcaagatttagaatgaaattggaactaattttctcttggtcctataatcttataatagttattcac

SEQ ID NO: 889079 - DNA, 612 bp, Homo sapiens
atgactcccaggtaatactgtagaccactctgaagcagccgattctccggcttcctgcactggtatcagaggcaggcagaagcatgggggcaacccaattcaggccgctttgctattagctctgaaaaaacaacatggttttcatggcttcatgcctcttctttggctttcatgtagacttgctactacctttcagctttggttaagaagcagtgacacaaactattatgtccagaatatccaaaatatcactgccatcactactccagtggagtaacatctctgtctcatgaactaatggtctaaagagctctttttaaaaatggcccctccatgagacactttatacaaacaaaattcgaaaacttgctatactcaaagggtggagaccactgamcttgcctgtgcccaatcagagaattctatttaattaaaaaccaataagccagccaataacaaagaccatgtcataacaaattggtcttgcaacaagtcaggaaagtagaactggtagaagagggaacaaagaccaatgaagaaagacagaaagacaagtcacttgcatgttatgtgaaatgggagaagagctcatataccgccaagattcagagg

SEQ ID NO: 889080 - DNA, 656 bp, Homo sapiens
atttccagcaggaaagtcagaaattcagttctggagttcaggagaaaggtcaaggccagagcagtattgttatataaaagttaaaaactcagtttgtggaataaattcattgacttggaaaaagtatataaaaacagaagagggggcaggatggaattattgggaaaatgtgctcttagggattgggaagaaggcaagacacagagctagagtttagaagcttctggtgctactgcagggaactggccactggatgtttgactgggacatcccaagagaacagtcacagcagtgtaattgggaaggacaccaacttgtaagggctcgggagtcaggaccattctatcgtggtgtttttttgtgcagagttgatgagaagatggtatgttaaagatttcacaatggaggagacaagcatagaccaaaggcacaaggaaaggggggcttttgttgatggaacaaggtactggaagcagcaggaggagaaggggatgaaaggttctagaasaggagtcctcctcactgtggacggctattacagttgggcatgtagagatccaaaataacttagacaaggaaggaggggaaagtgaaattattttgagtggcatagtcctgatcttagcaaagtagaaaattacatcgtttgccaaaag

SEQ ID NO: 889081 - DNA, 579 bp, Homo sapiens
agggcattcccatctgtggtggcaatagggaaagagtcattctgctaaaggaaaggagagggaagagtaaagggggttttgtcttgcagcttgggcaccagctcagccacagtgggatagagcaccaggtagcctcctggggtccccacttccaggcctgagctcataggtgtcatttctggacmcagtccagggcaaagggaagttgactgccttggagggtgagttttaggcctgtaagcattccagcaagctgaagggagagccttgggtcttgagtgaatatcagcaatagccaggcagaaatctctgtgggtctagtgcagtggtggccacaggaagagactcctgttagataaggagagagaagagtgggaaggactttgtcttgtggcttgggtaccagcttagctgcaattgaatagagcaccaagtagactgctaaggttcctgcctcctggccctggctcctggatggcattccaagacctgccctgggccaattgggagactacttctctttaaagtaagatacaaggctggaaatgtgccatatactgactaaagagttcttgggcc

SEQ ID NO: 889082 - DNA, 628 bp, Homo sapiens
tcatccttcattgtacttgatgctttaaaaacatttgctaccaataacttagaaatagatttttattttgtggggaacaacctattgtcctggtgttctgcctgcctttctggactcaccttgtcatggtccattgttgcatcatttactcctttctctctaaactgttagaaaactttggaattctctcctargatttgatgctcttctctttgaatactctttttgaattattttgcttactcctaaagcttttgttattgcagatatgttaatgactctctgtggttattgctatttcagttttctttatagcttagacttcatctgcctattggatatttccaattggaaatccatatttatattaaatccacatattgccccaccaccatttatattaaattcacatatgcaccactacctcctcattattgaaacatttgactttctttgtggtacatatccctgtgcgtcatacaccatgcactccactgtttgagcccaaaactggatgttgtctttgacttctctctgccttttatctcataacctgagtaatcatcaaattctataagttctgcctccaaattacacctccattctttttttcacttctctcccttac

SEQ ID NO: 889083 - DNA, 624 bp, Homo sapiens
caaatacttctgagtacactaaattatgggaagtatgctctgtaagaactggagtgacttgaattcttttgcttgagaaaaagaagactatttttgagcatataaaggatgctgtgatgaacaaaagaaaatgagcttacactcccataaagttaaaaagaaaaaaagaatgtcctgacagtgctaagtataaaaattagactccatagcattttgtargcttctctagaggtgtttaaaaaaatcagagaaagtcaggtgtgctgctggtaagtcaggataaaagacggtatatgttcctatgatagatacttaagtgaaaaatgccattaaaaccaaatgttcaatgtatcttaacatgcctataaaacaaggagattacatttcacttggtatgagctcgtgggaaatagtgctctagtggcacattgtacataccgatatcaaagtacttgtcatattataacatttcattgggttatttgtctgagttcttggtctcagactaatctttgcaacagtactacaggtcctctattcccatagttaataataataatgataaataataataataaatgagggattaagtcatcatcccgttccatatttgtaactttttaa

SEQ ID NO: 889084 - DNA, 624 bp, Homo sapiens
caaatacttctgagtacactaaattatgggaagtatgctctgtaagaactggagtgacttgaattcttttgcttgagaaaaagaagactatttttgagcatataaaggatgctgtgatgaacaaaagaaaatgagcttacactcccataaagttaaaaagaaaaaaagaatgtcctgacagtgctaagtataaaaattagactccatagcattttgtaggcttctctagaggtgtttaaaaaaatcagagaaagtcargtgtgctgctggtaagtcaggataaaagacggtatatgttcctatgatagatacttaagtgaaaaatgccattaaaaccaaatgttcaatgtatcttaacatgcctataaaacaaggagattacatttcacttggtatgagctcgtgggaaatagtgctctagtggcacattgtacataccgatatcaaagtacttgtcatattataacatttcattgggttatttgtctgagttcttggtctcagactaatctttgcaacagtactacaggtcctctattcccatagttaataataataatgataaataataataataaatgagggattaagtcatcatcccgttccatatttgtaactttttaa

SEQ ID NO: 889085 - DNA, 618 bp, Homo sapiens
aaataccatgactgattttaagctgccaacttgacatcaatcagcttgcaaaatccctgcaaatttaacaattggctcccataatgcagtacaaaccagctccaggatccccttgccaatgatgaaaaagaaagcaggattgaacagagggagaaggtgggctatgaggcaatcacaacacaggccccagccaactgcaccaggaggtctgaaaccaatatggcccttcagtattrtcccaagttggggtgaaggtgaagtcttgttaccaggcatcactctcagaggttagagaactgagttttttcattgctacagtggggatgtgggcagtgtggcatggcatcctccacagcccaccctttcacagctcagatcacatttccttataagttctgggagcatctattcttcctttgtagtgggcttctttttctgggggaaaacttataagaagactagcagtgggactctagtgtctatagaaaccacagccattcttgaagccacaaatgatcgtcatagtctttctcctctacattccattgcagattgccctcaccctgagctagcacctcaggtagtactagtattcaggtggtactaaaaaaggagtac

SEQ ID NO: 889086 - DNA, 597 bp, Homo sapiens
gtgaaggacttcttcaaggagagctacaaaccactgctcagtgaaataacagaggacacaaacaaatggaaaaacattccatgctcatggataggaagaatcaatatcatgaaaatggccatactgcccaaagtaatttatagattcaatgctaaccccatcaagctaccattgacttttttcacagaataagaaaaaactactttaattttcatatggaaccaaaaaacagcctgcatagcaaagaacaatcctaagcaaaaagaataaagctggaggcatcatgctacctgacttcaaactatgctacgaggctatggtaaccaaaagagcatggtactggtaccaaaacagatatatagaccaatggaacagaatgaaggcctcagaaataaaaccacacatctacaaccatctgatctttgacaaacctgasaaaaacaagcaatggggaaagaatcccctatttaataaatggtgttgggaaaactggctagccatatgcagaaaactgaaactggaccccttccttaaaccttatacaaaaattaactcaagatggattaaagacataaatgtaacatttaaaactgtaaa

SEQ ID NO: 889087 - DNA, 648 bp, Homo sapiens
ctttaattgaggtataatttacaaataaaacttgtatatatttaagttttacaacttcatgttttgatatacaaaagcactgtgagataatcatcacaatcaagctaattgacatatctgtcatctcacatagttaccattttcttttctttttcttttttttcgtggtgagaacacttgtggtctatccttttagtaaatttcaaatgtgcaatacaaaattgctaactctattcatcttgctaaacactgcatctcctgacccatctcagttttgaattgtactaatagaatacacatagtactaatataattctcaaagcaaaaatatattttctttttttttctttttctttcttttttttttttttatgagactgagtgtctctttatcacccaggctggagtccaagggcgcgatctcggctcactgcaacctccacctcccgagttcaagcaattctcrtgcctcagcctctcaagtagctgggattacaggcacccactaccatgcccggctaatttttgtattattactagggaagggtttcaatatgttggccaggctggtctcaaactcttgacctcaagtgaacacctacctcggcctctgaaagtgctgagattacaggcatgagccactgcgcc

SEQ ID NO: 889088 - DNA, 635 bp, Homo sapiens
acagtgatgaaatgctcaagaatcaagggcatattccatatcctatttccatgtcaatcagtgtgtcagcaccagacatcaagtgcattagtcctcagctcagtttcattgaggaaagggtataattgcctgtggagtttctgtaaagcaatctagcaaaagaccttgtaatagtccatcacagtagtgttgtcaataatgctacaaggtgcctcctcatttttacttcttgtgcctcaagaccctaagaatcagcctgcaacagctgcaaaataagaattcctcttcattgttcatagttgtgaaaaagcttcctaataaaccacaaacatagacttaattagctcccagatcccttggattccatgagggaagaggaattctcaagrtaaatcctcctttttgctgcacccctcctgaaagagtcttcagatcagaatgaactatgagcagcccaccccttacagttaagttcatgcaccctggtctactgattgcactaaaacatccaaaatggaatctaggtgaccccctagggaggatcctacaggaaggtgggtctcaagatatccttgggcacttctgtcatcagtcttcttcaattttttttttttttttttttgagatggagtctc

SEQ ID NO: 889089 - DNA, 635 bp, Homo sapiens
acagtgatgaaatgctcaagaatcaagggcatattccatatcctatttccatgtcaatcagtgtgtcagcaccagacatcaagtgcattagtcctcagctcagtttcattgaggaaagggtataattgcctgtggagtttctgtaaagcaatctagcaaaagaccttgtaatagtccatcacagtagtgttgtcaataatgctacaaggtgcctcctcatttttacttcttgtgcctcaagaccctaagaatcagcctgcaacagctgcaaaataagaattcctcttcattgttcatagttgtgaaaaagcttcctaataaaccacaaacatagacttaattagctcccagatcccttggattccatgagggaagaggaattctcaagataaatcctcctttttgctgcacccctcctgaaagagtcttcagatcagaatgaactatgagcagcccaccccttacagttaagttcatgcaccctgrtctactgattgcactaaaacatccaaaatggaatctaggtgaccccctagggaggatcctacaggaaggtgggtctcaagatatccttgggcacttctgtcatcagtcttcttcaattttttttttttttttttttgagatggagtctc

SEQ ID NO: 889090 - DNA, 514 bp, Homo sapiens
tgtccaggtcctggagcgtgaccaggtgctcggcgtccgccgcgtccacgatttccagcagcgcgggcgccgcgtttgcctcgatctcctcgcggaccgctcctccgcccacgccgcgcactgctcggggagcggccgcacgcgaactgcgtgtccagcgtggtcctgcccacgtcacgctccccagcagcacaccccggcagccctggcggggcgcgggaccagcccgcagtgtccgggacgcggcggggaggggaggagagggaggaaggggaggggaaggaggaaggggaaggggcctgggagcgcagggaacggcgtacsaggactgtccgggcaggggcagggaggggagaggagggaggggatgggggagggcaagagaggagaaaagaggaggaggggaggggaggagagacgaggggtcagggcgtggcggggctggcgagtcctgtggcgcgggggaggggcgggcgtctcctggacttgcttccacccggcttaatcccgcccg

SEQ ID NO: 889091 - DNA, 514 bp, Homo sapiens
tgtccaggtcctggagcgtgaccaggtgctcggcgtccgccgcgtccacgatttccagcagcgcgggcgccgcgtttgcctcgatctcctcgcggaccgctcctccgcccacgccgcgcactgctcggggagcggccgcacgcgaactgcgtgtccagcgtggtcctgcccacgtcacgctccccagcagcacaccccggcagccctggcggggcgcgggaccagcccgcagtgtccgggacgcggcggggaggggaggagagggaggaaggggaggggaaggaggaaggggaaggggcctgggagcgcagggaacggcgtaccrggactgtccgggcaggggcagggaggggagaggagggaggggatgggggagggcaagagaggagaaaagaggaggaggggaggggaggagagacgaggggtcagggcgtggcggggctggcgagtcctgtggcgcgggggaggggcgggcgtctcctggacttgcttccacccggcttaatcccgcccg

SEQ ID NO: 889092 - DNA, 613 bp, Homo sapiens
tcccagtcttcatctatccacatgttcttcattggctcctaaatttggggccaaatttttagtgaactacagggttcttgccactttttctagtttttcatttctatgtgcatctatggcttccgctactgcctatgtgttgctgactctcagatgaccatcttcagctccaaacccctttcctaactctaagcccagatttcccaaaccctctaatttcttctgtggtacatctaactgggactttgaaacgtgactatctccaaatgaaacaaatggcatctcacaatgcagtctgctcctgtttttcattttcctttcttggataatattatcactattccctttttctccctaatggaaaatcttaaaggtatcctcagttatattgaatgtgtcctaaactatgctgggtgctaagaaaacagaaaattaagacaaagttcctgctctcaaccagttcacagataytaatttaaactaacaaagcacctgattcgtgcaactatagaaatatttatgggaacagtgcagagctaacccagagaagggaatgattaactttttccagggtgtggtgtgggatgattatgaactgggttttcaaaaccaa

SEQ ID NO: 889093 - DNA, 606 bp, Homo sapiens
ttctttggggctgtgatggagagagtatgctgttttccacatgagtttgcttggcagataggataattcatgctgcaggactagcattagcagcatttctttgacatactcggatgagtcataggagagaagacagacactgttcccatgatgtcaccacccctccctgacctccccaaggagacacaggaggaaaacgcagtttctgtgtgttgactacttgaaatagccaaatggggaaaattgcatttgaatgagtgtsataccatgtgtgtaaggtctcagagtctatgtgagaatctttaaccaaagactcacttagctaagaacaaaccctggtctttgtgggtcaacattcatatggttcgagttcagaacctccttttgcctcagtaagccagataacacagaaatggactgacattgtgttctttccctgtattatcttcactttgttaaaaaataaggaactcctgcattttttttctgctcatcttttccttcatctttcaaaatttattggatgtaggctaatcctgatagaaaatatcattgaccactgataagcagaagtaattgatagcatgcattcacatcccatctctg

SEQ ID NO: 889094 - DNA, 608 bp, Homo sapiens
agaaatggggagagtataagcaaaccaggaggctttgtttgttttaaaatgtttgctttatccagatccttatacttaaagatctgacatataacaacaacagaaaagtatagttattggctccatttaaaaaatatattattataaggctctgatttcagagcctcagtcgttcattatggagttgaaggctgggagtaaggagcagtgaaygtttaggaggccgtatacctgatctgggcaaagcatagtaaggacattctgagcacagatatgaaaacttatggagtacaatgggcaggcagtggggttagaaatagcatatgaggaaatgacaagaaacttgttcctcctttggaagataaatgatttgaagtctgtatattagaagagccttttaatatttaatatctccttctcctaaacaggccagaaaagtgacaacgagaatgtgctgaaactttaagtgcctcctgatagtgtgtgtgtgtgtgtgtgtgtgtgtgtgtgtgtgtgtgtgtttatgcattatggcccaagtgggaatatctgtttaattgcagtctggttgtcctgttattggttagacaagacatacccaaacatag

SEQ ID NO: 889095 - DNA, 597 bp, Homo sapiens
tgtgttaggatggtaatatttcttccttaagtctatgatacaaatttaatttctttcatagatagaggaccattcagattttccatttctctttgttacaatttttgaaattttaaattttttgttatttacacatttaatataaattgtcaactatattggcataaagttgtctgaatwttattgccttattattctgtaaatgtctgtaagaactgtgatgatatcccatttttcattcttgttaccagtagtttttttctctctctctctctttttacgtgattagtcttgctagagatttatcagttctctaaagtttgctattctatagttcatttattttttctcttattttaatcatttcctcccttttacacacactgggtttaatttgctcttctttttccaacttcttaagaaataaatttagatcattattttaattctctcctcttttctgctacaagtattaaagctctaacttccctctaagcattgttttagctgcatcttatgaattttcatatgttgagttttaattaccacttggcttgaggtattttatagattcccttgtgatttcttcctgaccta

SEQ ID NO: 889096 - DNA, 604 bp, Homo sapiens
gctcagaagaagacaggaaaatgtgggaaagtttggaacttcctagagacttgttgaatggctttgcccaaaatgctgagagtgatatggacaataatgtctaggctgaggtggtctcagatggagatgacgaacttgttgggaactggagtaaatgtgattccttgttatgttttagcaaagagactggcagcattttgcccctgccccrgggatttgtggaattttgaacttgagaaaaatgatttagggtatctggtggaagaagtttctaagcagcaaagcattcaagaggtgacttgggttctgttaaaggcattcagtttcataagggaagcagagcataaaagtttggaaaatttgcagcctgactatgcgacagaaaagaaaaacccatttttctggggagaaattcaagccagctgcagaaatttgcataagtagcaaggagcctaatgtgaatccccaagaccttggggaaaatgtctccaggccatgtcagagaccttcacagcagtccctcctatcacaagcctggaggcccaggaggaaaaagtggtttcgtggcccaggcccagggtccctctgctgtgtgcagcctaag

SEQ ID NO: 889097 - DNA, 624 bp, Homo sapiens
ggtgccaagccactcatgagggatctgcctccatgagccaatacctcccactgggcaccacctccaacctcggggaccacatttcaacatgagctttggaagggacacacatacaaagcatatcaagaatggtggggtggggggctggggaagagctgtggtttgaaagaaagatcattaagaattgtatagtaagtgctggaggtggaaagcattttcagcagccatcacataagcaaaggctctgagacraggagagcactgatttcagtggcagccctgctgcaggcgtgtactgtaaacaagtgattaatggaaggcatggtgggccttgctagatcagatccatgccaggcactgcaaaggctagacattgtgcatggatagcatttccatgagttttcacagtgggcctgcaaaaaaggaaaccaacacacatgaagtcataaaccctaaacattgtaccaattaatctgaaaacaaaaattcaggaagtgagagatgaacatgaatctgagaaaaactcatggaggaaagacctcaggctaagcctttaagggtggctaagattactgggtatatacccaaaggattataaatcatgctgctataaagacacatgca

SEQ ID NO: 889098 - DNA, 624 bp, Homo sapiens
ggtgccaagccactcatgagggatctgcctccatgagccaatacctcccactgggcaccacctccaacctcggggaccacatttcaacatgagctttggaagggacacacatacaaagcatatcaagaatggtggggtggggggctggggaagagctgtggtttgaaagaaagatcattaagaattgtatagtaagtgctggaggtggaaagcattttcagcagccatcacataagcaaaggctctgagacaaggagagcactgatttcagtggcagccctgctgcaggcrtgtactgtaaacaagtgattaatggaaggcatggtgggccttgctagatcagatccatgccaggcactgcaaaggctagacattgtgcatggatagcatttccatgagttttcacagtgggcctgcaaaaaaggaaaccaacacacatgaagtcataaaccctaaacattgtaccaattaatctgaaaacaaaaattcaggaagtgagagatgaacatgaatctgagaaaaactcatggaggaaagacctcaggctaagcctttaagggtggctaagattactgggtatatacccaaaggattataaatcatgctgctataaagacacatgca

SEQ ID NO: 889099 - DNA, 609 bp, Homo sapiens
attttcacctttcattaaatttgatgtgttatgggcagagttatgtgaatatcggttccaagtattaatgcttccaggggcacttaagcgaagaggattttgtaattattttcttgaaaagaatcctatctgttgatacctactttagtttaaagtaaaatatataaatcaattactactatgtaattcgttatcttatataggtcctttcaatctatattaataataaagctttcttcccaggtaaattccagctatttctaatttactatcactcacattattttacrttaaacttcaactgtggtcaacccaaatttgatcaataaaatagtaatcatcttataaagaaacctaaatatactcctgtctcagcctttttgtgactggtctgtgctattctgattttggtgtataatacaggacataaaggaataaaatacctgtcagatttgtcacttttcattgtttgaatttcttctctatctctattctgtcccacttgagatcatgccaataaaatattttttattttgaaattgcaatctcatccatcttcacacaatcaaaaattatttgtttttatttcatttattataaatatcttta

SEQ ID NO: 889100 - DNA, 571 bp, Homo sapiens; identical to SEQ ID NO: 888153

SEQ ID NO: 889101 - DNA, 648 bp, Homo sapiens
cacaactgaccaacattaacattaaaatagaggaaagactgataaaactgactcttcgtagcaataagataccaaattccaacgtgattatgacatagcatcacgttgaaagaaatcaaagtattttacccccaaatatagtttgttgatatattttgaaatggcaaaacctgcaaatggcaaaacccgcaaatggcaaaaccctgcaaaaccatctcttgttgggaaatttgcattttgtagagaatctccttccttttctaggtcttttcctgattcaggagacatttaaccaagagtctgataccttttaaggtctgaaaggagacatttaccatttattcaccctgaagcctgctacttaagtrgtttcatctgcataacaagaaccttggggccaggcgcagtggctcctgcctgtaattctagcactataggaggccgaggagggcggatcacaaggtcaggagttggagaccagcctggtcaacagggtgaaagcagaactgcttaaacccgggaggcagaggttgcagtgagctgagatcgcgccactacactccagcctgtgggacagggcaagacctccgtctggcggcggggggtgttgcagcggggaacaagaacgttggcttccacaaccccctt

SEQ ID NO: 889102 - DNA, 632 bp, Homo sapiens
tttctgccttaatttcattatttacccagcagtcattccggaacaagttgtttaatttccatgtagttgtgtggttttgagtgagttttttaatcttgagttctaatttgattgtgctgtgatctgagaggctgttataatttcagttcttttgcatttgtctaggagtgttttacttccaaatatgtgataaattttagagttgttataatttcagttcttttgcatttgtctaggagtgttttacttccaaatatgtgataaattttagagtaagtgtcatgtggtgatgagaagaacttaaattcttttgttttggggtggagaattctgtagatacctatcagatccactygatccagagctgagttcaggtcctgaatatctttgtcaaatttctgttagttttttatttcttttccctacttgatggtgggttttttgaggatcagacctgtgacttattaattactatatcttttttctgtactaaaaagagtgcttgaggttctatctagtatgtatttgttgagtgagtacataactcaatattactggtaaaagcagcaaatcatagtataagaaattattttcagagggctcatttcagagcacagatgatccattgacca

SEQ ID NO: 889103 - DNA, 632 bp, Homo sapiens
tttctgccttaatttcattatttacccagcagtcattccggaacaagttgtttaatttccatgtagttgtgtggttttgagtgagttttttaatcttgagttctaatttgattgtgctgtgatctgagaggctgttataatttcagttcttttgcatttgtctaggagtgttttacttccaaatatgtgataaattttagagttgttataatttcagttcttttgcatttgtctaggagtgttttacttccaaatatgtgataaattttagagtaagtgtcatgtggtgatgagaagaacttaaattcttttgttttggggtggagaattctgtagatacctatcagatccactcgatccagagctgagttcaggtcctgaatatctttgtcaaatttctgttagttttttatttcttttccctacttgatggtgggttttttgaggatcagacctgtgacttattaattactatatcttttttctgtactaaaaaragtgcttgaggttctatctagtatgtatttgttgagtgagtacataactcaatattactggtaaaagcagcaaatcatagtataagaaattattttcagagggctcatttcagagcacagatgatccattgacca

SEQ ID NO: 889104 - DNA, 646 bp, Homo sapiens
tagctattcatcctgatgttctccctccccgctttccccaacaggtcccagtgtgtgttattcccctccctgtgtccatgtgttctcattgttcagcttccgcttatatgtgagaacatgcggtgttgggttttctgttcctgcattagtttgctgaggttaatagcttccagctgcattcatgtccctacaaagggtatgatgtcatttttttatggctgcttagtactcyatggtgtatatgtacacattttctttatccagtttatcattgatcggcttttgagttgattccatgtctttgctatcctaaatagtggttcaatgaacatatgcgtgcatgtatctttataatagaatgatttatactcctttgggtatataccctgtaatgggattgctgggttaaatggtgtttttggttctaggtctttgtggaattttcatagtgtcttctacaatggtttgaactaatttatattcccaccaacagtgtaaaaatgttcctatttctccacagccttgctagcatctgttgtttcctgacttagctattttttaaaatagccattctgactggcatgagatgctatctcattgtggttttgatttgcatttctctagtgattagtgatgttgagctttt

SEQ ID NO: 889105 - DNA, 646 bp, Homo sapiens
tagctattcatcctgatgttctccctccccgctttccccaacaggtcccagtgtgtgttattcccctccctgtgtccatgtgttctcattgttcagcttccgcttatatgtgagaacatgcggtgttgggttttctgttcctgcattagtttgctgaggttaatagcttccagctgcattcatgtccctacaaagggtatgatgtcatttttttatggctgcttagtactccatggtgtatatgtacacattttctttatccagtttatcattgatcggcttttgagttgattccatgtctttgctatcctaaatagtggttcaatgaacatatgcgtgcatgtatctttataatagaatgatttatactcctttgggtatataccctgtaatgggattgctgggttaaatggtgtttttggttctaggtctttgtggaattttcatagtgtcttctacartggtttgaactaatttatattcccaccaacagtgtaaaaatgttcctatttctccacagccttgctagcatctgttgtttcctgacttagctattttttaaaatagccattctgactggcatgagatgctatctcattgtggttttgatttgcatttctctagtgattagtgatgttgagctttt

SEQ ID NO: 889106 - DNA, 646 bp, Homo sapiens
tagctattcatcctgatgttctccctccccgctttccccaacaggtcccagtgtgtgttattcccctccctgtgtccatgtgttctcattgttcagcttccgcttatatgtgagaacatgcggtgttgggttttctgttcctgcattagtttgctgaggttaatagcttccagctgcattcatgtccctacaaagggtatgatgtcatttttttatggctgcttagtactccatggtgtatatgtacacattttctttatccagtttatcattgatcggcttttgagttgattccatgtctttgctatcctaaatagtggttcaatgaacatatgcgtgcatgtatctttataatagaatgatttatactcctttgggtatataccctgtaatgggattgctgggttaaatggtgtttttggttctaggtctttgtggaattttcatagtgtcttctacaatggtttgaactaatttatattcccaycaacagtgtaaaaatgttcctatttctccacagccttgctagcatctgttgtttcctgacttagctattttttaaaatagccattctgactggcatgagatgctatctcattgtggttttgatttgcatttctctagtgattagtgatgttgagctttt

SEQ ID NO: 889107 - DNA, 590 bp, Homo sapiens; identical to SEQ ID NO: 876812

SEQ ID NO: 889108 - DNA, 584 bp, Homo sapiens
ttttttaaactgctgttgctttaaagtttgttttgtctgatataagaatagctactccagctcacttttggtgtccatttgcatggaatatctttttccacccctttaccttaagtttatgtgaatccttctgtgtcaggtgagtctcttgaaaacagcagatacttggttggtgaattcttatccattctgccattctgtaacttttaagtggagcatttaggctatttacattcaatgttartattgagatgtgagttactattctattcactgtgctatttatttcctgaataccttgtggggttttttttttcatagtattgttgttttataggtcctgtgatatttatgctttaaggagattctattttggtgtattttgaggatttgtttcaagacttagagctccttttagcagttcttgtagttctggcttagtagtggtaaattctctcagcatttgtttgtctgaaaaagactatcttttcttcatttctgaagcttaatttcactgaatacaaaattcttggctgataattgttttgtttaaggagtctaaagataggaccccaataccatct

SEQ ID NO: 889109 - DNA, 630 bp, Homo sapiens
ttggtcattctgcagggtttgcatctttctctatttacttcctgcccagttaagggaaatcaaaagaagtgtcccaagatttggtttcaagatgaattgacaaagctcaaaaaaaaagaagacaaggaggaggtgaaaacgtagttcaaggtccaagatttataatcagaattttgaagcctatagaatttatctgttccttgctactcaaagtatggtccatggaccagcagcacaggaatcatgtggaagcttattataaatacaaaaccccagaccccacccaagacctactgcatcaaaatctgcattttaacaagatactcaattaatttgtgtgtgccctgaaatttgagatatactgatccaagtcaagccttttatttacagataaggaaactgagtcccaggtgaaaggcttatgccaaaccacaaaactattcatcccagaggagctgggactagaactttaatatgaatactctggcyagtcttctttctctgtatttgaatggaagacatacagctcatgccctggggacaaaatttcttcaaatttgtcatcctcttcaactcacagattacacctcttcaactcacagatttctcactcatcagagcttcttcact

SEQ ID NO: 889110 - DNA, 639 bp, Homo sapiens
cccaggttcaagcgattcttctgcctcagcctcccgagtagctgggactacaggcacacaccaccacacccagctaatttttgtatttttagtagagatgggagtttcaccatattggccaggctggtctcaaactccttacctcgtgatccgcccgcctcagcctcccaaagtgctgggattacaggcatgagccactgcgccaggctaaacaaaattcttaaataggagatcatatccagtaatgttaacttcttgcttataaaaacaactaatttgtttttaaatatcttaaatgcctttagtaatttttgaataaacaaaattttttactattattaactattattaaaaagaacttaagatgagaccttcartttggaatggcagccccagtgcggaccctccaagtttttcaacaaaatatcattgtaagcggaaaagataaaaacatactacatttccaaaatctaaggcagatataacacactgccaagcctggactatttttgctttatcattgtaattaataaaagagattaaaaatcacattgatatctagaaacagagaaaatcttggaggccaagaagctagaaccaaacacctcaacttgccccccaacagcgacactaaaaggg

SEQ ID NO: 889111 - DNA, 629 bp, Homo sapiens
caaataaatggaaacatattccatgctcatgggttgaaagactcaatgtctttaaaatggccatactgtttaaagaaatttacagattccacagtattcctaacaaactcaccaatgtcattcttcacagaattagaaaaactagtctaaaattaatgtggaaccaaaaaggagcccaaatagccaaagcaatcctaagcaaaaagaacaaagctggaggtatcacactagccaacttaaaactataaggctacagtaaycaaaacagcatggaactggtacaaaagcagacacatagaccagtggaacaaaatagaaaactcatgaagagttagaaactctcagtaaaatctttctgtcatcccacttgaagatctcagcataaccaaattttctatgaagtgtttgtcttatgttaacaacctgatgtaaaattatggtgaccccaaagacatcttttcttagttaactctttcttgtaatgaaaatcagcacaaatccttgaaaaagtaagcattcaacaaacttaagttttgttcttagtttgaaaggaaaagttggtatctcgatgtattctataggctaaatatgtttccatcaggaagttatttactttcccaatctttttc

SEQ ID NO: 889112 - DNA, 621 bp, Homo sapiens
tttgagttattttagcctttttcccctctgactaccaatacctttttcatttgtcaagccaaggaatgtaaaactcccactgagctagtcctaagttttagggctaaaagaccatgaggctgaagttgctgcctgggcagggtaatgctgagggactcaagctttgactcaccttccagctttagtctgatcctcagcttcgcttggcacttttcttaccctakgcccccgggatggggcataagtaggctcactcagcaagctgattgcatggcgcaccatcgacctcacatctgagatcacctttgtcagcatgcagtgtcttcgctccactagtaagatgtattgcttttgacatacttttgtcaaaggtagtcaatctttccaaaaacaaatacaagaaatattaaatgggcagaaagtaatcagcacaatttaggtagcttccaagagcgtcttgttataatgtgacataggaaaccatttgcccttatacttcatgccaaagagctggggctgggagaagaaagcaaggaaaccagcacagaaatgggagtctgaaccctgagctgctccctggctctccactgtctcctgtatagctttgggaaagtacccctt

SEQ ID NO: 889113 - DNA, 634 bp, Homo sapiens
aaataagtgctatctggagagattttcctcaaaatgaagaaaatggcaggggtatatttataattatgaagacatgcccaatataatttaaatatccaagagaggtataattttataattctatatgatgaggagttattagaaataattatccctttaataatcactagttattttatggagatggattgagaaatttatctggaggatttgctttaaaatggccagattcaaagcagctataaaatgatttttggaggctagttgcaattggagctcattcaaccagtccatttccattataatgagatttgtttttaagtaaggtggggaggaaaaggacctgttaccataagtcacctgatccagcaattgcctattgttcaatggtgcattattatctatggtaaagcytaaagggttttggtgagactgctttgaagtagatatctaaggaggcacaatgatctcagtgtcccttctctccacccaatcttatatttagcttattttctgcctacctactcattttccattgaagaataaaaagaaatgtgtttgttaagtgactagacaaggaacagaattgactcatagatggtagttgaaggtacacaaagatttttgagcttta

SEQ ID NO: 889114 - DNA, 585 bp, Homo sapiens
ttgaactaccatttgtaaatgctgataatggtcactaattaaatgacaaatttaaagaagcttaaagtaagaaatgggaattgattaaaaattattgtcacaaattatataatatttgtatttctcctcctccccccttcctccctttttcctcttcctcctccatcttcttctttctatttgaatgtstttctcttccttttccacctatcctcctgcaatataaactccacacagccaaggactatgaatatctttctgtcactctgcccctgcacttggaacagtttctgctgggatatgatagatgctcgacacccatcagttgaattaacaaaacgtgaagagaagagaggcaggaagaaatgctcagtgaaaattatgggacagggagttgtagattttgtggctggtaaatagctgcaggggaatgaatattgccaagtatttggagaggcactgaaataaagggtcctctgtatacttcctgagtcacagtccagcaatctgtcactaagtcactggttggtacagaggttccacctactggtgggctccagggccaaggaactaatcacattggat

SEQ ID NO: 889115 - DNA, 644 bp, Homo sapiens
aaaattaagtgagttatatatttttaaagatggcatcagaatatttataaaataacacatttcttgtttcttaatatgccagatcctgggagttaagttcaatattattgatcccttggacagcatggtgcctatcaagagtttttagacttctgtttggctattgtttcatgacagcgctttgtggaagttggtcaagaaaaaagagatacaggaagttatagaaggcacaaaagagtataattttagtctctttaaggagagagtatcttctctgtttcttctctttctcttgcaaattgtttgcagaacgaggacttgtgtagcattcctgcttaaagtcaactcagtgaaatccacaattgaaacacacatgacttgtattgctatctcttaattttcataatcttttgagatctcaccaaatgtcatttttttccatgtgacaattcaagatggaaytcaacttgattttcagttttgcctctgcttaaactcatctgtttctgtctgagcccccttaggtggataaatgtaagactgcgtactccttgctgcctaatttatactttgtttagtctgaagaaagaaaagtgtaaagaaaacacagcataaatgagcagcactattaacagtgagctgag

SEQ ID NO: 889116 - DNA, 596 bp, Homo sapiens
gaaggaacaaaagcctccggcttttttcaaatgggttcctccaacatggtggaaaactcataattgtttgtaccctcttcctggttcagccataggaggaaatactccgtgggcacgaggcaggaagggacagcgaacaggaaaaactagccagccagacacactgggtccttagcccctgaaaccaccttgtggcccgggtggcagctgcagctcattctagccccgcatggctattgtatgcagtgtgtgcatgaagcagacatggccatgagccccagctgggaggggatggggtagcagcagggagctaccactcacccatccatctcgtgctgcytgaggccagtaagttaggggttggggatgcctataaaaacagacagaaattgcatggttctgaattgcatatctgatgcctgggccaaaggctcattctatctagtaatatcttggcagtttgcaataacatccccaatatcgttaaaaaaaggtaggtgccataacagccctgaaaggaagagggaaaatgacataaaaaaacactggattggggccaggtacagttgctcacgcctttaattccagcaccttgg

SEQ ID NO: 889117 - DNA, 673 bp, Homo sapiens
acatggacataatcatgggaacaatagacaatgtggaccaatagagtggggaaggaggagggaatgggttgaaaaactacttattgggcactgtgctcactgcctggctgcaatctacccatataacaaacctatacatgtattcttctrtctaaatgaaagctgaaatcttaaaaaagacgaagacagatacattagggttaagttgttaagtcttccattttattgttttatagttgtttgctctgtttctcattcctttgcctctgtttctttctttctctctctttggttacttattttgatttttagatcttcattttaatttattgatggtatttcaagaatacaaatttgtatagattccttaatggttgatccagttatgacactgtccacagtctactgttaccattgaagtgttgtaacccctcttttttttttattatactttaagttctggggtacatgtgcagaatgtgcaggtttgttacataggtatacatgttccatggtggtttgctgcacccatcaacccatcatctacattaggtatttcttctaatgctatgccgtccctaaccccccacccccctacaggccctggggtatgatattcccctccctgggtccatgtattctcattgttcaactcccacttataagtgagaac

SEQ ID NO: 889118 - DNA, 559 bp, Homo sapiens
aaagataaagacggacattttataacgataaaagggctcatctgtctggaaatataataaacgtacaagcacatgacaacagagcccccaaaatacatgaaacaaaacctggcagaattgacaggagaaatagacaacctaataataacagagacttcaataggccccttaaataatgaagtctaaaaagtaaaaaaaataaataaatttcaaaaaatgtttataaaataagaatataaakaaagaaaatatttttgtacagctgtacaatgtgtttgtgtttcaagctaagtgttattacataagagtcaaaaagtttaaaaattaaaaagtttttaaagcaaaaaaagttacagtaagctaaggttagtttattactgaaggtaaaatttttaaaataattttagtgtagcctaagtgtatagcgtttataaagtgtcccaggccttcacattcacattcactcaccgcttcctcactgaatcacccagagcaacttccagtcctttaaaaagctccattcatggtaagtaccctatacaataaagtgtatcatttt

SEQ ID NO: 889119 - DNA, 691 bp, Homo sapiens
aggtctccacaagctgaaagaggaaggatgaaatacgaggccaaagagagagttaactccatatgagaaaggattatttgcattaaattctaatttattaaggaaagtattataaattatctctttgaattgattattactttgctttatgtcacaaaaatataacaaastgttttaagagtctcataaatgctgtgttaggcttaagatagtggagcagtcagttttttatgcacttttaaatgctcggcacttggcacatttttcttttccccgaggtgatgacttgaagaggaggcatagtcaaaagaattgcttttagaatgaagatattttgaacaggtttctagttttaagagaaattttggtggagagagagtgcaagagtgacaaatctatgaaacagagttagaccaagagcttcagaaagaagtagaactacctcctcctccgactgagtaggtaggtaacctggaatgaagatgaggttgaggggtagaaactgaaggcagaaagacttccttcctgttgactgctactttctctgaaacagtgaagatggatcatctgcaagagtgaaaggatggtagacatacaccttctgtaatcgccttcttgttccaaatataattttaagacaaaagttttccccgtagcaacttttacatgtctcagttcagtttctatttta

SEQ ID NO: 889120 - DNA, 662 bp, Homo sapiens
ggaaccattgtaatgacctcattttactttattatttcttttaaaaccctgtctctaaatgcagtcacattttggagaactcaggggtaaaacttcaatacatgaatagtgggtgacacaatttagcttgtaacagttacctagmattgttatttaaaatctcctttccaacttaaaattcatatggaaccaaaaaaaagcctgtatagcccagacaatcctaagcaaaaagaacaaagctggaagcatcacgctacctaacttcaaaccatactacaaggctacagtaaccaaaacagcatggtaatggtatgaaaacagacacatagaccaatggaacagaacagagatcttggaaataagaccacacatctacaaccatctgatcttcaacaaacctgacaaaaacaagcaatggggaaaggattctctgtttaataaatggtgctgggaaaactggctagccatatgcagaatattgaaactggatcacttccttacatcttttacgaaaattaactcaagatgaattaaagacttaaatgtaaaacccaaaactataaaaaccctagaagaaaatctaggcaataccattcaggacataggcatgggtaaaggtttcatgacaaaaacagcaatagcatttgcaacaaaagcaaaaa

SEQ ID NO: 889121 - DNA, 627 bp, Homo sapiens
gcattgatccctttaccattatgtaatgcccttctttgtcttttttgatctttgttggtttcaagtctgttttatcagagactaggattacaatccctatttttttttcctttccgtttccttggtaaattattctccatccctttattttgagcctatgtgtgtctttgcatgtgagatgggtctcctgaatacagcacactgatgggtcttgactctttatccaatctgccagtctgtgtcttttaactgggggatttagcccatttacatttaaggctaayattgttatgagtgaatttgatcctgtcattatgatgctagcaggttattttgcccattagttgatgcagttttttcatagtgtcaatggtctttgcattttggtttgtttttgcagtggttggtaccagtttttcctttccatatttagtgcttccttcagcagctgttgtaaggcaggcctggtggtgacaaaatctctcagcatttgcttgtctgtaaaggattttatttctccttcatttatgaagcttagtttggctggatatgaaattctgggttgaaaattcttttctttaagaatgttgaatattggcccacgctgtcttctggcttgttgggttt

SEQ ID NO: 889122 - DNA, 615 bp, Homo sapiens
ggactgtagcttttgagttaatgctgaaatgagttaaaacattgggggaccattgggaaagcaggattgattttgaaatgtgaagacgtgagatttgggaggggccatgggcagaatgatattgtttggccctctgtccccacctgaatctcatcttgtatctcccataattcccatgtgttgtgggatggacctggtgggagatagttgaaccacggagatgggtctttcccatgctgttcttgtgatagtgaataagtctcatgagatctgatggttttaagaatgggagtttccctgcacaaactctcttctcctgtctgctgctatgtgagatgtgccttttaccctccaccatgattgtgaagcctcctcagccaygtgggaatgtaagtccaaaaacctatttcttttgtaaattgcccaatcttgggtatgtctttatcagcagcatgaaaatggactaatactccaccctacctcttggcaaactaataattgctataattttttttcaccatagaataattttgcttgttatggaatgtagtataaatgaaatcatacagtgtgtactcttttgggtaaggcttcatttacacagcataatgttat

SEQ ID NO: 889123 - DNA, 626 bp, Homo sapiens
agccagcttgtattctcagaaaatgggattttgttttttattgcattgtcaggctgcaaattttccaaacttgtatgctctgtttctcttttgaaactgaatgcctttaacagcactcaagtcacctcttgaatgctttgctgcttagaaatttcttccaccagacaccctaaatcaatctaagtttcacagatctttagggcaggggcaaaatgccaccagtctgtttgctaaaacataacaagagttacttttgctccagtttccaacaagtttctcatatccatctgaaaccacttcagcctggatcttattgttcatatcactatcagcatttttgtcaaagccattcaataagcctctaggaagttccaaactttcccatattttcttgtcttcttctgagccctcctaactgtttcaacctctgcctattacccaattccagagttgcttccacattttcaggtatcttttaagcagcaccccaytcctggtaccaatttactatgttaattcattttcacactgctaataaaggcatacctgagactgagcaatttattaaaaaaaaaagacgtttaatggacttacagttccacatggctggggcaaggaggagcaaa

SEQ ID NO: 889124 - DNA, 665 bp, Homo sapiens
taaaacttgctgttaggtaaggtctctcatatgtgtgtttctgattttgtaatttgatactcattgtggtgctcagatgttaactgggtggattaggatagggtattttaatttggtggattgggatacatgtattttctccacagattgtgaaaaccgtgccctcagctaagagaaagsgattggaggtgggacttaaatagaatgttaaagactttgactagtgtgcattgtgaaatgggaaagaagaaaatgtaaaatgattgcaaagagacattcagctgtagctaaggtaaggtcaatgtgataactaaatggaacagctgggttgtgctaatagaagtgtgagggaggtgcctatcctgccccactctgtactagaatgttcatttcttctgggctataatactctaactagaaaacattcatgggagaccaagaagatgttaagaacttgactcaatattatgtcacatattgaatagtggaaagattggcaacatttggttgagagaaaggaaaacagaacaggcctcaggtgattgaacatctaccaatgattggaaattgtgcagaaccattttatgactatataatgaggcattttaaaaagctgcctaaagatagaaagtgcagccttaagctagatattctaccacctctgg

SEQ ID NO: 889125 - DNA, 617 bp, Homo sapiens
tgccaaatgccccttatcacccccgagaatattttttcacaagagtaacactacatctttgaactctggtttttcataatgtgttcataaagtgttcatttttccctcaaagcaaacaaattaaggtgtgcttcctttgtaaaataaattataaaacttggttcatctatcatgctatcttgtacagttcttattatctagtgcaaccaagtgtcaatagtacagacatattgaatgttcttaatgatgccctgaggctcagccgtattgacaaccacatctctaaccaccagctaataaactgatcatgatttaattaaatttgtatattaaggatgaatggccctctttgctattgggarggtactttcatttactcaacaggcaatatttagagactatgatgcactggagctcaaagacaaattaagtaagactatttacatacagagtacagacctacagaccaggaaacaagaatacacaatccaccatactaagtactttaattgagatgcatatgtgatcctttggcagtggattcagtcttcacagtaaacttgcactaggttaattcagaaagtttaagtgatttgtcaaattgccattagtttata

SEQ ID NO: 889126 - DNA, 587 bp, Homo sapiens
taacacaaaatggcctttttattcctagcttgcagcaagtttttttcaagagtgtgttgaaattttatcaaaggacttttctgtatttattgagatgattgcataatttcttctgatttttaatattaaactacctttcttaggataaaatctgcttcttcatgatatatcagcctcttatgtatagacggatttgatttgctaatattttgtggaagrttttatatccaggtacacaagacatagtaatttttaattttatgtatttgtcaaatttttatattaaggttattctgacctgattaaaaacattggaaatctttgcttctttatattctgacagtttgataacactcaatgttttttcttaactgtttctagaagacacactaggcctagcgttcttttcttctgtcttcttttttgttgttgttgtgtcattatgtttgtacacgtagcataatatttactatcttaaccattttttagagtatatttgaagttgcttattagcttaagaagcttttgggctgagacaatggggttttctagatataggatcatgtcatctgcaaacagagacagtt

SEQ ID NO: 889127 - DNA, 587 bp, Homo sapiens
taacacaaaatggcctttttattcctagcttgcagcaagtttttttcaagagtgtgttgaaattttatcaaaggacttttctgtatttattgagatgattgcataatttcttctgatttttaatattaaactacctttcttaggataaaatctgcttcttcatgatatatcagcctcttatgtatagacggatttgatttgctaatattttgtggaaggttttatatccaggtacacaasacatagtaatttttaattttatgtatttgtcaaatttttatattaaggttattctgacctgattaaaaacattggaaatctttgcttctttatattctgacagtttgataacactcaatgttttttcttaactgtttctagaagacacactaggcctagcgttcttttcttctgtcttcttttttgttgttgttgtgtcattatgtttgtacacgtagcataatatttactatcttaaccattttttagagtatatttgaagttgcttattagcttaagaagcttttgggctgagacaatggggttttctagatataggatcatgtcatctgcaaacagagacagtt

SEQ ID NO: 889128 - DNA, 587 bp, Homo sapiens
taacacaaaatggcctttttattcctagcttgcagcaagtttttttcaagagtgtgttgaaattttatcaaaggacttttctgtatttattgagatgattgcataatttcttctgatttttaatattaaactacctttcttaggataaaatctgcttcttcatgatatatcagcctcttatgtatagacggatttgatttgctaatattttgtggaaggttttatatccaggtacacaagacatagtaatttttaattttatgtatttgtcaaatttttatattaaggttattctgrcctgattaaaaacattggaaatctttgcttctttatattctgacagtttgataacactcaatgttttttcttaactgtttctagaagacacactaggcctagcgttcttttcttctgtcttcttttttgttgttgttgtgtcattatgtttgtacacgtagcataatatttactatcttaaccattttttagagtatatttgaagttgcttattagcttaagaagcttttgggctgagacaatggggttttctagatataggatcatgtcatctgcaaacagagacagtt

SEQ ID NO: 889129 - DNA, 587 bp, Homo sapiens
taacacaaaatggcctttttattcctagcttgcagcaagtttttttcaagagtgtgttgaaattttatcaaaggacttttctgtatttattgagatgattgcataatttcttctgatttttaatattaaactacctttcttaggataaaatctgcttcttcatgatatatcagcctcttatgtatagacggatttgatttgctaatattttgtggaaggttttatatccaggtacacaagacatagtaatttttaattttatgtatttgtcaaatttttatattaaggttattctgacctgattaaaaacattggaaatctttgcttctttatattctgacagtttgataacactcaatgttttttcttaactgtttctagaagacacactaggcctagcgttcttttcttctgtcttcttttttkttgttgttgtgtcattatgtttgtacacgtagcataatatttactatcttaaccattttttagagtatatttgaagttgcttattagcttaagaagcttttgggctgagacaatggggttttctagatataggatcatgtcatctgcaaacagagacagtt

SEQ ID NO: 889130 - DNA, 675 bp, Homo sapiens
ttccatatccgtttttattgtgtgtatttgattcttctcttttcttctttattagcctagattacagtccattttattaatgttttcaaaaaaccagctgctggattcattgattttttttgaagggtttttcacgtctctatctccttcagtttagctctgaacttaattatatcttgtcttctgctrgctttggggtttgtttactcttggttctgtagtttttttagttgtgatgttagggtgtcaatttcagatctttctagcttttcaatgtgggcatttagtgccgtacatttccctcttaacactgctttagctgtgtcccagattctagtatgttgtctttgttctcactggtttcaaataacttattgatttctgccttaatttcattatttacccaggagtcattcaggagcaggttgttcaatttccatgcacttgtgtggttttgagtgagtttttaaatcttgagttctaatttgattgcactgtagtctgggagactgttacaatttcatttcttttgcatttgctgaggagtgttttacttccagttatgtgattgattttagagtcagtgccatgtggcaccgaaaagaatgtatattctgttgttttttgggggagagttctgtagatatctatcaggtccacttgatccagagctgg

SEQ ID NO: 889131 - DNA, 675 bp, Homo sapiens
ttccatatccgtttttattgtgtgtatttgattcttctcttttcttctttattagcctagattacagtccattttattaatgttttcaaaaaaccagctgctggattcattgattttttttgaagggtttttcacgtctctatctccttcagtttagctctgaacttaattatatcttgtcttctgctggctttgggktttgtttactcttggttctgtagtttttttagttgtgatgttagggtgtcaatttcagatctttctagcttttcaatgtgggcatttagtgccgtacatttccctcttaacactgctttagctgtgtcccagattctagtatgttgtctttgttctcactggtttcaaataacttattgatttctgccttaatttcattatttacccaggagtcattcaggagcaggttgttcaatttccatgcacttgtgtggttttgagtgagtttttaaatcttgagttctaatttgattgcactgtagtctgggagactgttacaatttcatttcttttgcatttgctgaggagtgttttacttccagttatgtgattgattttagagtcagtgccatgtggcaccgaaaagaatgtatattctgttgttttttgggggagagttctgtagatatctatcaggtccacttgatccagagctgg

SEQ ID NO: 889132 - DNA, 675 bp, Homo sapiens
ttccatatccgtttttattgtgtgtatttgattcttctcttttcttctttattagcctagattacagtccattttattaatgttttcaaaaaaccagctgctggattcattgattttttttgaagggtttttcacgtctctatctccttcagtttagctctgaacttaattatatcttgtcttctgctggctttggggtttgtttactcttggttctgtagtttttttagttgtgatgttagggtgtcaatttcagatctttctagcttttcaatgtgggcatttagtgccgtacatttccctcttaacactgctttagctgtgtcccagattctagtatgttgtctttgttctcactggtttcaaataacttmttgatttctgccttaatttcattatttacccaggagtcattcaggagcaggttgttcaatttccatgcacttgtgtggttttgagtgagtttttaaatcttgagttctaatttgattgcactgtagtctgggagactgttacaatttcatttcttttgcatttgctgaggagtgttttacttccagttatgtgattgattttagagtcagtgccatgtggcaccgaaaagaatgtatattctgttgttttttgggggagagttctgtagatatctatcaggtccacttgatccagagctgg

SEQ ID NO: 889133 - DNA, 514 bp, Homo sapiens
agttccacagatctctagggcaggggcaaaattctgctagtctctttgctaaagtatagcgagagtcacctttattccagttcccaacaagtccctcatctgcatctgagaacatctcagcctggacttcattgtccatatcactwtcagcattttggtcaaggctgttcaacaagtctctaggaagttctcaactttcccacatctttctgtcttctgaaccctccaagtctctaggaagttccaaattttcctgtgttcttttgagccctccaaactgttccaacctctgcctgttacccagttccaaagtcacttctacatttttgggtatccttatagaagtgtcccactacttcagtaccaatttactatactagtttgttttcatgctgctataaagaaatacctgggactgggtaatttataaagcaaaaaggtttaattgactcagttaccacatggctcgggatgcctcaggaagcttacagccatggtggaaagggaagcaaac

SEQ ID NO: 889134 - DNA, 514 bp, Homo sapiens
agttccacagatctctagggcaggggcaaaattctgctagtctctttgctaaagtatagcgagagtcacctttattccagttcccaacaagtccctcatctgcatctgagaacatctcagcctggacttcattgtccatatcactttcagcattttggtcaaggctgttcaacaagtctctaggaagttctcaactttcccacatctttctgtcttctgaaccctccaagtcyctaggaagttccaaattttcctgtgttcttttgagccctccaaactgttccaacctctgcctgttacccagttccaaagtcacttctacatttttgggtatccttatagaagtgtcccactacttcagtaccaatttactatactagtttgttttcatgctgctataaagaaatacctgggactgggtaatttataaagcaaaaaggtttaattgactcagttaccacatggctcgggatgcctcaggaagcttacagccatggtggaaagggaagcaaac

SEQ ID NO: 889135 - DNA, 678 bp, Homo sapiens
acatcggacttaatctgcactgcagaataaatggacctaatagatatttacagaaaattttatctgatggctacagaatacatattcatctccttagcacatggctcattctcaaggatagacaatatgttaggtcacaaaacaagtcttaaaaaatgcccctcccaaaattaaaattatatcaaatgtcttctctgaccacaatagaataaaactagaaatcaatcaaaacaggaatcttgaaaactatataaacaaatggaaattaaacaatttgctccttaatgaccagtgactcaatgaagacattaagaaggaaattgaaaaatttattaaaacatatgaaaacagaaacacaacattccaaaacctgtgggatacaatgaaagaagtaatgagaggaaagtttatagcagcaagaaaagtgaaaaartgtttttctatgtcagaaaagtgaaaaaacttcaaataaacaacctaaggacctagaaaagcaagcacaaaccaaatccaagatttttagaagggaataataaaggttagggcagaaataaatgaaattaaaacaggaaaactcatataaaagattaacaaaacaaaaaattgattttttgaaaagttaaagaaaattgacaagtgtttagccagactaagaaacaaagagagaagaccccaata

SEQ ID NO: 889136 - DNA, 615 bp, Homo sapiens
catcttgcaatgcacatctttaagaacgttcaaaacacaaaatacccataaggtttcaaatttttaaaaacagtgtggcaattcctcagtgatctagaactagaaataccatttgacccagccatcccattactgggtatatacccaaaggattataaatcatgctataaagacacgtgcacacgtatgtttattgcggcactattcacaatagcaaagacttggaaccaacccaaatgtccaacaatgatagactggattaagaaaatgtggcacatatacaccatggaatactatgcagccataaaaaatgatgagttcatgtcctttgtagggacatggatgaaattggaaaccatcattctcatcaaactattgcaaggacaaaaaaccaaacaccgcatgttctcactcataggtrggaattgcacaatgagaacacatggacacagaaaggggaacatcacacactggggcctgttctggggtgggggaagggggagggatagcattaggagatataccaaatgttaaatgacaagttaatgggtgcagcacaccaacatggcgcatgtatatgtatgtaacaaacctgcatgttttgcacatgtaccc

SEQ ID NO: 889137 - DNA, 557 bp, Homo sapiens
gtcattcctaattgaacaacccaggactcgtgaggttaattacagatattaacgctgctgttcttcagcttcttgccctcaagaagcctctagcttccaaatgacctggctccaacaaagagactctctttagcccattaactaattgataaaaatgtgagtgtttagaatgagtctaattaaatcaccgagccttacaattactagtccatttggtagctgttgggagatgggtaacctcagctggcattgtagaggaataaaagataaaaataaaagggagcttaaccaagatcatttygaaagctgttcatttgaagacaaagtacatatttgcctgaaatgtctacatttactacttcaaatgcattccctttctagggtagcacaatctctgaaaaagaaaataacgtcttttttcttcttctttaagagcaggcatgctccactttgtctaataaagttacatgagtggctggggaattttttctgcgttaattaagctaaattcctttagagctgggaacactgaagtttgtccattgagcttttgctta

SEQ ID NO: 889138 - DNA, 669 bp, Homo sapiens
cctttgcccactttttaataggaccttttattcctgttgagttgtttgagttcctcgtatattctggatattagtttctttcagatgaatagtttgcaaaatattttctcccattcaacaggttctctctttgctctgttgattgctccctttgctgtatagaagctttttagtttagtccaatttatctatttttgtctctgttgtctgtgtttttgaagacttagtcacaaattatttgcctagaccaatgtctgggagagtttwtttttaaggttttcttctagtatttctatagttttgggtcttatgtttaagtctttaatccactttgagttgattttgtatatggggagagatggggttcagtttcattcttctgcatttggctatccaattttcccagtgagagcctagattcaaatccaatttcactggactccaaaattcatgaattttctttctatgatgtcaatgtactgcccagttttctagattaggaaactttgaaagggtgttatgtaataaatattatttttttttgaaaactggctcccctctgctgtttaatgaggtgatcacaatgcttcaaatgcagtggatcaggtgagagttgatggataatctaatgcagttgtcagcaaagggaggggccaaagtacagcacac

SEQ ID NO: 889139 - DNA, 576 bp, Homo sapiens
acaggttctcattatttgtttggcatctggctgctatttggagggctaaatacacgttaggtaacgctgaataccccaaacccatatgttcctctggcctcatgttgcttccactctcttataaagttcgaagccctgagaatggcgtacaacgcccttctgtagacggccccaccagccatcccacactctccccatcactgtagccttcactcctatttatgaggcactcagacctacttgctactgcccaaacacactgcatagagatgtgcttgcatagttgggttttccctcttggcttctgtcatggcaatgagaaagacatcctgctcrgccaatcccaggaaatgagacgttctaaatagcctgaagccaagcccagctgtgcctaacctggatcggccaaactctagtcttatcacaggtgtgtaagtaagaaatcagtgctcgttgtcatatgctactgccccatctttctgtatctctgcttcacaaaagggcttcccctgctttacctgttttatatcctgttctctgcactctgtcaggcatctccatccctcacttgtgtct

SEQ ID NO: 889140 - DNA, 576 bp, Homo sapiens
acaggttctcattatttgtttggcatctggctgctatttggagggctaaatacacgttaggtaacgctgaataccccaaacccatatgttcctctggcctcatgttgcttccactctcttataaagttcgaagccctgagaatggcgtacaacgcccttctgtagacggccccaccagccatcccacactctccccatcactgtagccttcactcctatttatgaggcactcagacctacttgctactgcccaaacacactgcatagagatgtgcttgcatagttgggttttccctcttggcttctgtcatggcaatgagaaagacatcctgctcggccaatcccaggaaatgagacgttctaaatagcctgaagccaarcccagctgtgcctaacctggatcggccaaactctagtcttatcacaggtgtgtaagtaagaaatcagtgctcgttgtcatatgctactgccccatctttctgtatctctgcttcacaaaagggcttcccctgctttacctgttttatatcctgttctctgcactctgtcaggcatctccatccctcacttgtgtct

SEQ ID NO: 889141 - DNA, 598 bp, Homo sapiens
atacaaaaaattagctgggtatggtggcgcgtgcccacaatcccagctacttgggaagctgaggcacgagaatcgcttgaacctggtaggcagaggttgcagtgagctgagatcatgccagtgcactccagcctgggtgactgagtgagacgccatctcaaaaaaaaaaaaaaaaaaaaaaaaggccaggtgtggtggctcatgcctgtaatcccagcactttgggaggccgaggtgggcagatcacctgaggtcaggaattcaagaccagcctggccaacatggtaaaaccctgtctctactaaaagtacaaaaattagccaggcgtggtggcgggcgcctgtaatcccagctactcaggaggctgaggcaggagaattgcttgaacccgggaggtggagrttgcagtgagccgagattgcgccattgcactccagcctgggctacagacagagaccctgtctcaaaacaaaaaaagtgcaatagtttgttacctatattcaaaatggaagaaaatgctcaatttccataagaagttaatgaaattatagacttttttccatccaatttcatggacccccagaattctatgcacaaa

SEQ ID NO: 889142 - DNA, 570 bp, Homo sapiens
aagagggccactgtcctccagactccagtatggaagatcctccaagagcttgcaccatgcacctggaaaagccaaagacactcaacactagccaatgaaagcagccaggagggaggctgtaccctgcaaagccacaggggcagagctttccaaggtcaygggagcccccctcttgcatcagcgtgacctggatgtgagtcatggagtcaaaggagatcattttggaactttaaggtttaatgactgccctattggattttggatttgcatcagacctgtagcccctttgttttggccaatttctcccatctggaaagggtgtatttacccaatgcctgtaccaccattgtatctaggaagtaactaacttccttttgattttacaggctcataggcagaagggacctgtcttgtctcagctgagattttggacttggactttgggttaatgctagaataagctaagactttgggggaccgttggaaaggcatgattgtgttttgaaatgtgagggcatgagatttgggaggggccagggacggtatgatatggtttggctgtgtgcccac

SEQ ID NO: 889143 - DNA, 570 bp, Homo sapiens
aagagggccactgtcctccagactccagtatggaagatcctccaagagcttgcaccatgcacctggaaaagccaaagacactcaacactagccaatgaaagcagccaggagggaggctgtaccctgcaaagccacaggggcagagctttccaaggtcacgggagcccccctcttgcatcagcgtgacctggatgtgagtcatggagtcaaaggagatcattttggaactttaaggtttaatgactgccctattggattttggatttgcatcagacctgtagcccctttgttttggccaatttctcccatctggaaagggtgtatttacccaatgcctgtaccaccattgtatctaggaagtaactaacttscttttgattttacaggctcataggcagaagggacctgtcttgtctcagctgagattttggacttggactttgggttaatgctagaataagctaagactttgggggaccgttggaaaggcatgattgtgttttgaaatgtgagggcatgagatttgggaggggccagggacggtatgatatggtttggctgtgtgcccac

SEQ ID NO: 889144 - DNA, 495 bp, Homo sapiens
gacacagactctggctcaatacccacaggctaaacttccaggcctacccaggcaccagactggatcccataggcccaagctccaggcctgcaatgtatacacagtctctgaactgccccaccactaagccaaccccagccaacccagtctctagaccacccccagcaccaggctgacccccacagcaccaggcttcaggcatggcccagcacaaggctggcactcagagcccacgccatcaaaccagcacctgcaggccagggacccatcagttgagatacaggcaccagattttctcagcacyagaccagcccctgtggccataggctccaggccagtaaccgtggactgagcctataagtctgcaccggccacaaataggatcttgcaaccccaggttccaggccagtctgatagactaggtgtcacagggttgggctccacaggcccaggtttcaggtccacccaagcaccaggccagttcctgtagcccta

SEQ ID NO: 889145 - DNA, 574 bp, Homo sapiens
gatggcatgaaaagtgagacaaattttaaaattaggcagattcagtttttaagtgattttcttgtatacccatacatcatctgcacattaagcacttttctctaattaagccagggaaaatacagagtaatgataatatctgtgaggtcagctgtgatcagaagtgcccacaggctgcatctcttaaaaacagtccatggcacctcaagggacactgcaaagacagtggccgggaatgtaattgagctttaggaaatgattaaagggaagtaaaatcatctccaactcaacattaatgcgtttgatttcccgggtgagaacaggatttgcgtaactgagtggttctttctttctacagtcctggatgtttggaaagccarctcttacagttagctttctttgctttgctaacattatccatcagaaaatcgaaatgcaaacagctcctatttcccaatgaagaactttctctgatttaccttaccatcatcaggcttcaccatctcaccttggaagcgttcaatcttttggtcaatatttctagaccaaaataaagtgctctcaagcctgttct

SEQ ID NO: 889146 - DNA, 552 bp, Homo sapiens
agatataactcttagcaactctgttgtcacccactcctaactctggctgacagcagattgtagagtagttaagggtcattgttgaacaagtctcagttttaatctagtaaagaaaacagaaacttgagaaattagtcagagaaaagtatgtcctatgacatcctaattattcattatttattcagataattaaatgacgtaagaatagtaggacaagaaaaataaagatgtgagtattcaaaaatagagggctgtctttattcatttaacactagattgtatacrtagaaaaatctacagataagagattagaaaatataagtaaatttagcaaggctgctagatgtaggagcaatacacaaagaaggaaatttttttctacataacagaaaaacaattaaaaacgaatacttttaaaataacaaaaatatcaaaaaacaccaaatacctaaaagtgaaaaatatacaagacacagagaaaactacaaaacatgtggagaaattaaagaaaacccattgaccaaaagactaagatggaagggtaaactatgt

SEQ ID NO: 889147 - DNA, 552 bp, Homo sapiens
agatataactcttagcaactctgttgtcacccactcctaactctggctgacagcagattgtagagtagttaagggtcattgttgaacaagtctcagttttaatctagtaaagaaaacagaaacttgagaaattagtcagagaaaagtatgtcctatgacatcctaattattcattatttattcagataattaaatgacgtaagaatagtaggacaagaaaaataaagatgtgagtattcaaaaatagagggctgtctttattcatttaacactagattgtatacatagaaaaatctacagataagagattagaaaatataagtaaatttagcaaggctgcyagatgtaggagcaatacacaaagaaggaaatttttttctacataacagaaaaacaattaaaaacgaatacttttaaaataacaaaaatatcaaaaaacaccaaatacctaaaagtgaaaaatatacaagacacagagaaaactacaaaacatgtggagaaattaaagaaaacccattgaccaaaagactaagatggaagggtaaactatgt

SEQ ID NO: 889148 - DNA, 638 bp, Homo sapiens
atgaattgggactgaagactgccatctgaaaagatgaccaagttaaacagctagatgaccaagttaaacagcttgacctaacaaaactagttttaccagactggttatataggtcacatgaagataaaagtataggtaatagactcacgctaaggtccataattgtacatatgacctggttwtttctcaaaaatatatattcttaggcaacgatgaccaataagaaatgtacaaagaggacttagtatgtaagacatgttgtttagttcatataaggacaaatttaaagaatcaagtctttacatgatgagcagtttaccatcttaatttgatatacagttgctgttactactaataattacaaaattaataataagtataccatcttcatttgcataatgtttgtaagcactttttcttctgtcatctcatttgatcctcccaaaacatgtacaaggaaggcccagtttatttattgccacattccaggtgaggagactgaggttttgaggagctgagttgcccaagtttgtgccatttgtccaaagcataactagatctagactgtaagttggctgactctaatcctagcatttctgaaatgaaaataaccgtatcaatgaattataattttgcag

SEQ ID NO: 889149 - DNA, 644 bp, Homo sapiens
ccatgttgcccaggctgggctcaaactcctggtcttgagtgatctgcccacatcggactaccaaagtgctgggattacaggcatgagcctccatgctcagcctctctgtcctacatttcagatccttaatatctggctgctttggcagccttgaacttcaagttttgtcttcccatgctcatgagactgcctaaagcactcccatgtcttagcaactaaattttgccttccttcctaggccatcatcccatgccagggctcaacaagtgctgtaggatatatcaacaggcagaatttgagctcatttcaatgagctttcctttggtgtataatctgggtccttcagtcctttttgtcacagtggcatgctgctgtctacaaacagatgttttgtattttgagggctttaaaagtttttctcagtgggaaaagtggtatgctatgagctacagcgtcaagaagcagcagaattttccttgtcaaccttttaacawacaattcttatcaaaggttgctttctttcaaatatgattatgactaaagtgtacccatttaagttgtttcaaaaaagaaaacttgtactttcaaacatgtcataacttcataattttagaatttgtttttcctggaggaaattctccatt

SEQ ID NO: 889150 - DNA, 596 bp, Homo sapiens
gtaaaatactgtggagactagtctcaaaaatgacaattactggtgatctagtgtctatgagaaaaatatattctaaattcttagacattgttttacaaaattattattatttttatttttatttttttattattatacttyaagttttagggtacatgtgcacattgtgcaggttagttacatatgtatacatgtgccatgctggtgcgctgcacccactaactcgtcatctagcattaggtatatctcccaatgctatccctcccgcctccccccaacccacaacagtccccagagtgtgatgttccccttcctgtgtccatgtgttctcattgttcaattcccacctatgagtgagaatatgcggcatttggttttttgttcttgcgatagtttactgagaatgatgatttccaatttcatccatgtccctacaaaggacgtgaactcatcattttttatggctgtatagtattccatggtgtatatgtgccacattttcttaatccaatctatcattgttggacattatttttaacacatcttacttgtgaaatgaagactagccagcatttaccagtgttgataatcatcct

SEQ ID NO: 889151 - DNA, 547 bp, Homo sapiens
cagcacaccagcatggcacatgtatacatatgtaactaacctacacattgtgcacatgtaccctaaaacataaagtataataataataaaataaaataaaataaaaaaattattctgccttcttttgtctttttcttcttatagagttacctcctcccaaaacatgttgaagattttaaaactatccatctgttacctcatatttccccagtccttcctgttagttcattttaaatttcgactccagaagaccacactggcagcttacttctctgcctgtrgcctccaagaggctcctagctacttgtcttgatttccttgcttatcctcatgtttatctttccatctggaaaaaaattatgctgccatagagaagaaaccctattgataactgaagtcataaaatatttctgataaatattttttcatacgttttgttgccacagcttttcattaagcagtagtaattcaaaacagataagagcatggacacaggagccagacagtttgattcatctagtttgaccaattcctgtattggtgatct

SEQ ID NO: 889152 - DNA, 598 bp, Homo sapiens
tcgttattagttctgactttggcctggcagtttccaaaatctaaaatgctctcttttacctttctaattaaatttgaaagccattcctgaactcctaaatttataaattttaaacaccaatatttcacaaataatagctgttttaatttttagtttggtttcacaatagaaaatctgcagtcttttaataagaataataagtgaatattttagctccctcattcatttgtcaatttcacgaagagatttatataatgtggaagtcaaatttttaacttactggtaagacatgaaacatttattcartgaggtgctaaatattggtctaattcaaaaaatctgctagtcactattaacattagagatctaccgtatcttaatatgttacatataattagtactaatcttcaatcatttggcatttaaagacattaaaagctactcaaattatctagctaagaagcagctggtaattgataatatctacctctagccttagaaaattgtaatctcagctggatgtctccagatggggttataaaaaaaaagaaatcacgtttctcattgctctcagtaacacttcagatcaaacaaagag

SEQ ID NO: 889153 - DNA, 615 bp, Homo sapiens
ctcctcagcctgaacttcactatccatattactatcagcattttggtcacaatcatttaaccagtctctaggaagttccaaactttccctcatcttcctgtcttcttctgagccctcaaacacttccaacctctacccattacccagttccaaagctgcttccaaattttcaggtatctttatggcaataccccactctcagtatcaattttctgtattaggctgttcctgcattgctataaagacatacctgagaccaggtagtttatttttaaaaagaggtttaattggctcattgttctgcaagttttacaggaagcatgaggctgacatctgttcagcttctcgggaggcctcaagaagcttataaaaatggcagaaggcaaaggggagcaggcatgtcacatggcagaagaaggagcaagagagagacagtaraggaagagatgccacacacttttaaacaaccagatctttcaagatttcactcactatcatgagaacagcactagggaaatggtgctacaccattcatgaaggttctgcccccatgatccaatcacctcccaccaggcttcacctccaacactggggactacatttcaacatgagatt

SEQ ID NO: 889154 - DNA, 554 bp, Homo sapiens
tcacacctgtaatcccaacactttgggagtccgaggcgggtggatcacctgaggttgggagttcaagaccagcctgaccaacatggagaaaccccgtctctactaaaaatacaaaaaaattagccgggcatggtggcccatgcatgtaatcccagttactcaggaggctgaggcaggagaatcgcttgaacccaggaggcgaaggttgcagtgagcggagatcgtgccattgcactccagcctgggcaagaagagcgaaactccatctcaaaaaaaaaaaaaaaaaaaagaaaagaaaaaaagaaatagtagccagcattgactgagtgcttactatatgccaggcctgtgctgagtgcttggcacccattatctcatttactcctcacagtgataggagaarggcattaccattaccattatcctcatcttacagatagagacatttagtgactcccaacattgcataggcaccaagtagctaaggtgggctgtggtcccagcctgtctgtctccaaagctgagctcttactcatcttccaaggctggagagg

SEQ ID NO: 889155 - DNA, 553 bp, Homo sapiens
tgtgaaagagaccactagctgctttccaatatcctttcctccttcattggtagaagaactccagcttttagctgaacaactgtaactcaataaagactaaatgtcccaggtttccaacaatataactgttctatccaatgagatataagaggaagcctcaagccgggcgcggtggctcacgcctgtaatcccagcactctgggaggccgaggcgggcagatcacctgaggtcaggagttcaagaccagcctggccacatggcgaaacsccgtctctactaaaaatacaaaaattagctaggcatggtggtgggcgcctgtaatcccagctactcgggatactgagacaggagaatcgcttgaacccaggagatggaggttgcagtgaggcgagatagcgccattgcactccagcctgggcaacagagcaagagtccatctcaaaaaaaaaaaaaaaaaaaaagaggaagcctaatatggaactttggggaactctccttaaaaaggaagaggttggtgtgatggataataagatctctgtctttgagtgctta

SEQ ID NO: 889156 - DNA, 584 bp, Homo sapiens
ctaatgctagggatggagatgtcctgccctcaatggactcaacaggggctacacaaatcaagagcggtatagtgagtaatatggtgaggaaataaatacctcttctaagaagcaaatagacttgaatatattagatagaaaaatatactaatgcctgcactgaatatgtgattagctttttttgtttttttttttttttgactgtctcactctgtaacccaggctcaagtgcagtggcatgatgtcggctcagtgcaacctctgcctctaagggtcaagtgatcctcctgcctcagcctcctgggtagctgggagtacaggcacacccagctaattcttgtattttattttttgtggagacggsgtttcaccatgttgcccaggctggtctcaaactcctgtgttcaagcaatccatccacctcagcctcccagagtgctgagattacagatgtgagccaccgtggctggccatgttgagcatttcttgaaaaatagcagaaacaattgcttccttaccaaaatggtatttttcatttttggtttaatgggtaagactggagaaggagacacttggccactatt

SEQ ID NO: 889157 - DNA, 634 bp, Homo sapiens
ttgcccgggttgccataacaaagcaccacacactgagtggattaaacatcagaaatatagcgtctcacagttctgaagggtagaggcctgagatcaaggtgctgggtttgcttttttctgtgggccgtaaggaagaatttgttccatagctatcccctaccttttggtgggtttctggcaactttggcattgcttggtttgtagaagcatcactctgatcactgctttcatcctcacatgggggtctctttgtatgtgcctctgtgtccaaaatctgccttttttagaatggcatcagtcatattggactagggtttgccctaatgacctctgttaacttgattacttctgtaaagatcatatctccaaacaaggtcacattctgaagtacyggtgttggagtttcaacatatcttttttagggggaacacgattcaacccatagcagcttcttaaaaggcaacctctttaatgtgaagaatttgaaatattgactcatttctggaagaaacaaaaacaataacaacaacaaaccaaactttaagagtaaggaatatctaactgggcagtgttggttgtcaaatgagtattatacacataactaaatttcagggctcaaattgacatgatttct

SEQ ID NO: 889158 - DNA, 629 bp, Homo sapiens
atgcatattatatgtatagtaggaagcttgacgtggcctccagggcccctgtaacacacaaaccgatggtgcagatagacatgaaaatagataggaaatagctggctgctgagatttaatagcttcatttattcgttcctttgttcctagcagtaaatactgctcggcccttaatatgtacaagctctgagtgatggtgggcacaaaaattactaaagcagctttattgttgttaaagagtttgccacctgattatgagaactctagcagtcatgatacaaggtgacatttacacaagagaaataccacagagtgatatatggcttggaaataaggaaaawtatttcttggaagggagagatttgaagaaaatgttttggacatttagaattctgagtcttaaactggctcttaaatccagaatttcaagaaatggatagaggaaagagagacattcaattcagaaagaatagcatgagctgggaatcagggaaaagcacagaatatttttaggcaaactgaaaaataagcaaagggattactatgaagtcaaactgcaaagtcaagccattgatgtcatactaaagagttggacttcattctgtaaacaaggagaaggaaaggcaagg

SEQ ID NO: 889159 - DNA, 629 bp, Homo sapiens
atgcatattatatgtatagtaggaagcttgacgtggcctccagggcccctgtaacacacaaaccgatggtgcagatagacatgaaaatagataggaaatagctggctgctgagatttaatagcttcatttattcgttcctttgttcctagcagtaaatactgctcggcccttaatatgtacaagctctgagtgatggtgggcacaaaaattactaaagcagctttattgttgttaaagagtttgccacctgattatgagaactctagcagtcatgatacaaggtgacatttacacaagagaaataccacagagtgatatatggcttggaaataaggaaaaatatttcttggaagggagagatttgaagaaaatgttktggacatttagaattctgagtcttaaactggctcttaaatccagaatttcaagaaatggatagaggaaagagagacattcaattcagaaagaatagcatgagctgggaatcagggaaaagcacagaatatttttaggcaaactgaaaaataagcaaagggattactatgaagtcaaactgcaaagtcaagccattgatgtcatactaaagagttggacttcattctgtaaacaaggagaaggaaaggcaagg

SEQ ID NO: 889160 - DNA, 623 bp, Homo sapiens
cactcatgttgacattagtcagttttgaaattcagacataaaggtatacacatatagatttgacatttgagattaacttacttttttccagttagattatggaagagataaacaatgactcagaggaaaatggagaggctatagaggtgaaatactgtaataatgtggctaaacttgcttgagagaagatgagacataagcctgctttgttagtcctttcatagagaaatgactcagcactgttagagaatatgatgaggttacattgttctttcatcacaaactgttgagttaatggtggcatatatagagtatagctctgattcataagacarttggtcattgtgcttctctctttttattttttaaagcaaattagtgctttaaaagagcatagtaatctggttcttttcatgaaaactgatgattaaaaacaaactacgaaaataattttaaatacacctgggtttccaaatggacagaggttgttgaaagtcatttttaagttccttcaaagctacaaagtctatgtgtttctcaaattatcttttgcaaatcttagtaggaattaaacttgtgcaaatccaacccctggctctttttagcctcgtgagagcagagta

SEQ ID NO: 889161 - DNA, 623 bp, Homo sapiens
cactcatgttgacattagtcagttttgaaattcagacataaaggtatacacatatagatttgacatttgagattaacttacttttttccagttagattatggaagagataaacaatgactcagaggaaaatggagaggctatagaggtgaaatactgtaataatgtggctaaacttgcttgagagaagatgagacataagcctgctttgttagtcctttcatagagaaatgactcagcactgttagagaatatgatgaggttacattgttctttcatcacaaactgttgagttaatggtggcatatatagagtatagctctgattcataagacaattggtcattgtgcttctctctttttattttttaaagcaaattagtgctttaaaagagcatagtaatctggttcttttcatgaaaactgatgattaaaaacaaactaygaaaataattttaaatacacctgggtttccaaatggacagaggttgttgaaagtcatttttaagttccttcaaagctacaaagtctatgtgtttctcaaattatcttttgcaaatcttagtaggaattaaacttgtgcaaatccaacccctggctctttttagcctcgtgagagcagagta

SEQ ID NO: 889162 - DNA, 628 bp, Homo sapiens
cttctatttgtatagtgtttatatgggccaacatttgcatatgttcacgcatgttatcttcacagcaattctaaaaagacaattaactcttgttatgtctgtttataaaagaggaaattgaggcacagaaatgtcaagtcacatgaacaaatccctacaggaaccatctttaataagtgtcaaagtaaggagtcaagctcaggcagtcatgcccttatcccacaaattttgagattctgccatagccagstttatgccttgcttctcacttgtgatggactttccagagcttggcccagtcactgaaacatggcaaacattgtcaatatttgatgagtaaagacatgaatgaatgatgcttttgcaactatcccattccctgtgcactcactgaatttttcttcccctttttatcatcgcagtgtttgaaaattttacttccttattttactagatatatctttgtctttacatgtgtcatctctcaaccagatgtaaaaggtacttccctgaagggaagaagcatgttttatacctgttatgtaacctccgtaagaatagctgaatactcagtttgtgacacacaaaaaccctaaaataactatctaaatagattgggaagttgggt

SEQ ID NO: 889163 - DNA, 595 bp, Homo sapiens
ggcaaaaagtgtatgtttagtcttggtcctaggttcctgacatacagctcccaaaaccctcagaatttcctgagtaatagggaattctgttattcataataagcccctttcaactacaccagcgtttatattactgaggtgactctaggaggaaaggggctggttaccagatggaccaaccctgggattaggataatcccacccccagcctccagggtgggcggggctgcagctaaaccccatccacctcttcatctgctgttcatccacattcttggtcacagcttcataataaaccrgtaaacatttgtaaatgtttccttgagctttgcaagccacactatcagatgatcaacccccagagatggtcttggggactcctgatttaaagtcagtcgttcagatgcacaggtcacaacgtgggactcatgactgccttctgaactgggggaagccaaatggaactgagcccttaacctatggggtctgcactaactccaggtagtgtagaactgggttaaattctaggacatccaggggcctctgaagagaattggagaattacgtggtgtggaaagaccacgtttggtgttag

SEQ ID NO: 889164 - DNA, 657 bp, Homo sapiens
cataataagcccctttcaactacaccagcgtttatattactgaggtgactctaggaggaaaggggctggttaccagatggaccaaccctgggattaggataatcccacccccagcctccagggtgggcggggctgcagctaaaccccatccacctcttcatctgctgttcatccacattcttggtcacagcttcataataaaccggtaaacatttgtaaatgtttccttgagctttgcaagccacactatcagatgatcaacccccagagatggtcttggggactcctgatttaaagtcagtcgttcagatgcacaggtcacaacgtgggactcrtgactgccttctgaactgggggaagccaaatggaactgagcccttaacctatggggtctgcactaactccaggtagtgtagaactgggttaaattctaggacatccaggggcctctgaagagaattggagaattacgtggtgtggaaagaccacgtttggtgttagaagtgttctgctgagtagagaaaccatgttttccattttacttttcacttgattacctctttaaagaacctgtctccaaatacaatcacattctgaggtactggaggttagggcttcaacatccgaattctggggaacacaacttggcccacagca

SEQ ID NO: 889165 - DNA, 671 bp, Homo sapiens
atacaaaagtgtatagaaaatgatccctgcttccaaaagctgcaccctttataggtaagctgtcaccctgacaattaaaacaactcagaaatttacttaaatcagctttgggaatgtgagatagtccctttaattcaggtaaagtccctttaattccatataaagataataatacctttccttgttactgctcayggtcattatgagaatcagacaggataatgtatgtcagtcactggtcaaatacggttgtgcctcccatgtgcctatgctctgccttagatgagccacactcagtcaggtatgaagaataatcaagggaggaagacaaagaccctgcccgagtgggagggagcaccgtgttaaggttacagttatcctgcctctttatccacacattttcctttcccaaagtccaggaaacgatggcttctgtaggttcctgagtggccagcacagtccagggatgaagagcaccatgcttcgaccttgactctgcacttcttagagatggaactttggcaaatgagtaacctctctctgcccctcactcattagcagcaaaacaaggatattagtatcatttgggatggttgaaaaaaataaaatgaaataccatgtgcaaagatcttaatgcacagctggacaggccgaaagtagtaactgctgtc

SEQ ID NO: 889166 - DNA, 618 bp, Homo sapiens
acaataacagtgcgaaaagttaacaccacactgtcaatattagacagagcaacgagagacaaaattaacaaggatattcaagacttgaactcagttctggaccaagtggacctaatacacatctacagaactctccaccccaaatcaacagaaaatatattcttctcagtaccacatcgcacttattctaaaattgaccacataactggaagtaaaacacccctcagcaaatccaaaagaacrgaaatcataacaaacagtctctcagaccacagtgcaatcaaattagaactaggattaagaaactcactcaggcggtggctcacacctgtaatcgcagcactttgggaggctgaggcgggaggatcatgaggtcaggagatcaagaccatcctggctaacacagtgaaactctgtctctactaaaaatacaaaaaaaaaaaaattagcctgatgcagtggcaggtgcctgtagtcccagctacccgggaggctgaggcaggagaatggtgagaacccgggaggcggaccttgcagcaagccgagatcgtgccactgcactccagcctgggcaacagagcgagactctgtctcaaaaaaaaaaaaaagaaaagaaaa

SEQ ID NO: 889167 - DNA, 574 bp, Homo sapiens
atgtccgataacaataaatgcaatatatattatatataatacgtgtaacagcatatttgattcatatataacatacatataatgaagaccacttcctactttccagtagtctatattcgacaggatgtaaggtaaacagttgttatttattcttttctttcagttgttttttttaatgccaacaacttgaaagacacctggtacccgcgtgtgagtgaacagcatatatttctagccaaagcaaagcagtgacatttttaggccattcaggaccagtgcaatgtattgtttatattacttctgccaaggtgggaattcctcctctaccttgaaaaagaactctgaattcaatgagagagaagcacagtaaggaatgagcccttagattcggaagtctaccgttcagtaatttaacataccacatgtrtgcacagcagatgtagcattgcaatgaatatttgtgctctagaataactattggaatcctctccttgaggcaaaaggagcctgtgctcacctgtgctccaaatggagccccggttcctctgggacaaaccagagataatatggagtt

SEQ ID NO: 889168 - DNA, 641 bp, Homo sapiens
aattcaaagatttacatccaagtttccaatgaagccatataacttcagtttcccttaagttatatggcttcattgtcatacagaaagttaaccagtcttctgtgtatcttatcaattttattttgatcctcaatggttccaagatggccaaataggagcagctccagtctatagctcccagcctgagygacgcagaagacaggtgatttctgcatttccaactgaggtaccaggttcatctcactggggattgtcagacagtggatgcaggacagtgggtgcagcccaccaagcgtgagctgaagtagggtgaggcatcgcttcacctgggaagctcaaggggtcaggaaatcccctttcctagccaagggaagctgtgacagatgacactggaaaatcgggtcactcccaccctgatactgcacttttccaatggtcttaagcaaatggcacaccgggagattatatcccgcgcctggctcggagggtcccatgtccacggagccttgctcattgctagcacagcagtctgagatcgaactgcaaggtggcagcgaagctgggggaggggtacctgccattgctgaggcttgcgtaggtaaataaagaggcctggaagctcaaactgggtggagtccacc

SEQ ID NO: 889169 - DNA, 412 bp, Homo sapiens
ttgtattatctcaatgtttggcattaattaatttcatttttattattgcacttcttattgtgttattattgcatctttgactacatacattaattcacttgtttattcattcaactacttacccaattatctaacatttacttagctcctactckgttctgggcatgtattagtaaataagacagatttttctctcaaaaagagataacatagcataaggactaaaaatttggactctgaaattggatagctggtgtctgaggcccagtttttgtcactcacttagacattatcttttctaagcctaatttgctcattgtaaagtggggattattaataggactatggtgaagattgaaggcattttgggagtgcttggcacatagtaagcactcatgaatgttcatcattg

SEQ ID NO: 889170 - DNA, 583 bp, Homo sapiens
catcacacatactatctacaactcagttattgaatacaaacttcctctaaaaaacaaactaaaaaaacaaactagggttctttagagtaatgcctgatgtgagttcattgtcggaagaacataattaatttgaaatactggttgtataccagaaagtgaagaattactttaagaatgatggggagggctgggtgcagtggctcatgtctgtaatcccagcactttgggaggccgaggtgggaggatcacctgtggtcaggagttcgagaccagcctggctgacatggtgaaactccatctctactaaaaatataaaaattagccaggagtggtggtgcatgactgtaatcccagctactcaggaggctgaggcaggagaatcgcttgaactcaggaggcggaggttrcagtgagcccagattgcgtcactacactccagcctgggtgatagagtgagacttcgtctcaaaaaagaacaaaaaaaaatgatggggacatgccagaaagatatggtcagcttggagatattctcacaagccaaacgtggtacaatctgagcatcgccatagagaatgatagggct

SEQ ID NO: 889171 - DNA, 624 bp, Homo sapiens
agaaaactggtaccaaggtggtggggagctgatgtaaagacctgaaaatgtggaagcaactttggaagtaacaggcagaggttggaacagcttggagggctcagaagacaggaaaacgtaggaaagtttgaaactccctagagatttggaggactcagaagaagagaggaagacgtgggaaagtttgaaacttcctagagactcgttgaatggctttgaccaaactgctgatagtgatatggacaattaaatccaggtggaggtggtctcggatggagatgaggaaactgttgggagctggagtaaaggtaactcttggtatacgttagcaaagagactggccacattttgccactgccctagagatctgtggaactttgaacttgatagggatgatttagggtatctggcaaaagaaatttctaagctgcaaagcattcaagaggaatcaaraggacaaatgtttgaaaaatttgcaggctcacaatgcaatagaaaagagagccatattttctggagacaaatttaaccccgctgcagaaatgtgcataaataatgaggagccaaatgttaatcaccaagacaatgggccaaatgtctacagggcacgtcagagaccttcac

SEQ ID NO: 889172 - DNA, 624 bp, Homo sapiens
agaaaactggtaccaaggtggtggggagctgatgtaaagacctgaaaatgtggaagcaactttggaagtaacaggcagaggttggaacagcttggagggctcagaagacaggaaaacgtaggaaagtttgaaactccctagagatttggaggactcagaagaagagaggaagacgtgggaaagtttgaaacttcctagagactcgttgaatggctttgaccaaactgctgatagtgatatggacaattaaatccaggtggaggtggtctcggatggagatgaggaaactgttgggagctggagtaaaggtaactcttggtatacgttagcaaagagactggccacattttgccactgccctagagatctgtggaactttgaacttgatagggatgatttagggtatctggcaaaagaaatttctaagctgcaaagcattcaagaggaatcaaaaggacaaatgtttgaaaaatttgcagsctcacaatgcaatagaaaagagagccatattttctggagacaaatttaaccccgctgcagaaatgtgcataaataatgaggagccaaatgttaatcaccaagacaatgggccaaatgtctacagggcacgtcagagaccttcac

SEQ ID NO: 889173 - DNA, 599 bp, Homo sapiens
gtattagttaatggctttgctgggtatgttttaaatactcaccatgttaaacaggaactctctccacctgagtttttctggaactgcaacctgttattttgttttaattaaaagacattattttttagagcagtgtttagtttacagaaaaaattaagtggaaagtacagagttcccaaatatacccttgcccccacccttagctgtcccattattaacatctggtttaatgtggtgaatttgttagaattggtaagccaatattgatatactgttattgattaaagttcatagttcrcattagttcactcttggtgtggtacagttctaagggttttgacagatgcatatcacacatccaccgttacagtatcatacagaatagtcacactgccctaaaaatctcctgtgcttcaccttctaatctctctctcctcttccccttaacacctggcaactactgatcctttcattgcctctatagttttgcctctcccaaaatgtcatgtttggaatcatacagtatatagccttttcagactggcttctttcacttagcaatatgcatttaaggtccaatggtgcaacgttccattttt

SEQ ID NO: 889174 - DNA, 666 bp, Homo sapiens
gatgagtaacccagagtctcaaggcccagatatatttagcagatagggccaattttgtgattctgtgccagagagatggggaggctttctaaagcggatcttaagtgaagtcaagagatgtagaaaaaagggaagagaaacctgaagggcagtttcttatcactttagttgtattagtccttcttcatgctgctggtaaagacatacccgagactgggcaatgtacaaaagaaacaggtttaatggactcacagttctacttggctggggaggcctcacaaacatggcagraggtgaaagacctgtctcacatggcggtacacaagaaaagagagcttgtgcagggaaactcccctttataaaaccatcatatctcataagacgtagtcaccatcatgagaatagcatgggaaagacctgcccccatgattcaattacctcccactgggtccctcccacaacacggaactgtgggagctacagttcaaaatgagatttgggtggtggcacagccaaaccacatcgttactcatatgtctcagtaatcacataaaggcacccagcaaatatttgtggatcttccctgctctgtgcaaagccaacagaagagcatataaaacaaaaacaacactaaccttgtgtgtttacctaattgcagaggagctt

SEQ ID NO: 889175 - DNA, 666 bp, Homo sapiens
gatgagtaacccagagtctcaaggcccagatatatttagcagatagggccaattttgtgattctgtgccagagagatggggaggctttctaaagcggatcttaagtgaagtcaagagatgtagaaaaaagggaagagaaacctgaagggcagtttcttatcactttagttgtattagtccttcttcatgctgctggtaaagacatacccgagactgggcaatgtacaaaagaaacaggtttaatggactcacagttctacttggctggggaggcctcacaaacatggcaggaggtgaaagacctgtctcacatggcggtacacaagaaaagagagcttgtgcagggaaactcccctttataaaaccatcatatctcataagacgtagtcaccatcatgagaatagcatgggaaagacctgcccccatgattcamttacctcccactgggtccctcccacaacacggaactgtgggagctacagttcaaaatgagatttgggtggtggcacagccaaaccacatcgttactcatatgtctcagtaatcacataaaggcacccagcaaatatttgtggatcttccctgctctgtgcaaagccaacagaagagcatataaaacaaaaacaacactaaccttgtgtgtttacctaattgcagaggagctt

SEQ ID NO: 889176 - DNA, 634 bp, Homo sapiens
ggaaaaaaaaaatgttgtaagaaatgttaacatagtgatatggtttggttgtgtccccccacctaaaatctcatcttgacttgtaatcctcacctgtaaagggtgggaccaggtagacataattggatcatgggggcagttcccccctgctgttcttgtaatagtgagtcgcatgagatctgatggttttgtaagcatttggcatttcccctgctttccctcactccatcttcctgccctgtgaagaaggtgcctacttctccttgccttccaccatgattgtaagtttcctgaggcctccccagcaatgcagaactgtgagtcaattaaacctctttcctttataaattarccaatcttgggtatttcttcatagcagcatgagaatggactaacacagatagcatggaagtatttaattatgagttaataaaatattggacaaatactggaagaaaataactatacacaaaaaaataaaattggaaattgctcaaaggcaaaactctggctagtagcatagtgaaatacacagaagataaaactgaaaaaaaagcaaatattatgaatagatgaaaatatgagtttaggattagaaagaaaatgagcgacatgggagaaaaacaaattacca

SEQ ID NO: 889177 - DNA, 605 bp, Homo sapiens
ctgaattatggtacacttgcttccagataaggaaacaggcgcccctagattaagaataaaggaggtcctgggcagagggttttgatcttgataggtgacagaacagatctaaggtaagacaaacatacagactctctccaggccctcagattggggagatcagtaaataaaggcgggaataatccacatcagatgatagggaatgagagggttccataatcgtatttctgcatctgaatcttaagcctagctttgcttctattcrttagatattggaaagactgatacagcattgcatcaaacctaagatgctatagactgaagtgacattcctattttatatgccattacgaacccttttaaaaatgccactcactaaactatggctgctataattatgaaattcattcaagttgctataatcagaaaaaaaatttgtgtcttaggatcgatgaaatacggtacaagctgtgaactgcaatgaacttggttctgaagctgtggaaatcgctcagcacactggggaggctcctgctaaccaaggccaaaaacatagttcaaacaacatggaaaataatctgtactgcatatttcaataagatttg

SEQ ID NO: 889178 - DNA, 636 bp, Homo sapiens
gctcccgaatgactactgggtacataacgaaattcaggcagaaataaagatgttctttgaaaccaacaagaacaaagacacaacataccagaatctctgtgacgcattcaaagcagtgtgtagagggaaatttatagcactaaatgcccacaagagaaagcaggaaagatccaaaattgacaccctaacatcacaattacaagaactagaaaagcaagagcaaacacattcaaaagctagcagaaggcaaaaaataactaaaattggagcagaactgaaggaaatagagacacaaaaaacccttcaaaaaattaatgaatccaggagctggttttttgaaaggatcaacaaaattgatagaccgctagcaagaataataaagaaaaaaagagagaagaatcaaatagacgcaataaaaaatgataaaggggatatcaccacygatcccacagaaatacaaactaccatcagagaatattacaaacacctctacgcaaataaactagaaaatctagaagaaatggataaattcctcgacacatacaccctcccaagatcctgtatttcttgaaattgacttctcatctggcctaatttctttcttgaatcctgcatctcacattctagatggacgca

SEQ ID NO: 889179 - DNA, 628 bp, Homo sapiens
cctttttttcaaacagctttagaaattagagatacagaggatcaggtcctccagacactgtgggatgatttcagatagtcaaagcatcagaacacaataaataacaaggaaaaagtaggaaacttaccgttatgctatcatctctgataaatgagctgctggcagataatacagttggctaagactgactgaatgccaagaacttttctaagctttttataggcattaacttatttaaccctcctaacaaaaccctaggtgattcatgtattaggaagacctgaggcatagagaagtttcgataacttgcccaaagtaatactgctaagagtaaacagagtcgatgttgaatctcagcaagtcagttttagagctcacactcrtaagaattatactctaccacatattttgggtagtgatgtattctgctcaagaagacatcatgatatacctagcctggatttttatccctgcttaagtaaaagcttgttaacacctccttcaaatctccctttgcctcacccagtactacttctccttctctgatctactttattctttgcatctactttattatttcttttccagatcctgatagtgactcagttcttgatacttggcccctctg

SEQ ID NO: 889180 - DNA, 626 bp, Homo sapiens
caacctccgcctcctgggcccaaatgatcctcccatctcagcctcctgagtagctgggactacaggtgcacgccaccatgcccggctaatttttgtattttttggtagatggtgtttcaccatgttgatcaggttggtctcraactcctgacctcaagtgatccacccaccttggcctctcaaagtgctgggattacaggcaggcatgagccaccatgcccggctgaggctggcaaaatactaatgttccgatttctttagaacgatatagttaagttccatggtggcaggaatgatgtctacctctagtgtctagcacagtaccttgcaaagagaataggcgcacaatacatatttatagactttatcaagtgacaatacgtttggaagcgattaagtataattgagtaataatcaatatttgtattcaaaaacaaagtatcatctaaacattaatttcttttttacctttatgttttagaaatgacattgatatacaaacatgcatatgcactcccccctcaacacacacaccagggtttctcaaccttaccactagtaacattctctgttgtgtgggacaattccactagcacctctcttctccaaattgtgatgatcaaaaa

SEQ ID NO: 889181 - DNA, 626 bp, Homo sapiens
caacctccgcctcctgggcccaaatgatcctcccatctcagcctcctgagtagctgggactacaggtgcacgccaccatgcccggctaatttttgtattttttggtagatggtgtttcaccatgttgatcaggttggtctcgaactcctgacctcaagtgatccacccaccttggcctctcaaagtgctgggattacaggcaggcatgagccaccatgcccggctgaggctggcaaaatactaatgttccgatttctttagaacgatatagttaagttccatggtggcaggaatgatgtctacctctagtgtctagcacagtaccttgcaaagagaataggcgcacaatacatatttatagactttatcaagtgacaatacgtttggaagcgattaagtataattgagtaataatcaatatttgtattcaaaaacaaagtatcatctaaacattaatttcttttttayctttatgttttagaaatgacattgatatacaaacatgcatatgcactcccccctcaacacacacaccagggtttctcaaccttaccactagtaacattctctgttgtgtgggacaattccactagcacctctcttctccaaattgtgatgatcaaaaa

SEQ ID NO: 889182 - DNA, 594 bp, Homo sapiens
caagtttttataaagataggttattttcaaaatataaacagcatggaatattgagacaatcatctaaataattcgagccaaagatgaccgcaaaatctctacaaaattgaaggaaaagtcatctgaatgcatattgtcatttacctgagtgcatattattatttacttataaaatatcttattcaaatattctcatacaggtttcaaactatcttcatcatcaattatgaaaactaatcaccgcaataattaaaaacattggccaagtttcagccatgttaaaactctagttttttttttttttttttttttttttttttttttttgagatggagtctcactgtctcccargctggagtgcattggcgtgatctcggctcacagcaagctccacctcccagattcacgccattctcctgcctcagcctcccgagtagctgggactacaggtgcccaccaccacgcctggctaattttttgtatttttagtagagacggggtttcaccgtgttagccagtctggtctcgatctcctgacctcgtgatccacccgcctcagactcccaaagtgctgggattacaggtgtgagccac

SEQ ID NO: 889183 - DNA, 594 bp, Homo sapiens
caagtttttataaagataggttattttcaaaatataaacagcatggaatattgagacaatcatctaaataattcgagccaaagatgaccgcaaaatctctacaaaattgaaggaaaagtcatctgaatgcatattgtcatttacctgagtgcatattattatttacttataaaatatcttattcaaatattctcatacaggtttcaaactatcttcatcatcaattatgaaaactaatcaccgcaataattaaaaacattggccaagtttcagccatgttaaaactctagttttttttttttttttttttttttttttttttttttgagatggagtctcactgtctcccaggctggagtgcattggcgtgatctcggctcacagcaagctccacctcccarattcacgccattctcctgcctcagcctcccgagtagctgggactacaggtgcccaccaccacgcctggctaattttttgtatttttagtagagacggggtttcaccgtgttagccagtctggtctcgatctcctgacctcgtgatccacccgcctcagactcccaaagtgctgggattacaggtgtgagccac

SEQ ID NO: 889184 - DNA, 647 bp, Homo sapiens
tgacaatgcaagaggaaagaaaaatccattttctggagagaaattcgagccagctggagaaatttgcataagtaacgaggagctgaatgtcaatcaccaagacaatggggaaaatgtctgcagggcatgtcagagaccttcacagcagcctccctaccccatcacaggcctggaggcccaggaggaacaaatggttkcctggggtaggccaagggcccccctgctgctctgtgcagcctcaggacttggcgctctgagccccagtcatggctaaaaggggccaacatcagcttgggccattgcttgagagagtgaccaggtggaggtatttgaatcatggggtggtttcccccttttccccatcctattctcatgatagtgagtgagtcctcaggacatctgatggttttataagcatctggcatttcccctgctggcactcattctatcttctgccaccctgtgaagaggtgtcttccaccatgattgtaaatttcctgagacctcaccaggtatgcagaactgtgagccaattaaacctattttctttataaattacccaatcttgggcatttcttcatatcagcatgagaatggactaacacaaagactgcgcttttaagcactaactatactatgctgtaaag

SEQ ID NO: 889185 - DNA, 611 bp, Homo sapiens
ctgggtatatacccaaaggaatataaatcattctgttataaagacacatgcatgcgtatgttcattgcagcactattcacaatagcaaagacatggaatcaacccaaatgcccatcaatgatagactggataaagaaaatatggtacatatacaccatggaatactatgcagccataaaaagtaacaaaatcatgtcctttgcagggacatggatggagctggaagccattatcctcagcaaacaaactcaggaacagaaaaccaaacactgcatgttctcacttataagtgggagccaaataatgagaacacatggacgcatggaggggaacaacacatactgggatctgtcaggggtcaggggaaaaggagggagtacatcaggaaaaatagctaatgcaggctgggcttgacacctcgatgatgggttgataggtgcagcaaaccaccatggcatgcrtttacctatgtaacaaacctgcacatcctgaatatataccccagaacttaaaataaaattttaaaaagaatatgtagcaccttttacacattgcatacactctacactaaatattattgaacatccccagttactcttcttctaaataaa

SEQ ID NO: 889186 - DNA, 460 bp, Homo sapiens
ggtggcagcctggcctgtggaaacctcagtagtggctcaacccttggaaaccaaggaggcagccctgattgcgtctgtgtcaccttcagggttcctcttccctgttcttgaaggacagtgcacatcacaaacatagctctaytggcctgtcctgtagagtctaagtccaacagccttctttcctttcatcccatctcccttctcttctgctccaactgcagtgtttctgctcatataatcccacaatgcctttattgagtattgtccagctaccctcctggtgttctcttctgaacatactttctcattttttgcagtatgaacaggctgagaattttccaagccttaaattctggtttcttcttgccaacattatgctcatgattatttatgtattcactaagaaaatggaggtattctctccagctttccttttttcctttctgtgccttcatgaaaa

SEQ ID NO: 889187 - DNA, 631 bp, Homo sapiens
gtatgtgaaagaaaaggcatatctaaaaagaactaaaaggggattctagaaatgaacaatgtaataattaaaatagaaaagttcaaaaaggcaggttaaacagaagactagacacatagaagcaaaaatattgaactctaacacagacattgggaaatcacacaggatacaggaaaaagagagataaataactggaaaatatgagagaataatttgagttctgcatggcaaaaagagaagcaccaatatattaagtgaaactatctttataggtcaaaatggttgactttcagcaatgtcatacagctctacctactatgtataatatgagttgcagagaagaaaacaagaaagaacgtgggagagataattgaagagytgagaactgacaatttttcagaattggtaaaaaaaaaaacaaaccatgatgcctcatattgacttgagtaatataaaatatagtaaaactatcaaatgtcaagaacaaagagaaaagctttaaagtcaccagagagaaaagacaggaaggactgaaaaacagcagacctcttgtcagcacccttcaagaataaaggcagtggtacaatctgtgaaaggcttacagaaggtactagcagcccactattccaga

SEQ ID NO: 889188 - DNA, 596 bp, Homo sapiens
cagcttgtatatgcatgtttatttcattcttaccagaaatatggaaacgctgcagaaaattaactccacttttttatttcacttcttcatacgtgcatattctgccaacattctatggaagctgaaagttttccaggacatgctcaccttgtattggcttttaatcttgctgaacttctacacaccggggggtccactaacattctgtcaagragacattgagaaggccacatgtgaatgggacagcagggagcagggacatgcacgttgcactcaaggcacatgctccattgtcccattgaacttcacttacaaaacctaagtttgggaataaaattaataccatttgacccagcaatcccattactgggtatatccccaaaggaatataaatcattctactataaagatacatgcacgcgtgtgttcactgcagcactattcacaatagcaaagacttaatcaaccaaaatgcccatcaatgatagactggataaagaaaatgtagcacatatacaccatggaatgctatatagctaggaaaaggagcgagatcatgtcctttgcagggacatggatgaagctggaagccatta

SEQ ID NO: 889189 - DNA, 596 bp, Homo sapiens
cagcttgtatatgcatgtttatttcattcttaccagaaatatggaaacgctgcagaaaattaactccacttttttatttcacttcttcatacgtgcatattctgccaacattctatggaagctgaaagttttccaggacatgctcaccttgtattggcttttaatcttgctgaacttctacacaccggggggtccactaacattctgtcaagaagacattgagaaggccacatgtgaatgggacagcagggagcagggacatgcacgttgcactcaaggcacatgctccattgtcccattgaacttcacttacaaaacctaagtttgggaataaaattaataccatttgacccagcaatcccattactgggtatatccccaaaggaatataaatcattctactataaagatacatgcacgcgtgtgttcactgcagcactattcacaatagcaaagacktaatcaaccaaaatgcccatcaatgatagactggataaagaaaatgtagcacatatacaccatggaatgctatatagctaggaaaaggagcgagatcatgtcctttgcagggacatggatgaagctggaagccatta

SEQ ID NO: 889190 - DNA, 596 bp, Homo sapiens
cagcttgtatatgcatgtttatttcattcttaccagaaatatggaaacgctgcagaaaattaactccacttttttatttcacttcttcatacgtgcatattctgccaacattctatggaagctgaaagttttccaggacatgctcaccttgtattggcttttaatcttgctgaacttctacacaccggggggtccactaacattctgtcaagaagacattgagaaggccacatgtgaatgggacagcagggagcagggacatgcacgttgcactcaaggcacatgctccattgtcccattgaacttcacttacaaaacctaagtttgggaataaaattaataccatttgacccagcaatcccattactgggtatatccccaaaggaatataaatcattctactataaagatacatgcacgcgtgtgttcactgcagcactattcacaatagcaaagactkaatcaaccaaaatgcccatcaatgatagactggataaagaaaatgtagcacatatacaccatggaatgctatatagctaggaaaaggagcgagatcatgtcctttgcagggacatggatgaagctggaagccatta

SEQ ID NO: 889191 - DNA, 666 bp, Homo sapiens
catttagcactgtaagctttcctcttaacatttaacatgcttttgctacatgccaaagattttggtatgttgtgtctctgttttaatctactttgaagattttttttaaatttttgccttaatttcattgtttacccaaaagtcattcaggagcaagttatttaatttttacgtaattgtgtggttttgggagmtcttcttggtattgatttctattttgcactgtgggtagagagtatggcagagatgatttcaattttcttgaatttattgagacttgctttatggctgaacatgtggtcaatcttagagtatgtttcatgtgcagatgagaagaatgtatattctatggttgatgggcagagtgttctttctgttatgtccaattggtcaagtattgaattcaagtccagaatttctttgttagttttctaccttgatgatctaacactatcagtgggttgttgaagtgccccacttgtttgatttttgttttgctttttggggggcctagtagtattcatggtttctctatcctctggatccaacctactgctctgaactcattttccacctcttcattttacttccacaagtctatcttttttcccttctgcatggactactgtcatagccttacaaggtctcttcactgttactactacc

SEQ ID NO: 889192 - DNA, 654 bp, Homo sapiens
aatttcaaacatatattcagaaatagaaagggtggtataattaaccccaagcacctatcatcctgcttccacaattatgggctcatggtgaatcttgttttattctaaccaccctcctgtaattattttgaagcaaatctttgacactgtatcttttcatccataaattttaaaagatttttttaaacaactacaacattgttatcacacctaaaaaattaacaataattccttcatatcatctaatatccagtcaatatttgaccttctccaactgtctcataaaattttttaagtgtgtttgaaccaagatcctagtaagggtcactcaagtcgcttttagtctataaattccccttcatctgttatgccttgtgatgtgtttgtgggagaaaccagcttgccccgtagtgtttctcacagtctggattttgctgattgtatccccatggtatcatttaacatgctcctttctcccctgtattccctgtgactyggcagctagatctaggcttaatcagattcacatttaattctttttaatcaagaacactttgtaggtggtgatatgtttggtcggctctctttctgtaatattagcagccagttgtcatcattgtcaaaattcattaatccattagaggctgcaaaaag

SEQ ID NO: 889193 - DNA, 587 bp, Homo sapiens
atggatcattctcaaggatagatcatttgttaggccataaaacaactcttaaaacttaaaaaaattgaaataatatcaagtatcttctctgagcacaatggaataaaactagaactcaataacaagagaaaatttggaaattatataaacagatggaaattaaataatatgttcctaaatgaccagtgggtcaatgaaaaaaataacaaggaaattattataaaatttgaaacaaatgataatggaaacacaacataccaaaacctataggawacagtgaaagcaatactaacggggaagtttatagctattagtgcctacatcaaaaaagtagaaaaatttcagataacctaatgatgcatcttaaagaaccataaaagcgaaacaaaacaaaacccaaagttagtagaagaaaagaaataatagagttcagagcagaaataagtgaaattgaaatgtaaaaaatacataagatcaatgaaataaaaagttgactttttgaaaagataaacaaaattgacaaacctttagccaggctaagaaaaaagagagaagactcacataaaatcagagatgaaaaaggagac

SEQ ID NO: 889194 - DNA, 628 bp, Homo sapiens
tttcttacagttctgaaggctgggagatctaaaatcaaggtgctggcaggtttggtgtctgtttggcggtgtttgttgtttgctgttctttctgtatccaagatggcatcttgctgtgtgctccagaagggacaaatgctgtgtcctcacataggtgaaggcagatgaataaaaagagacaaactctctctgaaggctcttctgtaagggcattaatccgytcatgagggagagccttcatgacttaatcacttcccaaagggtccgaaactcttaataccaccataacggggattaagttgcaacacatgaattttggaggggaaccattcaaaccatagcatctaccaattttttaaaacacattttagactaccaaagtattaatttttatacaacttggaatagatgttctcctctgaagtctctgtgtaactgaagaataacctaagaatgcaaggctgtaagggaataagtttgtgtttttccaagccactaagtttgtggtaatttgtttcaataggtacaggaagtaatacacacccccgtatcaagtatggagcttctaggcttatagtctgccaccaagttcttagggtgtcaggtcaccatcctccctacctgaaga

SEQ ID NO: 889195 - DNA, 667 bp, Homo sapiens
agatgaagatggcttgggaacaccaaggtggaagattctcaagcacaagaaactcactggtactttgccttaaaagcatattgaattaaatacaggtagtaccaaagaagtggaaattatactacacaaaatactccttctggatgaatgattaagtgaggtatctggataagaagctatggagaaagactgctgctggtaataaacacttttttacagaatctgaggattaagaaaactcttgccctgtagtgtgagttygacaaatgctgtttaaataaaagcaactaggctgagtgcagcggctcatgcctgtaatccctgcacttcgggagtctgaggtggatggatcacctgagaacgagagttggaaaccagcctggctaacatggcgaaatcccgtctctactaaaaatataaaaactaactgggtatggtggcacatgcctgtaatcctagctactagggaggctgaggcaggagaattgcttgtacctgggaggtgtgggaggtggatgttgcaatgagccaagatcacgccactgcactccagcgtgggtgatgatggagtgagactctgcctcaaaataaataaataaataaataaataaataaataaataaataaaataaaataaagcagctagtcatgctgtcccacattaagg

SEQ ID NO: 889196 - DNA, 671 bp, Homo sapiens
actgttgaataatgcttctggtataacacatagtgtttgaaaatgtacacaatacactgtaatatccaatgcatacatcaaagtaaatatattttattctaggataattattaaaacattaagaaatactctttaatcatatatgttaaaacttgtagaaaatcaataacatacaagtaaagaagatcaagaagtcaaaaaaagtaattccaagtgtagaaagcatggtgaaaagtgatggaagaaaactgcagaaatttaaaatgtgaaattaaaatatataattattaatcaaaatacataattctyaattaaaatacataattcttcattgaaccccgaatctgtcaggacatatgtgtgatcttggataacgcattcaacctcctgaacactgaatttccttgactgtaaaatgttttagagatgttcctcacccggttgcatgaagcaaacctctgtgtgttaaggcacttcccacagcatctgcgacacagaacagtggcatctgtgctcttcgtagtctctgaacacagacccacagcagtatattttgtggtttttttttctatataaaaggctttgaaaatgtcccacagcttcctcagtaagtgactgtcaaaaggggcagccttcaaaagtagaattctggcaaatgtcttcaaaagaca

SEQ ID NO: 889197 - DNA, 587 bp, Homo sapiens
accttttgggaggaacctggtgggaggtaattgaatcatggaggtaggcttttcctgtgctgttttcctgatagtgagtaagtctcatgaggtctgatggttattataagggggagttttcctgcacaagctctctttgcctgctgccatccatgtaagttatgacttgctcctctttgctttccaccatgattgtgaggcttccccagctacatgaaactgtaagtccaattaaaccttttttcttttgtcaattgcccagtcttgggtatgtctttatcagcagcattaaaacagactaatacagtaaactggtatcagtagagtgggatgctgctgaaaagatacctgaaaatgcagaagcaattttggaactgcgtaacaggcrggggttggaacagtttgaagggctcagcagaagacaggaaaatgcaggaaagtttggaacttcctagagacgttttgaatggctttgaccaaaacgctgataatgatgtgaacaatgagatccaggctgatgtggtctcagatggagttgaggaacttgttagaaactagagcaaagttgactcttgttatgttttagc

SEQ ID NO: 889198 - DNA, 588 bp, Homo sapiens
cagttgatttattaaacctctactaagtgaccaaactttattaaactccatgaaaccccatgcccaacctccttctcagtcacactgagacactcttgtacattttccacatggggtttcaattccccacagtatttctgtgacttccttgaagaccacactctaactgctgtcatgtggcctctgcctacctacttttactgagaaaggctaagtttttcttcagagtatcatagttctccttaaatactgttgacgactrtcattgtcaactgatacatcctttctggaaagcattttcagttttcttcaaaaggcctttaaaatattcaggctctttgactaagtagttacacttctaagtttacttgaaggaaacaatcagcaatattccagagatatatatgcaatgagttcagtgaatggctaagacagaaccactgtaaataacctttatacccaacagtgaggaattaatttcatttagttacccaatctaatcgaatgcagcaatgaaaacattttttagaaggttatttaattcatagaaaagcatccacagtaaatttttttcaagtattaaaaaaa

SEQ ID NO: 889199 - DNA, 630 bp, Homo sapiens
ccccaccataaagcccagcaacttcttgcatgtaaccggctctttaaaaatatttatcatttggccaggtgcagtgactcacgcctgtaatcccagcactttgggaggctgaggtgggtggatcacttgaggtcaggagttcaagaccagcctggccaacatggtgaagccctgtctctactaaaaaaatacagaaattagctgggcgtggtggtgcatgcctgtaatcccagctacttgggaggctgaggcaggagaattgcttaagcctgggaggcagaggttgcagtgagccaagatcgtgctactgcactccagcctgggtgaaagagcgagactcagtatytaaaaaaaaaaaaaaaaaaaaaaatgtatatctatatctatatctgtatctatatctatcatttggatgactaatcagaacacattgaatggtttttctctattattcattatgaccaaatgaataccagttattgtcacgtcaccaagcatgtcaccactattcagccaagaattgagatgtcgtgtttcaagagacgttcattctcctgccatgatccagtcacaactgatgggcctgcatagtagcacttttctaagtgatagcctttatatttctttaga

SEQ ID NO: 889200 - DNA, 661 bp, Homo sapiens
gtaaacatacgagtgtatgtgtcttttcggtagaatgatttatttttctttgggtatatacccagtaatgagattgctgggttgaatagtagttatattttagttctttgagaaatctccaaactgctttccacagttactgaactaatttacattctcaccagctgtgtataagctttcccttttctctgcagcctcatcaacatgttattttttgacattttagtaatagtcattctgactgtgtgagatggtatctcattgtggttttaatttgcatttctccgatgattagcgatgttgaacattttttcatatatttgttggccacttgtatgtcttcttttgagaagtatctgttcatgtcctttgcccacttcttaaggggkttacttattttttgcttgttgaatgaagttccttatagattctggatattagatctttattggatgcatagtttgtaaatattttctcccattctgtaggttggctttttattctgttgatattttcttttgctgtgcagaagctctttagtttaattaggtcccacttgccaattcttctttttgttgcaattgcttttgaggacttattcataaatcctttgccaaggccagtgtccagaagggtatttcctagattttttcttttagaa

SEQ ID NO: 889201 - DNA, 609 bp, Homo sapiens
tccttttgagagttgatttttcagtgaaacttcaaagggcccttggtccccacaccgctcttatgctgcttattactttctcctagcacagtgtaataacccacggatgccagagtcatctgcctcattgcaaccacattaggggctaatgagataaccaaaatatcctgtaaagttcaaagtactatataaatatgttgagttttaacaagtttgtgatgtattatggtaataagcagaggtgagtgttgctccaaacttttttttagattcagcgggtacatgtgcgggtttgtgacatggatatgttgcataatgctgagatttgggcttctgttgaacccatcatccaagtagtgaacatagtacccaatagcaagtttttcagcccttcccacctcccctcctgyctctttttggagtccgcagtttctgttgttttcgtctttatgtccaggtgtattcattgtttagctcccacttttaagtgagaacagtattgcagtatttgattttctgtttctgctttaattcacttaggataatgacctccagctgcatccatgttgttgcaaaggaaatgattgcattatttttatggctgtgtaa

SEQ ID NO: 889202 - DNA, 599 bp, Homo sapiens
gaagtcaaatgtcaagaccccatattttcttcctggaaaatagctgaaaaatgatatacatgaatactaccataagagttactcatagggatagacgaagggcatgaaaggaagaaaataggtcagtaacagaatatgtgacacgggaaaggggcacacttagatttttccactcacatcaagagttctctctactatccctctcaatgggcttaggaaatctccttgtaagaaacttctagataaacccatacgcaactcaaatatctgctctgccactttttagatagytaatttggggcagatttcttaactcctgtgagccccagtttcaacagtttgcatggagatatctactttacagggttgctttgacgattaaattgactaacgtagtaatattatgcaatgtgcttgcagaaaattgctcaaaagatgtaatttttagctttttataatgtggatagcctatgtggctagagcagagttgctctagtgttcagcaaactcccccagccccattgccaaccctcagcccccctcaggtacaagaaaagctaaaaaaaaaaaaaaaatggatagcttcaatacaatggtgt

SEQ ID NO: 889203 - DNA, 543 bp, Homo sapiens
atataaatgatatctgtcttatcccttaggactatgttgagaataaaactgaagtaatgtgacaaaattcttcagaagtgaagcattttaaaaagcaaaaaggtaccttactgatctaagggtagtatagaaacattgcagagatctatagaaatcttttatgtacgtgtaggatttcctacagagcattctggtccttttttcctctgcctatattttaaattagactctgttctttcacwacaaaacttgcacagtaagctttcacctttgtttcttgccaatctttaactattgcatccatttgatctgagcagagccagctcacgtcagaagtgaccatttcatgccatgcagtctggttcccctcacactgtccatgtgagaaaccagcatgaagaaacatccaagatgagatttaaatgcgcaaaccagggcaatcacgtctttaagggctaacagatttttcctgacatcgattttcagtttctcactgggcatgaaatatacctacattcattctaaagtgatcttacagatgag

SEQ ID NO: 889204 - DNA, 559 bp, Homo sapiens
atgtaccccaggtcaactggctctgagtacagcacagcaccaaaacttgcccaggaatttctggccttgtggtctgcactgtttttcaggcctatttaagaccttagagcactttagtccacgctagtggggcatgctaaaactcaggttttgatcactgggatggatgattcctctctggttagtgctggcctacatattccctccatggctgmagcccaattctgccctgtgatgttttccactgtgacagggtagcattgagttccaatgcaaaatcccatagacactttgctctccctcccccaagtgcacagattctctctccatgccatgctgcactgctaggggatggggaaagagtggtgttgacaattaaagactgtctttcctaccctcttcagcacctctttccttgctatgacgttaaatccaagttctgtgattgttcacctgattttttagttcctatgaagatgctttcttgtgtggatagttgttaactttggtgcttctgcaagggtatgatcactgcagggttctattcagtcaccttgtt

SEQ ID NO: 889205 - DNA, 635 bp, Homo sapiens
agccttaaagaggtgattaagttaaaataagactgagtgggtcccaatcctatctgactagtatccttataagaagaggaaatttggactcacaaagaggcactagggatgtgtatacagagagaagaccatgtgaagacacagcaagaaggtggctgcctgcaagtccttagaagacaccaaaacttgccaacacygccatcttggacttccaacctccagaactgtgtaagccaccccattggtggcattttgctatgtcagccctagaaaaccattgcatttttttcattgatcttggccttaagcagctcatccaaaatcttctcttgtttcccctgtgctgtgtctgagaccacggaatttcctgcttggcactgggcattgagatctgagtgtttcatattctaccacttacttggaagcccaggaatggttgcaacatcaggagagtttagggaagaacatgtgtggccacgtggttgcctgggctttgctgtcttcctatgccaggctgtcctcccttctggttgggtgtatgtgggtgcatatacaagagtgaccctcggatcaaggctattttctggattaacctgcggtcctgaagcatttactgcagttagagcaggggtccc

SEQ ID NO: 889206 - DNA, 666 bp, Homo sapiens
tgtgatctaatcctgggagtaacatcccatcctattcccaggtctcacccacactcagggggaggggattgcaccggacgtggataatttcagtataatttcattaaccacttagttttttgtgctatttttatcatacattttccttgtacatatgttataaatgtagcaataccttgttatcttatttgttttcaatagtcaatagttttttagagaaaatttaaaaagacagtcccatatttatctatatattttatcctttctgwtttttaatttgatttttttctgccagatccaggattccatcttgcatcacttctattaatcctgaagaacttccttagtatttttcatagcccacgtgtgctgctgattaattctcttagcttttatttatcagaaaatgtcattatttcaccttcagttttgaagggtattttcacggggcaaagcactttaagttggcaatttctcttttcttcaactttctataaatattttattcccttaaatatcttggcttccatcattcctgatgagtagccagccattatacttacttcattctcccgaaagcaatgtatatatttttttgttctggctgcctttaagattttgtatttttgcttttaaaaattttgatcatcatacaactagttttgc

SEQ ID NO: 889207 - DNA, 644 bp, Homo sapiens
ctgggatacatgagcagaacatgcagatttgttacatgggtatacacgtgccatggtggtttgctacacccatcaacctgtcacctacgttaggtatttctcctaatgctatccctcccctatcccccaaacccctgacaggccccagtgtgtgatgttcccctccctgtgtccatgtgttctcattgttcaactcccacttaygagtgagaatatgcagtgtttggttttctgttcctgtgttactttgctgagtatgatggtttccaacttcatccatgtccctgcagaggacacgaactcatccttttttatggctgcatagtattccatggtgtgtatgtgccacattttctttatccagtgtatcattgataggcatctgggttggttcctttgatattgtgaacagtgctgcaataaacatacatatgcatgtatctttatagtataatgatttataatcctttgggtatacacccagtaatgggattgctgggtcaaatggtatttctggttctagatctttgaggaattgccacactgtcttccacaatggttgaactaatttacacccccaccaacaatgtaaaaatgttcctgtttctccatatcctctccagcatctgttgtttcctaaagca

SEQ ID NO: 889208 - DNA, 583 bp, Homo sapiens
gtgaaggaatctttatactgaaaactataaaacattgatgaaagaaattgaagaagacacaaataaatggaaagatatcccatgttcatagactgaaagaattgctattgttgaagtgttcatattacccaaagtgatacatagatttataatccctatcaaatttcaacggcatttttcacaacaatagaaaaaaattttaattaaaaaagctataaaaattctaaaacccaaaccacacacaaaaaactaaatagctgaaacaattctgagatctcgagaaagaaaaacaatgtcggaggcatcacacttgctagaaacttttcaatgaaatcactttctcagtgaatttttacaaaaggtatggaggtaattaattttagtatggtgttcttcactcacatatttaacaaaagaaaaacatttttgtttgtttytccgatactggccagaaatttgtattacatggatagagtttacctagagaaatattgggcagccacttgagatctctgaaccagccagtgctatatgaaaagaaaataattatgtccttacttgcaaccaggttgcaacatgcaac

SEQ ID NO: 889209 - DNA, 693 bp, Homo sapiens
agaatgtagagcagccctggtatatcttctttttatttagaaatagttttaaacttagaaaaaaacttaatacaagaaactttttcccctaaatcatttgagagcaagttgctcacatgctatcctatcaccaaccaatattttagtgtgtgtttccacaagcgaggacattattctacataactgcaatacagccatcaaactcaggtcattaacattgacatattactaccatctaattcatacaccccattcaaatttcttcagttgttccaataatgttatttatgacaaaaaatccaatccaggatcacacattgcattgaactgtcatgtgtctttagtctccttccaactgggacagttcctcagtctttccttgactttcatgacactgatggaacagtttggaaatctacagatgatctatgttttaggatgtctcccaatttaagtttgtctgatatttcctcataattggaccaggttattcatttggggcaagaaggtcccagttgtgatggccgcatgtgtgtcacacactccatcasgtggcattcgatcctgacttttcccattcgtgttgaaattcactttgatcacctcccagtttctccaatggaagttgctcttttccttttgaaattagtatgaatgtcatgggaaggtaacttgagaatacgtaaatatcta

SEQ ID NO: 889210 - DNA, 651 bp, Homo sapiens
tttcaaagccaacatctattttcatccctgtgcctagcttttctgttttttttttaatcggtacattcttatatcttgattttaaaatccattgtccagtttttctgtgtacgcttatatttatccataacatgaaccaacccagatgtggaaagaataaaaaatgcattgtctcctttacaccwccctgcgtggaaatgtgcttgcttctgcaccatctaatgcattttgttgtccaaatacacacaccagagactgataacactgttagccctgagactaaccaggtcagagcacatcaggaacattgcagatagaaaacctaccatgccaatgattgtggtcatttttagcccagtggagggagctggtttgacatcagagacacagctaatgtcagcaggatacagcacataaaatcacatttctcctccttcgtaccttatgcaaaccaaggaaactggttttatttccaatttggcaacaaaaaagaacaaggtgctaatctttcaaataaagatggaaatatttttcctagtgactgacttttcagcactatttctaagtgaactgtccttggggaagcaacccaggatataattttactgtcacataaaacattgcattatattttagtcaaatacattttat

SEQ ID NO: 889211 - DNA, 595 bp, Homo sapiens
aaagtaaaatttgattaaaataattatatcaaacttatctcttaacggatgctaggaaaggtgctatttcacatgtataacctcaccgtattttcaaaactattatttgccccatgttataaatgaggaaggaaactgagtctcagagaaggtaaatcattttctcaagtgcacagctgggattccagccaggcgagtctattctaaacccattaaatgtcatattttaatgttccttgatttctccattcaaaaacaagagaaaaggattaaggcaaatggaagagggggatayttaaatgccaacataaaagagtaggcacaaatatctgactttgtgaaatagtatgactttgtggaaatagatgtaatttgaaatgcagttaaaggaatccgtgaatgaaatgagaaaagagatggaaatgatgtcttccgcagtaacatcagttgtgcataacaatgtcatgggtaaatgcccatctgataaagaggttttaattaaactaaataatttattatccattatacttcaataaattaaaaaggatataatctaagatgctttatttctctgaaacaggattgtataccataa

SEQ ID NO: 889212 - DNA, 615 bp, Homo sapiens
taccaggaggctgagtcagaattggaacccagattttgtgtctctagtttgtttttttactctttctacatttatgacagctaatctttgtcacaagtaaattgtatttattccagtggagtagtaagaaagcagttaatccagtttagcgctataaaaagctcagttttcaagaaaatgtaaagcttctaaatatagtggagattgtgatctttttgttttcattcttcttgagagttaagccattgaaataaagatttagccgagaataggacacagtaagttaatgtgtgaatgcaggcgagggattcacaggtaatggcagtttgaaattgaacacttaatggagcttgacacctacttgggataagctgtaggttaggtaatgacacagctataaagttgagttccaataaagtatcgagatttcytaaattaaaggccatactttatttatagactggttaaggaattatttatatatacttttttggcatagagtttttttccatctggcagacatggaaaattaaaaggtaaattaagagagaggtcacacatataaggcattttgtaggacttagcttgcttggtttgaaaacaaaacaaaacaaa

SEQ ID NO: 889213 - DNA, 659 bp, Homo sapiens
agatacatttaagagtctattggaacacaaagaagaaaacacttcattttgcctagaaaggtcagacatttgagctgagtactgtaggataactatgtcaacaagaggggagtgatgtatcagcttgtataacataaattttgccacagtaaccaaaaatccccaaatcttgatggcttatgacaataaatgtccaagtttgcttgcaaaacctgttaggctggcgtgggaactctggtgcccgtgtcagagcctccagcatctggtgcaccgccggtggctatagcaaggaaaggggaaatggtggatcgtgtactggctctttgcatctctatctataagacacgtgtcacttctgcaccattttcatttgccaaagcaagtcacatgatcatacctagttttaatggggaagggcagtgcctttctacaatatacgcagaaggcaaagagcaggaatactgaggaatcaycctaacacttcccaaggattggagaggataagtaaacccaggaaaaaggacacgtgcaaacgcatgaaagtgaaaatgtgcttggtgcaggtggttcgtggtggtttcaatgatgaaagcacaggatgcacgggggagaaaagcgtggggaggagaggaaaaggcaggcaagtgtcgaatcatgaa

SEQ ID NO: 889214 - DNA, 658 bp, Homo sapiens
aactaaaagataattgcatagtaacactgcagcatatcactgaaaagaaagcactgggggaaaaatggttttatgaccttgaccttttgtgcctccccaactaatattttacctataaaaattagcttaaaaacatattctggggattcttcattcctatcacaacccattactatttgaacaaggaagaatgaatatacatctttagaaaaataaaatattaagatataattaatayacaataaactgattatatataggtataaaattggtgaattttgatatatgcgtatagccatgcaatcaccaccataatctttcctcattcccttttgtatgcccttctcctgtctctccccagccctactttccccattcccaggcaaccactgatctacgtcgtatcactttagtctgcattttctagaattgtacctaagtggtacaacttgtggctttggttttttcacttagcaaaattattttgggattcatctgtcttgttgcatgtatcatttctttttatttctaagtagtattccactgcctgcatataacagaatttctttgtctattcgcctgttgatggatgctgggttgtttccaggttttgggctatcacaagtaaagttgctgagaacattcctatacgagtctg

SEQ ID NO: 889215 - DNA, 658 bp, Homo sapiens
aactaaaagataattgcatagtaacactgcagcatatcactgaaaagaaagcactgggggaaaaatggttttatgaccttgaccttttgtgcctccccaactaatattttacctataaaaattagcttaaaaacatattctggggattcttcattcctatcacaacccattactatttgaacaaggaagaatgaatatacatctttagaaaaataaaatattaagatataattaatatacaataaactgattatatataggtataaaattggtgaattttgatatatgcgtatagccatgcaatcaccaccataatctttcctcattcccttttgtatgcccttctcctgtctctccccagccctactttccccawtcccaggcaaccactgatctacgtcgtatcactttagtctgcattttctagaattgtacctaagtggtacaacttgtggctttggttttttcacttagcaaaattattttgggattcatctgtcttgttgcatgtatcatttctttttatttctaagtagtattccactgcctgcatataacagaatttctttgtctattcgcctgttgatggatgctgggttgtttccaggttttgggctatcacaagtaaagttgctgagaacattcctatacgagtctg

SEQ ID NO: 889216 - DNA, 622 bp, Homo sapiens
agaattgtacttttaatctctgtatcccacacaaggagggcaagtcttaaaaagagtaggtgctgaataaacttaaaaacacttcatttaaaatcactactaaagccccaactgaatttgtacatctcaccatctagcctgggctatgggccttactactagtcagtggcaaatgtgacttacagtatcttctgaattggaaataaaaagaatcagatctttaaagttaattttgcaaayttgatgttaagagaaacagaggacataatatgcaaacacattttctaaataaattcaacccattggctgggcgcggtggctcacgcctgtaatcccagcactttgggaggccgagacgggtggatcacaaggtcaggagatcgagaccatcctcgctaacatggtgaaaccccgtctctactaaaaatacaaaaaaaaattagccgggcgtggtggcgggcgcctgtagtcccagctactcgggaggctgaggcaggagaatggcgtgaacccgggaggtggagcttgcagtgagtggagatctctccactgcactctagcctgggcaacagagcgagactctgtctcaaaaaaaaaaaaaaaattcaacccatcagccatc

SEQ ID NO: 889217 - DNA, 623 bp, Homo sapiens
gaagaaaaaagaaaacacaatagtatattagaatgttcaactgtgaataatgtttgcacggttttaattatataatgtataattacacaaacactaaatatggatttaccacaaaattatcttaacttggagagatgcagagaggattgtagaggcctaaacatacttcaaagatgcaacacccacaatatgaagacagcatatatttgaataattatcctctgtaatgatgaaatttccagagacaaatgagaaggcccaagattgtattcctyggtagtttaagcccataaataaaacaaaacaaaaagctcccaacgaatttgccttatctttctcaccccatgaattaaaaatctaaggatattacagtctttcttagtttatacactgctcagtcctagccagagggggccctgttcacttgattagaggtacagttccatccacagccacagctggggctctgtgggattttttcaggactctagaaattaaatccgtttcagttcaagtctctaatatgtgcctcccttttaagagtctgaatagttaacaatccatgagattaccacagttctagcctcacacttacaaaggtgcaaaagtaagtgggctacaga

SEQ ID NO: 889218 - DNA, 602 bp, Homo sapiens
aacactacttgctcaaattattacagtctgggttaaaaattatgaatatgaacctgtttggaaaaaaactgaatggcatcaaactcatatcagaagcaaatccatagttctacaagaatagaaggaaaccaaatatgsaactcaaggtgggagaaaaagaacaatgaactaaaactaaacaaacaaaatcaaaatactccggagaagattattattctaaggctgaaaataatggagccgtgacagtaattccaggcaatcacgtctagttactaaaagcgattatggatctaaaatggggacagtgggactggcaagtgattttatttactgttcctctttattaccattttataagcttctgatgtgtgaactctgagggtatattcatttagtcagaaaatggcttctggagcaattgaaagaatgactcatttgggtaagggcaaatatggaaacatgtaaattagtaaatgtaagaaggccagagcaaattctgcataggagaatagtgtaggtctcactgatgttgaaaagaaaaagcacttgcaaatgaaaagccttgcatgttaaaaaaataaaaaataaaaaggtagtacatt

SEQ ID NO: 889219 - DNA, 616 bp, Homo sapiens
aaggttactatcattattactattttggatggtgtttgagagtcaggagatgaatgtggagctgcctcattttctttaaagcaatttttcagaggtcacttaaatagctaaatccgcctccctatatcccactatgatagggacaaaaggctccaggggccccagcatttgagaacttgtagtcactagaacttttctaattgatgtccatgggtaataaatgactttgtgcagttggttgtggtatttatgctttaaggaaaagtaaacctctgatatctatcttgcagctctttgtctactgacaaccattgatctcttctcaaaaacttccagtgacacacacatgtccctcatctccacctatcatacacaaatgggatttaagaaacaaggtcactcytaaaaaaggatgttaaaaaaagcaaaaaaaaaaagcaaaaaaaaaaaaatcctttgttaactctaaacaacaactctattgttacatcaaatgaaagtaagtagaagttgtcagaaatgtagttctaccatatttaaaatgtttattttatcttataattggggcaaccttatgggaacaaagagtgggtttgatgatggcaattactttaca

SEQ ID NO: 889220 - DNA, 623 bp, Homo sapiens
ttggtataaagattattttattattattatttttttttttttgagatggagtttcactcttgtcacccaggctggagtgcaatggcgtgatctcggctgactgcaacttctgcctccttggttcaagtgattctcctgcctcagcctcctgagtcgctgggatgacagagcccgccaccatgcccagctaatgtttttgtatttttagtagagacagggtttcaccatgttggacaggctggtctcaaactcctgacctcaggtgatccacccaccttggcctcccaaagtgctgagattacaggcatgagccactgggcctggccaaaaccatccttaagttgatatacaaaaatctttactctgcattattctgtgagttactcattgctgagcaactcccacatgcacatgtaaataaaccttgtcttttctcctgttaatctatttccagttaatttgcaggcccccaagcaytggacccaagtggtagaggaaaaggttttcttcccaacattagtatatttttgcctagtgattcacagtaactgtaggtttttaacaatatagtatggcaattccaagttgtccttaacatttacaactttcaccagtggttatag

SEQ ID NO: 889221 - DNA, 557 bp, Homo sapiens
gtaaaattgagtgctttgagctctaggccagcattaaaatgaagactgaatgattattctgataaaatccatacacaaccatcaacatttgggagtgatcctaaatctatttatgatttgggcaggtgggttttcatgactattgtctgtaacaatttttcataagtcagaactgaccataatttaaaaagtggtgattgatttaaaaataaagccaggcataggtacagaaaggaaaatactactgcaatagaggtaggagaactattacaacagaaaaaacgctcggaacataagatctgcaaagctctgaaaggataaacagaattaaattttatttatagggaagagtaaacaaggctagaaagaactggatatggaggagtgagatgagctagtggtgtaatcagttgatygaaaaattttttttccctaaggttagctgattctcaggagggacttgtaaaagagagaccaaagttgaggaatctggaaaaaactgcctaaattttggtaaagttaggttacccagcatttttccatattggtcaatagca

SEQ ID NO: 889222 - DNA, 636 bp, Homo sapiens
ttttcagagtggttgagtcacttttccacagcccgtgtgtagagggagtctggatacagagattttgaaatcttctggtaatagatagtaccctagagagaaatctcctttcccgtcacccatcaccacccccttagagggctggtgtctcattggtggcctccccatgggaggaaatgatgtggtacctctgtcaccctatcagtgcctggatgatgtggtacctctgtcaccctatcagtgcctggaagagtactccagtgaatggaaaatagtactcatgctacagaawctcggcttcacccatagtttacctctacatctctcctgtatattttcagaaacttacttggggtttcacagacaggatttacagtcaagaccacctggggtagtccctgaaggaggaaaggcttgtctggattaaaagtgagaatgctctcaaatcccaccctagtggcacacctcatggcaggtggaagtgagacaagctcttctcaccatggcttccctccaccacctcctttgtcagaagctaaacaagcccttccagcaaacgttctggctctcagaggttctctgcagttccacagatatcctgggctgggatccaacaggggcctgcttagtcatagc

SEQ ID NO: 889223 - DNA, 576 bp, Homo sapiens
actggaacccaggtctgtctaatctgaaatcttacgtggaggcttgtgtggaggaagcaatactgtgtcaagggacctgccgttgaaggattctcgtggtgacccactgcaaagccagtggctgtgaagggcacttatgagaggagcatctgctgggggtgggggtggagagtgtagaccagcagctgatgggagacaaatacccgctttctcaaacatgctcgtggaagtgtgacaggcgccattggttggccaactcaactgccattcccagtctcyttccccctttctcacagaatctcaatttttttttacttttgttcgtttatttgtcccaccacccatctctagaactcaatttgagtctcacaaaactgaaaccttgtgttcattaaacaataactcctcatttcccctatatctccagcccctggaatgcaccattttactttctgtctctatgagtgtgactatgtacctcatgtaagcggaatcgtacagcatttttctttttgtaacagactgatttcacttagtataatgtccttaaaatttattcatgttgtagcatgtgtc

SEQ ID NO: 889224 - DNA, 656 bp, Homo sapiens
caatcatgatcaatgaggggcccctcaaggatctggtgtggtgatctggtgagtttcagttctttgatacttttttttgagtggactggaagtactctcctgaggacggagctcagataaaacaaatacaagttttaagctttaagacaagaaagggcaatctatgtttatacaaaagaatagtctataggactactgggttggtttcagagagaaaaaagacagcagccagaaaattccatacatttccctgtcaggaggaaatttattactacataagaatttagaaatatcatcacctattttctgacaaagatactcaataatacaaagaaaaagtaactgaacaaaaagttaaccagaaacacagaccttgagrtacaggaagatgacaggagggaaatatttggaattgaatcaaataaatcaagtgaggaggaaagaatgagttaatatataacagcctttacattaaaggtgaatgaacttggaaaattcacaaatttttagaattcattagatgttttaattggaaaattgtcagactgagttaaaaaccaaaacccaggtcaggcatggtggctcatacctgtaatcccagcactttgggaggccaaggtaggtggatcacttgagtacaggagtttgagaccagc

SEQ ID NO: 889225 - DNA, 543 bp, Homo sapiens
tctctttgctaaaacatagcaagagtcacctttattccagttctcaacaagttcctcatctccatctgagacaacctcaacctggaccttattgtccatatcactatcagcattttggtcaaaggcattcaaagtctctaggaaattccaaacttccccacrtctttctgtctctgagccctccaagactctaggaagttccaaacttgcccacattttcctgtcttcttctgagcctttcaaactgttccaacctctgtctgttacccagttccaaagttgctcccacgttttcaggtatccttatagcagtatcccactcctggtactaatttactgtattagttgattcttacgctaataaagatatacccaagactaagtaatttataaagaaaaagagggttaatggactcacaatttcacatggctggggaggcctcacaatcatgacagaaggcgaaaaaggagcaaaggcacatcttatgtggtgacaggcaagagagaatgaatgccaagtaaaatgggaaacccttcataaaa

SEQ ID NO: 889226 - DNA, 543 bp, Homo sapiens
tctctttgctaaaacatagcaagagtcacctttattccagttctcaacaagttcctcatctccatctgagacaacctcaacctggaccttattgtccatatcactatcagcattttggtcaaaggcattcaaagtctctaggaaattccaaacttccccacatctttctgtctctgagccctccaagactctaggaagttccaaacttgcccacattttcctgtcttcttctgagcctttcaaactgttccaacctctgtctgttacccagttccaaagttgctcccacgttttcaggtatccttatagcagtaycccactcctggtactaatttactgtattagttgattcttacgctaataaagatatacccaagactaagtaatttataaagaaaaagagggttaatggactcacaatttcacatggctggggaggcctcacaatcatgacagaaggcgaaaaaggagcaaaggcacatcttatgtggtgacaggcaagagagaatgaatgccaagtaaaatgggaaacccttcataaaa

SEQ ID NO: 889227 - DNA, 669 bp, Homo sapiens
aatatactattattatttgtcatcttttcatccttcagttctgtcaatatttgcttcatatatttagttgctctgctagtgagtgcatatacatttattattgttatatatttatagctcctgatgaattggctttttatcatgatataatctatttatttgtttcccgtgacagtttttttacctcaaatctattttgtctgatataagcaaggtcacgcctgttctatttttgttaacatttgtgtggaayatatttttccatccttttgcttttagcctatgtgtgtccttaaatctaaagagattatctatagacagcatattgttaggactcattttttcatctattcatctactctataaatctttttattggattttaaaatcaatttacatttcaagtaattactgacaggaccattttcttaattgttttctgtcttttccctttgtttttgtccttttttcctctcttactgtctttcttttcattttgttatttttgtagtcatatgttttgattcctttcttattttttctttagtgtatcctctgtagtattttctttgtagtttccattaggcttcgtaaaacatcttgtagttataactcttttaagctgataacaatttaacttcaatcacatacaatcacttctcttttgtt

SEQ ID NO: 889228 - DNA, 599 bp, Homo sapiens
tttctgtctctgtgttaggtcactgaggataatggcctccagctccatgttgctgcactgggcatgattttgttcctttttatggctgtgtagtgttctgtggtatatatgtaccacattttctttaatccactgttgatgggcactaaggaaaccaaaccgtgaattgagtgggattattataattttgagattttagtatttacatactggaatgccaagagaatacaaactgaaatagtctgtggagaaatgctgtccatttctccaaatgaaacataataataataatgataattttatctttttcactaattatatggcacaaatattagcttgaggaaagaagcatcttctacaatgtttatatatactgataaaacttcacaggatttggaataatttgatgatctgcaagtgtcctgaaagtaacattgttaaaccttmtaagcattaaattcactgcaaaaagactgggcacaaggcgaatgttagaattagcattgaatgaaattgtaatcatgacataaaatataataaattactatgattaaagtcctttttaaagcatcacctatgaaaggggaaaataaagtaaa

SEQ ID NO: 889229 - DNA, 660 bp, Homo sapiens
cattgattgagcttatgaatgtggttgttccatataggaaatgttgttataaaagaggtttcatgaagaagttgacccatcaggcagatactattaatatgtgtagctttaaatccagtaacacaattgtattggtccgttttcatgctgctgataaagacatacccgagactgggcagtttacaaaagaaagaggtttaatggacttacagttccatatggctggggaggcctcacaatyatggcggaagacaaggaggagcaagtcacatcttacatgaatggtggcaggcaaagagaaagcttgtacagggaaactcccccttatagaaccatcagatctcgtgagacttactgtcatgagaacagcacaggaaggacctgcccccatgattcagttgcctcccaccaggtccctgccacaacacgtgggaattcaagatgagatttgggtggggacacagccaaactatatcaacaatacaatatttgattctggtgcctgaagttttacttttacatcagtattaatgagaacttaagaaaacgatttgtttgtgtcatgtttacagaagtatgaaatcaatggctttggagtaagtatgctcttaaactgtaacccacacctgacacagtgagagatactcttccaatagccct

SEQ ID NO: 889230 - DNA, 686 bp, Homo sapiens
tatctttatagcaatgcccccacttctcttgtatcaattttctgtattagtacattctcacacttctataaagaactacctgagactgggtaatttataaagaaagggtttaattgaatcacagttcttcaggctgtacaaggtgcatggctgggaggcctcaggaaacttaaaatcatagggaaggtgaagaggaatcaggcacgtcttaccatggcggtgagagagaagggggaagtgctgcacacttttaaacgatcagatcttgtgagaactcagtatcatgagatcagcaaggaggaaatccaccctcatgagccaatcacctcccactagattcctcccccaacaytggggattacggttcaacatgaaatttgggttgggacacagagccaaaccatatcaaatagtcttattaaaaaaatcaaattgcagtctaagtcgctaaaacagggtttctcacctcagcattattgacattttagagtggataaatttttttgtgctttttagaatgtttagcagtattcctagcctctgcctgttagatgtcagtagtacacacacacatacttcaccccagttgttacaatcaaaaatgtctccagacatttgccccctggggagcaaaagtacccccagttgagaaccactggtctaaaactaccaggttacaataaatt

SEQ ID NO: 889231 - DNA, 693 bp, Homo sapiens
ttgtatctcatagtcttcaaaatactttatacttaaaacacatctcaagtcagatagtaaattttcatcagaaatacttgatctgtattctgactttctgaaactgatagttgaaaaagttaggttcacatacccaagctgttccattttccagtagctaggaacaagtatcagtttttaattttaaatttaaattcaaatttaaaattcagtttcttagttgctttagccacattttagtgctttatagccacatgtgactggtttctactttattagacagtacagtttctaaaatactttcaaggaaaagtggaaggggaaacctaaaagtttaaaaggacttaagaaatgtattaaccaaatataatgtgtataccttattttgattctgatttaaacaaatcaactacttttaaaaggtagaaaaaaacagggagatttgaatgctgactcagtacttgataatagaaattattgataatrtttttaggtttgatagtggtattatggttatgggttttttttttaagcctttatcttttaaagatacattgccacaatatttatgaaggaaatgataggctgtctgggattgcttcaaaatattccagagagagggccatttaggaagggagtatacatgaaacaatgttggttatgagttgataattgttgaagctggataatagg

SEQ ID NO: 889232 - DNA, 618 bp, Homo sapiens
  misc_feature 1, 2, 3, 4, 5, 6, 7, 8, 9, 10, 11, 12, 13, 14, 15, 16, 17,18, 19, 20, 21, 22, 23, 24, 25, 26, 27, 28, 29, 30, 31,32, 33, 34, 35, 36, 37, 38, 39: n = A,T,C or G
nnnnnnnnnnnnnnnnnnnnnnnnnnnnnnnnnnnnnnnaggttgggggactatttcatatgtagcagccagggaaatccttttagaggagataatgtgtgagcaaagacctgaatgatccaaagatccagatctgcaaaaatctctggggtagaatattcccagtagagcacatagcgagtgcaaaggcctagagcagatgtgagcttggcccacatgaagaacagtaacccatccttaaaagcaaagtgatatccatggaccaggaattttgaagaatgtctaggatagaaaaaacaaagggagttggattgccagggaggcaaatgcaaattttcctaagacaaatctgaactaaggtaattcccaagtggtactgtctgtagtgggatgctagacaaaggtcacaggacaaacaaagggcccgtgtggaaagattatcagccaaggaagcacagagtttcctagtatagstcaattcacatctttcaagtgcctcaccttttaagtccccttgaagaaatggcatattttatacattaaggccctttccatctctccctctcaaaaaaaagggagcactgtcatgagatcattccagacaaactctaacattcc

SEQ ID NO: 889233 - DNA, 427 bp, Homo sapiens
gccaagcccccaggttctgtctgggacccaaaggcttctgctgaggcaactcccaccacctgcttgtgacgcaagtttgacatctgcccatcacctactagaaaaagcctcagcatcttaacttcctgggttttccaaatgttgccagactctagcacaaagaaatgcaactttggtgtatctccacatcacgtcctcagtctcagcgaaccctcaccagtcctccaagaggaacaytggaaggttctgctcagccccccacgtcccttctctcaaggctgggtctcaagaggctctatgtgttttgtgaccctgccatctttggccatagaggatcagctcctggtggcacctaagccaagcttgactcactccattctctattctgagtttggattgagcgcagagactccagtcagtacttgct

SEQ ID NO: 889234 - DNA, 595 bp, Homo sapiens
aagttaaaaatccatcagaattatatattttcagccctatctagaaaaaacaaaacaaaacacagtgcaatgaaatcctcttaccctggtcctacatacactaggtgggtctgccgaagaatatctgcttctattcatttccaaacatacaaagatcagccccctaccccaaccccccccyaccttttttttcttttacttaaaccaagacttcttccaaataaggtagcttttcacaaaattgtttcccctcctacatctgtgttcctggtgtcagaagctatagaggctgctattttccagaactgtcattgtattctgtaacaaagcatcctttcccttagctgagctgaacactagagtgcttttaaactaagttttaaagaatctaggcatcttttacctttagctgtcgggtctgacttaagcaattttccttcttcctcttgattgaagctcattttaagcttaaagaacagtaactgtaatcctagttctccttcaaggattctgaaaatgattaaaacagcaacacttaattctttgagtattaagccatgatatcttaagaaatctgtggtagggagaattctaa

SEQ ID NO: 889235 - DNA, 682 bp, Homo sapiens
gcaccatttattaaatagggaattctttccccattgtttgtttttgtcaggtttgtagacaattagatggttgtagatgtgtggcattatttctgaggcctctgttctgttccattggtctatatacttgtttttgtatcagtaccatgccgttttggttactgtagccttgtagtatagtttgaagtcaggtagtttgatgactccagctttcatctttttgcttaggattttcttggctatatgygctcttttttggttccatataaaatttaaagtagttttttctaattctgtgaagaaagtcaatggtagcttgatggggatagcaatgaatctataaattactttgggcagtatagccatttccacaatattgactcttcctattcatgagcatggaatttttttttagaaggttttttaaattattatactttaagttctggggtacatgtgcagaatgtgcagttttgttacataggtatacacatgccatcgtggtttgctgcacccatcaactcatcatctacattaggtaattctcctaatgttatccctcccctagccccccaccccctgacagtccccagtgtgatgttcccttccctttgtccatgcgttctcattgttcaactcccacttatgagtgagaacatgtggtatttggttttcttgtgtt

SEQ ID NO: 889236 - DNA, 584 bp, Homo sapiens
gcctctgttctgttccattggtctatatacttgtttttgtatcagtaccatgccgttttggttactgtagccttgtagtatagtttgaagtcaggtagtttgatgactccagctttcatctttttgcttaggattttcttggctatatgtrctcttttttggttccatataaaatttaaagtagttttttctaattctgtgaagaaagtcaatggtagcttgatggggatagcaatgaatctataaattactttgggcagtatagccatttccacaatattgactcttcctattcatgagcatggaatttttttttagaaggttttttaaattattatactttaagttctggggtacatgtgcagaatgtgcagttttgttacataggtatacacatgccatcgtggtttgctgcacccatcaactcatcatctacattaggtaattctcctaatgttatccctcccctagccccccaccccctgacagtccccagtgtgatgttcccttccctttgtccatgcgttctcattgttcaactcccacttatgagtgagaacatgtggtatttggttttcttgtgt

SEQ ID NO: 889237 - DNA, 595 bp, Homo sapiens
ctctcaaatcactgtggaaggagaaaagaatggagcacagttactctgaagaccctgaaggaagccttcctcttttctcttacctgcagcccatttatagagcaggctggaggttcttgtcatgtggggaaaacagactttaaacatagtcaattaattgatgcaaatcaccttcctttcagtcagatktaggtaatagcatatctcacatgacaaaccctgctatttatcattttcactaagaaaaatctttagccactttccatctgtaaattctgaaaagaggctgataagttcgctcatttaaatatagcatagatgcatttttaaaaacccattgcttccgaagggagtgggattgacagacctggaccttgaatgctcatttgatatactgatgctctatggagcttggcaaggcagtttttcaacccacctgggagcatttctgtttccttccttggttctattttagaccgttacttttcatactacctgcaaccaaggccactgattatcttcccagagaaaaaactaacaattttttttctgtaaagttttaagatctccctctcctatcccatagccagaccta

SEQ ID NO: 889238 - DNA, 536 bp, Homo sapiens
tttctggcaaccattattcctgctctttaaaaacaaaaacaaaaacaaaagaaacaaaaaaacaagtctaccaatctgaaacaacaacaacaacaacaacaattgagttaatatgaacacatatttttgatgccagcatactacaggcaaacacctcttaaatcaatctaggagtggycaggaatacagagccactttaaatattacataaataaaggagttgatatacatttaatgcttgatttacatgaatatataaagagctgggtgagagaagatcaagaagggaaatatttcctgaggacctcattgtgaaacactgaagcaggtttccacaggttattggaaaaataccgctaccacctgtgtacgtgtcagaaaagaaatgctcccctaggccccaccaagagaaaaccaccttagcacattttggcagacaacagggactaactctgtcacatccatgagtgtaagcagcactcagtgtggcctcaaagcctacccttgggtcccaccaagggagtgagatgaccacc

SEQ ID NO: 889239 - DNA, 468 bp, Homo sapiens
atgtggggattgcaatttgagatgagatttgggtgtggggacacagagccaaaacatatcattttgcctctgacccctcccaaatctcatgtcctttttatatttcaaaaccaatcatgccttcacaacagttccccaaattcttgactcattccagcattaagtcaaaagtccaattccaaagcctcatctgagacaagacaagtccctttctcctattagtctgtaaaatcaaaaacaagttagttacttccaagacacratgagggtaaaggcattaggtaaatgttctcattccaaatgagagaaattggccaaaacaaaggggccacaggccccatgcaagtccgaaacccagcaggatactcattaaaacttaaagctctgaaataatctcctttgactccatgtcttacatccagttcaagcagatgcaagaggtgggctcccaaggccttgggcagctcc

SEQ ID NO: 889240 - DNA, 650 bp, Homo sapiens
tcagggccaagtgttgtgcgctttcccatgaactccttgcttaagtaaggtcagggagcagctgggcaaggaaacatcagaaagcttggcaagccgtgccatagctacgtgcctcttgtggcagctggtgttcatctgaagcatctgatctgaaagggaattaaagcagcagcgctgctgagattgagcaacttgtaatccttgctgtgaggtaccacaaactaatttaattccactgttggtcgcaaaggctgcgttttgcctgagttataaaaagaatcgtattgagccttttagaatgcggacttttatgtggatttctaagcgtcggattttgtcagtctatcacacagttcatgaaatgccttctttctgggacatgctttgcacagagctggatggaaagatttggagattaatttgaactctaatgaaaattagctgtgctgtttggtttcatgttstgattgtcatcatggaggtcagtactaatgatgtgtcaggctctctttgacagtttgcatacaggcacagtttactcagagctcagcaatgccattctcagaagatgaggaagtattgaactgtcaaacggggactgcacaggtgacaggtgatgcattttagatcagctctctaacgaagtgagc

SEQ ID NO: 889241 - DNA, 549 bp, Homo sapiens
aatagggctttccaaaaaaaaaaaaaaaggcaaaaaaaaaaaaaaaggcaaataaagaaaaaaaaaaaaaacttgagggaattcattactagctaatttgctcagtaaagaatctcttcaggcaggaggtaatataggccagaaaatggaatctatctaaagaaaaaaaaaaacagcatcaaacaaaaaataaatgcaagtaaaataaaaatatttagtgtgttattcttaaacgtaactgcttaaagaaataacactaacaacgtattcagtgactattatatacagatatgtgagttgaatgtcagcaatggcacaaaggatgaaagaaagaattgggactactctgttataagctacctgtgctacaaataaagggaaatggtgttatttgaatgtacacttagattaytttaaaatgtatattggaagctctaaggcaatctttgatgtgtttaaaaaatataattaatatactaagagaagagataaaatggaattttaaaaagtgatcagttgaaacctagaaagtcagaagggatataagaa

SEQ ID NO: 889242 - DNA, 565 bp, Homo sapiens
  misc_feature 15: n = A,T,C or G
atgttttcagctccnactggtcatttaaggacttttcaacactggttatctaggttagccattggtctaatattttttcaaggtttttagcttcttgcgatgggttcgaacatcttcctttagctcagagaagtttgatggtctgaagctttcttctctcaactcatcaaagtcattgtccgtccagccttgttttgttgctggcaaggagctgcattcctttggaagagaagaggcactctgatttttagaattttcagcttttctgctctggtttctccccatctttgtggttttatctacttttggtctttgatgatggtgacgtacagatggggttttggtgtggatatcctttctgtttgttagttttccttctaacagtcaggaccctcagctgcaggtctgttggagtttgctggaggtccrctccaggccctgtttgcctgggtatcaccagcggaggctgcagaacagcgaatattgcagaacagcaaatgttgctgcctgatcattcctctggaagcctttgtctcagaggggcactcggccgtgtgaggtgtca

SEQ ID NO: 889243 - DNA, 632 bp, Homo sapiens
acagtacataatcttgattgtgcttcattggtatttattgcacatggaccaattcctcacacagtagttagttgcaccagagtataaatacttggtaaaacacacaagaggaagtagaatttacacacaagtgctaactttcaccagcaaattcacgtgggcacttggacataaaaaaaaataaaaaatccttaagataattatatttataatatggatacagttacagtaccatgataaaggagtataaaaaggtattttcccaatgaatcattagctcaataacatactagacaacagaagtagagtttgaattttatttaagatctgcccagcccctctccctttaaaaaatatttaatttctttttgtgcaagtaacatcttctgtggattttgtaattcctaacactgtgcaaaaatggcattttgaaccactccttttttttgkttttgtttttatccacatgtgcagtaatctgaactgtttctctctctcgctctcttttaatgtcctgtcttcaattgacagagtcacatgtcacagagagaggctctgcgcctggtccttccaactaatattgatacataaataagctgtttaatataaacaagtctttctatctgctgtgc

SEQ ID NO: 889244 - DNA, 639 bp, Homo sapiens
tggaacctgaatttggtgtttgtcggggactgggaggagcagctgtgccctaacatgttatgttaggaagctgattagacaaaaaaggagaatcaaacattcataccataggcttactgctttatgtctttttttcttgaaatcatcctattcaaaaggartttcagaaggtaactcataattgatatttaagtctacacatgatcttgaacacattaactatggattataaaagaatgatattcaatacaatgattacatgtttttaaaaaacggaagaataagtctgtacattttcttctaatttaaccatcggttgtttatttctagcctgtatttttattaaaaagttgtttacatatgcacatatgatttttaacttaggtatcaattttcacctaaacattgatgacagtatgacctaaccctcttaaaactcttgtggaattccattagatcacttccgtcccaccccagtgctagagaatagaaaataatcagtaattattagcctttttccttatcattacaatcttaaatggctatgaagtattctattatgtagatatatcataatatctttacctattctcttattgctggatatttaggctgcctctaatttttcaagattatata

SEQ ID NO: 889245 - DNA, 634 bp, Homo sapiens
caacagtttaaaaaacaggtgagcaggatgtgttaactcaggtttcttataccattctcataatttgcagtttttactatttttagtataatgtgttgcaatccattcctcttactgctttactgtgttgtcatttatgctgtattaaaaataactcttgaatcttctgccttagttttcccctcaaagctcttacccattatcatagtatccttatcctttgtcagtttttaaatatggctgttttaagtgtttttttttttttctttctttcttygagacggagtctcgctctgttgcccaggttggagtgcagtggtgtgatctcggctcaccgcaagctctgcctcccaggttcacgccattctcctgcctcagcctccccagcagctggtactacaggcacatgccgcacgcttggctaattttttgtatttttagtagagacggggtttcgccgtgttagccatgatggtctcaatctcctgacctcatgatctgcccgccttggcctcccagagtgctgggattacaggcgtgagccaccgcgccctgccaaatttcctctttaaagttaagaatattcaagaatatactgggcaaattatttactaaaaatcactacagaaagttg

SEQ ID NO: 889246 - DNA, 639 bp, Homo sapiens
cagtgagccaagatcatgccattgctctccagcccaggcaacagagtgagactccatctcaaaaaaaaaaaaaaaaatcaactcaagatgtattaaagacttaaatgtaaaacccaaaacttataaaccctagaagaaaatctaggccatatcattcaggacataggcatgagcaaagatttcatgacaaaaatgccaaaaccaattgtaacaagagcaaaaatttaaaaatgggatataattaaactgaagagtttctgcagagcagaaactctaacatgagagtgaacaaacaacctgcagaatgagagaacttttttgaaatctatccatctgacaaaggtctaatatccagggtctgcaaggaacttaaatttacaaaaaagaaaaaaaaamccattaaaaggtgggcaaaggacatgaacagacacttttcaaaataagacacatgcaaccaacaaacatatgaaaaaaagctcaacatcactgatcattagagaagtgcaaatcaaaaccacaatgagataccattttatgacagtcagaatggctattattaaaaagtcaaaaaacaacagatgctggtgaggttgtggagaaaaaggaatgcttttacatcattggtgggagtgtaaatta

SEQ ID NO: 889247 - DNA, 543 bp, Homo sapiens
gagagtgcttacaaaggggattccagggagagttgttttgtggtgatgagactattctgtgttactgattgtagtggtagctacattacttcatgcatttggtaaaacttattgaactatatacaaaatataaaagtgaattatgccatgtgatattgtgatataataaaaattatgtatttggtctctgtccctgattcctgagacagagcttctaaaacccttgccagatagggatgctaggagtatcttttgttcttatatttggtctttgaccctggttcttgacacagagctccgaagaactttttaatttcctgagtgataggagtatctgatacagagctcctacatcccyggaatatcctggattataggagcatctcttgctctaatgagttgactcttggtaggctcctggatagccttagaataggagctgattgctatgaaaaccaaccatgtaattagaggataagaacttttagccccaaccccttattccccaggaagaggaaaggggctgaaaatttagttgattac

SEQ ID NO: 889248 - DNA, 543 bp, Homo sapiens
gagagtgcttacaaaggggattccagggagagttgttttgtggtgatgagactattctgtgttactgattgtagtggtagctacattacttcatgcatttggtaaaacttattgaactatatacaaaatataaaagtgaattatgccatgtgatattgtgatataataaaaattatgtatttggtctctgtccctgattcctgagacagagcttctaaaacccttgccagatagggatgctaggagtatcttttgttcttatatttggtctttgaccctggttcttgacacagagctccgaagaactttttaatttcctgagtgataggagtatctgatacagagctcctacatccctggaatatcctggattataggagcatctcttgctstaatgagttgactcttggtaggctcctggatagccttagaataggagctgattgctatgaaaaccaaccatgtaattagaggataagaacttttagccccaaccccttattccccaggaagaggaaaggggctgaaaatttagttgattac

SEQ ID NO: 889249 - DNA, 543 bp, Homo sapiens
gagagtgcttacaaaggggattccagggagagttgttttgtggtgatgagactattctgtgttactgattgtagtggtagctacattacttcatgcatttggtaaaacttattgaactatatacaaaatataaaagtgaattatgccatgtgatattgtgatataataaaaattatgtatttggtctctgtccctgattcctgagacagagcttctaaaacccttgccagatagggatgctaggagtatcttttgttcttatatttggtctttgaccctggttcttgacacagagctccgaagaactttttaatttcctgagtgataggagtatctgatacagagctcctacatccctggaatatcctggattataggagcatctcttgctctaatgagktgactcttggtaggctcctggatagccttagaataggagctgattgctatgaaaaccaaccatgtaattagaggataagaacttttagccccaaccccttattccccaggaagaggaaaggggctgaaaatttagttgattac

SEQ ID NO: 889250 - DNA, 598 bp, Homo sapiens
aactttttgtataaaatatgaagaaagggtccagtttcagtcgttagcatgtgacatccagttttcccaacaccatttgttgaaaagactattatttccattgaacagccttggcattctggttgaaaatcaactattaatgtaaacattgatttctagactcttagctgtatcccattggtctatatgtgtatccttatgccagtacaagtctgtaattattactatagctttgtagtaaattttgaaatagagaagtgtgcatactccatatttgctcttcacttttgagattactttgactatcaggagtcccttgcatttccacatgaatttttggatgggcttgtcaatttccacagaaaaggctgttgrgatttctatagagacatggtgactgtatatcaatttggaaagccatcttaataatgtctcccaatctctgaacattggtgtcttgtcatttatttactcctttttttttttaccttctttcaagtatgttttgtagttttagggtataacttttgctctttttgaataattaatttctaagcattttcttttttgatgcaattatcaatggaattgtcttaat

SEQ ID NO: 889251 - DNA, 582 bp, Homo sapiens
cctgtccctgcaaaggacacaaactcatccttttttatggctgcatagtattccatggtgtatacatgccacgttttctttatccagtctatcactgattggcatttggattggttctaagtctttgctattgtgaatagtgctgcaataaacataygtgtgaatgtgtctttatagcagcatgatttataatcctttgggtatatacccagcaatgggatggctgggccaaatggtatttctagttctagatcctcgaggaattgccacactgtcttccacaatggttgaactaatttacgctcccaccaacagtgtaaaagcattcctgtttctccacatcctctccagcatctgttgtttcctgactttttaatgatccgcattctaattggcatgagatgatatctgattgtggttttgatttgcatttctctaatgaccagtgatgatgagctttctttcatatgtttcttggccacataaatgtcttctttggagaagtgtctgttcatattcttctcccactttttgatggggttgttcaggtaaatttaagttctttgtagattctggatatta

SEQ ID NO: 889252 - DNA, 645 bp, Homo sapiens
acattaattcaagtaaaagtcaaagagtaaagtgactccacattcagtgtagcctcctgtccttcactctcatagtgccttcactcaatttctttctctgttgtgtttttctacaccagatatattctctggttcttttgcaattcacctcagttacaaatattgccctgaccactccactcccctgcagatccctgttcagacctcttctgagctcttacagaacatacctactactactgcaaacaccataaaggaatatatcattccagtgttcttttgtacatagaactggccactacatggaattgtatagctccacaaatagtggctatatcacaggccagtaggttgcaatattttgcaggagacacaattccctttaagaattgggggagasaaaaagtaatgaccctagatttttttaaaaaattgtacacaattaagctaaatcccatctaaggagatatcttcccctcaaatggacctcaaattaacatcctcctccttaggctatattcaatcaagaagacccacacttacaagtctgtgaattaaaatacaaaaaaactattcttctagtatttatcaccaaaataatatgatctggggcaagagagatattttagaagcacaatctggtct

SEQ ID NO: 889253 - DNA, 659 bp, Homo sapiens
ccacagtgtagtcctcaggacctagttcaagtcaccatctatagtaagagcgtagattttcaatgtttgtacttaaccttctttgagattctgttctttttcatgtaaaatgaggagatagaaaatgcttgaggagttaaatatatagagctcttcaacggtgccaggcatatcctaaagcttcagtcatgcccgggttttatacttatttaaagccttctctaaccttctcaagcagacttactctcttctgtgtggttataggacattgtatttgcctgtattataacctttgtattatacagctataggttaatttgtctgagacaatatgcttcttgcagagatcaacactgcatctctcatttatatccttggtttctggatatagtatatcctataagtatgctatactatattygatagatatactatactatagatatagtatattctataaatctatgaagtagtcttctttttcatcaagtgttgaatttccatacattccacattcctcaccttaggaatttagtactaacctgactattggctatggcagacattctcaaaatttagcctgtctcagaatgtccaggaaggcttgttaaaacacagatagctgagccccaccttcccctagatttcactgcaataat

SEQ ID NO: 889254 - DNA, 578 bp, Homo sapiens
ttaggtaataatcatttgtaaagaaatatgccatgactttttgggtcatttgaacccataataatgtctatttaatgtaagtataaatgtcagatggtggcatacatgtggagtcagtaaagatgaatatttgctgtgataatagtcatgcatcttaaatgttgacttttaaaatwtaccttgaagacatatcctattttcatattacagtacattttcacttaagtacatgatagctctagaaaggaagtgtggaagtgttaacatgtgaaggaacaaaatctgagtaatgctttgacatgagcatctattttgggcttcagagaaataggtggctgattgaaaaccaatgtaaagattgttgaaccactctgtaaggctgggtcatcagttctggatttactattttaaaaaacatttaattatgaaaatgagtttcctttggtttgcacgaatgtttcattgaaatgaaacttgcttcccattgtcttatattctgtaaacttgtgaaatatgtatttttaaatctctgttctgagaacaccctcttctttttttcccagaaactctagagtagt

SEQ ID NO: 889255 - DNA, 619 bp, Homo sapiens
aacctggttaaaaattaaagttattaaaagtttcaagatggcaacagcaaagcattaaaccaagcccatctgagcacggggtcctggcaactgcacgggtggtacatacatgatgaaactggcactctctctttcttcatctggaattctttctagactaattcctcctgcctcaggacacttcggccacccttcacagcataagcagaactggttcaatagcagttactcagtcatatcttcaaaataacagggatcccacaggagaggagggggcaagacccaagaccagacctattcatggaggctggaccagaagggggctgacaaaaacccaggtgcaattatggccagagaaggggtgagcagacaggcagagctgagcatcgaagtaggtgggaggacacagttcaattctggatgcgtttattgtgtgatattcaaaagaactaagaagtggcctctmtctttgaagcaaaagttcagatcttcagggcaactggagccaggctaaggattttaaattcattttgtaggagatggggacccactttaaagcctaagagaagtaacgtggtgtaatttctgttttgcaaagatgacttttgccacaatggag

SEQ ID NO: 889256 - DNA, 509 bp, Homo sapiens
ttggttaattcctaggtacttaagtttatgtatgggtattgtaaatgggattgctttttaaatttcctttttagatttttcactgttggcatatagaaatgctactggtttttgtttgttgattttgtatcctgtaactttactgaatttatcagttcaaatagttttttgatggcctctttagtgtttttccaagtataagatcatatctgaccaacattgagaaaccccttctctactgaaaatacaaaattagccaggcctggtggtgggtgmctgtaaacccagctacttggaaggctgaggcaggagaatcgctggaacctgggaggtggaggttgcagtaagccaagatcgcacaattgcactccagcccaggcaacaagagacaagagcaaaactctgtctcaagaaaaaaagaacaatgtatcatctgctcatctgcaaacaaggataatttgacttcttcctttccagttgggatgcccttttttttctttctcttatct

SEQ ID NO: 889257 - DNA, 599 bp, Homo sapiens
accaagagaatgaaagcagaagaaagcaggggttgcaatgctaatttctgacaaaacagactttaaaccaacaaaggtaaaaaaaaaaaaaaacaaggcaacgaagggcattacctaatggtaaagggatcaactcaacaagaagaactaagaattctaaatatacatgcacccaatacaggagcacccacattcataaaactagtttttagagacctacacggagacttagacttccacacaataatagtgggagactttaacaagcccactgtcaatattagacagatcatcragataattaacaaagatattcaggacttgaactcagttcggatcaggtggcctgacagatgtctgcataactctcacccaaatcacagaaatatacatcttctcagtgccacgtagcactgcctctaaaattgaccgcatattggaagcaaaacattcctcagcaaatgcaaaaaaactgaaatcataacaaacagtttctcagaccacagggcaatcaaattagaactcaagattaagaaactaactcaaacccacacaattacatggaaattgagcaacctgctcctgaaagactcctgggt

SEQ ID NO: 889258 - DNA, 591 bp, Homo sapiens
tggaggaagctcagggcagactcaccagtggatgccttcacacgtgcgggcttgctcttgtgtctgcctttctcggctgtcaggaggacattgtactcctgtcctggttccaggcctctcaggacataggaagtggtgtttcttggaagctgcactcccacccactggcctgtggggagactgtaattgaggcggtagcggtcaaatttggccaacggtgtcttccagagcagggtcaggctggtctctgcagtttcagaaacctgaaggtccttgggcgtgtccaactctgggaggagaacagagagatgaatgctcttcaggctgcaagrcagggctgcttctggggctgaaagtcaactgcatctgggctggaatcctaggtctgccacagaggagctgagggaccacaggagagtcacatctctgggtctctctttttacttttgtaaaataggtctaattatacatcacccacatgaccccatcggagtctgagaagattgaaaataatgtcatggaatatccattccataaaatgctgctcagatttaaagcagttaaaaggaaccaactattgataaaagaagc

SEQ ID NO: 889259 - DNA, 699 bp, Homo sapiens
agctgcaaccatctgatcttcaacaaacctgacaaaaacaagcaatagggaaaggatttaatatttaataattggtgctgggagaactggctagccatatgcagaaaattaaaacaggaccccttccttacatcatatacaaaaatcaactcaagatggattaaagacttaaaggtaaaatgcaaaactataaaaatcctagatgaaaatctaggcaatgccatttaggacacagacacagtcaaagatttcatggtgaaaatgccaaaagcagttgcaacaaaagcaaaaattgacaaatggaatctaatgaaactaaagagcttcagcacagcaaaagaaactatcatcagggtgaagagacaacctacagaatggaagaaaatttttgcaatctatccgtctgacaaaatcctaatatctagcatctacaaggaactgaaacaaatttatgagaaaaaaacaaataaccccattaaaaagtgggcaaaggacatggacaaacacttctcaaaagaagacatacrtgggacaaacaaacatgaaaaaaagctcaacatcactgatcattacagaaatgcaaatcaaaaccacaatgagataccatctcatgccagtcagaatgactattattaaaaagtcaaggccggatacggtggctcacacttgtagtcccagcactttgggaggatgaggtgg

SEQ ID NO: 889260 - DNA, 630 bp, Homo sapiens
tttctatactttgttgggttgattttgctagcattttgttgaggacttttgcatctatgtttttgagtgtaatgtctttgtccgattttggtatttacataatgctggcctcatgactgttttttaaaacatattttttaaattgagagctttcatgaattttaatgtagagaaataaatatcagaaatcatcaaaggaccaactggtgatataaagtttcagggaatgctatcttgatgatttgcttcacttcctagagaaatacattccagagccaaattgtatcaaaagctgaataacaaatatatttgcttatattttccaactgaaacaatcatcggccaagcctttatatatatacagccatcatcaaagcatttgatgcactcctgcaaagagctttattatcmcaaagattatctctttcacaaaactctattgaggcgcccctgaactctttttcaataaggcctgacttttggacttctgtgctcatctctgcattgaccaattgaagcaaggattctgctgagtcagtttaaccagaactctctgcccttgatatctgatcatcctggatatttgattgggtttctcattttccaccatcccccaagaaatgtctgatc

SEQ ID NO: 889261 - DNA, 596 bp, Homo sapiens
cataaagggatagaagaacatctaccaagcaaatggaaaagaaagaaaggcaggggttgcaatcctagtctcagataaaacagacattaaaccaacaaagatcaaaagagacaaagaaggccattacataatggtaaagcgatcaattcaacaagaagaactaactatcataaatatatatgcacccaatacaggagyatccagattcataaagcaagtccttagtgaactacaaagagacttagactaccacacaatagtaatcggagactttaacaccccactgtcaacattagacagaccaacacaacagaatgttaacaaggatatccaggaattgaactcagctctgcaccaagcggacctaagaggcatctacagaactctccatcccaaatcaacagaatatacactattttcagcaccacaccacacatattccaaaattgaccacatagttgaaagtaaagcactcctcagcaaatgtaaaaaaaaaaaaaagaaatcataacaaactctctcagaccacaatgcaatcaaactagaactcagtattaagagattcactcaaaactgctccactacatggaaactga

SEQ ID NO: 889262 - DNA, 596 bp, Homo sapiens
cataaagggatagaagaacatctaccaagcaaatggaaaagaaagaaaggcaggggttgcaatcctagtctcagataaaacagacattaaaccaacaaagatcaaaagagacaaagaaggccattacataatggtaaagcgatcaattcaacaagaagaactaactatcataaatatatatgcacccaatacaggagcatccagattcataaagcaagtccttagtgaactacaaagagacttagactaccacacaatagtaatcggagactttaacaccccactgtcaacattagacagaccaacacaacagaatgttaacaaggatatccaggaattgaactcagctctgcaccaagcggacctaagaggcatctacagaactctccatcccaaatcaacagaatatacactattttcagcaccacaccacacatattccaaaattkaccacatagttgaaagtaaagcactcctcagcaaatgtaaaaaaaaaaaaaagaaatcataacaaactctctcagaccacaatgcaatcaaactagaactcagtattaagagattcactcaaaactgctccactacatggaaactga

SEQ ID NO: 889263 - DNA, 640 bp, Homo sapiens
  misc_feature 1, 2, 3, 4, 5, 6, 7, 8, 9, 10, 11, 12, 13, 14, 15, 16, 17,18, 19, 20, 21, 22, 23, 24, 25: n = A,T,C or G
nnnnnnnnnnnnnnnnnnnnnnnnnaaaaaaaaaaaaagcagaagattaattttaggggtgttagaacaagtgatactatagctaagtccatgttgtcattcaattgcaagccctcattttaggggagatttgttaaacatgtagtgttcataaactaaaagttgaaaagcagacttttttaaaaagaaaaacttcaatttgtcttttaattggtgctcttacttgtaaacacgagttgtaaactcactggttacagtctgctatgttcataggcaatctgttcacctagagcaactttttcgttttaaaattctttaatgctgtcacagagctttctacctaagctgtaggcattaagtaaaggtgaaccaaagatgtttcagacagattttctaacagcctcttgcattcttatgacctttcgtatttcatcatgggttaactgaaacatgatatctactgaaatgtaggagagtatcctttagctgtaycatcatatatttaaaaaccttcagaatgccagcaatttccataaacaccatatctcactttatagaaaaaaaaacatgcctgtgtccagaccaagaatactggcacttcatattggagacaatcctgttcagatttactgagttagat

SEQ ID NO: 889264 - DNA, 602 bp, Homo sapiens
gtttgagcccaggagtttgagaccagcctgggcaacatggagaaaccctgtctctacacaaaattcaaaaattagctgggtgtagtggcacgtgcctgtagtcccagcaactctggaggctgaggtcccttgagtctggaaggtcaaggctgcagtgagttgagatcatgccactgcactccagctttggcgaaagagtgagaccctgtcaaaaaacaaacaaacaaaaaacaaaaataaaacaaaaacaaaaatataaataaaaaattaaaatccgcgaaaraaaagaaagaaagaaaaaaaagaagagaaaagaaaagaaaggagggagggaggagaaagtaaggaaaaaaaatacttgggaaaaccatgttttgattgaaaactataaggctaaagacaaaagaactgtacctaaggatcatactctcctcggttaattttttccttacagagtcacaagttaacaattctgaaattacattgtatgtgtcctagggttgaacaaataagagaataaatggcagatcatggaagccaggtttctccctgtcagagaacgttacaaagttacaaataagcaaggcattgaggctagaatg

SEQ ID NO: 889265 - DNA, 659 bp, Homo sapiens
caccgtgacgtagcacaaatgggcacagcactgtatttttaaaggattaggttattttactgacatggatttaacactattgatttttggcccatcacaaatcccatgtagctccacattttactacgaggtgaatgctgcatttatattcttaagcattctgcaaatatcttcattttgatcgacgtcccttcagcaaagcacagatgtcaatgcacaaagccatggaaggcccatccaacttctgtagatctttccaggacagttygtcttctccttcacagtaaccttgaatagggcaggagaaactctgccccacgttttccccatctggggaattggaagactacttatctgcctccgcagagatcctttagaatgttttttggtaaatgagaaaaaagggcagaagactaataggttaagctcggcattattaaggtgctttgaaaatagtcttgtggttgtatctttataacccctaaactatagaagttattcaaagatacatctgcgaagtgtgtacaggttaccatttgaggttctgtggaagcaacccgtttggggagcagagcctccttctgcgtacgtaattcagagcatgtaggagaatcaaccttgttttgttagcagctaagtttgtgtcaaaaacagatttg

SEQ ID NO: 889266 - DNA, 659 bp, Homo sapiens
caccgtgacgtagcacaaatgggcacagcactgtatttttaaaggattaggttattttactgacatggatttaacactattgatttttggcccatcacaaatcccatgtagctccacattttactacgaggtgaatgctgcatttatattcttaagcattctgcaaatatcttcattttgatcgacgtcccttcagcaaagcacagatgtcaatgcacaaagccatggaaggcccatccaacttctgtagatctttccaggacagtttgtcttctccttcacagtaaccttgartagggcaggagaaactctgccccacgttttccccatctggggaattggaagactacttatctgcctccgcagagatcctttagaatgttttttggtaaatgagaaaaaagggcagaagactaataggttaagctcggcattattaaggtgctttgaaaatagtcttgtggttgtatctttataacccctaaactatagaagttattcaaagatacatctgcgaagtgtgtacaggttaccatttgaggttctgtggaagcaacccgtttggggagcagagcctccttctgcgtacgtaattcagagcatgtaggagaatcaaccttgttttgttagcagctaagtttgtgtcaaaaacagatttg

SEQ ID NO: 889267 - DNA, 659 bp, Homo sapiens
caccgtgacgtagcacaaatgggcacagcactgtatttttaaaggattaggttattttactgacatggatttaacactattgatttttggcccatcacaaatcccatgtagctccacattttactacgaggtgaatgctgcatttatattcttaagcattctgcaaatatcttcattttgatcgacgtcccttcagcaaagcacagatgtcaatgcacaaagccatggaaggcccatccaacttctgtagatctttccaggacagtttgtcttctccttcacagtaaccttgaatagggcaggagaaactctgccccacgttttccccatytggggaattggaagactacttatctgcctccgcagagatcctttagaatgttttttggtaaatgagaaaaaagggcagaagactaataggttaagctcggcattattaaggtgctttgaaaatagtcttgtggttgtatctttataacccctaaactatagaagttattcaaagatacatctgcgaagtgtgtacaggttaccatttgaggttctgtggaagcaacccgtttggggagcagagcctccttctgcgtacgtaattcagagcatgtaggagaatcaaccttgttttgttagcagctaagtttgtgtcaaaaacagatttg

SEQ ID NO: 889268 - DNA, 618 bp, Homo sapiens
agcacatagaaaactgaaacaattttgcaaataggtaaacagatttatataaatgtggtctgattctccaagtcttgctgtaagctttaataagttgttggtattgtgggttcttttggtaaactttttgagaaatgtaccaactagcgctatttggtgtgtgttttttgcttctactctaatgtcaagtcagtgggagaagctttgtgtacttgctttggtaaactgattctgagtatcttatttccttatgtgcgtggaagtgcacttaatgaatttctgctacagtgtgtggtaaggatgctatttttaaagtctgagttcccagagtaaattttttaaataggattagggttttatcttataactaatataataaagcttaaattagaattataaataatatatgtatatgtatgtgtgtgtgtgtatctatctatytatctatctatctatctatctatctatctataatcccatcatgggggcaagaccctcatgacctcatttcatatatatatatttcatatatatacatatttcatatatatatatgtgagtcagattcaaaaacagcaacaaacatagaatattaaacctcaaagttattctaggcca

SEQ ID NO: 889269 - DNA, 680 bp, Homo sapiens
tacaagaggtctttgcagtttacctagttgcagtttagaatattagtgatcttcttgctaatcgtgttttatttatgtgcatcatgatgacttatttttactatattcttaggttgctattatttccctttgctgcactattacaaaattaatccacaccttcacttatagcgttttaaaagatggttgtgagacaaatgaccaaaaggtccaaaggtaggggataggtgtacrctagaatttacagaattttttagttctagatatttcaaagaaatcaagagtctcctgaatttaggcaatatatcttattttctgttttaatccagcccatgcacatttcttagatgtctgcctactgctttgctgtctacctgacacaagtttaagtaatttttcaataggggaagttggacttttagaagaagcacagctgtacccgcatatatccttaccttgtcaaatcccttatcaaatttgcattccagattttggtgttctcatggctgacctattgtaacattctttttactattgcttcctgttggtgggacataacctgtccctgtactaggagaggaaattaaattggtctggcacaattttctcctcacagagccaagttcagtagaagccagtgccctttcctaagtagatacacatcaactatttgataattt

SEQ ID NO: 889270 - DNA, 661 bp, Homo sapiens
atagccagcactcaagtgtgatttcttacatggaaaatcctgacagaagggagatcctgggactgtcctagtgtatccacctattaggtttccaaactagccaacccagtgaagagaattgctctttgttgagccaggctagttacactatcttttcccactatattggtgccttagtattcatttattcattcagtcagtcatttaacaaatgtttagggcacatcttttttttttttttttttttttgagacagagtctcgctcttgtcaacaaggctggagtacagtggtgcaatcttggctcactgcaacctctgcctcccgggttcaagcaattctgctgcctcagcctcctgagtagctggagttacaggtgtccactaccacacccggctaatttttgtacttttagtagaaacggggtttctctatgttggccaggctggtctcgaactcctgaccttgtgatctgcccacctcggcctctcaaagtgctgagattacgggtgtgarccataacgcccggccctagtgcatatcttatatctgagttgacatgatttgaagtcctacagatagatacggttgtgagcaaaatgaatttggaccctcactttagaaggtcctgcctcctggcagagaaagacattaatcaagta

SEQ ID NO: 889271 - DNA, 583 bp, Homo sapiens
tttttaagtagtttttattcaaaattaataaaaaaagaaatcagctattcaatattatttttggtcaatataaaaatgacataataaaacagaaatttcactttttgatttatcacggtagccagaaatggttaaaatccacgagattaagtgataaataattcaaggagagtcaaggacagtagtcaaaaaatayttgaagaatgaaaacagaaaatagatactaatctaagccagcaattatttggtggtttattcttttataaggtcaaatgtttgttaattcatttccataaacacatataaattacccattatatttaacacactgaacttcatacagtaaaagccatttttcctcagaaagtttacaatcattttcaggatgataactgtatgtgtatgttcatcagtcatttagtatctattcaaagagttgtcatgttaattgtggggaccccaaagggaataagaaatgtgtaaattcatatatatacatatatatgtatatgtatatatatatatacatatatatgtatatgtatatatatatatacacatatatattttttgagacagtgtc

SEQ ID NO: 889272 - DNA, 654 bp, Homo sapiens
cgtatctcaaaataataagaactttttatgacaaacccacaggaatatcatactgaatggacaaaagctggaagcattccctttgaaaaccagcacaagacaaggatgccctctctcaccacttctattcaaaatagtattggaagttctggccaaggcaattaggcaagagaaagaaataaaggatattcaaacaggaagagaggaagtcaaattgtctctgtttgcagatgacatgagtgcgtatttagaaaaccctatcrtctcagcccaaaatatccttaagctgataaggaacttcagcaaagtatcagcatacaaaatcaatgtgcaaaagtcgcaagcattcctatacaccaataatagacaaacagagagtcaaatcataagtgaactcccattcacaattgctacaaacagaataaaatacctaggaatacaacttacaaaggatgtgaaggacctcttcaaggagaactacaagccactgctcaaggaaataagagaggacacaaacaaataaaaaaaaaattccatgctcattgataggaagaatcaacatcgtgaaaatgaccatactgcccaaagtaatttatagattcaacgctatgcccatcaagctaccactgactttcttagaataatttaaaaaac

SEQ ID NO: 889273 - DNA, 654 bp, Homo sapiens
cgtatctcaaaataataagaactttttatgacaaacccacaggaatatcatactgaatggacaaaagctggaagcattccctttgaaaaccagcacaagacaaggatgccctctctcaccacttctattcaaaatagtattggaagttctggccaaggcaattaggcaagagaaagaaataaaggatattcaaacaggaagagaggaagtcaaattgtctctgtttgcagatgacatgagtgcgtatttagaaaaccctatcgtctcagcccaaaatrtccttaagctgataaggaacttcagcaaagtatcagcatacaaaatcaatgtgcaaaagtcgcaagcattcctatacaccaataatagacaaacagagagtcaaatcataagtgaactcccattcacaattgctacaaacagaataaaatacctaggaatacaacttacaaaggatgtgaaggacctcttcaaggagaactacaagccactgctcaaggaaataagagaggacacaaacaaataaaaaaaaaattccatgctcattgataggaagaatcaacatcgtgaaaatgaccatactgcccaaagtaatttatagattcaacgctatgcccatcaagctaccactgactttcttagaataatttaaaaaac

SEQ ID NO: 889274 - DNA, 600 bp, Homo sapiens
tgtctactgttaaagtgagggcattgattggaaaagaatgggaccctgtaacttggactggggacatgttggaggactctgatgaagctgaggacactgagtttgtaaactctgatgaaacttttttgccagaaggaacagcttccccatccccagtggtggcagcatcccctcctgrcccatgctgccatcacctttccgcctttgcctgaggagataaactttgtgttgccttgggcaacggtgatggcctccaatgaggcagttgtcaggcaatataatgttgattctcctcagaatccacccccaacacctctgtttgcttttagacctataactagagtaaagtcccggtaggcccctagaggtgaggttgagagtgtgacctacgaggaggtgtgctacactcaaaaagaactgtttgagttttctaatttatataaacagaaatctggagaacaggcatgggaatggatattaagggtgtgggataatggtggaaggaacataaagttggagcaggctgaatttattgatttgggcccaccaagtagggaccctgcattcaatgttgcagctcattgagttaaaagaggttct

SEQ ID NO: 889275 - DNA, 601 bp, Homo sapiens
actctagaggaatccccgtgactaaattttaacttgggcttcaatattatttaaaatctgaattaaaatatcagaacattactatcataatacaaattaattaaaatgaagatggccaagaagctgaataattgccaagagagtgaaaaacaaaaaaaggttctgggaataaaggcattattgatcttgtgttcattttttcatcaaatattcccccattcaatctgatttgtctattgaaaatgctttctattaggttggtgcaaagggaattgcagtttttgacattaaaattaatgtcaaatagaaggtgaagggtgcatttcaccaacaaatccaaaggtcctttatctgtccctgttgtctctgacccttcatcattaarcattattaaacaccccttgtcttcatgactcaggataaagtttctgaaggtagatgacttatcttatttttctttgtattcccagtacttatagaaatacttgacacatagtaagtgcttaagatgactaagtgatcttccccttgcctcctggattgaatcatcctctcctcaggtcctggcaatttctggtgttcctaatgcacacctcaggtt

SEQ ID NO: 889276 - DNA, 582 bp, Homo sapiens
ctcttagcggactcactctgcaagcgtgacaaaccaggcttcatctcagattaaattagggtaattgtctctattctgctttccagttcggcctgttttgaacagaaggttgatgctagttcttgaggcatcttccaaatagtattcttttattaggtcatttgaattaattagagaaagtaaaaataaaaccttatcagcytgagcaaagaggaatgaagcacactcccagaatgtggtgagcccagaaaattaaagttggccttgggagaagagatctctgtgggacaataatgacatcatcctggcgccatattgccactgtccaggaaagagaaatttacctccaggccagttgcgcatttccatcccctccccattcctccccacaaagtctctcccactagactccctaccactgggacccaaaatagttactttatattccatgggtggttgtttttcttccatgaaatgagcctctcaccctagattttgaggcattatcttaagattttcctttatccatctcccatcgagatccaaagtgaccagaatatgcagaaataataagatccttag

SEQ ID NO: 889277 - DNA, 618 bp, Homo sapiens
gggctgcattctggtggggaatggctctgaaaatggtgccttgctctatctgcttatgactcagaagtgtgtgggagccagacttgagctccctctctggagcaatgtaatcttgtggtttccaggcagctccctgtgttagtcttagggcccatgaggattgagggcctcttctgcagttaggatcacaggagtctaccttgagcatgtggaccattgggggtccctcatgtaccctytcccacattggggtcctctccagattcccagctgatcctggctgagcagactgcctcacttccctctccttccttgcttgaggggttgcctatcacttccctgaattccagcgttctcttttagatgatctatttgaagtgtgattatgtacttgccattttggctctattttttggaggaggcaagtaccagatgactctagtaagccatcttgaagccacccacccctgcatcttttgttgttattttttatttttctcttgctattttggtagggcttcttcttcttctttttttaaataaatacttgttttaaattcacattttactgatttttgtttttaatttatttacaaaataaatgctatacattgttct

SEQ ID NO: 889278 - DNA, 597 bp, Homo sapiens
ttttctgggtttggaattctaatcagacaggatttttgtttcagcactttacagatgccactcctttgtcttcttgcttgcatggtttatgatgagaaatcttatctttattctactgcagacaatgtgtctttttcctctggctgcctttaatattttctctttatatgcgattttcagcagtttgaatatgatttccccagcattgtgtttgtgtataggtgtgtgagtgtatgttggtatttatcttgctagatgttctctgagcttattgagtctgttttttggtgtcttatatcagttttggaaaatactcagggaatagttactcaaaaaattttaaaaaatctaaaatttatggtgacctcagattggcattcctcccaagtatctggtgttagcaaactcaaatattmtctggaaaaaggacattttatcaggcccatcagataaatacttcccattatgaagttcctagaagcatgaatttaacaccaaaaatcaccaaatggatgagagaaaaagctaccatcagggaggccagaggatcataaggataagaatgagaacaagggactgtcaaaatgaccaggcaaa

SEQ ID NO: 889279 - DNA, 514 bp, Homo sapiens
actgtcaaaatgaccaggcaaaatttttcaactgaattcaactgaaatatataataattgaacctgtaaacttaatgaaatgctaaacaatatcatgtattgttgtagaaaaaataaactagaatgtaaaaataaataagtgacacagataaaatgatagaaaatatamaaaagatagaagaaaaggattaaagaatgaaaatatctaatatgcttataaatggatttctagaataataaaacaggaataatggaacaaaggcaatatttgaagagataatgactattttccacaatcgatgtaaggcatgaattatcagtttcacaaagcccagtgaatctcaagtagaataaatagaaggcaacctatagttagacacattattataaaactgcaagaccaaagacaagaaaattattttaaaagcaaccaaggaaaaaggggaaactacttacaaatgccaaaaataaggttacaaactgacttttgacagcaacaatacgaaacagaaaa

SEQ ID NO: 889280 - DNA, 575 bp, Homo sapiens
ctttgtagccagttgaaacaagtctaatctctctgactcctatgacaaccctgtaagtatttgaagatagctttgttccaagacctctctgcatttgactgaaatcactaggttcctcatgttcttcattactcttacggtgactgtacgacrgatatgcttctgtttctttacatcttgagacagggtcttactctgttgcccaggctggagtgcaggggtgcagtcatggctcactgcaacatgtgtcttccaggctcaagtgatcctttcacctcagcctcctgaatagctgggactacaggcacataccaccatgcctagctaattgttttattttttacagaggtcgggtaatccctattttgaccaggctgatcttgaactcctgagctcaagtgatcctcctgctttggcctcctaaagtgcttggattacaggaatgagccactgtgcctggcatgtttgttttaaaagaactaaacttcatactcaatgtatgagcaacacggaatgggacagggctcaagcggatgtgacaaccatctctgttttggacatattactttcagtac

SEQ ID NO: 889281 - DNA, 671 bp, Homo sapiens
attctaacagggcccacctagttattggccattctcggggaatacttctttgaagttcatgtgctttaatacgctttaaacctacattcaagcatatggtttattttgagacatgaacttgacattcactttcttgtcctgccttttgtggcctgtgtagcaaaaacatctgctctgacaatggaagaaatcataaagtagtaactcctcattaaagtaccagkgcaacaatgtaatccttttgggagtatggctgacttgccatgatctgtgagtttctctggctattgtttcctcactccttcatagtagattctcagccaaaagcaatttcttttggacttgtattttactaatgatatatttaataagggaaagggagaaaaacatagggcatcaataatcacaaatatatacatctggtagaggactgaaaggaaaacagatcacagctggctttgacagttaatattatgaaaatgttcagggtggaatgtctattttaaataagaaacacttgaaagaaatggtcaagattaacaggagcttaaattgaaaccacgttggtttgtaggtaatagaatgctagagacaaacactgcctttaatataaaagcattcctcccccagccccacagctccccagactatccatgtggccctgtttgtgc

SEQ ID NO: 889282 - DNA, 645 bp, Homo sapiens
tcctattttcttaccttttagtaccttgctggactcaagttattgggttggagagtcaccatttgtcacctctgatgtttctctggatccacttgaatgccctaagattattagctgagcctgctctgtgtttgttttcctgctcgtctgtgtgccctggatgttttcctctttgcacatcctttggtcaagccaatcatgacrtgattctgccaaaccttccccactttcaggaaacacagtagaagagtgtaaagtattttccttccctgcttactgaacattcatacctgtggcaggaactagctctaagatgccaggatgaaaaccaagccctgagtagtaggtaatacacaccactcttaccgactctagctgtgaatgctcccattgattaaactttactggggatccttgttcagttgactgtttacaccagtgcttctcaaagagtggtccccagaagaggagcattggattcacctggaacttgttactaatgcaaattcccactgcagatttacagaatcagaaattctgaagggggggctcagcaatcatcctttaataagccccataggtgattctgatgtcaattaaatttggaaaataatgggttacatgaaggccagcagtctccatatt

SEQ ID NO: 889283 - DNA, 560 bp, Homo sapiens
gtcctataaaatccacttttcatcacatgttacaattcctactaagaaatggctaatgaggccaggtgcggtggctcacgcctgtaatcccagcactttgggaggccaaggcgggtggatcacctgaggtcaggagttcgagaccagcctggccaacatggtgaaaccctgtctctactaaaaatatgaaaattagccgggcgtggtggtgggcacctgtaatcccagctaatcgggaggctgaggcaggagaatttcttgaaccaaagaagcagagtttgcagtgagccgagagcatgccactgcactccagcctgggcaacagagygagactctctctcaaaaaaaaaaaaaaaaaaaaagaaatggttcattgttgttgcatagagtgagagaagatgacacttcaaaatgacttttttttattttttattttcgcttagctcatgaggcacccacttatcaagctttttcacctttccaatttgcttcaaatgccgaatgaccacggaatgggtgatgttgagttcttcggcagcttctcatgtagttgtaaaagg

SEQ ID NO: 889284 - DNA, 595 bp, Homo sapiens
taaacataatttccatagtctaaaataaacataaaataaaaagcaagtaatgtcattatcaaaaaaaatgaagtgagaaatcctcattaaaatgatgtataacataaccacattttttaaagaatgtattcccatatcaaacagcaaatttcaacaacgcaaaaactgtaattacttttgtaccaacctaatataatgggcaaaaaaggagagagaatcatagataactctgtggagtttgcaaacctggctgagctgattttagtaatggcagatgatgagtcagacttagtaaactagaacatcctttttgtcaacattattggaaaatacattttttttaatactttaagttttagggtacatgtgcacaaygtgcaggtttgttacatatatatacctgtgtcatgttggtgtgctgcacccattaacttgtcattgaacattaggtatatctcctaatgctatctctcccccctctccccaccccacaacaggccccagtgtgtgatgttccccttcctgtgtccatggaaatgtaaaattatttggtttaattacaaatacttcttaaggagttgtgtgccaggcaaga

SEQ ID NO: 889285 - DNA, 632 bp, Homo sapiens
gttccaggctcagctagcaaggcaggtttctaagttcctacaacatataagaaaaaccacacccttgctaaactccctaaccatagaagctatcaggctgatttacaacccagaccactacaactctgtttgggtacaggaccatccttacaaacattcttttataatgggctgtttcagacctcaagccagttttatctacttatagaggstgtgcacagactgtctttctatcctgtaattcaccttttgacataaaaccaaattctaccttattttaatgctaaaaccctgccctaaagtgaacatggactgtatggttatgtatatgtttacccattgcacttgtactcagcaaccctcataaatatgtatagcttttcccccaaacatgctgaatatgcatgatactagccctctgaggcataaaatccaacctgtttttcccctcttcaaagagagacagagtaccttctatccatgctggaaactttctctttccacttgcaaattgatataatcaataaagctctcctttctattactccatcctggtggtcttttggatgacagattgaagctcagagagcagcatctttagctacagaaagcaacaagggcctggagcttct

SEQ ID NO: 889286 - DNA, 587 bp, Homo sapiens
gttgcatgttgcaacctggttgcaagtaaggacataattattttcttttcatatagcactggctggttcagagatctcaagtggctgcccaatatttctctaggtaaactctatccatgtaatacaaatttctggccagtatcggaraaacaaacaaaaatgtttttcttttgttaaatatgtgagtgaagaacaccatactaaaattaattacctccataccttttgtaaaaattcactgagaaagtgatttcattgaaaagtttctagcaagtgtgatgcctccgacattgtttttctttctcgagatctcagaattgtttcagctatttagttttttgtgtgtggtttgggttttagaatttttatagcttttttaattaaaatttttttctattgttgtgaaaaatgccgttgaaatttgatagggattataaatctatgtatcactttgggtaatatgaacacttcaacaatagcaattctttcagtctatgaacatgggatatctttccatttatttgtgtcttcttcaatttctttcatcaatgttttatagttttcagtataaagattccttcacttgc

SEQ ID NO: 889287 - DNA, 593 bp, Homo sapiens
atatatgggattggtttcttgatttctttttcagaaagatcattcattgatgtgaagaaatgtgaatgatttttgtatttgtttttgtatcctgctaatttactgaattcattattcgttcaaacaggtgtgtgtgtgtgtagtatttagggttttctrcatacaggatcatgtcatctaaaaacaggaataattttacttcattttttaaaaattcagatgctatttgtctcctttccttgtctatttgctcttgctagtacctccggtgctttgttgaatagaagtgaccagagtggacatccttgccttttattagatcttagaggaaaagccttcactttgcccaacttattacaaggttagctgtgggattttaataaatggcctttactatgttgagaaaattttcttctatgcctattttgttgagaattttttatcatgaaataataaacttcgtcaaatgctttttctgtatccattgaaatgatcatgtagttcttaatctttcattctgttaatgtggtatatagcattgattggtatatgttaacccaaccttgcatcttagggatggataaatgccactt

SEQ ID NO: 889288 - DNA, 636 bp, Homo sapiens
agattcttcctcctacctctatctgtgctgtgaaaagaagaattagcccgtaaatcccagacatactgatacttggatagttagcccatgaagaatgtcatttactcagcctcttgtatgatccttctttggggataacttttataatgctatggaaaggctctggctatacttgttacagtcctcacacatccatcaagagatgagaggtagagtgaggggaacatgcrcagaaaggaggagacatcgctgggaattacagatatttccaacacgatcaattaatcagatggctttttcagataattgctcacaaatctttatactacgaggaaggatttctgggctccattcatatcactgtgagtggcagttggaaaaggagcatccagagctaactgaatttagctagaagacagatcttactggtattatggagggacttaactccttggaagaatcttaacaatgtcttagggtttgttaatttaattttagttgacttaattttctactaagagtatagtgttctgttttcagcaatagtaagaaagaatgtcttgtggaagcaatttcatggttgcctttcatgtaaattttagaagcctaaaagcacaggcgatcaatctctagtct

SEQ ID NO: 889289 - DNA, 615 bp, Homo sapiens
tttttttgttttacatttgcttggtagatcttcctccatccctttttttgagcctatgtgtgtctctgcatgtgagatgggtctcctgaatacagcacactgatgggtcttgactctttatccaatttgccagtctgtgtcttttaattggagcattgagcccatttacatttaaggttaatattgttatgtttgaatttgatcctgtcattatgatgttagctggttattttgctcattagttgrtgcagtttcttcctagcctcaatggtcttcacaatttggcatgtttttgcagtggctggtaccggttgttcctttccatgtttagtgcttccttcaggacctctgtagggcagtcctggtggtgacaaaatctctcagcatttgcttgtctgtaaaggattttatttctccttcacttatgaagcttagtttggctggatatgaaattctgggttgaaaattcttttctttaagaatgttgaatattggcccccactctcttctggcttgtagagtttctgctgagagatccgctgttagtctgatgagcttccctttgtgggtaacccaatctttctctctggctgcccttaacattttttccttcat

SEQ ID NO: 889290 - DNA, 615 bp, Homo sapiens
tttttttgttttacatttgcttggtagatcttcctccatccctttttttgagcctatgtgtgtctctgcatgtgagatgggtctcctgaatacagcacactgatgggtcttgactctttatccaatttgccagtctgtgtcttttaattggagcattgagcccatttacatttaaggttaatattgttatgtttgaatttgatcctgtcattatgatgttagctggttattttgctcattagttggtgcagtttcttcctagcctcratggtcttcacaatttggcatgtttttgcagtggctggtaccggttgttcctttccatgtttagtgcttccttcaggacctctgtagggcagtcctggtggtgacaaaatctctcagcatttgcttgtctgtaaaggattttatttctccttcacttatgaagcttagtttggctggatatgaaattctgggttgaaaattcttttctttaagaatgttgaatattggcccccactctcttctggcttgtagagtttctgctgagagatccgctgttagtctgatgagcttccctttgtgggtaacccaatctttctctctggctgcccttaacattttttccttcat

SEQ ID NO: 889291 - DNA, 594 bp, Homo sapiens
aatacataataagaaaatataattataggaaaaagaaaaaccttttttgattgagttgacaaactttgatataaaattatattctaaaattttttaatgtctatggcagagaggttaatacaacattttattttatattacaggatatcacctgtcttcagggattttatagtatttcatggatatggtttgtgaagagttttgagagaagaaggtctgcccttttcacacagtgagaaagtgtccaaattcttatgcatttctaatctgtaacactatattattaattgcttatgttaaaaaataacaattttatttaacttgtgagtacaggtacacttcaaatctgtgctgcatttctgargttatgtatttgtgtatacccagttctgcttgagaatcttgtggcatcaacctcttaggagaccagaagagtctttttggcttctgaatgttttctcttgccctttctattacccttaaaagaaatttcaatgatggtacagatgactggagtctagtgtggactgattctatgatgataactcgaaaactttggaaggtgtttcagggatagtaagcaccagggagagc

SEQ ID NO: 889292 - DNA, 598 bp, Homo sapiens
ttttatttttgtgtgatagatttcttaatcccaatttaattaatttgaattaaaaaatttaattaaaaaatttaagataactactataatgcaaaattattttcaactgttcatatagttaatatgattaagtaggcagctatacccttaactttgtattactaaatattttcttttaagtaaaataatctttacatgattgccttttattctttttagatgtgcttttgcagacttaaaactacaaggtggtcagtaattatagatgactttttcaatatttcatttgcagctgcacataaaatataaagttatatttgaagagaatgggtatggtataggtttctataaacattaaccrcaatgaacatttaaataatcaatatcacagagataagatagaatcttaattgtccaaagaaagtaaaattgctcaaatttaagtcaatgactgaatttttgttggtgtaccaaaataaggtttctaatttttaaaaagtagaaattacacttgaaaaaaagtgtgattaatcaattaaaatttggagggaaagcttcttcacctcagcatgtgtaaaacaagcatgaagagcagtgt

SEQ ID NO: 889293 - DNA, 557 bp, Homo sapiens
ttctgacagaatgcttgagacttagatgatttatgaagaaaagagatacatttcttttttatacttcaagttctagggtacatgtgcacaatgtgcaggtttgttacatatgtatacatgtgccctgttggtttgctgcatccattacctcgtcatttacattargtatttctcctaatgctatccgtcctccatccacccacctcatggcaggccccggtgtgcaatgttccctgccctgtgtccaagtgttctcgttcaattcccacctaagagtgagaacatgcagtgtttggttttctgtccttgacatagtttgctcagaatgatagtttccagcttcatccatgtcactacaaaagacatgaacccatccttttttattgctgcatagtattccacagtgtatatgtgccacattttcttaatccaatctatcattgatgggcatttgggttcgttccaagtctttgctattgtgaatagtgctgcaataaacatacgtgtgcatgtgtctttatagtagcatgatttataatcctttgggtatataccca

SEQ ID NO: 889294 - DNA, 583 bp, Homo sapiens
ttgctattgtaaatggtgctacaataaacatatatgtgtatgtgtctttagagtagaatgatttacattcctttgggtatgtatccagtaatgggattgctgggtcaaatggtatttctagttctagattcttgaggaataacacactgtcctccacaatgtttgaactaatttacattcccaccaatagtgtaaaagcrttcctatttctccacagccttgccagcatctattgtttcttgactttaaaaaaatcatcattctgactggcatgagatgatatctcattgtggttttgatttgcatttctctaatgatcagcgatgttgagcttcttttcatatttttgttggcttcataaatgtcttcttttgagaagtgtctgttcatatcctttacccactttttgatgggtttgtttgtttttttcttgtaattttgttgaagttccttgtagattcttgatattagacctttgtcatatgggtagtatgcaaaaattttctcccattctgtaggttgcctacataccacagatgttttgtgggttctctcttatgtactagccatgattctaggttct

SEQ ID NO: 889295 - DNA, 586 bp, Homo sapiens
ctgaggatgatggtttccagcttcattcatgcccctgcaaaggacatgatctcattcctttttatggttgcatagtattccatggtgtataggtaccacattttctttattcagtctattattgatgggtgtttgtattgatttcatgtgtttgctattgtaaatggtgctacaataaacatatatgtgtatgtgtctttagagtagaatgatttacattcctttgggtatgtatccagtaatgggattgctgggtcaaatggtatttctagttctagattcttgaggaataacacactgtcctccacaatgtttgaactaatttacattcccaccaatagtgtaaaagcgttcctatttctccacagccttgccagcatctattgtttcttgactttaaaaaartcatcattctgactggcatgagatgatatctcattgtggttttgatttgcatttctctaatgatcagcgatgttgagcttcttttcatatttttgttggcttcataaatgtcttcttttgagaagtgtctgttcatatcctttacccactttttgatgggtttgtttgtttttttcttgta

SEQ ID NO: 889296 - DNA, 583 bp, Homo sapiens
ttgctattgtaaatggtgctacaataaacatatatgtgtatgtgtctttagagtagaatgatttacattcctttgggtatgtatccagtaatgggattgctgggtcaaatggtatttctagttctagattcttgaggaataacacactgtcctccacaatgtttgaactaatttacattcccaccaatagtgtaaaagcgttcctatttctccacagccttgccagcatctattgtttcttgactttaaaaaaatcatcattctgactggcatgagatgatatctcattgtggttttgatttgcatttctctaatgatcagcgatgttgagcttcttttcatatttttgttggcttcataaatgtcttcttttgagaagtgtctgytcatatcctttacccactttttgatgggtttgtttgtttttttcttgtaattttgttgaagttccttgtagattcttgatattagacctttgtcatatgggtagtatgcaaaaattttctcccattctgtaggttgcctacataccacagatgttttgtgggttctctcttatgtactagccatgattctaggttct

SEQ ID NO: 889297 - DNA, 648 bp, Homo sapiens
ggcgattatgtttcaacacataaatttggggggattcattcagaccatagcaattgtatactcaaaatttgcttagagagtaaatcttaaatattctcaccacacacagaaaaataagttatctatttgaagtgatggatatgttaattagctctatcgtggtaatcatttcacagtgtttaggtatatcaagatatcacattgtacaccataaatataatcaatttcccttgttaattatacctcaataaatgtggaaaaactaaaaataataagcatatatcaagtttacaacaatgcaataatttgtattaagaaatgaaagaaacttgggtgtggtggctcaygcctgtaatctcagcacattgggaagctgaggcaagcggatcacttgaagtcaggtgttcaagaccagcatgaccaacacagtgaaacctctgtctctattaaaaatacaaaaaatagctgggcatggtggcacaagcctgtaaacccagctgctcggaggctgaggcatgagaatcgcttgaacccgggaggcagaggttgcagtgagcctagatcacgccactgcactccagcctgggagacagagtgagactctgtcaaaaaaaagaaaaaaaaggaggggagacagattcgaaatgg

SEQ ID NO: 889298 - DNA, 648 bp, Homo sapiens
ggcgattatgtttcaacacataaatttggggggattcattcagaccatagcaattgtatactcaaaatttgcttagagagtaaatcttaaatattctcaccacacacagaaaaataagttatctatttgaagtgatggatatgttaattagctctatcgtggtaatcatttcacagtgtttaggtatatcaagatatcacattgtacaccataaatataatcaatttcccttgttaattatacctcaataaatgtggaaaaactaaaaataataagcatatatcaagtttacaacaatgcaataatttgtattaagaaatgaaagaaacttgggtgtggtggctcatgcctgtaatctcagcacattgggaagctgaggcaagyggatcacttgaagtcaggtgttcaagaccagcatgaccaacacagtgaaacctctgtctctattaaaaatacaaaaaatagctgggcatggtggcacaagcctgtaaacccagctgctcggaggctgaggcatgagaatcgcttgaacccgggaggcagaggttgcagtgagcctagatcacgccactgcactccagcctgggagacagagtgagactctgtcaaaaaaaagaaaaaaaaggaggggagacagattcgaaatgg

SEQ ID NO: 889299 - DNA, 615 bp, Homo sapiens
gttctggccagggcaatcaggcaagagaaaaaaataaagggtattcaattaagaaaagaggaattcaaattgttcctgtttgcagatgacaggttgtatatttagaaaaccccattgtcttagcccaaaacctccttaagctgataagcaacttcagcaaagcctcaggatacaaaatcaatgtgcaaaaatcacaagcattcctatacaccaataatagacaaacagagagccaaataatgagtgaactcccattcacaattgctacaaagagaataaaatacctaggaatccaacttacatgggatgtgaaagacctcttcaagaattacaaaccactgctcaatgaaataaaagaggacacaaacaaatggaagaacattccatgctcatagataggaagaatcgatatcgtgaaaatggccacactgcccrtggtaatttatagactcaatgccatccccatcaagctaccaatgactttcttcacagaattggaaaaaactactttaaagttcatatggaaccaaaaaagagcccgcatggccaagacaatcctaagcaaaaggaacaaagctggaggcatcaggctacctgacttcaaactatactaca

SEQ ID NO: 889300 - DNA, 638 bp, Homo sapiens
gggcaacttataaaagaaagaggtttaatgcactcacagttccacgtgtctgggggtggtttcacaatcatggcggaaggtgaaaggcacatctcacatggtggcggacaagagaagagggcttgtgtagggaaactcccttttttttttttgagatggagtcttgctctgtcaccaggctkaagtgcagtggcacaatctctgctcactgcgacctctgactctctggttcaagtgattctcctgcctcagcctcccaagtagctgggattacaggcacgtgccacaaagcccagctaatttttgtgtttttggtagagacggggtttcaccatgttggccaggatagtctcgatctcctgacctcttgatccatccccctcggcctccgacaatgttgggattacagacgtgagccaccacgcccagccagaaactcccatttttaaaaccatcagatcttatgagacttattcactatcatgagaacagcatgggaaagacccgccctcatgattcaattacctcccaccaggtacctcctaaaacacgtgggaattcaagatgagatttgggtggggacagagccaaactacatcaactgcatattctatcagaaatgtatatcataacttatt

SEQ ID NO: 889301 - DNA, 638 bp, Homo sapiens
aatagcttttttaaacagttgggcatggtggctcacgcctgtaatcccaacactttgggaggccgaggcaggcggatcacctgaggttgggagttcgagagcagcctgaccaacatggagaaaccccatctctactaaaaatacaaaatcagccgggtgtggtgatgcatgcctgtaatcccagctactggagaggctgaggctggagaatcgcttgaacccatgaggcggaggttgccgtgagccaagatcgcgccattgcactccagcctgggcaacaagagtgaaactcctcgtctcggggcggggggtggggtggggggaacctaagtatgcatagaggtagtattctctgcttatttatgtttctatatatttaatctatgtaygcatgcatgtatgtatctatttgtatcacagcattttaaaccagataaaaaggctaattatattgataatgtagattttctgttcttgctcaatacattctatgttcaccctatagcaaatacttccatctttctagtggtatacatatacgtttatgtgttttgttctgattaccttttttttgcataaaaactacctcaatctataacacattctttcattacagtcatggtttctctgtgtcagga

SEQ ID NO: 889302 - DNA, 659 bp, Homo sapiens
tgtggccattcaagaatgttacctggcagtatttagacaaattaagtatacacatcaacaagatgacatttctacttctcatgggtatgtctctctccaaaaaagtaaaacaaaaatccttgtacattcctgtaagtagacacatacaagggtgcccattgcaagattgtctgtagtgacagaaaggcagttgtaagaatcttggaatgtaagagccagttggatgtgcaatagtaagtactagatatacatatagcgacaatggaacatactcatgctaacattsatataatgtgaaactggattgagggaaatagcaaaatgataagacctaaaaaacactttatcgtgtttgtaaaaaccataagtgcacatgatagattgcactgagttaaaattaagaacgagccttcatcaaatgacatcaagttacccatattttcagcatattctgttaacaaaataatttgccacttataaatttggggatgaaaactgctagctatatagtaaaataaagtaacatgagaaatgtttgttttctgcacacatgctaatttataaatgctaattttataaaataaattataaatgcactttttaatatcccttcatgcaatttaaactgatactctatctcttgtgaaagagaggcagca

SEQ ID NO: 889303 - DNA, 630 bp, Homo sapiens
aacatattagcatatgtaatttaagcttgctgttggccttgccaaggtggaatgctggttgtgatacaggttgagtctcccttatcttcagtgcttgggactgaccagaagtattttaaacttgggttttggtttttgtttttgtattttggaatatttacataaacacaatgaagtatcttcaggataggggataggacccaagtctaaacacgaaattcatttacgttttatatacactttatacaggtagcctgaaggtaattttatacatgattttaaataatttggagcatgaaacaaagtttcgaatgcatttgactgcaccmtgccacatgcagtcagatgtggaatttttcacttatggtgttatattggtgctcaaaaagttttggattttggagcatttcagatttcagatttttagattgggaggttcaacttggatatacctttatttggctgaaattctaagaagaggataaatgaattttgttttgttgtttttgtttttggagttccttttctgttttaatttttaatttcattttcttaatttacctaatgaaccaatccctatgattacagtgagaaaagaaaacttggctctcactgaatcttctaaaaact

SEQ ID NO: 889304 - DNA, 460 bp, Homo sapiens
tcctgaatacagcacactgatgggtcttgactctttatccaatttgccagtctgtgtcttttaattggagcatttagcccatttacatttaaggttaatattgttatgtgtgaatttgatcctgtcattatgatgttagctggttattttgctcattatttgatgcagtttcttcctagcattagtggtctttacaaattggcatgttttttgcagtggctggtaccagttgttcctttccacgtttagtgcttccttcagagctcttgtaaggcaggcctggtggtgacagaatctytcagcatttgcttttctgtaaagtattttatttctccttcacttacgaagtttagtttggctggatatgaaattctgggttgaaaattcttttctttaagaatgttgaatattggcccccactctcttctggcttgtagagtttctgccaagagatctgctg

SEQ ID NO: 889305 - DNA, 597 bp, Homo sapiens
tttccttttgcacaaaccagtctcatcccatcctcaaacgagttcttcaaggtggacaatgaatctgtccaagcccaacttacccttttatgctcatctcagcttctaccttctctaagaatcttttgatgtctacctcagtgagaattaccttctctatcttctacccaactcctcatgtagctttgagagcaatgcascttatgtttactgggctcaagactggttttgaagagtctacctcattgtcaaatcttgtgacgtaattttgggtttcaaaataaaattgcaaccaataattcaataacaggaatcataattacaggaacggtattagatgtctcagaattgtttttttttaaaaagttattgttaaaagtatcctgaatagggaacagatctaaatatactgagctcccactctatgttgaataccgtgacaaaagggggtggttataaaagtggaagaaagagtccctgcccgaaagtagtgtatggttcaattgagagatgacaagatagaccattataatagaacataatcagtgtagtgataaagataaaacaggaagctttgggcacacagagcagggatgc

SEQ ID NO: 889306 - DNA, 629 bp, Homo sapiens
taaatgatctggaaactctctcagatgtttgccaactatatcccatgagccaatttggcccatcacctgtttttttttaataaataaagttttattggaacatagttacatccatttgtttacgtattatcaatgactgataccttgcagtaatggcaaagctaagtagttgcaacaaagtaatagtagttacttatggcccagtaagcctgaaatatttaccatctggctctttgcagaaaaagtttgycaagctttaactagattccagggcattgctgctcaaagtgtggtccttggaccagcagcattggcatcccttgcttatttgaaatgtagattatcaggccccaatctagacaaactaaattagaatctgcattttaacaggatccccaggtgatttagttgcacattcaatattaagaaacatttctcctgtataactaagtagctgagaactttgacttcgaggtcagagaatcctagctctgccattcactaacattgtggcctggagtaagttatattccctttctagtctcagttgttggatatatataatagggataatgatgctatatcatgggattgttttcagaaatgaaataaaatgaaacacctgaatg

SEQ ID NO: 889307 - DNA, 486 bp, Homo sapiens
gggctcttttcacttcagagggcccccacaacatctgcagcccccaccccacctttggttctgaggatgctgctaaacataaccgcgttttggggaacccaagaagcacctgggctgtcaccctgccgacttgctcgtaccttctgaaacccacccagaaaacaggaattcacatgtggcctggctcgcttccgcgggacagacacctgcaggctggaaagtgtcctggtgttgccccatcatgggtttcagaaaggtggtcctgaagtcaagagccccggacaggagaagagatgcctgggccccrgtccagctccaccagtgactttccagatgatctttggtatcctgagagtggatagtacagccactctcagggtactggtttcctcatttgtaaactgcagggacaggactggatgctctctaaggtctcagaacgccctgacgtgtccagtgacacttggtaaaccaggaggagtgcag

SEQ ID NO: 889308 - DNA, 628 bp, Homo sapiens
gataaaactaaaagaaaaaaatcgcacatacataagccaaaaccacgataatagctcatttagttctaggaagtaaataatctgtcaatcattttggaaaaatactatgaaataacttgaatgtagatattctaaattaaaaagataagtattctatttaagtctatatagacttaaatatagagttatatacmttgggtttatatttgatgtgttaagtttctgaagatccttttggttttggtggaagcagaatgaggatagagagaattgtttctttatatatagattcaaagcactccacaaacagctatcgttgtttggtcctggtacgacctgtacatgctcttcttcaagcaactgcttgtaggagattaagcagaaagtctgaaaactgcaggaagatcacacagacgttgtctcccctgggcctggagagatcccttttaaaagggaatggattgggctggctccacgtgaccaagtgggaatagatcactagggttttattaaagatattggacatagcaccaaacatctagagttggaggaaccaactgtacctttaaagaatttcccagttgataacgatggaccaagtcctcctggatagagttactggtatatc

SEQ ID NO: 889309 - DNA, 594 bp, Homo sapiens
aatgtatatataaagagagagagagcgcgagcgcgtgcaagagagcaagagagagagaacccttaaaacacaacaatgagaaaacaaccaaccacattaaaaaatgggcaaaatggccgggcgcggtggctcacacctgtaatcccarcactttgggaggccgaggtgggcggatcacgaggtcaggagatcgagaccatgctggctaacacggtgaaaccccgtctctactaaaaatacaaaaaattagccggccgtggtggcaggcgcctgtagtcccagctactcgggaggctgaggcaggagaatgtcttgaacccgtgaggtggagcttgcagtgagccgagatggcgccactgcactgcagcctggcgacagagtgagactccgtctcaaaagaaaaaagaaaagggcaaaatttctgatcagacacatcacaaaagatgacatacaaatggaaaataagcgtatgaaaacatgttcaacatcatgtcactagagaattacaaattaaaacaataagataccactacacacctattagaatggctaaaatccaaaaatctggccatattgaggaaaggttattaggat

SEQ ID NO: 889310 - DNA, 565 bp, Homo sapiens; identical to SEQ ID NO: 887309

SEQ ID NO: 889311 - DNA, 613 bp, Homo sapiens
aaatcctccaaatttgctcctgtttaaaactgatttggctatctaattcctttgcatttctagcatttccacgtatattttagaaatatcttgccaatttatgcccctttcctcaaagaaaagactggttgaattttggtgagtattgtgatgactatatagatcaatttgcaggaaactggcatcataataattttgaagtttccagtccatgaacatggtatatctcttggaccttctttcatttctctcagcaattatttgttgttttcactgtataagtcttgcacatattgtgttaaatgaatagttaagtatttcatgtgtttgagtgttgtggtattggatttttacatttcattttcttttttktgtgtgtgtgtgtgtgtatatctcctctattttaatccttttaagttggcaaaagcactattcccgatcacaaatacacagcagttctacagttttatgtttctgaatggctgtttaaagacaatcctaaattattacttagtttgacttagattgtaaagagttcaagagtgaagtttataagacacatgcacacgtatgtttattgtggcactgttcacaatggcgaagacttgaagcc

SEQ ID NO: 889312 - DNA, 631 bp, Homo sapiens
gtatgtgtaactttatttgcagataatgaaaaaggctaaatttgtggcctattttgaatgtaagactaaggtcagattttcttcttcagtctcaggatctgttatctgacggggttggatagtgtggatggggaaagcaagtcattgagtttggaaagcatatgctagagtttactttaggaagaagatacacactgcaggagagcaaatccactcacagcatacaagacatgccaagaagtgttttccttattttgtttaaatcttattttatctttcacacatggtggtgggagaaaagtaaaactaaatttgattcagaccaaataatttaaccagcttatttaggcaacgctcagccttttgaataaagatgctcagatgttcatctttmtgccatttttttttgtgttccctccaagaagtcatctgtgtttatggaggagaagggcttattaagtaacaattggggttgttcccctgaaggtatacaaagagcaggagatgtacagtgattttaagagaataaatgtccagattcccaactcctatatgcactttttactaaaatgattctgcttgagaatgtgcctgcagtgtgagggaatgccgtctcttttctcttttccca

SEQ ID NO: 889313 - DNA, 688 bp, Homo sapiens
aacaggacaaaggtttccatcttcagtaaaaagtaggatcaattacaagctttggccacaaaaattgtgaaactggcacaaaagttatattgaaaatgccagctgggcacagtggctcaggcctgtgatctcagcactttgggaggctgaggtgggcggatcccctgtggtctcgaactcctgttygagactggcttggccaacttggtgaaaccctatctccaataaaaatataacaacaacaaaaattatccaggtatggtggtgcgtgcctgtggtcccagctgctcgagagactgaggaaggagaattgcttgaacccgagaggcagaggttgcagcaagctgagattgcaccgctgcactccagcctgggcaacagagcaaggctccgtctcaaaaacaaaacaaaacaaaacaaaacaaaacaaaacaaacaaacaaaaaaagccagtctttctctgtgggatagagggaatgagatcctaaagttttctttaaactcaagtatggttttcagaacagatgccgaagataactgcactgttatggactacttgggcttccacattagtcttgtttaccctagaagccaatttattttaagtccacaggcactcagaaaagcagatatatctcatgcttccaggttctccttaggtgtgtcagcaaatacactactcaaactc

SEQ ID NO: 889314 - DNA, 565 bp, Homo sapiens
ttaacttatgtagtctatgatcttgggcacaatcaagactctcattatttgtaaaaagtacctcctttttaagttgttgttgcatattaagtaaaataactcaggtcaaatgttgcaaaataacaataataatagcatgaaccacttaaggaactgaaaataggccaatataggtgagagttaaattggtagtgtagttttgttttwtatatatatatatatatatatatatatatatatatatatatcctcattatgtttagaacttttgtccctgcaattccatttataggtatctaaaccaagaatgtaaacagaaatgcagcaaagtttataaacaagtatgtttattatcgaataatcacaatctaaaaaatgttagaaacaactaaaatatacaaaaataagaggttatattcaaatatatgagtgaaatatatttctcaactattagaaaatatttataatttgggagtgacaggaaagtggccacaacataatactaaatgaaaaaagtcaggtttataactatacattacataattatacaaatattatgtttatt

SEQ ID NO: 889315 - DNA, 598 bp, Homo sapiens
cttcaacaaaagaatgaataaagaaaatgtgatgtatatatatgcaatggaatactattcaaccataaaaaagaatgaaaacatgtcatttgcagcaatatggatggaacgggaggtcattgtcttaagtgaaataagccaggcacaaaaacataagtattgcaagttctcacctatatgtaagagctaaaaaatttgaatccatggaggtagagagtggataaatagataacagagactggggaaggtgcatgggggaaaggaagaaggatgcagagaaatgggttagagggtacaaacatacagtaaaatagaargaataaattcaatgtttgatagtagagcaggatgactatacttaaatgtgtcatactcaggtgatggacacccacagctatcaaagatggaaaacaaaaggtaaatacatatagcttaggacagtgtagcattacggatcaagagcccccaaaaatatgcattccttttacccactaattataccattagaaattaaagctaaagaaatattaagggtatacaaaataacataaataaaaaggatgctcatcctaaagttcaacaaatgtatacagtttaa

SEQ ID NO: 889316 - DNA, 643 bp, Homo sapiens
tattataaaatcatataattcatccttctaaagctgcaaaatctcctctctgctagattcatttaaaaactgggtaacttggaaactctactgattcagactgctttaattttgttaaacattttttaacaagaaaattagaaaagtaatgaagacttattgcaaaatatttaacaaatggagaaaagtataaaggcgaaaacaaagccaacttcaaacttaggcgtaaacctgtcctgagcctctattccagtgaagtttaggagtaaaatgtgataaattctagaatttcccagtcatctcaccaaacctggagcytcatagcgacagtcactgtcacaagatttgtccatctccatggaagagggcaatgacttttcaagctctaagttcaaagccaaaaccactctgctggtttgaatgtttcataactgttccttcttgtgtacagaaattactcttttctagaagggccacattctgagttcatccaaatgtattaaattaatgtcttgatgaagtaattgaaattgactgtaaaaagaggaaattttattctaactggaacagcctgctaggatcaatgattttaagtcatgacacttatcttgatcggtcatacacatgacttatcagtttgctt

SEQ ID NO: 889317 - DNA, 621 bp, Homo sapiens
atgcaaggaagctaagaaccttgaaaaaaggttagaggaattgcaaactagaataaccagtttagagaagaacataaatgacctgatggagctcaaaaacacagcacaagaatgtcgtgaagcatacacaagtatcaatagctgaatcaatcaagtggaagaaaggatatcagagattgaagatcaacttaatgaaataaagaatgaagacaagattagagaaaaaagaatgaaaaggaacaaagcctcgatgaaatatgggactctgtgaaaagaccaaatctatgtttgattggtgtaccggaaagtgacgaggacaatggaaccaagttggaaaacactctttaggatattayccaggagaacttccccaacctagcaagacaggccaacattcaaattcaggaaatacagagaacaccacaaagatattcctcaagaagagcaaccccaagacacataatcatcagattcaacaaggtagaaatgagggaaaaaatgttaagggcagccagatgggaaggtcggattacccaaaaagggaatcccatcagactaacagtggatctctcttcagaaatgctacaatccaggacagagtgggggccaatattcaacatt

SEQ ID NO: 889318 - DNA, 765 bp, Homo sapiens
aagcttgagttattaaaggttgaattgtgtccccctaaaaggaatattaaagtcctaacatccagtacctgtgaatctgactttatttgggaatagggtctttcaagatctaatcaagttaagataaggtccttaaggtcagccctaatctaatatgactggtaaacctataagagagaacagagctcaggagttcaaggttacagtgagctatgactgtgccactgcaatacagcctgggtgccagagtgagaccctgctcctgccccccaaccaaaaaaagaaaagaaaagaaagaagaagagatacaggcagaacaccttgtgacagtggaagcaaagattgaagtgctgctgtgtaagccaaggaaagcctcaaggacttcggacaaaacaccataaacaagaaaagattctcccctacagatgtcaaaggagcatggccctctcaacaccttgattttagacttctagcctctggaastaagagacaattatgttgttggttgttgttgttgttgttgttgttgttgttgttgatgttgttggttttaatccacctagtttccacttaatggcaaccctagagaactagtacaagggttgtgtgttatattcttttacctgcaagcagggctgcaggtaaaaattaatcctgataggcagactgtgttagatgctatataaccttttgtgatcgatcctaatggagaagacctcccagattagaaattgttatctggcaccaaaaccctaacatacaact

SEQ ID NO: 889319 - DNA, 658 bp, Homo sapiens
gccataatgcccaaagcagtctacaatctacaaagattcaacgcaattgctacgtaattatcaacttcatttttcacagaattagaaaaaaactattctaaaattcatatgtaaccaaaaaagtgctcaaatagccaaataaatttttagcaaaaaagaacaaagctggaggcatcmcactaccagacttcagaatatactataaggctacagtaaccaaaaaagcatggtactggtacaaaaacagttacatagaccagtgcaacagaatatagagaaccaagaaataaagctgcacatctacaaccttctgatcttcaacaaagtcaacaatagcaagcaatggggaaaggaattcttattcaataaatgatgttgggataaatggctagccatatgcagaagaataaaacaggacctatatacaaaaattaactgaagatggtttaaagacttaaaggtatgacctaaaactatcataatcctagaagaaaacctaggaaacaccattctggatattggcctttgcaaataatttacgactaagtcctcaaaagcaattgcaacaaaacaaaaattcacaagcgagatctgattaaactaaagagcttttgcacagcaaaagaaagtatcaacagagtaaacagaaaacctgcaa

SEQ ID NO: 889320 - DNA, 577 bp, Homo sapiens
acagtgtgtgtgtgtgtgtgtgtgtgtgtgtgtgtgtgtgtgtgtatgtttttctcccctctggctgctctttctccatgagcaggtcaataatgataaaaattttcccttatgaaatagggtctcaatccctccctagtgactggccttttcaaaataaaaactcaaggcaatgaaacatatacagctgaaaatcatccagaagaaaaacatgaaccatcttaataacatattcaatctctttttctcgccatatagaggtcattatgtagaccataatgtgtggtggtgaatgaatgtgtgcatgtgtgtacgtatgtgtatatagttatgaatatattattcaaggttatctctgatttggaaaagtctacataattatataaatcatgcataaatayaatatatatgcatatttacatatacatgcatacttgttttcaattctccgatgagttaaaatgaacacatattttcttctatacatacatatatacaaattttaaagaaaggataagctgtatgtgtaataatatttagtttcttaaatacattttatagattaatattaaattgc

SEQ ID NO: 889321 - DNA, 642 bp, Homo sapiens
aacaaaatgaggagtgtaggcagaactggtgtagtgcttttttaaaaggcaaggcatagattgctagctcatttttaagatgaacacactgaagctctgaaaagtcaactgacctgcccaagttcgcaaagctgaggcctgagtacagaccttttgactccaagtctagtgctctttcctctcctctgtgcttgggcacttggctagagaacagagccataaaacaaattaaagcacgrggggaaaatcttgacctacaaatgcacttttcttctgacctccaatgaaacacaagcagaaaaggaaagttgcaaaagccagattgtcttacataagcatctcatttgagataaaaccttccttgctggtatcattaatcaccttacctcttcccttcctctaggaatccctggtgacagagcaacccaagctgttttgtgtctgtattgcagctacctcaagatcaattagtatttttcacaaagctgtcatgtaggaagacgataggggatgcagacaaagtcaactgttgagaggccacagtgtgtagttgagtagttggtgaggacactgacacggcctcctgacatcttatggtgtcagcctgagctttgaatatggccatttatgattttatggtaa

SEQ ID NO: 889322 - DNA, 670 bp, Homo sapiens
cctattaaagcattattcttatctcgtatttggaacctaactctaagggaacctacataataatacaccttgacacaatgcggtatgttaggaaaaatgtctccacatttcttagaaaagtcattcaaatacattaacatcattgtttcatctgtgaaggcatctccaacccctctagatgaaactgaacatccgtcctgtctgtggccactgtgcctatcacatccttctccttcaacatctatcttattattttgcatttcacaattttgtgttttctgtagtagtcttcaaatttctcaagggtagaagtgctgcagctttcaccatagtayactgagggttaagcaaaatatcagggaaatggacgtgcttaataaacattcattgaacaattctttaaagatcataaaaatacttcattcaaaggttattgggcacttaataatgtatgaagtagatgtatacgaagttacataatttcccaaattgaccaggttagggaatttttggtgtctaatcaactgaagcttcagctttgccactgagtaagacaaactattatgggatttatttgagtccctatgtgacataaaaaaggacccagattcaagttacactgtcactaattaagtgaactgtggtagttcgtgtaatctctgggtcccat

SEQ ID NO: 889323 - DNA, 670 bp, Homo sapiens
cctattaaagcattattcttatctcgtatttggaacctaactctaagggaacctacataataatacaccttgacacaatgcggtatgttaggaaaaatgtctccacatttcttagaaaagtcattcaaatacattaacatcattgtttcatctgtgaaggcatctccaacccctctagatgaaactgaacatccgtcctgtctgtggccactgtgcctatcacatccttctccttcaacatctatcttattattttgcatttcacaattttgtgttttctgtagtagtcttcaaatttctcaagggtagaagtgctgcagctttcaccatagtatactgagggttaagcaaaatatcagggaaatggacgtgcttaataaacattcattraacaattctttaaagatcataaaaatacttcattcaaaggttattgggcacttaataatgtatgaagtagatgtatacgaagttacataatttcccaaattgaccaggttagggaatttttggtgtctaatcaactgaagcttcagctttgccactgagtaagacaaactattatgggatttatttgagtccctatgtgacataaaaaaggacccagattcaagttacactgtcactaattaagtgaactgtggtagttcgtgtaatctctgggtcccat

SEQ ID NO: 889324 - DNA, 645 bp, Homo sapiens
gcctgcaaaggacgtgatctgcttccttttctggctgcagagtattccatatagtctatgtgtacacattttctttatccagtccatcattgataggcattggggttgattccctgtctttgctgttgtgaatagtgctgcaacaaatatatgtgtgcatttatctttataatagaatgatttatattcctttgggtatatatccastaatgggattgctgggtcaaatggtatttctggttctagatccttgaggaatcaccatactgtcttccacaatggttgagctaatttacattcccaccaacaatgtaaaagcattcttatttctccacagccttaccagcatctgttgtttcttgactttttaataatcgccattctaactggtatgagatgttatctcattgtggttttgatttgcatttccctaatgaccagtggtgttgagccttctttcatatgtctgttggccgcatgaatgtcttctttcaagaagtgtctgttcatgtcctttgctcactttttgatggggttgtttgttttcttttttcttgtaaatttgtttaagttccttgtagattctggatattaaacctttgtcagatgggtagattacaaaactttctcctattctgtaggttg

SEQ ID NO: 889325 - DNA, 641 bp, Homo sapiens
ctttcttttgcctgatttctctggttaggacttccagtactatgttgaataggagtggtgaaagtgggcatccatgtgttgtttcagtattcaaggggaatgcttcctgcttttatccattcagtatgttgctggcagtgggtttgtcataaatggctcttattattttgaagtatcttgctttaatgcctagtttgttttttacatgaagggacattgaattttattgaaagccttttctgcatctatagagatgatcaggtggtttttgtttttatttctctttatgtgatgaatcaaatttattaatttgcaagtgttgaaccaaccgtgcrtctcagagataaagcctacctgattgtggtggatttaactttttgatgtgctgctggttcagtttgctagtattttgttgaggatttttgcatctgtgttcatcaaggatattggcctgaagctttctgttcttgttgtgtctctactaggttgtggtatcaggatgatgttggcctcatcttctttttaaaggctaaatagtattccattacgtgtgtgtgtgtgtgtgcatgtgtggggtttgtgtgcatgtatgcatcctcacattttaaaaattcattcatcccttgatggacatttaggtt

SEQ ID NO: 889326 - DNA, 583 bp, Homo sapiens
taataaatagtgctgggggaactggctagccatatgcagataactgaaactagaacccttccttataccttatacaaaaattaatttaacatggattaaagacttaaatgtaaaacccaaaactataaaaatcttagaagaaaatctaggcaataycattcaggacatagacacaggcaaatatttcatgacaaaaacgtcaaaagcaattgcaacaaaagcaaacattgacaaatgggatctaattaaactaaagagcttctgcacggcaaaagaaactatcatgagagtgtgaagagacaacctacaaaatgggagaaaatttttgcaatctatgtgatctgaacaatgagaacatatggacacagggaggagaacaacacacactggggtctttcagcaaggtatgtgagggagaaaatcaggaaaaatagctaattcatgctgggcttaatacctaggtgatgggttgataggtgtagcaaaccaccatggcacacatgtacctgtgtaacaaacctgcacattctgtacatgtatcttggaactaaaaataaaattctgctaaggattctggattttt

SEQ ID NO: 889327 - DNA, 653 bp, Homo sapiens
gtctcactatgttgcccagcctggtctcaaactcctgggctcaagcaatcctcccaccttggcctcccaaagtgctgggattagaagtatgaaccactgtacccagtcttaaaaactttttattttaaaaacccacaagtgtaaaaaatatgacatgaaaaatttttatacacaatccttacaggtacgtaggaaaaagttttttaaaatatacattaaattattaacaatctctgggtgatggcattataaataagttttctttctctgtttacctatgttttcaaaattttctacaacttaagtatttcacttttgcagccacataaaacacaactgttttttctgacacggagtttcactcttgctgcacaggctgaagtgcaatggcgtgatctcagctcaccgcaacctctgtctccccggttcaagcgattctcctgcctcagcctcccgagtagctgggattacaggcatgtgccaccacgcctggctagwtttgtatttttagtggagatatcatgttgatcaggctggtctcaaactcccgacctcaggtcatctgccagccttggcctcctgaagtgttgggattacaggtgtgagccaccgcgcccggcagaacacaatttttaattactgctacattaatg

SEQ ID NO: 889328 - DNA, 585 bp, Homo sapiens
atatcattaactatattaatgactgatattgcataaaaatatatttgtatagcagataaaaagatgggggagggatagcattaagagaaatatctaatgtaaatgatgagttaatgggtgcagcaaaccaacacgacacatgtatacatatataacaaacctgcacattttgcacatgtgctctagaacttagagtataataaaaaaaagttgtaaagataaattttgtctagaattcaactaagaggcacctagaaatttttaaggataattaaaattcgaagatgaaatttgaatgttaacataaagcaaaataaaagaaatgccaaatacatacaattttaaaactataacaacttcaaaattcaaaaagaaacttttatattattatgttatataatatttttatttttaaaggcacttttttcttgtgattaaaggtatgtkttctcttaaaaacatgtatttctctacatttaaaaaaatgattttttaacttaaaaaataaattattttcttcctttttctattcctattttatttttttaaatttttttagacttttggccatttttcttaacttta

SEQ ID NO: 889329 - DNA, 561 bp, Homo sapiens
tccagccatggctgaaaggggccaatgtagactttaggctgtggcttcagagggtacaagccccaaaccttggcagcttccacttgatgttgagcctgtgagtgcacagaagtcaaaaatgggggtttgggaatctctgcctagatttcagatgtatggaaatggctggatgtccaggaataagttcactgcaagggtgaggccctcataaagaaccactgtttagggcagtgtggaagggaaatgtggggttggagcccccacagagagtccctactggggcactgcctaatgcagctgtgagaagagggccaccrtcctccaaaccccagaatggtaaatccactgacagcttgcaccgtgcacctagagaagactaaaacactcaatgtcaccctgtgaaagcagccatgaaggaggctgaaccctacacagccacgggggcggagctaccccaagaccttgggaacccacctcttgcattagcatgacctggatgtgagacatagagttactgggagatcattttggagctttaaaatttgactgtccctctggatt

SEQ ID NO: 889330 - DNA, 665 bp, Homo sapiens
aattttttgactttttttgtagaaatcaggtcctactttgttgcccaggctgatctcaaactccggggctcaagcaatcctcccacctcagccccacaaagtgttgggattataggaatgagccactgcacccagcttcacatatattttaaaataaactaatcatttccactttaaaaaaaaaaaaaacttgctgaaatttttattgagtttgcattaaaactgcagatsaatttaaagtaaattaatatcttatcaatattgtgtcttctaatccatgaacatgatttatccctcaatttattttagtcttctttactttctctcagcaatgctttatggttgtcagtgtactggtctttgaaatctttcattagatttattcctaaatattttgtggcttttgttgttattgtaaatggtatttaaaatattttattttctagttgtttattgctagtatatataatacacatacaaatgaattttgtatattgaccttgcattcagttcctttgctaaatttacttatcaaatactttataaacttcacattttcttcatattaaaacatataatctgtaaataagttttatttcttcattttcaagagtcataactttttaaagcccaatgaagtataatgaacaaataacaaaattcac

SEQ ID NO: 889331 - DNA, 665 bp, Homo sapiens
aattttttgactttttttgtagaaatcaggtcctactttgttgcccaggctgatctcaaactccggggctcaagcaatcctcccacctcagccccacaaagtgttgggattataggaatgagccactgcacccagcttcacatatattttaaaataaactaatcatttccactttaaaaaaaaaaaaaacttgctgaaatttttattgagtttgcattaaaactgcagatgaatttaaagtaaattaatatcttatcaatattgtgtcttctaatccatgaacatgatttatccctcaatttattttagtcttctttactttctctcagcaatgctttatggttgtcagtgtactggtctttgaaatctttcattagatttattcctaaatattttgtggcttttgttgttattgtaaatggtatttaaaatattttattttctagttgtttattgctagtatrtataatacacatacaaatgaattttgtatattgaccttgcattcagttcctttgctaaatttacttatcaaatactttataaacttcacattttcttcatattaaaacatataatctgtaaataagttttatttcttcattttcaagagtcataactttttaaagcccaatgaagtataatgaacaaataacaaaattcac

SEQ ID NO: 889332 - DNA, 650 bp, Homo sapiens
tgtataggaatgcttatgatttttgcacattgattttgtatcctgagactttgctgaagttgcttatcagcttaaggagattttgggctgagaggatggggctttctaaatatacagtcatgtcatctgcaaaggcagggacagtttgacttcctcttttcctaattgaatacactttatttctttcccttgcctgattgccctggccagaacttccaacactatgttgaataggaatggtaagagagggcatccttgtctgctgtcggttttcaaagggaatgcttccagtttttgcccattcagtatgatattggctgtgggtctgtcataaatagctcttattattttgagatacgttccgtcaatamctagtttattgagagttttcagcatgaaaggctgttgaattttgttgaaggccgtttctgcatctattgagataatcatgtggtttttgtggttggttctgtttatgtgatggcttacatttgttgatttgcctatgttgaaccagccttacatcccagggatgaagacaacttgattgtggtggataagctttttgatgtcctgctggattcagtttgccagtattttattgaggatttttgcattgatgttcatcagggatattggtctaaaattct

SEQ ID NO: 889333 - DNA, 650 bp, Homo sapiens
tgtataggaatgcttatgatttttgcacattgattttgtatcctgagactttgctgaagttgcttatcagcttaaggagattttgggctgagaggatggggctttctaaatatacagtcatgtcatctgcaaaggcagggacagtttgacttcctcttttcctaattgaatacactttatttctttcccttgcctgattgccctggccagaacttccaacactatgttgaataggaatggtaagagagggcatccttgtctgctgtcggttttcaaagggaatgcttccagtttttgcccattcagtatgatattggctgtgggtctgtcataaatagctcttattattttgagatacgttccgtcaatacctagtttattgagagttttcagcatgaaaggctgttgaattttgttgaaggccgtttctgcatctattgagataatcatgtggtttttgtggttggttctgtttatgtgatggcttacatttrttgatttgcctatgttgaaccagccttacatcccagggatgaagacaacttgattgtggtggataagctttttgatgtcctgctggattcagtttgccagtattttattgaggatttttgcattgatgttcatcagggatattggtctaaaattct

SEQ ID NO: 889334 - DNA, 619 bp, Homo sapiens
ttgtcagtaatgtggtgtccttcctcaaggggttctggcttccccttcattcaaggggttctgggtctgtgagctggctcaagtctggaaattgattgagtggccatgattctctgtttttataattcaaattagtcttttgtccattcaacctagaaatttcctgcttgtataaattaagtaggaatgcagtaggcctcctatccatttcatttctaggaacaccatgattaattagccaaggccagagctctagacacatcagactattctgattgtcgctttgcctctgctatccgttatggtaactacgcccaccttgcctttgatggttgagtgtcaccacttggcccccgctacctcgggatccaattattcccattgtatttaaattttgtagttgagtgactgcagwtcccatcattagatctgacacacagagaagagcaattacagcaattacagggctcttcaaagatgcaggtgctgcccttacaaatctattccacaactcagtgtccctagtttcatcagggggatctggcagtcccacatgtccccattccaagtttcagggtcccattcttttccagtagatgccctcactttaacagtaaac

SEQ ID NO: 889335 - DNA, 588 bp, Homo sapiens
tgtccatgtccatgcattctcatagtttagctcccacttataagtaagaacatgctgtgtttggttttctattcctgtgttagtttgctgaggataatggcttccagctccatccatgtccttgcaaaggacatgatctcattcctttttatggctgcatagtattccatggtatgtatacactacattttctttatctaatctatcattgatggacatttgggttgattgcatgtctttgctattgtgaatagtgctgcaataaacatatgcrtgcatgcatctttgtagtagaatgatttatattcctttgggtatatacccagtaacgggattgctgggttacgtagtatttccggttctagatctttgaggaatcgccatactgtcttccacaatggttgaattaatttacattcccaccaacagtgtaacctcaccagcatctgtgtttcttgacttgtaataatcgacattctgactgatgtgagatggtatctcattgtgggtttgattagcatttctctaatgatcagtgatgttaagctttttttatatgtttgttggctacatgaatgtcttcttttg

SEQ ID NO: 889336 - DNA, 588 bp, Homo sapiens
tgtccatgtccatgcattctcatagtttagctcccacttataagtaagaacatgctgtgtttggttttctattcctgtgttagtttgctgaggataatggcttccagctccatccatgtccttgcaaaggacatgatctcattcctttttatggctgcatagtattccatggtatgtatacactacattttctttatctaatctatcattgatggacatttgggttgattgcatgtctttgctattgtgaatagtgctgcaataaacatatgcgtgcatgcatctttgtagtagaatgatttatattmctttgggtatatacccagtaacgggattgctgggttacgtagtatttccggttctagatctttgaggaatcgccatactgtcttccacaatggttgaattaatttacattcccaccaacagtgtaacctcaccagcatctgtgtttcttgacttgtaataatcgacattctgactgatgtgagatggtatctcattgtgggtttgattagcatttctctaatgatcagtgatgttaagctttttttatatgtttgttggctacatgaatgtcttcttttg

SEQ ID NO: 889337 - DNA, 588 bp, Homo sapiens
tgtccatgtccatgcattctcatagtttagctcccacttataagtaagaacatgctgtgtttggttttctattcctgtgttagtttgctgaggataatggcttccagctccatccatgtccttgcaaaggacatgatctcattcctttttatggctgcatagtattccatggtatgtatacactacattttctttatctaatctatcattgatggacatttgggttgattgcatgtctttgctattgtgaatagtgctgcaataaacatatgcgtgcatgcatctttgtagtagaatgatttatattcctttgggtatatacccagtaacgggattgctgggttamgtagtatttccggttctagatctttgaggaatcgccatactgtcttccacaatggttgaattaatttacattcccaccaacagtgtaacctcaccagcatctgtgtttcttgacttgtaataatcgacattctgactgatgtgagatggtatctcattgtgggtttgattagcatttctctaatgatcagtgatgttaagctttttttatatgtttgttggctacatgaatgtcttcttttg

SEQ ID NO: 889338 - DNA, 644 bp, Homo sapiens
gagtccctcattttcaattgtttgtaatagtttcattagaaatggtaccagatcttctttgtacctctagtagaattcagctgtgaatctgcctggtcctgggcttttttggttggtaggctatttattaatgcctcgatttcagaactcattattggcctattcaaggatttgatttcttccttgttcagtcttgggaggctgtatgtgtccaggaatctatccatttcttctagattttctagtttatgttcatagaggtgtttgtagtattctccaatggttggttgtatttctatggagtcattgatgatattccccttatcatttctgattgtggctatttgattcttaygttttcttttttattagtctaagcagtctatctattttattaatttttttcaaaaaatcagctgctgcattcattgatttttgaaggatttttcatgtctctatctccttcagttcagctctgatcttggttatttcttttcttctagctttggggtttgtttgctcttgattctctagttcttttagttgtgatggtagtgtgttgagatctttctagctttttgatgtgggcatttagtgctataaacatccctcttaccaccactttagctgcatcccagagattc

SEQ ID NO: 889339 - DNA, 589 bp, Homo sapiens
acagtatttctcatctactttgggagccataatcagaatgaaatttttctcagactgggatttcttttccctatccaactaggcaactcctctcttgcctggaagaatagagctattttcctagaaaatagtctctccatctaagaatagaacaatttasatggcaggtggtctgtttgatcccacagactgtaaatatgagatgcatcaattagagatcaactttttaccttatcaggtatgctgtccttgtcaaggttaatcaattttttcaggaaaccagtttctgaaagaagtaactttgccgttgcccagttaggtttcttttgcagaagaatacacactgcattcatgacagtcagtacaaggaagggaggccgtgtgtatactctgtaatagatgatgaaaatctcatcaacttcacaattaaaaatgaaatgcaccctgtaaatatctcagaagacaatatacacagatttttaacacacatttggataaggaaaactatttgtcaacatatagctatttaattacttaggtatcttttaaaaattgggtatcttaaatataaggatattatagttttagg

SEQ ID NO: 889340 - DNA, 752 bp, Homo sapiens
ttgggagaaatacctaatgtaaatgacgagttgttttgggggacaccaacatggcacatgtatacctatgtatcaaacctgcacgttgtgcacatatgccctagaacttaaagtatactttaaaaaaagaaaagaaaagaaatgtcttccactggataccctaaatcatctcactcaagttcaaagttccacagatccctagagcaggggcacaatgctgccagtctgtttgctaaagcacagtaagtgtgacctttgctccagttcctaataagttcctcgtctccatctgatacttcctcagcctggacttcactgttcrtatcactaacagcgttttggtcacaaccattcaacaagtctctaggaagttccaaactttccttcatctttctgtcgtcttctgagacctccaaactgttccaaatctgcctgttaaccagttttaaagctgcttcaacattttcaggtgtctttatagccatgccccacttctctagtaccaattttctgtattagtccattctcacactgctataaagatgcacctgagactgggtcatttataaagaaagaggtttagttggctcatggttccacaggctgtataggaagcatggctggggaggtctcaggaaacttacaatcatggcaaaagtcaaaggtgaagccagcacatcttacatggttggagtaggaggaaaagagacagagtgaggggagaaatgctatgcagttttaaacaaccagat

SEQ ID NO: 889341 - DNA, 613 bp, Homo sapiens
tcagggaataagactttcatcatgtcctcagaaaggtaatttcagtctaatagatttcattaaactctgcattttaggttgaaagcatttctaaatgcattgctatggagtaaaacacaacatagtaaaaatgttcccaagttccttgtccttacttggcgtagtctcattatttcagttatattcctttggaccaccctaaagtattgtgytcttctttcatgtttacatcctttcgacaatttaaattcatttaataaaatctacaggagggagagacctttcttgttaacatattaacttctggggaatgtctgctttcatataattatgcatagacttcatattcatataaatattttttgcctgcaggggggtaaaatggatctctctcatgaatattcaacagtgccatttcttctagcaagacacagacatctttcttcatggttattaagcactaggatgtctatatatattttctccttcatgttgtgtttgcataaaagtgatgagatacaggaactgccaaagcagacatttattattccaggtacctcaatattatagggccttcatccaaataactcaataatatttttcagattcaaat

SEQ ID NO: 889342 - DNA, 649 bp, Homo sapiens
taaaggcttcaaatagaaagtttgtgttctttgttggatagttgtgaggttatgatctagaagaggtcataagattttttaagttggatattgtttcatcaaaattctcttgacacttggaattctcaaatattgaatatttctgagatcctgaaattcaaaggagagttagctagaaattaacattctagaaagttaattcaatgatctaaattgtcaaacttgatttaatgaaccttttaaaaattaggttttaaatggacattgtaaaaaattcaagttatacaagaaagtagagaataaaagctaattgtctcagccttcctgtccccagtcctgatatttgacctcctctttcaatatgagtctaattagcccaccaggcaaggamtaattcatttttttaatctagtatatctgtatttgaaatgtgtgaacatggccatcaaaaagctttctagacacacaaatctcatatcgtaaattcattctggaaactgccggccatcaagaagtctagccatttggaaatcataagaggttatagcccagaccttgaaactaaccctggaaatctgattgctatttgtcttgaatttttctttgaacagtgctcaaccttcactgagacctgcacttgagtgcaaca

SEQ ID NO: 889343 - DNA, 655 bp, Homo sapiens
tctcaaaagctgactcaagccccatttgtggcaaattaactaaaagagcaagggacagaagggaaaaagcaaaaacacctgttggtaattttccccaagcaacatttttgtctttcaaaagaccaaagcgaggctgaactttagagacaaggtttcccttgttggaaacagagcaggcsagtagcacctttaaacagttccctgtttttcaagcagctgagggagggaaaatctgcagagagctcagtgagggcggccccaggaaggccctgcagaggtgcttcattaacccgattaagcaggtggatggagagggcctcgctgataatttacaccttgctaatgaagcgtgtgactcttaatctcctccaaacaagatacactcatgaaactctggtacaaggaaaggggaaattaattaggtgaaaaaactatgagattatagcagagggattcctgcaaggcaactgtaacctgggtagttattcattttagcctttctgaaattaatggctgagctgtcaagtaaacaagttgtggtatcttttgggcttataagaagttcaaaagcagtacatcattatgtgtctgatttcatatttcatgcaatatctttaaaaatcaatctgatggactgacttctaatgtgtaattt

SEQ ID NO: 889344 - DNA, 621 bp, Homo sapiens
ctggtcttaaatagcgtttttaaaaatttgttttcaaacaagtctaatcataaataatagaatatattttacaatagttgaaggtaacaaaaaataagtgctatttaaaaaattgtattagattgtttaaaaatgttgtgggtacatagtatgtgtatgtatctgtggggtccctgagatgttttgatacaggcatgtaatgtgaaataagcacatcttggggaatggggtatccctcccctcaagcatttatccttcaagttataaaaaatgcaattacagtcttagttayttcaaaatgtaccattaaattattattggatatagtcaccctattgtgctataaaatagtaggtcttattaactctctatttttatacccattaaccatccccaccttcccacaaacctccccccagctacctttcccagcctctgataaccatccttatactccatatgtccatgagtttgttttgattttagattccacaaataagtaagaacatgtaacatttgtctttctgcgcctggcttatttcacttaatataatgatccataatgttccatcattgttactgacaatgactggatcttgttctttgttacagctgaatagt

SEQ ID NO: 889345 - DNA, 676 bp, Homo sapiens
tatttgcatgcctaggagctttctgaccctgtgttgagctgcctaaccagcttcctgattgacctcctgatatttctgcaaatgtggactaagaggccaggagtcctcagggcccaggtgactcaggttattcagtaattatgtttggactagcaggcctctacttaatttgggatgcaaaaggggacttctcttcctaattgctaaaatagcttttcaaggttcacctctcatcgtggtaagagtctcatttcctgagactcttatttctttccatgacttatgttatattctggagagagtggattcacatggaaaagctggctctgtgctggctttccaggggtcagccctcttgtgagtgacaagtctgcctatttacatgatgtacattgtgtcccactactggtaatagaagctcagcagctgattgactgttaggttattttcaaagctcaatattcmcaataatctaacagacacccacacaaccacaaagacagacaaggctctcataacctgcaaaagacaaggtgcacatttcttctttccatcccagcaacaaattgccaacccagccagcacttaagttggggtaaaaattaattaaaagaagaatctaccaatgtagataaaagaacaaaaaagctattgcagctgtcttctccataacaga

SEQ ID NO: 889346 - DNA, 566 bp, Homo sapiens
ggaggtaattggatcatgggggcggtttcccccatgctattctcatgatactgagtgagttctcacgagatctgatggttttaaaaggggctcttcccccttcgctcagcacttctccttcctgctgccttgtgaagaaggkgccttgcttccccttagccttccaccatgatgcctgaggctccccagccatgctgaactgtgaattaattaactctatttcctttttaaattacccagaattgggcagttctttatagcaatatgaaaatggactgatacaccacatctctcctgtttcctggcagcggccatatggcacagagagagaatgtgtgcacttgagggagggagaatgcagtgactgtgggactttgcactgtaactcagagatgccctgtcacagcagaaaacaatactgggcagaactcaactggtgctgatgaagggagcgtttagatcattcttagccagaaggtcattgtttatcccagtggtgggaacctgagtttcaggaaaccccactccctcaggctaaagggctctgggatcctaaagaaacttga

SEQ ID NO: 889347 - DNA, 579 bp, Homo sapiens
acttttatgtttttgttttctttgttgaagatcagttcactgtacatatttggctttacttctgggttcgctattatattctgttggtctatgtgccagtttttatatcagtaccatgctgttttgatgatgatggtcttatagtatattttgaagccagttaatgtgatgcctccagatttgttctttttayttagtcttactttggctatgcaggctctttcttggtcccacatacattttaggattgttttttctagttctgtgaagaatgctggtggtattttgatgtgaattgcattgaatttgtagattcctttttggcagtatggtcattttcacaatattgagtctacccatccatgcgcatggaatgtttttctatttgtttgtgtcatctatgatttctttcagcagtgttttgtagtgttccttgtagaggtctttcacctccttggttaggtatattcctaagtattttattttatttttttgcagctattgtagaaagaattgaattattgatttgattctcagcttggtttgtgttggtgtatagcagagctactgatttgtata

SEQ ID NO: 889348 - DNA, 554 bp, Homo sapiens
ggggcagagaaagtgaccgattattaatcatttccctaaaatcagcagggtttcctgcagagagacactgattatcttggaatgttttgaatataggatccattagaataacaaaaagcacttgaaaaaaaaaagcttgtgtaaagatgctctaagtttttctctggttttgtttcatttttccaaaataaaatttgtgactatagactgcttcacttttggggggatgagctcctgtatatttctgacatagaaatacagaaacgrgtcacctttatctgagcctatgaattctctgattctgttagggagctgagtccttcattcttttctgctgttccttaaaatttcttacactttcccaggagtaactgctgatgtcctatcagtgactgcactacacctttgctatcctgctgattattcatcaatgtcctttctccgtgattaagaggtgtcacatcatcgcatatgatcaacttcctgacttttactcaggggtttaatggaagggattgttttttggtttgttggtttgtttctttggcctctct

SEQ ID NO: 889349 - DNA, 637 bp, Homo sapiens
gggagaggtataggaatggcacgtggtcttgaaatcctgacagactgacagaactaaattccaggattttcctcctccgggtttcaagataatagagaatgctgaagctctgtagatcaagcaatatagcacatgctcatttgtaaaaactactgcaacaatactgtgtatggtccaatttaactctgccctggtcyattcccttgctgcatttagacatgagatgtgtaaaacggataattgtagtaattcttcacacaatgtaaaaggaaaggtcttctcaaaaaacactgtggcactttgggaggctgagtcgggtggatagcctgagatcaggagtttgagaacagcctggccaacacagtgaaacccgcctctactaaaaatacaaaaaattagctgggcatggtggcaggcacctgtaatcccagctactagggaggctgaggcaggagaatcgcttgatcccgggaggtggaggttgcagtgagctgagatcgcaccattgcactccagcctcagcaacaagagtgaaactccatctcaaaaccaaccaaccaacaaacaccattatggtaatacagaagggtttatttgaaacctgactctactgcctaaatgtaaacggaccaaacag

SEQ ID NO: 889350 - DNA, 570 bp, Homo sapiens
aatacctgtggaaacttctagtacccatcctgtgttcatctaaagacaagtctttgttgcattacttctcagtccttaaagttattgtttttatctgtcttacttttcttattacattttttgaagttcagtaaaattttgaatatagcagggtctgagaatccttgctttgtgggttactgttaaggcaatgtttctaatattttatcacaaagtaggatatgtgctgtgtgtttttgttaaatatttcttattagtacaaggcagttacctttaataagtgttttattagaattttggggtgggtgaggcagctgaagtctgtaatcccagcactttgggaggttaggtagaagaatcacttgagcccaggagttccagaccaccctagacaacatkgtaaatccccatctctaccaaaaaaaaaaaaaaaaaaaaaaaaaagccagaagtggaggcacacacctgtagtcccagctactcaggaggccaaagcaggattacttgagcctgagaggtcaagactgcagtgagcctggataacagagaaagaacaagaaaaataaaaga

SEQ ID NO: 889351 - DNA, 595 bp, Homo sapiens
ttttaattctgattctggtagctgtactataaatgttgtaggcattgagacaatttgacagtgtttggattgtgtttgacaaatgagacaactaatacacgattgtcttccactgctgagaaaggtttctcagacttgaatgtgaatttaggttggttaatatttcagtgaacaaaaatggaattgctgaaactaaaccagtttgtcctcagttaggaaaagggtgcataattggttcaaataggatttggtttgcgaagttgtgagggctgaagggataaagtcgataatgtacaccttccccattaagacataattaaagagaaagyagctattcagagggaaacacatggttaagaacaagcacatggcatgtgataatctttctctacactgcatttaaccatgtaggttttactagaagcaaaagaaccctgaccccatcaagcaaaaatacaattataaaacaatcatgttcatattctaaaagataattgttatgtgtaactaaatcaagcaaagatttggcaaaccagagatggcttctactgcagaattcacaaaaagtttgaatagatgaggatggaactgggtt

SEQ ID NO: 889352 - DNA, 672 bp, Homo sapiens
aactggcaaatgcaacaagggctggtaggcttgagacccaggagagctgattgagcagatgaggtccaaaggcagtctgctggggaattcctttgttcctggggaggctagtccttttgttctatttaggcttttaagtgattggataaagcccactcacattatcaagggcagtctgcttactcaaagttcactaatttaaatattaatctcatccagaaacaccctccaagttgacacatacaattaaccatcacaaagcaccacgggactttctatttgaaaccacagggccagcctagttctcaacttctctatccctttctcttactgctagaaattgttgactcaacatcaggactttaacaacatttaattcttattatcccaggacctgaggccagagcagtttayactcatttagaagaaccctaccatttttgctgtcctagcctggaggacacacgctaatccctatacttaaactctattttcatttctgtgactaaaaggccctctctttgttgtaactggcagtggattccagctctaacttttttccctactgtcaaaccccttgttccgaaatttgctaaatgtctgtctcctcctgaggattaggataataattgagaattacacatattgcatggcgatctacagaagtgtcag

SEQ ID NO: 889353 - DNA, 600 bp, Homo sapiens
gcccccaataacaaattttctaaagtacagattactacaatcctgtcagcccccatgtatcactcccattttttttttgtaaagaaaccatattgggattatagatttgttcaagatctgagggaagttaaggaggcagcagtgctagtccrcccaatagttcctaatccttacacaatattgacccaagtccttgaagacgctaattggttctcagtattagacttgaaggacacattcttttgcatactcttacttccagaatcccaggatatttttgtttttgaatggactgatccagacattcatgctgcatctcagcataccttgacagtccttccccagggttttagggacagtttccaactctttggcaatgcattggcaaaagggttgagggaactactgttaagtaatggatccctgttgcaatatgtgaatgacctattaatttccagcactattagggaagactgtgacaggaacacagtgcaggtccttaatgttcttggaaaataagggtattaattatccccacacaagactcaaatttctataaagaaagttaaatatttggggtttatgctcattcctgggaca

SEQ ID NO: 889354 - DNA, 571 bp, Homo sapiens
aaatagttaagagcctttttggaaatgactgtattcaatgaatttgaattcctgggtttgggctcatgccaaaaccactctatgaagctctacaaagcagtgatcacgagcctttgaattgggataatacctgtcaataggtatttttaaccctaaaagaaaagttgggaacagcccctgctttgggacttccaaatttagaaaagcctttcaccctctatgtggctgaaaaacaagggagagctttggatattatagctcaaagactcaggtataatcccagacaagtggcttacttttctaaacagctaaaccragtggtggctagatggccaggatgcttgtgagttgtggccaccactgctttattagtagaagtagcctgtaagtttatcttgggacaacaatttaaattgtgcagtagcctggaaaatcaagtacatggtatcctagaggcaaaaggacatcaatgtctaacagggggccggttactcaaatatcaagccattctgcttaacaccccagatgttattcttaaagtatgtctactctgctaccctgctgccagatt

SEQ ID NO: 889355 - DNA, 571 bp, Homo sapiens
aaatagttaagagcctttttggaaatgactgtattcaatgaatttgaattcctgggtttgggctcatgccaaaaccactctatgaagctctacaaagcagtgatcacgagcctttgaattgggataatacctgtcaataggtatttttaaccctaaaagaaaagttgggaacagcccctgctttgggacttccaaatttagaaaagcctttcaccctctatgtggctgaaaaacaagggagagctttggatattatagctcaaagactcaggtataatcccagacaagtggcttacttttctaaacagctaaaccargtggtggctagatggccaggatgcttgtgagttgtggccaccactgctttattagtagaagtagcctgtaagtttatcttgggacaacaatttaaattgtgcagtagcctggaaaatcaagtacatggtatcctagaggcaaaaggacatcaatgtctaacagggggccggttactcaaatatcaagccattctgcttaacaccccagatgttattcttaaagtatgtctactctgctaccctgctgccagatt

SEQ ID NO: 889356 - DNA, 635 bp, Homo sapiens
tatacttttccagttttattaaggtaagataaacaaaaattgtgtgtatttaaggtgtaaaaagacattattttatatacatatacattgttaaattatgtcacaaccatgctaagtcccatcgtgtatggccacttagattgttttcataagttgacttgtacagtaaattaatggtgcaataaagttgagagtgcaggtatctcttcaagatggtgatcttatgycctttggctatgtacccagtagcaagaccactggatcatataatagttctatttttaattttgtgaggaaccttcatacttttttctatactggctttaataatttatattccaaccaacaatatgtaagagttcccttttctccacatcctcatcaactttatttatgtattgactttttgataatggccatcctaataggagtgaggtaaaactcattgaagtttagatttacatttctgtcatgaatattgatgctggacaccttttcatgtatctgttggccatttgtatgtcttctttggaaaaatgtctattcaggtcccttgcctgtatttttaatcaggttatttggtattttgctattgagtgtattttgggcattaattcatatatatatatgatttg

SEQ ID NO: 889357 - DNA, 670 bp, Homo sapiens
caagaacaatgtttctgaaggaacatgcaactgtgactaatttacttcttcaaagaacccctgagagctgagcaatagactaaaaccttgtgcactacctctgaatgctataattatattgaaatttcctgaaagaacaaatacatagaaagaaaaaagttcccgaagacatagagtgtgtgactatcttaactctgaagackagctttgaattctgtcaatccttccaaaattagggaaatacagaatcctaatgttaaactgagataatttataggaatatattaagcaaatcgcagtacttcaaaacaaaactccaaacctgttaatgttgtttgcccaacaagttcctactggaaggatgtagcaaaaatatattcattatggaatgtagtttctgtttaaacaagcaaagttaaaaggaactaagcaattggccaggttcaaaacttatagcttctattgagtcttagtgtggcaaaaatccaaaggaaggagacaagggcacggcacttacccaagaaccatttgctgtggaaagctggcttgttataagtttatcttctaaacttaataagctcatcacaaatactgcttcttcccatcattttttctggtatattagacattttttagaaagatagtatatcaactatattaaaaacaattt

SEQ ID NO: 889358 - DNA, 670 bp, Homo sapiens
caagaacaatgtttctgaaggaacatgcaactgtgactaatttacttcttcaaagaacccctgagagctgagcaatagactaaaaccttgtgcactacctctgaatgctataattatattgaaatttcctgaaagaacaaatacatagaaagaaaaaagttcccgaagacatagagtgtgtgactatcttaactctgaagactagctttgaattctgtcaatccttccaaaattagggaaatacagaatcctaatgttaaactgagataatttataggaatatattaagcaaatcgyagtacttcaaaacaaaactccaaacctgttaatgttgtttgcccaacaagttcctactggaaggatgtagcaaaaatatattcattatggaatgtagtttctgtttaaacaagcaaagttaaaaggaactaagcaattggccaggttcaaaacttatagcttctattgagtcttagtgtggcaaaaatccaaaggaaggagacaagggcacggcacttacccaagaaccatttgctgtggaaagctggcttgttataagtttatcttctaaacttaataagctcatcacaaatactgcttcttcccatcattttttctggtatattagacattttttagaaagatagtatatcaactatattaaaaacaattt

SEQ ID NO: 889359 - DNA, 588 bp, Homo sapiens
aaggggccgggagtggtggctcaagcctttaatcccagcactttgggaggccaaggcgggcagatcacgagatcaggagattgagactatcctagctaacatggtgaaaccccgtccgtactaaaactgcaaaaaaattagctgggcatggtggcacacgcctgtagtcccagctgtagcacaggctgaggcaggagaatcgcttgaacccgggaggtggagggtccagtgagccgagatcgcgccactgcactctagccggggcaacagagtgagactcagtctcaaaaaaaaaaaaaaaaaaaggcagaagtcttggayatgtttctttgtgcatcctttagagcagtagtgcattatctatctattgcttcaaaacaaattaccctaacactttgtggattataacgctaaacatttattatctaacattttctgtgagtcattaatttaagcatcgattagtcaggtgattctggttcagattctttcataatgttgctatcaagctgttggcctgagttgccatcacctaaaggcttgattgggactgaaaggttcactcaagattgtccccttatgtggcta

SEQ ID NO: 889360 - DNA, 571 bp, Homo sapiens
catttgaagttttgaaaggttactacaagatagctgaaaaatttactttatctggaaaggaaaatcttggaacattagcataaaataattaaagtaactaagcaggaaaaacaagataatcctactaaataagttmgatttcacatggtaattgattttgctgtttcaaaatgtttgtaaatgttataatattgaactgggcttgatctacgttgctccattacatgtttaatttaataacaataaactttattctatgctttcttcctattttccagtacccaatttctcaaaattttatgaaggccggaaaatgtttatttaccacagcacatataagacagctgggatccaacaagtctacaagctatccagctgaagaggtagcctcaggttaagttctttggtatgaattcttctgagattcttagaggaccttcttgctttgttccttgagccccaatttaagactattgctggaattagaaactaacaacaacaacaaaaatattcactgtcactttgtcgtgagtggcacaagatcagacataaccagatccatgcacatttg

SEQ ID NO: 889361 - DNA, 655 bp, Homo sapiens
ggatggtaagatttggggtaaataaaagcttcatatattttcactttcttaaattacttacagtgatcccacattatcagtaatgaagtagtaaaattacatccaaaaaattctcatacatacagtatttatatctccraaattcattgctagctttgctcagtgatttctgttcttgatgcagtttgtaactaagcaggaatgctacagacactttcaaagtcaccctttcagctgcattcctagggacttattaaggtgataaacacctttggccaaagcctatggtcagcaacattctcagcaaaatcaaatgttcctgttacttttgtttcttatgtgtttgaaacaagggctacccaagcagttcattgtggcaccccaggctgtgaccagattgttcatcctcgcactgagtttgggtctctaaatgaacccaggtatgttttaataaccttggaactgggaactctttttgcaccatttccatacacagccagctgctgtatattttggcagtggcaagcttatttctaaggaaagagaaatatttccattctttaataagtcattctaagtttcctgtgatgttataaataatcgggcaaacagccggctttattctgcttaatttgatatggcagatttgaaatgt

SEQ ID NO: 889362 - DNA, 627 bp, Homo sapiens
gaaaagaaaattgggaaacagttgacagcacttttgttcgttaagtggcaaatatttgtgcatgaccaacggtggaaaacaaatatgacaaaagtatattgttattggactaccaagaatcttgtattagtttgagttctctcagagctgaccttgagactacaaatgagctcaagtagtttgggaacttgcaatggctttcctgaggtgtctacttggctagactactgtcttcaattattctaagactaattaatcaccaaacactaacctaggtgttgctgtaaagagattttgcagatataattaaaacttctaatcrgtagactttgtgtagggaacactgtcctggataatttgtgtggagctgactgaatcagttgcaaaacctcaaaagcagggctgaggtttcccagagagaataaatctcacctgtagacaacagcgctagcctgtccccagagactccagcctgcctatgatatcccttttctgaatgcccaccccatgatatcaactttttagccagctcatgcatttgtaaattcgatttcttataataaatatcttcctatattgtactgctactggttctgtttctttggttgaatcctaactgatataaaa

SEQ ID NO: 889363 - DNA, 630 bp, Homo sapiens
gctactgatcactctcaaaatacacagatatataacatcattatgtttactgatatggtttggctgtctccccacccaaatctcatcttaaattcccatgtgttgtgggaaggacccagctgaaggtaattgaatcataggggcagttctttcctgtgcttttcttgtgacagtgaataagtctcacaagatctgacagctttataaggtgttatttccctgaataagctctccctttgcctgctgccatccatgtaagatgtgactggctcctccttgacttccaccrtgattgtgagtcttccccagccatgtggaactgtaagtccattaaaccattttttttttgtataaattacccagtgttggtatgtctttatcagcaacatgaaaacggactaattcaggtaggtggtaccaggaatggggtgctgctgaagagatacccaaaaatgtggaagatactttggaaactgggtaacaggcagaggttggaacagtttggaggactcagaagaagataggaaaatgtgggaaagtttggaactccataaagacttattgaatggctttgatcaaaatgctgataacgatgtggacaatgaaatccaggctgaggtgatctcagaa

SEQ ID NO: 889364 - DNA, 630 bp, Homo sapiens
gctactgatcactctcaaaatacacagatatataacatcattatgtttactgatatggtttggctgtctccccacccaaatctcatcttaaattcccatgtgttgtgggaaggacccagctgaaggtaattgaatcataggggcagttctttcctgtgcttttcttgtgacagtgaataagtctcacaagatctgacagctttataaggtgttatttccctgaataagctctccctttgcctgctgccatccatgtaagatgtgactggctcctccttgacttccaccgtgattgtgagtcttccccagccakgtggaactgtaagtccattaaaccattttttttttgtataaattacccagtgttggtatgtctttatcagcaacatgaaaacggactaattcaggtaggtggtaccaggaatggggtgctgctgaagagatacccaaaaatgtggaagatactttggaaactgggtaacaggcagaggttggaacagtttggaggactcagaagaagataggaaaatgtgggaaagtttggaactccataaagacttattgaatggctttgatcaaaatgctgataacgatgtggacaatgaaatccaggctgaggtgatctcagaa

SEQ ID NO: 889365 - DNA, 621 bp, Homo sapiens
aaataagttaaattttaacccacccaccacgggcaaaaagcaagatagtggtgccccattaacatttttctttgcatttttctctgattgggacatctccttaacatttattgaatgaaaaaaacataatattttgcatgaatatttattatatatctagatgcaatggccacaaaatacaaagccattacattttttttctcactttcattgaaagttcgtctaaatctctataagtaaatttagcatttacaagattaatattattgctgccagaagaaattactgccagaccttgagtggggtatggggggctgcagtgcaacagctggtagagtatttcctgttttcccyttctttggtttacaaaactttgttccgtctctggcaactgatttaacctttttctctcctacttggaaaagagagtgacacacatttttaacatttttggcccagcaaaagttctctttgggaatgcttaggccttttttcctccaacatgggagatagaacaaaagatatcacacaagctgatcttccctcccaccccacacattcaaaagcagccaggggatgctatgagcaaactcttctggggttgaatctaacattttagga

SEQ ID NO: 889366 - DNA, 682 bp, Homo sapiens
acaagtattaacagcagaataaaccaagctgaggaaagaaactcagaaattgaaaactgattctctgaaataaaacactcagaaaaaagtttagaaagaataaaaaggaataaacaaaacctccaagaagtataagattatgtaaagaggccaaatctttgaatcactggcatccctgaaagggagagggtgaaagcaaacaacttggaaagcatacttcaggatattgtccacaaaaatttcctcaaccttcctagagggaccagtagtcaaattcaggaaattcagagaattgcttcaaaattctacatragaagatcatcctcaagacacataatcatcagatattgcaaggtcaaaatgaaaaaaggagagagaaaggacaggcagcctacaaagggaacttcatcaggctaacagtggacccctcagctgaaaccttacaagccagaagagagtgggggcccatattcaacattcttaagaaaaaaaaattcaacccagaatttcatatccagccaaactaagctttttgagtgaaagagaaataaagattattttcagataagcaaatgctgagggaattcatgaccaccaaacctgcttcacaaaagatcttgaaaggagcactaaatgcagaaagaaaaaactgctaccagctaatataaaaatacacagacca

SEQ ID NO: 889367 - DNA, 694 bp, Homo sapiens
gcaatcccattcacaattgccacaaaaagaataatttacctagaaatacagctaaccagggaggtgaagcacctctacgatgagaattacaaaacactgctaaaagtaatcagagaacatgtaaacaaatttttaagaatcccacgctcatgtataggaagaatcaatatcattataatggctctacttcccaaagcaatttgtagattcaatgctattcttatcaaactagcaaggacattcttcacagagccaaataaaactattttaaaatatatataagaccaaataaaactattttaaaatttatataagaccaaataaaactattttaaaatttatataagaccaaaaaagagcccaagtacccaaggcattcctaagcaaaaagaacaaacctggaggcatcacactacatgacttcatgctacactacaaggctacagtaaccaaatcagcatggtactggaaaaaaaaaggtgggggggtgggtgtatagatcaatggaacagaatagaaagcccaaaaataaggccrcacatctttgaccatctagtcttcaaaaaagctgaggaaaacaagtaatggggataaaactccatattcaataaatggtgctgggacaactggatagccataagcaaaagattgaagctggaccctttcctcacaccatacacaaaaatcaattcaa

SEQ ID NO: 889368 - DNA, 618 bp, Homo sapiens
ttaaatgctaggagcatgttgtaaatgaaaacataaataatttattatagtcatgctgaactaaggccaaatttcctagtggctcagtgatgcacatcgcatcaatgagaaatgggctgagatgtaaaatcttattttcccaaatggattattgaaaattaaagtacaagctgttaaaagcaaatcttaatttttatataagttcctgcactctcatttaatggaaaaaaaaatctatcttcacagaattttaaagtaatttttctataaccaagatctatasagtaaattactcacttactggtgagtatttgctaacactgtatgagaatatccttcaggatctggccatgtcacagcccctagggtgattataaggtcctatacaggccttagaaatattacgcttttaattagatggagcaatggctagtcttcgttcctatatcattatattattaacattcattgccaggactcccggttgcatctcattgcaagggaggctgggaaatgtagtctagctgtgttccccggaagagagggaagtaaattttgttgaacacaaagcaggctctaccatggagtcaaactccacccatccccagatggatagcc

SEQ ID NO: 889369 - DNA, 584 bp, Homo sapiens
atggaaagtatctttaataaagctggatatggtttgaaaaaaaaaaaagaagacacagaatggcagaatgcataagaattcaccaaccaagtttctgctgtcttcaagagatttacctaacacataaaagattcacataaacttaaggtaaaggggtggaaaaaggtagtccacacaaatggaagccaaaagtgagaaggagtagctgttcttatatcagacaaaacaaactgtaaagcaacaacagttaaaaagacaaagatggatattatataatgataaaaggactagtccaacaggaaaatatcataatcctgaatatatatgcagctaacactgacaatcgcaaatttataaaacaattactactagaccaaagaaatgagatggatggcaatgcaataatagtgggkgacttcaatactccactgacagcactaaacaggtcaccaagacagaaagtcaacaaataaactatggacttaaactataacctagaacaaatggacttaacagatatttacagaacattctacccaatagctgcaggatatacattcttttttcagcatggattctccgag

SEQ ID NO: 889370 - DNA, 561 bp, Homo sapiens
caatgttcagggaacaagagagataaccttaaactctgactgccagtgagctgggtggaacagagccatatttctcttctttcaaaagcaaatgggagaaatatcactgaattctttttctcagcaaggaacattcctgagaaagagaatgtatccctgagggtaggcctctgaaatggccrctttggaggcagctgtcttttacggtcacagctgtagggatgaaataagccccagtctcccgtagcactcccaggcttattaggacgaggaaattcccacctaataaattttggtcagactgtctgctctcaaaacctgtctcctgataagatgttatcaatgacaatgtgtgcccgaaacttcattagcaattttaatttcgccctggtcctgtggtcctgtgatctccccctgcctccatttaccttgtgatatcttattaccttgtgaagcatgtgatctctgtgacccacaccctattcatacactccctccccttttgaaaatcactaataaaaacttgctggttttaaggctcagggggcatcacggaacctg

SEQ ID NO: 889371 - DNA, 586 bp, Homo sapiens
acattttaatctttcatgtttttgttcatattttctctcatatatctctccagaaacaagtaagaacattattattctgccaattcacatgagtaaagaataaattaagaagcctatatattttccaggcattcccttcacaacaaaacaaagttttcaatctgattaagttgcataaagaaagctttaaagtgtactaaattataaagttagatctacggtccatggacattagaataaatacacattctatgacctgtttgrcatcaaattcaaaatgctctgcttttacccaaacatctactgaccccttagaggattctacccggtatttcctcactgtctcctaagtaatatgtatgctatgttaactagagctaaaaggtgccttaaagatgtattcatagccatatgtgtatggtatattttaaattaaatgttttttaaaaaatcattgagacacattggtactgggtcccttggaatcactggacatatttatatctatttcttatcaactatttaaattataaggttaaatgtagatactgacataacacataattttttgaatttttaaacattt

SEQ ID NO: 889372 - DNA, 652 bp, Homo sapiens
tctggcttatatcacctagcataatgtttcgaccatgctgtcataagtatataatttcctttttaaggctaattaatatttcattttatatatataccacatgttgtttatccatttatctattgatggacatttgggttgtttctgccttttggctattgtaagtaatgctactagatgaccaytgaggtacaagtgtctatttgagtccttgcttttcaattcctttgggtatatacctagatgtggaattgccggagcatatgataattctatgtttaactttttgaggaactgccatactgttttccacagtggctgcaccattatacatttctaccagcagtatatgagggttgtgacttcccacatctttgccaatacttgttatttttttatcttcttgatagtaaccattctaatggtatgaaatggtatctcatcatggttatgatcaaacattttaaagaaaatctttctgtgtggctgtgatcgtctctgaattaaatagtgtctagctctggggccaagcagctttgggtttaaacaccagaaggaagtcagctccacaagggaaggagctttaggctgttttgtgcaccaacatatccctgatccatagaacaataactggcacgtagtaagacatgaa

SEQ ID NO: 889373 - DNA, 669 bp, Homo sapiens
atacgatacggagacacctccaccaaggcaaactctgaactagaggtggttctgagaaataagcaggcttgagggcacatgggtcctcctcctccctcatcagaggctccctctgcccggaaaagtccgcctgggttgagaccagaggagcaatgagaacaggagagatgggaaagggatgaagtcccccaaattggtgatggaaaagaaaaagtgaagaacatctaagggctggcaatcaatgggcaattgcaggaggagcggcataaataaggaggagttcctgtgtgaggatatgtaaaaagacaagtatgagttaggatcatctgtatatacaactatgagcaaaaccctcccagagtgggracattggccctcctgcccaattcttcaattatacataaagcacttacgaggaatcgaataaataatgaagtgttttataaagagtatccgtcttggagggagattccagttgtagagatgtttcacttgtgcaaaatatgcaacatatctcttctgaaaagcaacagaaatcttcctttaagtggagatgaaaagtctaaagtcggcattcctttttttttttttgcataaagcttgttaatggaggtaagtaattaaggaaacatttactggatgccataatataactagatatttttaggg

SEQ ID NO: 889374 - DNA, 631 bp, Homo sapiens
ttatgagtttaggtggaaatatgaagggccaaaaggaattggaagatattttcctactatttgttctttctcttgattttcatgattcattattcttgtagaagtgaccttaccacagtataaggttcacttataatcactgttctgccttgtaattttaggtgaatttgttacaaaatattatgaaatctataggaaaagccaactttcaaagctattaagcatttgacttaacagttgagggcaatattattcagaaaaatttcaatctcattcctcagcgcaaaaaactgaaataaaactttaccactgccaagtcattaaattgctctgtataatggcaattcagtatattctgcctctatatctaacaaaaattcataggatttgatgatraagtccacaaatgcaagtcaaaatcactgctgacactattatataatagttcactaaaacatgacagatttaaatattttctgcaaagtacctgctaataaataatacaataaataatcaggctttaaacacctgacatttaacaagctttgtaaatttgtccaactcaagtctttctgctccacagttatttttgccactatcaactgtaacgcatcttagcggattccacttc

SEQ ID NO: 889375 - DNA, 622 bp, Homo sapiens
aagttatccagaatatatatctaagatcattgctggaggtggctatactaaacaaggtgttttaagtagacaaaagagccttccattagaagaagatgccatctaggactttcacagctagagagggaaaatcaatgccttgcttcaaaggtcaggctggggccacacctgttattccagcactttgagaggccaaggtaagagaatcacttgagcccaggagttcaaggccagcctggacaacaaggcgagactcttgtctcttttaaaaataaataaataaataaataaataaataaataaaaactgactctcttgttaggggctaatgcagctggtaacttgacrttgaagctaatgctcatttgccactcaaaaaagtcctagagctcttaagaattatgctatatctaatctgcttgctatctacatatggaacaacagtctcctggatgacagcacatctgtttagaggttggcttactgaatattttcagtccactgtcaagacctactgctaaggaaaaaacattcatttcaaaatattagcactcactaacaatggaccaggtcattagagggctttgatggatatgttcagaaagaagaatgttactttcat

SEQ ID NO: 889376 - DNA, 605 bp, Homo sapiens
aaacatagaaaaacagtatatgacttccaaggtaatgacagacggtgagaaggaaagaattatattattaaaattcaatcaaatgaaaacagaatgtcagtaggaaaacagaagagttaaatagatgtacatagaacactgttctcaacaatgcataatacatgttcttttcaaatgtacagaaaacatttgacaatatcgaccaaattctgggccattaagcaagtctaaacaaatttcaaagaactaaaaaagaaaaaaatacatagtatgttctgtgtccaccacacaatataatcagaaatcaaaaatttaaagataaatacaaaattctcatatgtttggaaataaggaagtatatttctacataactcatgggtcaaaaaaaaaaacaagcacaaagttggaacatagtttgaactragtaaaataaaaacactaaaaataaaaatttatgggacgaaactaaagcaattcttagaggaaaacttgtagccttaaatggtaaatagaaaagatagtggttgacactctaagaattatccatgtcaagaagtcaggaaaagaacaaattaacccaaggagtacagaagaaagtactaaat

SEQ ID NO: 889377 - DNA, 620 bp, Homo sapiens
aatataaaatatttttactatcacgatactactggtaacctgcaagcagcaaccaaccagaagacagcaagactaatatgaatgaacacataaaaaagaggctgctctcgtacataccagctgaatattagccctctaaacaacctttaacaaaatcaacaaaatattatgtgaacacagaataatgtaaacccyctctcagcacaaaagaaaaaaagtcagatttgaaatgattgttttccttcaagcaaggaattagcattagttaatagaaaactgatgctaacttctttaataataacattttaggttggacaatgtgaaatggccatttttaaagcaaaagatggttaaaaactggcaatttcaaatgattcaacctctatattcttaagtatggtactgtaaatttccagtatatatacaatattccaacctgtagagctaaacacagaacctgtatattaactaatatacagctaaacacagaacctgtattttaactaatgggcttgaaactagtcaataagacaaaaacttgattttactgaattatataagtcagttgatggtgctatgttttcctggaatttgatataaaaattgatttagagcccact

SEQ ID NO: 889378 - DNA, 632 bp, Homo sapiens
tcggttctctgcttcctatcttaccctgctcactcacagctgcttcaggtgacctcctttttaggttcagagttatggctgacctcggctttaatcaaaacgaatgtattttggtttctcattttgtttattgcttctgtcttcaaattagaaatcctagagctcatcagatttacttttatgtttatttttgaaagagcatcctgctctgtcacccaggctgcaatgcagtggtacaatractgctcattgcggccttgacctcctgggctcaagtgattctcctgcctcagcctcccgagtagctgggattacaggcacctgccaccacacctggctaatgtttgtgtttttagtagagacagggtttcaccatgttggccagctggtctcgaattcctgatctcaggtgatctgcccaccttgacctcccaaagtgctggaattacaggtgtgagccaccgtgcccagacgatttttatgaccatgaatggggacagatttcttaaacagatcacaatgagccatagttttaagggaataagttgataaattagactatattcaaattaagaatttctgtttattaagagacaccactaagaaagtgacaagacaagttgcagagtgga

SEQ ID NO: 889379 - DNA, 676 bp, Homo sapiens
aatcaaaacgaatgtattttggtttctcattttgtttattgcttctgtcttcaaattagaaatcctagagctcatcagatttacttttatgtttatttttgaaagagcatcctgctctgtcacccaggctgcaatgcagtggtacaatgactgctcattgcggccttgacctcctgggctcaagtgattctcctgcctcagcctcccgagtagctgggattacaggcacctgccaccacacctggctaatgtttgtgtttttagtagagacagggtttcaccatgttggccagctggtctcraattcctgatctcaggtgatctgcccaccttgacctcccaaagtgctggaattacaggtgtgagccaccgtgcccagacgatttttatgaccatgaatggggacagatttcttaaacagatcacaatgagccatagttttaagggaataagttgataaattagactatattcaaattaagaatttctgtttattaagagacaccactaagaaagtgacaagacaagttgcagagtggaaacagatctatgaacacagaactgacagagggctcacatcaacaatatgtaaagagctcttaaaaatcactaagagaaagaacaatgggtaaaacacttaaacgtgtaatttataaaagcaaaacttgaatgtgtt

SEQ ID NO: 889380 - DNA, 562 bp, Homo sapiens
ggaaagcaatttggagatttctcaaagaacataaaaccgaactaacattcaacccagcagtctcattaccgaatatgtatccaaaagaaaacaaatcattccaccaaaaagacatatgcacttgtatgtttattgcaacactattcacattagcaaagacatgggatcaacctaggtgcccatcaacagtggactatcaacagtggactggataaaaatgtggtacatatagaccatggaatactatgcagccacaaaaaagaatgaaattatgttctttgagggaaaatggctacagctggaatccaggaagtgaactaatgtagtaacagaaaacaaacgcctcatgttcctataagtaggagctaaattctgagtacccatggatatgaaratggtgaaaatagacactagggactgctaggagggggagggaggaaggaaaaggttgaaaaactgctgaataccatgttcagtacctgggtgttgggatcattcacaccccaaacctcagcaccacacaatacacccaggtaataaacctgcacatgtagaccctgaa

SEQ ID NO: 889381 - DNA, 564 bp, Homo sapiens
aaaaatttgttatagatctgatttattgttttcttccccctacccctcccttgttgggaattgtagtaaagcaaatcttacatgaaatcattagaccagacaagaacaatggcagaggctactttgtgattactcaccgaatagaaaaactgcactttcacatcatcatacagaggtrgaccgtcgaatacatcaattaatattttgtctgttgtaatgttatcaagtacctatgaatgaacacatggaattgagaactataaacctagataatgataacaatgaagttccttttcacttatcatgacttcctgtatttatcaagtacttttggtctcacagcccaatcactacatacataaataattattaataatctcttctagttgcaatactgttgtttatgcgtgtgtgtttacatttgctttttgttttctgagacagagtctcactgtcacccaggctgaagtgcagtggcatgatctcggctcactgcaacctctgcctcccaggttcaagtgattcttgtgcctcagcctcccaagtagctgggactataggcac

SEQ ID NO: 889382 - DNA, 628 bp, Homo sapiens
ctgtcattatctgttatgaggtctctttttttttgtttctgattttacttatttgggtcttccctttttcttaattagtctagctaatggtttgttgatattttttaaacctttttgttgttaaccttttgtaatttttgcctcaaatttgtttatttctgtttggtcttcattatttatttccttttaataatttggggtttggtttgttcttactattctagtttcttgaggtagaattgttcagtggtttatttgaaagttttctagtttttttgatccaggcatttattgctaaaaatatacttttttttttwatactttaagttctagggtacatatgcacaatgtgcaggtttgttacatatgtatacatgtgccatgttggtgtgctgcgcccattaactcgtcatttacattaggtatatctcctaatgctatccctcccccctccccctacccaacaacaggccccagtgtgtgatgtcccccttcctgtgtctgagtgttctcattgttcaattcccacctatgagtgagaacatgtgatgtttggtgttttgtccttgcgacagtttgctgaaaaaatgatgagttcatgtcctttgtagggacacggatgaagcta

SEQ ID NO: 889383 - DNA, 669 bp, Homo sapiens
atacgatacggagacacctccaccaaggcaaactctgaactagaggtggttctgagaaataagcaggcttgagggcacatgggtcctcctcctccctcatcagaggctccctctgcccggaaaagtccgcctgggttgagaccagaggagcaatgagaacaggagagatgggaaagggatgaagtcccccaaattggtgatggaaaagaaaaagtgaagaacatctaagggctggcaatcaatgggcaattgcaggaggagcggcataaataaggaggagttcctgtgtgaggatatgtaaaaagacaagtatgagttaggatcatctgtatatacractatgagcaaaaccctcccagagtggggacattggccctcctgcccaattcttcaattatacataaagcacttacgaggaatcgaataaataatgaagtgttttataaagagtatccgtcttggagggagattccagttgtagagatgtttcacttgtgcaaaatatgcaacatatctcttctgaaaagcaacagaaatcttcctttaagtggagatgaaaagtctaaagtcggcattcctttttttttttttgcataaagcttgttaatggaggtaagtaattaaggaaacatttactggatgccataatataactagatatttttaggg

SEQ ID NO: 889384 - DNA, 619 bp, Homo sapiens
ttctggttattttgtaggtctttgtttctttcttcctctcttctgtttgcttttgtggtttcatggttttattccattctctttttcatttgcatatatgctgtaacttttttcttttttgttactctggggcttacataacaaatcttatagttctaaaggtttattttaagctaataacaatttaactgattgcctgcaaatattctagacttttaccctccaacccaatttataattttcttgtcttaattcacatcttttatatggtttatttctaaaaaacttattgtagctatggttattgttgaccattttgacttttaaccttcatactgtataccaccactacaatamtgtagcactctgaatttaattatgagtttacttctaccagtgagtttaaatactttcatggtagtaattaacatcctttcacctcatggtggcaattaacatcctttgaaaccgtcttttaagcatttcttgtacagctgttctagtggtgatgaattccatcagcttttgcttgtctgggaaagactttgcttctccttcatatttaaagaataactttgatgagtatactgttcttgactagaagtttttttttttctct

SEQ ID NO: 889385 - DNA, 604 bp, Homo sapiens
atcccacacgggggcctgtcacagggtggggggctaggggaagaatagcattaggagaaatacctagtgtaggtgacaggttgatgggtgcagcaaaccaccatggcacatatttacctatgtaacaaacctgcatattctacacatgtatcccagaacttaaagtataatttttaaaaaagacttcaccaatattatttatttttcctgttgcctcaggttccaacrtggctcaacatggcagttgctgatcctgactttgcttaaaatttggtactttatcacaaattttaaaattaattttgatttctcaaaatattgattaaaatatttatctctactattgaatttttgggcacacctttaaattttgcatgcaagataagcaccttcctcagttgtaggatgttgacggtgataaggacattagcaaaggaaatattgaaaagctcatgaatactgttgcataattcttcttagagaaaatagtttcttggtataggatagaacaattgctaaagggaaggtgacctcctacatagcatgaaaagatgtgtcatgatcttggtatttgtaatttgttccctttcactctgctcaacta

SEQ ID NO: 889386 - DNA, 604 bp, Homo sapiens
atcccacacgggggcctgtcacagggtggggggctaggggaagaatagcattaggagaaatacctagtgtaggtgacaggttgatgggtgcagcaaaccaccatggcacatatttacctatgtaacaaacctgcatattctacacatgtatcccagaacttaaagtataatttttaaaaaagacttcaccaatattatttatttttcctgttgcctcaggttccaacatggctcaacatggcagttgctgatcctgactttgcttaaaatttggtactttatcacaaattttaaaattaattttgatttctcaaaatattgattaaaatatttatctctactattgartttttgggcacacctttaaattttgcatgcaagataagcaccttcctcagttgtaggatgttgacggtgataaggacattagcaaaggaaatattgaaaagctcatgaatactgttgcataattcttcttagagaaaatagtttcttggtataggatagaacaattgctaaagggaaggtgacctcctacatagcatgaaaagatgtgtcatgatcttggtatttgtaatttgttccctttcactctgctcaacta

SEQ ID NO: 889387 - DNA, 668 bp, Homo sapiens
taccaaaaatacaaaaattagctgggcgtggtggcacgcacctgtaacctcagctacttgagaagctgaggtaagagaatcacttgaacttgggaggcggtgcttgcagtaagccgagattgcactactgcactccagcctgggtgacagagtgagactccacctcagtcaaaaamaaaaaatgaaaatagaaaaaaccgacagacactaaaagctaagaaaatagtgtgttcattttggaatctaattcaaaattcattataatgaattttaacgggccaccaaaggcatgtgttgaagttcactgaatattattcaatgtttgagaattacagacagcacacatatttcatttgtagcaatgtctgatttgttttgcatatatatatttgcatttatttaaaacaaaaaacgtcaaaatatatttcatctgttatttggaaaaaacattgagtaactaattgtccaaatataggtctctattttctaatttttaattaacaatgcttcttatttaaaaaaataacttatttcaaaataactgacatttaatgtttttacattttttaaagtgttcatgtacatctatttaatttctagatatcgtgagggaatcgtcactgtatctggaagccagatgccaaagatgttcagttattatcaatgta

SEQ ID NO: 889388 - DNA, 652 bp, Homo sapiens
gggaaaaagtttcagcttcaagcattaacgttttagttcataaatctgaaggaaaataaagagaaaataaaggcattaagagatatgaaacaatgtaaaaatgaatatttcttttatgaatccttgtgaatatatgacagtatacaagctacagaaaactagtttactgggcggatcacgaggtcaggagatctagaccatcctggctaacacggcgaaaccctcttctctactaaaaaatacaaaaaattagccaggagtggtggcgggcacctgtagtcccagctactagtggggctgaggcaggagaatggtgtgaacccgggagtcagaggttgcggtgagccgagatcgcgccactgcactccagcctgggckacagagagagactcggtctcaaaaaaaaaaaaaaaaaaaaaagaaagaaaaaagaaaacagataaaggacaagcaaatagagagggggaaagcagccaccaccgtaatttgaacagtaaaactgagaggaactttgaagtggaaaggagtgtagtctttatttcatccttggggatttgtcagggctggaggatgcacacaacaaataaataatttagagtgctctgaaatatggtcagacagcatatgccttgcagttatgtctacactttgt

SEQ ID NO: 889389 - DNA, 490 bp, Homo sapiens
aatgagtatctagtgctatcactgatctgactggaggcagagttcaggcggtaatatgagccatggggtgtggctgtaagtacaggtgaagcttccctggtttgcctgctgctcacctcctcctgtgtggtgtggttcataatagtccatggagtggtaccagtctgtgacctgggagttgtgggcccctgctctrggtggtcctaccgtagataaataaataaaagtaaggaatttttgatcacaaaagaacgccaaagcacaagtcatgttacatatccttgtcccaacaaggtctcactcttactgacttcattcctcctcatttgaagttggaaagagatacatttactttgttggaacaagatgtgttcttctacctgctggtcaattgtcttgataacagtaattttgttagaacaagatgctctgctaccatttaccaaaagattgtcataataaatatacaaattgcccaattctaggctca

SEQ ID NO: 889390 - DNA, 529 bp, Homo sapiens
taaagtcagtgaaaatagccagccagaggcatggaaaattttaaatttaaatttttgatttaatgttgttttctttgctttaacaatattagatagtccaaatgaaattacctttcagactaggttttaagaatcaatagattctttttttaagaattttttaataagattcttaaaatttattttaataaattcagcaatctcattaacagaagaatcaataaattctaatttaacatttgatatttagcttaaaaacataaccactataaaatttaaaatacccttattttacagtattcttatttaaaatattcttrtctgcctttttgattagcttatagctaatctttccttttggaatagaggcaaaaacatattccagacctttgtttgttcttttattttaacaacaccctaacatgataaagtaacatcaattattggattatattattaagcaaaagaactatgaacaatgtaacactgaaggtccctgagctggattcatggttaaagaataatcacg

SEQ ID NO: 889391 - DNA, 546 bp, Homo sapiens
taacatcaattattggattatattattaagcaaaagaactatgaacaatgtaacactgaaggtccctgagctggattcatggttaaagaataatcacggccagtgattgaaaatctgcagttttatattgtcagtcactgataccaaggttaaagacatattctgccttgtgatctctcactgacttcagcatttctgttcagggagggaaccaggtcataaaagcaacccaactgcctattacaagaatcatatcttgcagaatgggacatttggtgttagtgcacaaacacaataaccttttccttatttyagttgcagaaaatcagtacagattattaaaaaaaatttatccactataattagtacaccttagaatatattagaactggacttaagcagatcatctagatacataacactatcatattacagcatataatttcaattaaaatgtaagaatttgcatttctttctgtttggtgttgatttcagctcctaataatttaaagcgtgcctacaatccaattaggaatcttttaaaaa

SEQ ID NO: 889392 - DNA, 546 bp, Homo sapiens
taacatcaattattggattatattattaagcaaaagaactatgaacaatgtaacactgaaggtccctgagctggattcatggttaaagaataatcacggccagtgattgaaaatctgcagttttatattgtcagtcactgataccaaggttaaagacatattctgccttgtgatctctcactgacttcagcatttctgttcagggagggaaccaggtcataaaagcaacccaactgcctattacaagaatcatatcttgcagaatgggacatttggtgttagtgcacaaacacaataaccttttccttattttagttgcagaaaatcagtacagattattaaaaaawatttatccactataattagtacaccttagaatatattagaactggacttaagcagatcatctagatacataacactatcatattacagcatataatttcaattaaaatgtaagaatttgcatttctttctgtttggtgttgatttcagctcctaataatttaaagcgtgcctacaatccaattaggaatcttttaaaaa

SEQ ID NO: 889393 - DNA, 546 bp, Homo sapiens
taacatcaattattggattatattattaagcaaaagaactatgaacaatgtaacactgaaggtccctgagctggattcatggttaaagaataatcacggccagtgattgaaaatctgcagttttatattgtcagtcactgataccaaggttaaagacatattctgccttgtgatctctcactgacttcagcatttctgttcagggagggaaccaggtcataaaagcaacccaactgcctattacaagaatcatatcttgcagaatgggacatttggtgttagtgcacaaacacaataaccttttccttattttagttgcagaaaatcagtacagattattaaaaaaaatttatccactrtaattagtacaccttagaatatattagaactggacttaagcagatcatctagatacataacactatcatattacagcatataatttcaattaaaatgtaagaatttgcatttctttctgtttggtgttgatttcagctcctaataatttaaagcgtgcctacaatccaattaggaatcttttaaaaa

SEQ ID NO: 889394 - DNA, 611 bp, Homo sapiens
atcagaaaaatgaaaatcagtaaacaatgagttaccgttttttccagtcattaatttatttgaaaaataaccagcattggcaaatgtgagggaaaaggcattttcttttctttttaatgaacttttattttagcttcagaagttcatgtgcaggtttattatataggtaaactgtatcatggaggtttggactacagattatttcatcagccacataataagcaaaatactcgagaggtagttttttggtcatctccctcctgccacactccaccctcaagtagaccctggtgtctgttattctcctctttgtgtccatgagttctcattgtttagttyccactaatgagtaagaatatgtggcatttgattttctgttcctgcattagtttgcttaggataatggcctccagctccatgtgtgttgctgcaaaggaaatggtctcattgaaaaagacatttcatacactgttggtaaatacattttgaacattaatttagtagcatattcacacacacatatatataacatagtaaggatatataggtatgttaaggatatttgtatagatttgtcacatatatacttatgtgtaaggacatttcttaca

SEQ ID NO: 889395 - DNA, 600 bp, Homo sapiens
tcaatattatatctctgaaactttttttgacaaattttggggcatgatgatgagagaaaggggtttgaaactttctaataagagttaacgtagagccatttaaggaggaacagacacaaattatcagaaaaataaaagaaagaycaagtgcaaaagttctgtggcaaagatgatgatagtaaagaatatatgtgacttatggtggcttttactttgttcttgaatttctgagtaatttaagggttaacatttaaagaatctacattatagataacattttattgcaagtaaatgtatttcaaaatttgttattggttttgtatgagattattctcagcctacttcattttcaagctatattattttattaatgtagtttgatgatcttacagcagagctggaagctgtatcttcaaaatatgtctgtttgactcaaaacaatcaaggtattcaacaggagttattatgtatgaaaaaatacaacaggaatgtaaaaaacttgaggctaaaaagatgttggaagaagtaatattaaatcttaaaaaacgtatggaaagtacacattggtgaagacacattggtgaagtacaaaaatataaa

SEQ ID NO: 889396 - DNA, 600 bp, Homo sapiens
tcaatattatatctctgaaactttttttgacaaattttggggcatgatgatgagagaaaggggtttgaaactttctaataagagttaacgtagagccatttaaggaggaacagacacaaattatcagaaaaataaaagaaagatcaagtgcaaaagttctgtggcraagatgatgatagtaaagaatatatgtgacttatggtggcttttactttgttcttgaatttctgagtaatttaagggttaacatttaaagaatctacattatagataacattttattgcaagtaaatgtatttcaaaatttgttattggttttgtatgagattattctcagcctacttcattttcaagctatattattttattaatgtagtttgatgatcttacagcagagctggaagctgtatcttcaaaatatgtctgtttgactcaaaacaatcaaggtattcaacaggagttattatgtatgaaaaaatacaacaggaatgtaaaaaacttgaggctaaaaagatgttggaagaagtaatattaaatcttaaaaaacgtatggaaagtacacattggtgaagacacattggtgaagtacaaaaatataaa

SEQ ID NO: 889397 - DNA, 524 bp, Homo sapiens
ccaacagcaagtatagattcagacatttgtatctataatttagacagtttaaaatgcaatattaagtaattcaaaaattgttcaaagctcagtaccttttcacacattaatactttgattatcaacttccttttaaagagtgagtagaaaaggttagtaagtagaaaagagtaaaagaggcctttctttcacaacttgccaagacgtgcattacttatttaaaataaaaaaaaaatgctgtttgaaaaacaagaaggatggcaagaatgaagctccttcatgcaagatacctctgaytaccctctaaagacagttactatggcatggtcatagaattactgcaggaaaaaatttgtccactgaggctgcttcctccagaggtaaggtttaacttatggtaacttgctatggatcaacagctcaagatgaagtgtgtggctggcaatttaagtgtaaaattagatttccagtataatcagtcatctgatagcccatctaaatgtattctgcatttgcacatttaa

SEQ ID NO: 889398 - DNA, 622 bp, Homo sapiens
aaagctttgtcttttaacctggatatctggattttttactcttggtgaaaataactgcaatgacatttatcatgtatgatttaaagtcaggaaatgcctcctggtaacctacagggtcagtttttcactgatgggttacaactggcctaattggtttgacaaacctagcttgattacatggacaaggagacataaaaggcttgtggagaatttctcctcgaagccctcctgaaagcatgattcctagcacagaatcttggtggttgacactggagacagaatgcacactctgtgtctgtgaatacttggagccctgggtagctttcaatatgggatgtctttcagactcccagtccatgcccgcactctctttcacttgctgcaccatatcctttgcctttaaataaaagccccatgtaaatatgttctatggaatgtggtggttcctttcaaacatccaaacaggaagcttttcagtatgtatacatttctattgataatacacctaagaatgaatttgctatttgccagttcataaaagtatatatatttatatattgagctttagacaaaatttkcaagtaaaatacaaaaagaaatttcttgaaccattagagaataa

SEQ ID NO: 889399 - DNA, 647 bp, Homo sapiens
gccaagcttaaacattttcagaaacttactagagaccacacaatgaggaggaggtgggtttgggactgaaatttttgtttatttgccttcaaaatctggatcttaaaagaacaatttctccccctttgacagacataaacccaacggcatctgtgccattgtcatgtgccttgtctgtctaccttctacatacatccgattatgatgggccagacagacagggattttggcttccttagcaaaattggctcttaagttaaaaggaaaaacaaaataagatggagaatcccctctcctacattcacaacttmatggctgattccagtttgctttttgttaatatacacattccatttcttatagtctgtgagtaaatgggcctttcataagcccatccaaagggtagcttacaattttcattctgtcccctctccttgcacttttcttaaagtgaatgaattactagttaatgcctgagagagtaaaatccctgatccaattttttcacaaaatgtatagttttatgtggaagaaaataggagtctggaagatactcagcctcaatgaactttactcctctgaggaaggttagcaagagggataggagtcaggagaggcaccctcattagtcaccagctctgattgta

SEQ ID NO: 889400 - DNA, 647 bp, Homo sapiens
gccaagcttaaacattttcagaaacttactagagaccacacaatgaggaggaggtgggtttgggactgaaatttttgtttatttgccttcaaaatctggatcttaaaagaacaatttctccccctttgacagacataaacccaacggcatctgtgccattgtcatgtgccttgtctgtctaccttctacatacatccgattatgatgggccagacagacagggattttggcttccttagcaaaattggctcttaagttaaaaggaaaaacaaaataagatggagaatcccctctcctacattcacaacttcatggctgattccagtttgctttttgttaatatrcacattccatttcttatagtctgtgagtaaatgggcctttcataagcccatccaaagggtagcttacaattttcattctgtcccctctccttgcacttttcttaaagtgaatgaattactagttaatgcctgagagagtaaaatccctgatccaattttttcacaaaatgtatagttttatgtggaagaaaataggagtctggaagatactcagcctcaatgaactttactcctctgaggaaggttagcaagagggataggagtcaggagaggcaccctcattagtcaccagctctgattgta

SEQ ID NO: 889401 - DNA, 642 bp, Homo sapiens
cacagaccaagaaatgcaaaggcccagaagaagatgaaagaggcaaggaaggattgcaaccttccaaggaagggtgtccctgctaacaccttgattttggacttctgaccttcacaacagtgagagaatacattcttgttgtttaagccacccagtttgtggtactttgttacagtggcctcaggaaactaatacaggaggttttttgtttagcatattacaggatattgacttgagtaggaactcagatttcacagasagatagttggatgaggtctatgtattaacaccacattgaatataaactctataagtgagaagcattgtttccaggaagagcaaataccacattccaaccatattgatggttgttgagtcagggccctcttattctatgagattcctgtcgaaactaccttatcagcaactgtctggctgagagcaagaataatcttttgcctcttttatacacagattttatgtagttaattaaataaatgttaatttaaattaataaaaatcatactaaagcaatttctaaaaatatatttatcagccacttttttttgtaggtcttcaatagaataatgaaatccatgaaaaatcctcgggttttcagagtttcatcttgatatcttagca

SEQ ID NO: 889402 - DNA, 561 bp, Homo sapiens
gttacagtggcctcaggaaactaatacaggaggttttttgtttagcatattacaggatattgacttgagtaggaactcagatttcacagacagatagttggatgaggtctatgtattaacaccacattgaatataaactctataagtgagaagcattgtttccaggaagagcaaataccacattccaaccatattgatggttgttgagtcagggccctcttmttctatgagattcctgtcgaaactaccttatcagcaactgtctggctgagagcaagaataatcttttgcctcttttatacacagattttatgtagttaattaaataaatgttaatttaaattaataaaaatcatactaaagcaatttctaaaaatatatttatcagccacttttttttgtaggtcttcaatagaataatgaaatccatgaaaaatcctcgggttttcagagtttcatcttgatatcttagcattctgtcaaactataggctgagggagaaacattctgcagcttcccttagaagacccactttggatccacctttccgcagaggcattt

SEQ ID NO: 889403 - DNA, 576 bp, Homo sapiens
actagagggaggcaaatggctttcagatggttgtgtagctggttttaacagtagcctgcagtggctttttgacagacatgaaccttactagttattattaggcttcagagcattagtatgaggttttaatttgcttatgttaggcacgagaaggtagcactatcctagatgccctaaatattgttccttgtcacttttttcccactgaattcagaggtaatttggggactgtgtctaaaatggtcttatattcatgtgccataggtttctgaagcttccattctgaacatggtctcaagttggctcttgagggctaatttcattacacatgatcataggtataaatttaaatktatgggggattgttttgtacatcccacagaacctggatttactacaaagagactgtagagtttatcaaaaagaagattaacaggaataagagttcttgctgtctagggaatatatcatcttctttgggtaatgcctattaatgctcctcaaaatagctagagcattcaaggtttgtaaccagttcacaatgacagaagtagcttctactagaaattaaatata

SEQ ID NO: 889404 - DNA, 573 bp, Homo sapiens
ggctctaggtctcaggaagcaatctggttgattatgtgttttcagtgtgtagtcataatacaactgtatatcagtagtgtacattagacactttatacactctacatatattttctcatttgatccttcaatacatgaataatataggaaatagacttgaatttaactgctccagtaaggtcaaagaccaaaaacctcattacaatgcctacattagagattcttcttccaattaaaataaagttaccaagggcaattgctcctgccataacgagaagacattggatgaacttaaaattttttttttgtttaaagccatcaaaacactatgggcctaaagttacaatgaactaaatttcagagaaaaataagcctttcctaggtgatcacagattagcagcrgagtccatctctgaggacatttgctggatctggggccttgagtaggtagaaggacaagcctacaatgtggagaaacacctggaacattgggaataagcaaaataatctacagggaacttcaataggggctgaaaactagaaaatcatgtggtctcctagctcttacttatt

SEQ ID NO: 889405 - DNA, 528 bp, Homo sapiens
gaaaaaagcctcagtgttgcctcagactcatagttcatacaagaactcacactgcagagactgcttatggaagtaaaaaatgtagaaaagacctctttaaacacttatccctcctgttacacatgaatccacactctggagggagactgcaatgggaataaatataagaaagctttcagttccagctcttcacttattrggcatgaatgagcaatagcaggactgaagcactgtaaatgttaacagttactgcaattatcattgtcttatatctcaattagaacccaaattcataattttatagtttttcttttcttaaaaaaatggtataaaatgacagatagctgtcttagccccctttctgctctgccaccttaatgttgctatgtagtagctttgttacaattcacttacatacccatggttttattttcaatgtgaagccctctttgagttccattcaatttagatttagaatttgtatgctccaggataccctttttttttgtcagtttgttttaattggtc

SEQ ID NO: 889406 - DNA, 528 bp, Homo sapiens
gaaaaaagcctcagtgttgcctcagactcatagttcatacaagaactcacactgcagagactgcttatggaagtaaaaaatgtagaaaagacctctttaaacacttatccctcctgttacacatgaatccacactctggagggagactgcaatgggaataaatataagaaagctttcagttccagctcttcacttattaggcatgaatgagcaatagcaggactgaagcactgtaaatgttaacagttrctgcaattatcattgtcttatatctcaattagaacccaaattcataattttatagtttttcttttcttaaaaaaatggtataaaatgacagatagctgtcttagccccctttctgctctgccaccttaatgttgctatgtagtagctttgttacaattcacttacatacccatggttttattttcaatgtgaagccctctttgagttccattcaatttagatttagaatttgtatgctccaggataccctttttttttgtcagtttgttttaattggtc

SEQ ID NO: 889407 - DNA, 528 bp, Homo sapiens
gaaaaaagcctcagtgttgcctcagactcatagttcatacaagaactcacactgcagagactgcttatggaagtaaaaaatgtagaaaagacctctttaaacacttatccctcctgttacacatgaatccacactctggagggagactgcaatgggaataaatataagaaagctttcagttccagctcttcacttattaggcatgaatgagcaatagcaggactgaagcactgtaaatgttaacagttaytgcaattatcattgtcttatatctcaattagaacccaaattcataattttatagtttttcttttcttaaaaaaatggtataaaatgacagatagctgtcttagccccctttctgctctgccaccttaatgttgctatgtagtagctttgttacaattcacttacatacccatggttttattttcaatgtgaagccctctttgagttccattcaatttagatttagaatttgtatgctccaggataccctttttttttgtcagtttgttttaattggtc

SEQ ID NO: 889408 - DNA, 701 bp, Homo sapiens
acagcagggcactactggaacacacagaagggacacctacccacttttatgtcaacatcatgggctttctgatggaggagatatcataggttgatacctgaaggacaaggaaaagcttgccagatagagggaagaggcaaaggcaaagagcctgagatgaggaagagccctgcagagttccactccatcaagtttgggctacagcaaagggtagagtgmagtaagtggtgagagacaaggctgagtaacttgacaagaattacattgacatgggtgtttttatttcatggtgaaaaatctggaatgtttcctgagaacaagtgtaagccaatgacacagtaaatgacaggagatttaaaatgtcacctgtcaagtgactgcttatgaagggttattgctcaactaagcatttctgaatgagtctaaggtctgttggccttcaatttctaccaaaaccctgagaacttgatgatgcctgtgttttctgagaatcgtttcagtgtgctggctgacagttccatgaggatggcaaaacttaagaaagtgtagagccagtgaaaaagagatgcacagacttcttgggaattttttaagctacagaacatgatgaatttatggtgcataagtacagtcttctctgtgaaagtttttgttttcacatctttcattagatgtgtgtaagaaaaaaaatacttgacgta

SEQ ID NO: 889409 - DNA, 615 bp, Homo sapiens
tctggtcttaaatagtgtttttaaaatttgttttcaaacaagtctaatcataaataatagaatatattttacaatagttgaaggtaacaaaaaataagtgctatttaaaaaattgtattagattgtttaaaaatgttgtgggtacatagtatgtgtatgtatctgtggggtccctgagatgttttgatacaggcatgtaatgtgaaataagcacatcttggggaatggggtatccctcccctcaagcatttatccttcaagttataaaaaatgcaattacagtcttagttayttcaaaatgtaccattaaattattattggatatagtcaccctattgtgctataaaatagtaggtcttattaactctctatttttatacccattaaccatccccaccttcccacaaacctccccccagctacctttcccagcctctgataaccatccttatactccatatgtccatgagtttgttttgattttagattccacaaataagtaagaacatgtaacatttgtctttctgcgcctggcttatttcacttaatataatgatccataatgttccatcattgttactgacaatgactggatcttgttctttgttacagctg

SEQ ID NO: 889410 - DNA, 655 bp, Homo sapiens
atatcagaagcataggcaaaaaacaaatgatagacaaatggtactacattaacctaaaaagcttctgtccagctaacaactgagtgaagagaaaacttgtagaatgggagaaaatatcatcaagctattaatctaataagggactaatatccaaaatgtacaagaaattcaaacaacttgacagtaaaaaaaatctgagttcaaaattgggcaaaatatctaactatacttttttttagaaaaaagaaatacaaatagccaataaataaatttaacaatgctcattatcactaatcctcagagaaatacaaatcaaatctacaatatgatataatcttgcttcaatttgaataaattatcatcatggaaaagataaaaaaaaaatgctggtgaggttccagagaacagtaaactcttatgtgctgttggtgggaaggtaaattagtgcagccactatagaaaacaacatgaggtttcctcaaaaaattaataatggaactgcygagggatccagcaagcccacgactgggtattcaggcaatagaaagaaaacaatagatcaaaaggaagcctgtcctcatatgtttattgtagcactagtcactacggctaatgtatggaatcaacctacatatccatcaccaaaagaaaagac

SEQ ID NO: 889411 - DNA, 602 bp, Homo sapiens
ctcacttataagtgggagctgaacgatgagaacacatggactcggggaggggaacaacaaacactggggcctgttggggtcaagaggtagagcatcaagatcagtagctaattcctgcggggcttaatatctaggtgatggattgacaggtgcagcaaaccatcatggcacacgtttacctatgtaacaaacctgcacatctcacacatgtaatctagaccttaagataattttttttwaaaaaattaccttatgttttagtttcttaatcagaatattcattttcagttgatctgtttttaagtctccatggcaatcgaagtcttcatttccaaatacacttaacacatttattgtcatttccaggagtttcttatatctgcagaaacgtacagaattagtaagtcaaatatttttaagagtaaatatttaataattgtttaaacgatattatgttatagcatatcaaagaaacacatctataaactatgatcctttcagtttcaactgagcatagtttggaagcactctatatgaaattataatcttagataaataatatgaagaacaattttatggcatatatggcaggtaaagtggta

SEQ ID NO: 889412 - DNA, 535 bp, Homo sapiens
cctcccaaagtgctgggattacaggcttgagccaccgcacccagcctccaacaaatgactttttaaataaaatacagttctcaccttctccttttccattgactattctgtttccttttccatgggaaggtccacgtaaaggctctgacactttcttggggacacactgctaaggtagtatcaagaattagtttccattttaaaattataatgagttgcatcaagagtttcttgtcaatctctttttatgaaactggktctcactctgtcaacccagggctagaatgcaggggcctgattatggctcactgtggtctcaaactcctgacctcaagcaatcttcccacctcaacttcctgaatagctggaactacaggtgcataccatcatgccatgctaatgtttctattgttatctttgtagaaacacggcctcattatactgcccaggctggtctcaagctcctaggctctagtaaatcttcgacttctgcctcccgaagtgttgagataagcagtgtgcaccacaacaccca

SEQ ID NO: 889413 - DNA, 595 bp, Homo sapiens
agcagctgggattacaggcatgcaccatcacgcctggttaatttttgtgcttctttttttttttttttttttttttttttttttagagacggtttcaccatgttggccaggctgatcttgaactcctgacctcaggtgatctacccacctcagcctccaaaagtgctgggattacaggtgtgagccaccatgcccagccaastaaatattttaaataaactacaatgacaaaattatgatgataaagtcttaccatattggtattaagagtctctgcttctagaactggttatttgcagcaaaatacatgttattcaattagatgaagtgttttatataaactcttcatggacaactcataaaacacacaaaaatccctttgcaatacaaattttgagaacataaatttaaatttctacgtttccacaatttatatttttaaatcagatacagtcttgttatgttgcccaggctgttctcaaattcctgggatcaagcaatcttcctgcatcaaactcccaagtagcagggactacaggtgtacaccaccacactcagctatttttctacaatttttaatattattttagtccca

SEQ ID NO: 889414 - DNA, 595 bp, Homo sapiens
acaatgtggtacgatacaagtaaatattgtgaaatggacaaattaggctaaaaaacatatccttcacctcagatatttattacattatggtgaaacatttaaaatgtactattttagcacttttaagatatgcactacattataagtgactgcagtcactttgctgtgcaccatatcaccagaatgtctttctcctaactgaagcattatcccattgaatatttcccctttttccacccctgccccccaccctgctcagcctctgataaaccaccattctactcttaacttctatgagtgcacagttttggatttcacatataagtgatattaagagatatttgtctttctgtgtctggcttattttacttagcataatgtcctctaaatccatccatgtttttgcaaatgacagaatttcattcatttataaagataagcygtatttttgtatgcatcctacatatacttttaactttccacagctttattgagatataatttatacattgtgtaattcactcatttaaagtacaaacttcaaattcttttagtatattaactggatggacaaataatcatcataatataattt

SEQ ID NO: 889415 - DNA, 667 bp, Homo sapiens
aagctgagagatattgccagtaatatttcctttcacttcccagtcacaaatgtagagaaagacagataagtcaggctaatttactgaaaaggagaactttgaaggaagtagcacctatcaaatgccaattcttctagagatttcttacgtttttgagatacagaaatttatatgttgcacttatctgttctggggttcttaatcaggagtgtatcctaaacttgagggtttktgtgtgtgtgtgtgtgtgtgtgtgtgtgtgtgtgtgtgctgttattgttgttagaggcaagagtctcactatgttgctcaagctgaacttaaactcaggctcaagctgggactacaggaacatgtcactgtgcccagcttcaagaaaatgtttttaaaaatgttcaggccttattaggtctattacatcaaaatcctcaggggaaagcctacaattgtagatttttaacaaaatgtcctcaggtcgctgtaatgcacaattctgagaattagtgcagcaatcacttcagtctcatctctcacccgcatggctagttccctttatcagttggacatgtggccaaaaagagaaaagagtaagagatagtgtcatttattaaagctccagttaagtttcctgggtatgggtagaacacaaacaagtaaactgaaaatc

SEQ ID NO: 889416 - DNA, 679 bp, Homo sapiens
atttatttgcatgcctaggagctttctgaccctgtgttgagctgcctaaccagcttcctgattgacctcctgatatttctgcaaatgtggactaagaggccaggagtcctcagggcccaggtgactcaggttattcagtaattatgtttggactagcaggcctctacttaatttgggatgcaaaaggggacttctcttcctaattgctaaaatagcttttcaaggttcacctctcatcgtggtaagagtctcatttcctgagactcttatttctttccatgacttatgttatattctggagagagtggattcacatggaaaagctggctctgtgctggctttccaggggtcagccctcttgtgagtgacaagtctgcctatttacatgatgtacattgtgtcccactactggtaatagaagctcagcagctgattgactgttaggttattttcaaagctcaatattcmcaataatctaacagacacccacacaaccacaaagacagacaaggctctcataacctgcaaaagacaaggtgcacatttcttctttccatcccagcaacaaattgccaacccagccagcacttaagttggggtaaaaattaattaaaagaagaatctaccaatgtagataaaagaacaaaaaagctattgcagctgtcttctccataacaga

SEQ ID NO: 889417 - DNA, 640 bp, Homo sapiens
acactgtatataaaatataaaaaccttaccttaccatcctctcatcttttgtgccatgttgtcatagatttttcttctgtacgtgttgtaattcctggaggatgtcatccaaacagtaatttcccctccacatatttactatttttggcacattttcatcttttctgtgaactagaatttccaattattatttttcttcatcctgatcaagtttcttttgcatttatcgtggtttgggttcgatggcaacacagtctcacagactttctttaactgaaaatgtacttttctcaacttcagttctgaaggctgcttcagcaggttcagaattctagggacacttttgactttgaacagcatctctgggtaccatctaacatattattatatccagttgtgtcaaatctgtcatcggccatagaaccctttgacaggtgcttcttgttgcttcagktctaagtatttcataatcttcagagacatggagaagtagcagtgctagtaacagtactagtgaaaccaggttaagccctaaaataattaagaagccattgcatgcacacacgtgaacgtttgacttcagctaaaatgctttcaaatgtactattttatctttatacaaggccataacacaaattac

SEQ ID NO: 889418 - DNA, 640 bp, Homo sapiens
acactgtatataaaatataaaaaccttaccttaccatcctctcatcttttgtgccatgttgtcatagatttttcttctgtacgtgttgtaattcctggaggatgtcatccaaacagtaatttcccctccacatatttactatttttggcacattttcatcttttctgtgaactagaatttccaattattatttttcttcatcctgatcaagtttcttttgcatttatcgtggtttgggttcgatggcaacacagtctcacagactttctttaactgaaaatgtacttttctcaacttcagttctgaaggctgcttcagcaggttcagaattctagggacacttttgactttgaacagcatctctgggtaccatctaacatattattatatccagttgtgtcaaatctgtcatcggccatagaaccctttgacaggtgcttcttgttgcttcaggtctaagtatttcatartcttcagagacatggagaagtagcagtgctagtaacagtactagtgaaaccaggttaagccctaaaataattaagaagccattgcatgcacacacgtgaacgtttgacttcagctaaaatgctttcaaatgtactattttatctttatacaaggccataacacaaattac

SEQ ID NO: 889419 - DNA, 665 bp, Homo sapiens
gaaaacactaggggagagaggaaagtaactggctcagttaaggttgtctatgatagaaacaagcaaagaaataaagtagatgtcaagaaagcatttgacacatggatctggagctcagggaaaagctatggactggagataccaatttgaaaatcatccacaaagaatcaggttattgaaactatgggagtggatgagattgctcaggatagtgtgaagcatacaaaggaaataattcctagaactgagcccgaggaaacataaacattggagggaagacagagaaaggaacctaaagagaaactaacggagggccagaaaggtggaaagaatatgaaagtacagtggtgaaargaagtgaagaaggagccctttaaacaagtgagtggtcaacaatattaaatgtgatgaagagtttaagtgaaataactttcaaagtgtctaatagacacagcaataagtagtttactagcactcttgatggaaacaatttcaaccaggtgccaaaaactttaaggaggaaaatgtggtttgacagaaaaatatttggttacaaaagggcagcaaaaagtaggatggtaactgaataaggagaataactgttgttgttgttattgttgtcgttgttttgtgatggttttaaaatgagaagaatgagttgtttt

SEQ ID NO: 889420 - DNA, 581 bp, Homo sapiens
attaaattcttctctactgcaatgccatagtttcagtggatttatgctgtttgcgtagttggcaggaaaacctgttgggcaaatacaatatggtctagaactgaggaataattccctacatcaaatgtgtatgataaataaggagaaagacatgggagggrgatgacaggtgttagtttacagccagattctgaagcatttggatggcatgtgttatgggttgaactatatggccaaaaaagatatgttgaattcctgacccccagcacctcagaatgtgaccctctttggaaatacgattgttgccaacataattagtttagttaagatgaggtcatatgaagcagggtgaacccttaatccaataaaaccagtgtccttgaaagaagagggaaacttggacacccacatgcacaaagggatgaccatataagaacaaacagggagagactggccatgtgaagatggaggcaggaagtggaattatgccaccatgaatcaaggaatgcctaatgcccagggctatcagaagctggaagaaacaaggaaggagtctctcctagaggctttgaaaagagcat

SEQ ID NO: 889421 - DNA, 581 bp, Homo sapiens
attaaattcttctctactgcaatgccatagtttcagtggatttatgctgtttgcgtagttggcaggaaaacctgttgggcaaatacaatatggtctagaactgaggaataattccctacatcaaatgtgtatgataaataaggagaaagacatgggagggagatgacaggtgttagtttacagccagattctgaagcatttggatggcatgtgttatgggttgaactatatggccaaaaaagatatgttgaattcctgacccccagcacctcagaatgtgaccctctttggaaatacgattgttgccaayataattagtttagttaagatgaggtcatatgaagcagggtgaacccttaatccaataaaaccagtgtccttgaaagaagagggaaacttggacacccacatgcacaaagggatgaccatataagaacaaacagggagagactggccatgtgaagatggaggcaggaagtggaattatgccaccatgaatcaaggaatgcctaatgcccagggctatcagaagctggaagaaacaaggaaggagtctctcctagaggctttgaaaagagcat

SEQ ID NO: 889422 - DNA, 626 bp, Homo sapiens
tgcttcaaatgccagtgttgtagtttaaatagttaattgtaactaaaatacaactacaccagcctgacaggtccctaagctgttaatcacccaattacctacttactatggatgtgttttatatttttaactgggagaaagctttragcagggggaataaaaaagaaaaaaaaaggaaagaatatgaaaaagcacaagagcttttgagaaagaggacacccagagagaacatcacataatttacaattggcctcagaccaatccagggtgcaaggaagccattcttctgtatcctcggcaaccaatctgaaaatttccccataaaccggcttcctgcccatgtgtaattcgtgcttatcaattaaaatcccattaccttatgcaacatgtgtatgtcatgtcctctggcagctggatgtgctgaatgtaaagccaggcctgacctaaataacctgaaactctttgcaaacacatttttatgtggattagaaaaatacttcagaagatttataggtcactgatagaaatatgtttttatggaggctcccactttaatctaggcctggtttagacacatgtttcttctgaaaaatttaatttgcacatccctgtctactggaatgtca

SEQ ID NO: 889423 - DNA, 654 bp, Homo sapiens
cagggtagttctacccttcagttgttcttcccataatgggcaatggttttgtgctggtgccctctatccttcagccgagactccctaatggtcaatagcgtgcatatccaagtcagctatctgaggtcatggatgctgcctttggctatgaaatagaacaaaactaactagccatgaggggattaactcctgaccttggcctcattagtgctgagctctaaccaactgttggacacatatcatattgtttgtctttaaaactatgcttgaatctgctatattactttctcattaayatctagtagctgggaataatttaatggatttttccagtgctttttatcagtacaaaatgctgatgagtaagtgtataaaaaattaaacttgatttttaaaatatttaattttattattatcattatccctattttacaaacggtgctgggaaaactggctagccatatgcagaaaactgaaactggaccccttccttataccttatacaaaaattaactcaagatggattaaagacttaaatttaaaacccaaaactataaaaaaaaaccctagaagaaaacgtaggcaataccattcaggacgtaggtacaggaaaagattttacgatgaaatcaccaaaagcaattgcaacaaaag

SEQ ID NO: 889424 - DNA, 654 bp, Homo sapiens
cagggtagttctacccttcagttgttcttcccataatgggcaatggttttgtgctggtgccctctatccttcagccgagactccctaatggtcaatagcgtgcatatccaagtcagctatctgaggtcatggatgctgcctttggctatgaaatagaacaaaactaactagccatgaggggattaactcctgaccttggcctcattagtgctgagctctaaccaactgttggacacatatcatattgtttgtctttaaaactatgcttgaatctgctatattactttctcattaatatctagtagctgggaataatttaatggatttttccagtgctttttatcagtacaaaatgctgatgagtaagtgtataaaaaattaaacttgatttttaaaatatttaattttattattatcattatccctattttacaaayggtgctgggaaaactggctagccatatgcagaaaactgaaactggaccccttccttataccttatacaaaaattaactcaagatggattaaagacttaaatttaaaacccaaaactataaaaaaaaaccctagaagaaaacgtaggcaataccattcaggacgtaggtacaggaaaagattttacgatgaaatcaccaaaagcaattgcaacaaaag

SEQ ID NO: 889425 - DNA, 649 bp, Homo sapiens
cataaatctaggtctccctcacaaccaccacctgatttgccagaaactactgattcagatatgtatctgtttaaatgccaactttaacacttaatagtttatagcctttagtatcttatcttgcctttctttctcgcaacttccaaatctagaaaatgatataattatttatagtcataaggttgctttgaggattgtgttaacttatataatcatctagtgcacattcaataaatggtggttcatattaataagycaaaatcataaaaaagacaacaagaaagagaaaagcagaaactaaaggaaaaggaataactttctgagaacagtgaatttttgctgtattaataagtatcattaggcaagagattctagaactataatagagaaaaaaaaatccactccagtcaatgcttcactcaccacgaagagattgtttggtgtttgttcactctctccaaagggtgggataggagaatcagttctactagacatgttttcttggttagcttgttgctctgggattggctcatataagctatccatagagccctcctgcaatacagagatttatgagtcaaggaataacagaataataattttcctttaaaaggtacctaatttatacacccacctttatatagtactt

SEQ ID NO: 889426 - DNA, 665 bp, Homo sapiens
cattcacagatacgggggattaggacttgtatctgacttttggggggtcattctttaaatcacaacacaagggtcttgtagtttttgaactattgaagcaatttctgctacatttttccgactgcttctttctgtcttctgattagagatactatgtggcaagctctcggcaaatccggaggttgacaggagggtcccgttctcctgtcatttctcactttagtgagactttatcaggagtgtccaccatcagagcatttggacatgaacagaggtttatccagcaatacaaagagatggtgaatgaagacttggtctgtttctacaataatgtaattttcaacctgtaagtcccgttratacctagcctaggatcaatctcttcttagacatcttgctcactgacttctaaacagacggttttgaaatggcatttcatccaagttttagaagtatgtattaataagacaaatattttccagtatttaatgtacatttaaattaaattatatctatttatattcacatgaaaggcacatactatttaatatgaaaaaggtgcttttagaattactcatgacataattctacattgtgttttatatctttagaatatattttatttgtatacactgttttgtaaaatttttgaatttgaagttata

SEQ ID NO: 889427 - DNA, 662 bp, Homo sapiens
tcaacctgtaagtcccgttaatacctagcctaggatcaatctcttcttagacatcttgctcactgacttctaaacagacggttttgaaatggcatttcatccaagttttagaagtatgtattaataagacaaatattttccagtatttaatgtacatttaaattaaattatatctatttatattcacatgaaaggcacatactatttaatatgaaaaaggtgcttttagaattactcatgacataattctacattgtgttttatatctttagaatatattttatttgtatacactgttttgtaaaatttttgaatttgaagttataatctcacataaaggagaaaaatgaattaaatagaagttgagcatgtttcaatttttaaagactaattttatcatattaaaaagtatacacaattggaaagggaattgattttccaataggatttaaaaaatgcaatacatcattatagctggtgttattttgcttctaaattcrgatcaagttttaaagcaaagttctgcaaaagtaaaatgcattttcatgcagatgaattctttaagttatcatgtgatgatcccatgtttgattgagttccaagtaagttggggagaaaaaagaaagcagctattgctgtttatgtctcaatttcccagagga

SEQ ID NO: 889428 - DNA, 706 bp, Homo sapiens
gctggtgaggcctcaggaaacttacaatcatggtggaaggcaaaggggaaggaaggcaccttcttcataaggcagcaggaagaagtgctgagcaaaggaggaaaagtcccttataaaaccatcagataaggagagaactcactcagtatcacaagaacagcatgaaagaaaccacactcatgattcaattacctacacctggtctctcccttgacacttagagattatgggaaatataattcaagatgagatttgagtggggacacaaagcctaaccatatcattccactcctgacccttcccaaatctcatgtttcattcacatttcaaaaccaattatgccttcccaacagtcccccaaagtctkaattcattccagcattaacccaaaagtccaagtttaaagtctcatctgagaaaaggcaagtttcttccacctatgagactgtaaaatcaaagcaagttagttgcttcctagatacaatgggagtaaaggcattgggtaaatacacccattccaaatgggagaaattggccagaatgaaagggctacaggccccatggaagtccaaaatccagcaacacagtaattaaagcttaaagctctaaaatgatctcctttgactccatgtctcacatccaagtcatgctgatgcaagaggtgggctcccatgatcttgggcagctctgtccctgtggctttaca

SEQ ID NO: 889429 - DNA, 706 bp, Homo sapiens
gctggtgaggcctcaggaaacttacaatcatggtggaaggcaaaggggaaggaaggcaccttcttcataaggcagcaggaagaagtgctgagcaaaggaggaaaagtcccttataaaaccatcagataaggagagaactcactcagtatcacaagaacagcatgaaagaaaccacactcatgattcaattacctacacctggtctctcccttgacacttagagattatgggaaatataattcaagatgagatttgagtggggacacaaagcctaaccatatcattccactcctgacccttcccaaatctcatgtttcattcacatttcaaaaccaattatgccttcccaacagtcccccaaagtctgaattcattccagcattaacccaaaagtccaagtttaaagtctcatctgagaaaaggcaagtytcttccacctatgagactgtaaaatcaaagcaagttagttgcttcctagatacaatgggagtaaaggcattgggtaaatacacccattccaaatgggagaaattggccagaatgaaagggctacaggccccatggaagtccaaaatccagcaacacagtaattaaagcttaaagctctaaaatgatctcctttgactccatgtctcacatccaagtcatgctgatgcaagaggtgggctcccatgatcttgggcagctctgtccctgtggctttaca

SEQ ID NO: 889430 - DNA, 617 bp, Homo sapiens
agatgcacgtgccatgcttgcacaacctacagaaacatgaaccaaataaaacccttttctttataaattacccagtctcaagtattcctttatagcaatgcagaatggcttaatatagtctccaatggtgtccatatcctaatctcaagaacctgtaactatgttaccttatttagcaagagggactttgcagattaagttaagaatgttggaatggggaactmtgctggattatttgggtgggtccgagtaatcacacaggtcctcataagatggaggcaagaaggtcagagcgagagaagaaaatgtgaaattagaagtagcaaacagggagacaaggagaggaaaacacagatttgaagatgttatgctgttagctttgaagatgttatgctgttagctttgaagatgaaggaaggggccacaagccaaggaatactggtatcctgtagaagttgcaaaaagcaaggaaatagattctccccaagagcatctagtagcactatacagctttgacaacatcttgattttagaacttctcaatcccacaactataagataataaatttgctttgttttaagccacttagttcacggtaatttgttatagtaacaat

SEQ ID NO: 889431 - DNA, 699 bp, Homo sapiens
ctatgttaagatgaattgctctctcatggaaagactcaataacttatgcctaagaataatataataatcacaacgatagccatattgttgttttgaatttgggtaacagaagaacatagatctttaaactattaggcatatcttttctgctcaaaacaatttctttacattttatccctttaagtcctytaaagcttatcacacagaaaaaataacagtctgggagaggaagactaaagaaatcaactttcttcagagcacatatagatttattgtagccaattgatgacactgcaaaactggcacaaaggcaaatacttaataaataaatgaaaatcagagtggatcagttcagtgctgtatgttttgaaccgggtcctcaaaggcaagtcatcatcagaagaaagaaaaatgcatttaaggagcgttaattattgtctatctccaagaccaaaataaaaaaagcttaaaacttttagactgttaaaaatctactatactaggatattaaagtattttaaagaaaatgagatttatgcttaataaaaaaattcccattaaacagcaaactattagaagagaaaatcattctgaatctctacacttctcaatccaaatacaatgccatgagctataattcagtaaaaagctctatattttggatcctgaagcttgactcataattgaaaggaaaccttc

SEQ ID NO: 889432 - DNA, 658 bp, Homo sapiens
cttgcagtaaaggattgtattagtcccttcttgtgctgctataagaaatacctgagactgggtaatttataaaggaaagaggtttaatggactcacagttccacatagcgggggaggcctcacaatcatggtagaagaggaaggaaaaacaaaggggcatcttacatggcagcaggcaagagacagtgtgcaggggaattcccccttagaaaactatcagatcttgtgagatgtattcactttcaygaggacggcatggaaagacccacccccccatgattcaattacctcccactgggtctctccatgacacgtggggattattaaaattcaaggtgaggtttaggtggggacacagagtcaaaccatatcaatgaccgtggcacctacttgcctgccaactcctttcaatcaatagcataatcccttccttttaggaactggtcaaggatctaattttaagttgtctttttttcaatgccctgtctcaagcccaaccaaagcaagtgatattaaatagggaaagtgtaaaacaatggtatgcaacctcactgcacattagaatcacctggggaactcataaaacctatggatgcctggacccatccaagattaattaaaagagataaagcccaggaattttaaaattccctccagg

SEQ ID NO: 889433 - DNA, 598 bp, Homo sapiens
caattgttccattttgacttatttcattcctagaaaatttgtcctatgctttgttatttataatcacattaatgatttatttcagaatatactgtaatataaaaaatgatgcatgctaaataaaatctggcaggtttttttttttccccaccattaggaaggaaatggaggtgtaaatacatttaaaattcaccatggggtgatggaatgcacgacttttgggcaaccttaaaactgtcctttcaattttaaatccacacaccaacagaggggataattttaagtctctctttgttgagagcttcaggggagagtgtgtaragtggattttttctgattcaaaatgaagagatacatgaaaactaccaaagtcaaggcacttcatagagaaaagtatgatgctttcattgctgaagagacccaactaaagtctaatgcagaggatgagaaagaaagagggcttgtcatattcttcagccagcacaaccttcccttcatgtttacatcaacagcagtggtgcctcccggtctgatgtttacataaagctgagagtcaactggataccctggctccatgctggcccaaggcagagctgac

SEQ ID NO: 889434 - DNA, 598 bp, Homo sapiens
caattgttccattttgacttatttcattcctagaaaatttgtcctatgctttgttatttataatcacattaatgatttatttcagaatatactgtaatataaaaaatgatgcatgctaaataaaatctggcaggtttttttttttccccaccattaggaaggaaatggaggtgtaaatacatttaaaattcaccatggggtgatggaatgcacgacttttgggcaaccttaaaactgtcctttcaattttaaatccacacaccaacagaggggataattttaagtctctctttgttgagagcttcaggggagagtgtgtagagtggattttttcygattcaaaatgaagagatacatgaaaactaccaaagtcaaggcacttcatagagaaaagtatgatgctttcattgctgaagagacccaactaaagtctaatgcagaggatgagaaagaaagagggcttgtcatattcttcagccagcacaaccttcccttcatgtttacatcaacagcagtggtgcctcccggtctgatgtttacataaagctgagagtcaactggataccctggctccatgctggcccaaggcagagctgac

SEQ ID NO: 889435 - DNA, 609 bp, Homo sapiens
gtgtattaatgtgacctcttatttgttcaagagctgagaggcagacagctttctctcttccccttgtataagggcactaatcccatcatgagcttattgtcacctttatgaccttctctaaatctaataacttccccaaagtcccatctccaaataccatcacattgcaggccagagcttcaatatataaattggagaggactcaattcaatccatagcaaatctactcaaaaacttagatattacaaattgaaatcctcccaaaatggcaaactcactcacaggaaggcaagaaaagggagacacagggatgagaaacagatggactagaaaacaaacaaacaaacaaacaaacagtatggcagacttaagccctatcatattacctatartgtaaataatttaaatatacaatatagtaacagaggttggcagaatgaataaaatatatgattcaactagatgctatctacaagaaactcagttcaaaaacaacatatgtaggttgaaagtaaaagaatagaaagagatgcaccatgcaggtgtaaattttcaagagctcagaaggaactctttgatcccttacacactcatgatgctcagatactt

SEQ ID NO: 889436 - DNA, 636 bp, Homo sapiens
acagaagcctatgagtgaaatgtcttttccatattttttagctatcactctgtcaatacacgcacttgaaactggatgcacttgagaattaaaagatgttagatctataaagcattagaacagtgtctactaggtactactcaataaatactgtctactttgctgaagtaataagtatattaataacaaaatttttaaatattgaattaaatttttttattgtatatacagaagctccttcaatgctatcttttattttcaccatggcttcacattagcctatcacaaaattctactccttacctacgatctcagtgagaggttcttgcattaggatgtactaagaacaccaaagaatctaaagaactcacggttatggcaatttctacaatgaagataaacagggattatgcagtttggttgacattcaggtctccagtrtgtgctctttggcctttcgtggtcacactatgtgctgctctgcttctatttatatcatcttcatcaaataacaggcctagtaggagaattgtaggcagggggtgaaggaaaaaacaaaatgtatgaaaccttcaaccaaacacagtgactttatgttaccagtactggtgggagatttgttataggactaaaaaa

SEQ ID NO: 889437 - DNA, 614 bp, Homo sapiens
tcattagaaaggtctgcatgggaaatcagctttcagctgaagcaagaaggtggcagaagcatgctgtaaagagatttgcaatggagggttttgtgccatagaatgcaggttgcagaagccccaactggaaatggcaggaagaaatggacaggcagaaaagtgaggttttggactgagagtaggggagagggtagatggtcaaagggacttgaatattgggcagggactgagaatcaacaggaatgtgaggtctggtaggattagctgctttctgggatctaagtggagcaaaggtacaaattagcttctgtgccagtgttggctcagtccatagagggtgttgtcagaggcttcatgatattagcaaattgtgtttttttctcagttacccaaacagaatcttggtgggaagcttttgtggtgcctctgaagaratcattgttcagccatacacagataaagagtgagtgtcctctgggggcaggatggctctgaatcctctcaaaaggcaactatggcctgactcagtagtccttttgaagaaatcctagccaaggatgaagggacaagtctagtttcgcagctgagagaaacaagcttagttcttaagtgca

SEQ ID NO: 889438 - DNA, 554 bp, Homo sapiens; identical to SEQ ID NO: 883109

SEQ ID NO: 889439 - DNA, 608 bp, Homo sapiens
taaaaaatagtgtaagtgctcattaaatggttagctcatgttctctttccttcttaaagtagtaggtttttcattgattgattgcttcatttgttcagaaaatatttgaataccaagacccatatctagttctggggctatggaggttttagttagacctacagctagaactacagaggaggtagatacagacaaatatattcaatactacttgctaaagactgcaatggagagaagatcagaaatttataggagcacagaggaggagcagctgcttggctgtgagggcaatgatgtcaaatttgccagttctgcctttaagcaagtcctttaggttctatggccctcaacttattatatgtaaaataaggctaataaggattttatcctcagtttttgtcacagttaaaggtggtaataaaaaggtatagacatatatacatatatttttatatggagggaaatgattggmtcatgggggaagtttcccccatgctgttctcatgatagcgagttatcatgagatctaatggttttataaatggaagtttcccctgccctcttctcttttgcctgccgccatgtacgacgtgcttgcttccccttca

SEQ ID NO: 889440 - DNA, 652 bp, Homo sapiens; identical to SEQ ID NO: 882804

SEQ ID NO: 889441 - DNA, 618 bp, Homo sapiens
cacatgaaaagatactccataggattagccattagggaagtgcaaatcaaaatcacagtgtgatgctacttcacactcaaggcaaatgactataatagaaaaaaaaaagatgaaaacaagtgttggtgagcatgtagagtcattggaacactcaattgttattccttattgatgcatagcaaatcgcttcaaaatttagtggcttaaaacaagaaacacttattatctcatagtttctgggggcaaagaatgcaggaacagcctagctggatggttctgacacaaggtctctcatgtggctgcagtcagggtgttggcagggcctgtggtcatgcgaggcttgcctaggtctggaggatcgaattgcaagaaggcaccctcacatggttgttgacaggaggcctcagatycctgccacatgggcctctcctcaggctgcttgagtatcctcatgatgtggcagctaacttccactagagcaagccgtccaagaaagggcgagagcgaagccacagtgtcctttctgacccggtctcctaattcacacatggttacttccattttattctattaattagaagtgagtccctaagttcattccacactcaaaatggaaag

SEQ ID NO: 889442 - DNA, 504 bp, Homo sapiens
aagggcgagagcgaagccacagtgtcctttctgacccggtctcctaattcacacatggttacttccattttattctattaattagaagtgagtccctaagttcattccacactcaaaatggaaagtcatcttgaagggaggagtagcaaataatttgtgaacagattttaaaaccaccacagcacgcaattcacatttttgcctgtggtctgcctctttggtttcctaaaccaacttgcatgtccttgtttccatacactgaacaggctcactgcctccctcragggaacaagacttaagcgtcttctggttactgcatcaaatctattgcttaagaattctgggtgatatgcagcactcccaggatgccccgatgaggccccttgaaggctggtaaacgggcgtgctttcagccacagcacatttacattttcaaccatgaagaaggaacaagatcattgcaataaatctgtccatttggaaaaggaagaatgaggaacacac

SEQ ID NO: 889443 - DNA, 621 bp, Homo sapiens
atgtgttattttttgagaaatatgaaattcgtctttggcattagcttcaactttcatcctagagtagttaatgggcctaaatctaattatttgtaaagtttgcttggatgattggtagatgataaagcaatatacactaattagccacaaggacaacgacatgagagatgaattttacagatacatcaaaaacttatctgtgaatggaattttagaatgctttaaatagagctataaaaataggtgaaacaagttgatttaagttggagttctttattattcatggaactataggaatttttttttcttgtggtacttagaagtttcagtgtgttataaagattttttcttctaccagattgcatcttccttgaaggccagacccatgtctgattcataytatctccatgtgtctagtagatttctctctataaattagctatcaaatatttgttgaatgcagaacccatatgccatccttttgcaaattagaaataaaagcatgcattctccagaacgtgtttcttaaagcacctgcctctcttgtgtcctttttgaaattaatcacatgaattcagaaatgagaagggatagttttatgttaggtcttttgtaggaaag

SEQ ID NO: 889444 - DNA, 607 bp, Homo sapiens
actaactttcaggaatttaaaaaatgtggaaggatgatgctatggattgaaatatgtcctccctaaattcatatgttgaaactccaatccccagtataaaacgcagcaagaagggggccatcagcaggccaggaagagagccctcacaaaaaacggaatcagccagcaccttgatctcggacttcccagcctccagcatcatgaaaaaataaagatttgttgtttaagtcacccagtctatcatattttgttatggcagcccaagcaaacctatgcagcygggtcaagtattttatatatatattataggagaatacatgctttgagtcatatagaacaggatattaacaccaactctaaattgctatttgtagatttggggaaacactccaaacttcagttttctaaattaaataagtacagtattttcttcattattgggctttttttttttttttttttttttgagatggatttttgctcttgttgcccaggctggagtgcaatggcacaatctcggctcactgcaacctctgcctcccgggttcaagcgactctcctgcctcagcctcccaactagctgggattatgggcatgaaccaccatg

SEQ ID NO: 889445 - DNA, 577 bp, Homo sapiens
aggatcaacatggaacactcaaacaatggttctgttattaattcagaaacatccaacccacttatgagttaaagcaagatattaggcacagatctatgagctattaatattgtctgttttaataaaacatatcagagcttacactaacaaaagttgttgcttcaaggttgtagacaccttagtaagctagacaatttagtaaactccaaaactgtcattgccccattctccaaccattttaaatgttgtagacctgaaataaaggccatcctgagtctcaacaaraactcatttttgtttagaattacatctaattttggttaactggatttttatctacaaaacttgtttccaacattcaaatccacatttaaaagtttaatatggccgggcacagtggctcaagcctgtaatcccaacactttgggaggctgaagtgggtggatcacttgaggtcaggagttcaagaccagcctagccaacaaggtgaaaccctctctctattaaaaatacaaaaattagctgggcgtggtggtgagcacctgtaatcccagctacttgggaggctgaggcatga

SEQ ID NO: 889446 - DNA, 535 bp, Homo sapiens
ttctgtggacaccattcagcctctttccccagccacctctgtcatagcccagtggtcccatgaacaaagtggccatggtggcagggatggagtttacatatgggctcagcaacatggacttccactcaccaaggctaacctggctatggcaactgctgagtgcccagttttccaaaagcagagaccagcactgagccctcaatatggcatcatttctcagggtgatcagccagctacttggtggcaggttgattatattggacctcttccatcatggaaarggaagaggtttgtcctcactagaatagacacttactgggtttgcctattctgcaaccagtgcttctgcgaagactaccatctgtgggctcacggaatgccttatccaccatcatgatattccacacagcattgcctctgaccaaggcactcactttacggctaaagcagtgtggcagtgggctcatgctcatggaattcactagccttaccatgttccccatcatcctgaagaggctggattgatgaacgggag

SEQ ID NO: 889447 - DNA, 628 bp, Homo sapiens
tttttatttctgtaattttaattatcacttgtctaccctcttctttacagtgtttttacatgtgggccactttgttaagtgactaagcaaagcctgagccaccagatgctgacttgcaggaaaaaaatgaacttaatgtactccagtaaatccagtggtaaaatttgccacrgccaggtcttatagtacaacatattaaacaggaatctgtgtctaagatattcaaaattattttaaatttttagtaaaatcagcagagaataaccatgaaataaaaaaaaaatggaagcaaatataaccacatcataaacaaaatgtactcttcctccaaaccttccatggtaattaattttatgtgtcatcttaactagattatggtgcccagttggttggtaaaaccctagtctacacattgctgcacagtattttttagatgtgattaacatctacaattggctggctttaagtaaagcagattacactccataatgtgagtgggcctcatccaatcagttgaaggccttgagagtagagactgaggtttcccaaagtagaagaattctgtctccagattgtcacaaggaaattctgcctgagtttccaccctgagtttccacccttcagactc

SEQ ID NO: 889448 - DNA, 653 bp, Homo sapiens
accatgttactaaagtcctgttcacagtagtttctttaactctatccatcgtgtccagctatcaagaaaaaaattacaagctgtcctaaaagacaaaaagcataatttgaagggacagaggaagtattagaaccagactcagatatggccaggatgttagaattatcagatcaatgattttaaacaacaataaataatgtgctaagggatctaatggataaagtaaatartatgcagggacagacagatgatgtaatcagagagatggaaattccaaaaaaagaccaaaaagaaatatcagtgatcaatcatactataacagaattgaagaatgtatttgatgggcttattagtagactaaaattggccgtagaaaaatctttgagcctgtggatatctcaatagaaacctccaaaacagaaaatcaaagaaaagaaaaactgacaggaacagaacagaatatccaagggctaggaaaactacaaaaggtgtaacatgtgtgtaatgcaaataccagaagaataagaaagagagaaagggacagaataagtatttgaaataataatgactgaaaatttccccaaattaatatcagacactaaacccaccaatccaggaagctctgagaacactaaggaagataaatacacccc

SEQ ID NO: 889449 - DNA, 632 bp, Homo sapiens; identical to SEQ ID NO: 883118

SEQ ID NO: 889450 - DNA, 628 bp, Homo sapiens
cttaacatggtgtctgagacttcaagtcttcatgcatcctcttcttttctaggttcttatcacatgctcctctttgtgattccctaactttgagctgttctggtatgtttcaaagcatttacatgtgctagttcctctgggtctcatgccttcattcctactctgtcttgaaagtttctgttccttctcagtcctgctcctcaatgaaatcttcctcggtggtatccagacagattgagctggtcccattataggagtttcaatgaaactagtaaaatgtattctgctttcaagtacattataaatggttgtttacatgtttgtctctcttgttaaatgatgtctttttagggaagagctctcagcttgactgtctatgtcaaagtatggatcatgtggaacaaataaaagcaatgggggtaggcaaacctagatgagacttcgggcttcccctgcccagtgtgcgaccttagtaaaastaattaatttctcagaaattcagttttctcctttaaaaaaatgttacttcggatgggtcagcaattgacaaataaaatttttatttctgaataaaataaagtgttaaagaagtaaatgacaaaaaaaaatgtggggtgtatgtgtaatt

SEQ ID NO: 889451 - DNA, 676 bp, Homo sapiens
aataaagaatcctcatcccacatggtcatgcaccctgccggccatcccatctttgggaagggtcagactgcattcctgggatgtttgaggtcattatgagacgttggtttttgttcccatccacacccattatgaaggaaaatagtgttcaaattcagttyaaacagtgttcaaaaactaaccctttacaacacagagctccatctattcttgagcttgaaaatagtcttccaggtaatttcatagcaatagcttgattcctaaagagtgcaggaaactcatcttactttatttttaatattgaggaattatcatttgctgccctcaatagctaggtaaaatagctaagaaattaggagtgaggcattttccttctaatctgagagagaagatatgccgtggatacaaaagatgatcactgcaaggagcacatacttatgtaactcaggttgactcataatatgtcattttgctttgttgggattagtgtatagaaagttaagcgacactattccatgtactttgttaatcggggatagtaagtgaaatatcacattctacctgtttatctccttaaacatattcctatttcatattcaaagggacatggtaagagaactaaaccatggtcaacatttgcagtaggaagaataggtacttttagctttagactctc

SEQ ID NO: 889452 - DNA, 602 bp, Homo sapiens
tttattaatttggcaatgactgggtcaaatctaaaatgaagaaaaaaatgctgtaaagttagacagctatcataaaggagataataagtaattgttttatttgttgtctttaaacatgtaaaggcttctgggaagaatccttaaatattaatttttagtaatggaaattctggaaattaaaatatatcaaacatcaaatgttattaaaaattttaaatcaacaaaagtctgcatttgtaagtcaaatttctacctaagattacaaaggctttggttatagatccccttaaaaggatttggatgattctaagaagaaaacaaaattacttagatgtaatcctagcttttggctctgtcaatgcagaagacatttcatcatgtgattacacagcaatagggtgtttttatagtacctattcttatagaaaatgttctttgargttctgtgcacactggtaaagacaggatagttgccatatttcagcacctaaccagaacaaaagatgtgcattcattttacattcacaagtcttattaatttttacaaatttgcatgacttattttaaatttgtactgcgtgagttggagaaattctcaatga

SEQ ID NO: 889453 - DNA, 650 bp, Homo sapiens
ctattaaaaaatgtttctgatttttgagtgtttgcctcccaaaaaacactttagaagttttttcagaaacacaacttaatgggttaatcctgctaccaaaacagactctcttgggattcacaggctgagaatccaaacttttaccaaacatgatttcttataaagaygtcttatagcttactgagagaaaccatttggggaacactgcaaaaatacagtgtagtagaatctggggagcaactttgttcagaattttgggctatggtatttcaggaatttaaaaaaaaacaaagcattagaataaaagtctaaatggactccctctttggccagggcactctaaaatgtaacctgaaagactggttcaggccatgatgagaagtggggttcagacatgcctcatcatacccttccagcagtaacatcaatgcctaccttaagtctgataagaaacatttacaattctctctaaagcctgctacttggaggcttcatctttaggataaaaccttggtgtcttcaacccctaatcatagcaaagacatctctttctactgataataactctttcaaccaattgccaatcagaatatatttatatctacctatgacctggaagccccctgcttcaagttgtcctgtcctttcag

SEQ ID NO: 889454 - DNA, 596 bp, Homo sapiens
agtcaatgccttctaacgcttttattttcagtgactgtcattttaatttttttctccagttccctagtttctatgagaatttggtcttgctaataagattttctccaattatgaaatttgtcaacaacatagattcttgaaaagtaattataatcctttacttaaaatttttattgtttcctttaaaatgtcttctgcatagtaaaattcaaaatcaaatatctgtcaaagaggtgagtgtgccttattacctcaaagaygttaaattgcttttgcaaattactttctcattctcttttctagtctcatcttaattctccatggttttaatagcaggtgctcttgctggcttcatttggtttattgctttgtctaaaaatagttttcatagcttaaataggcttgcaaatttgattctttctaataatttcacttataagcagtcacattttctctctgaaaaataatttaatatttatattgccagttgggctaggtttggtttttaagttgtgcatttgtttccatttgaaactactattgttaataatcaacattggctgaggcaagatgtagtagacgccacccttaccaat

SEQ ID NO: 889455 - DNA, 640 bp, Homo sapiens
cacagtctacatgaacttcttcactgtcacatttcaattaatgtccatacgtagtacttgataaatatctgtctccaacccatccctttttctttgacactccaaattcacatctctgaagctatgtcttcgaatgtaattgtcacaaaccaaattcatactctactactccatttctgctcttcctcctttctttcttatctatgattcttatggtaacagtgcaaaggctgggagaggaaaaatagaaatgtattaatgtaaagttgtcatactactcttgaagtgatataataccactttctgttagactccaataygttgaaggtttatgctataagcactaaggtaaccaaaagatgctgcagactattatagcatctcttcaaacagacttcacagaaacttgcaagcagcctgtgtctatgacatcagttggcatgagcaacaggtttttgattttggagaactatgtttacctgacactgcaacaaaacaaaagcagctatacatgataggaatgaatacaaatattaacaactgataccattgaatttttggagggtgaggagcccctcaagacaaatagagactttcaattttaaaagagcagatattgtgtttgttcccctgacttatt

SEQ ID NO: 889456 - DNA, 568 bp, Homo sapiens
aactcagaagaaataaaggcaacttggatctggggatattaaggaaggtttaaggcatttaaatggtttttttggagaattagtaggattttattaggaaatacaaggaagaaagtccttctagatgaagaaagaaaagggataaagatgtaataggacattttacttgtggcatagctaccaagggcaagtgacttaagacatcctcctcctccatccctggggcaaagcaaggcttcttcagtggtgatgggaagggacaggaaatttgtaagagttccctgccctgtgactacctgctttgtctggtttttgctttcacactgcttccattaacatatttttatcatagccagcacaaggaatattctagagtattatgttattttgtrtttaaagggtcctacttttggaaaatatttataaggggagatgaccctcctggctccataaacagctactcatgtgccccttccccaacatattcattcacttttgggtttggaggccactgaaaagtggcctgaaactgatttctaattaaccaacccaggaagctgagaagtca

SEQ ID NO: 889457 - DNA, 625 bp, Homo sapiens
gtctctacctcatctcttcctagactccattactgctttcagaactattctgttataagctttaaaaacagattaccatcctttatttgatacagaagataatcctgttgatgtttttgaaaccaagttgtctacaaatctgatccacttaaataraatatgataacaaaactgtgcctgtcagtctctgaagaaactgagagtagaattaacaaaatgtaattaaggtaatccaagtaaagattaaggcagtcgatgacaaaattattttcctatagaatagagttgtatttctgagtggaagctcaaattctcctctctttaccttggtggaatcctattattactttgattcaagtatatctttgcaattaaactgctattaattatatggaaatgagacaggaaaatactgtgtagaagagggcagttcccctgcaaaggccccacactcaagcctgaaaacccatgaccctaaatgggaacaggcatttctgtttttgcacccaaaagttgccttttggcccaccatgcccccccatcttgtactcatataaaccccagatcccaggttccagaagcacacaaggcagagacgaacagaagagtagaagaatggcagaac

SEQ ID NO: 889458 - DNA, 495 bp, Homo sapiens
cctagctatgttgtgatgggggagaagcagggagcacctatatgtttttattgagtagtgataaaaaaactatactaaattgttggctaggagacaacataactcatttcctttttttcctatgaatattccaggaatatttccacatacccatggcaaaatgcacttggaaatgatcagtaaatccagatatttgtatgtaagctcaaataatttttactaactgcttacattctgcaggcacactagctgtgacaaattgatggtctggtaggaagtattctgggggaactttaagactgctctcagggacaaggcctgaatgcaggattcttgacaaatatcccttagccagaaaagggtgatcaacagtttatgtggtgagcagattcttaatattattaaatttttctctaccaagaaacatctcatggrggaaaaataatgggctctctgatacagtttggatgtctgtccctgaaatctcatgttgaa

SEQ ID NO: 889459 - DNA, 648 bp, Homo sapiens
actcaaattgtgatgtaaatgtactgtaaagttttgattacaaaattttctcggggatggaatttacttagtaggactaatttgaaacatctgggaattctttttcttgtaaatatattgaccagttatagaagtttgctagtaatatcaccctttaacttcaaagtatatagctggggtaggctacaacagttatagatagctttgcatacttattattttagatactgagaccaatattttggtagaaagggggaacagaatgtaagaaagggaatataaacaaagagaagattgtacagataatggcttaaataatcttttggytgctggcaacattagcctgtctttaggttagacatcaaccccacagctagtcaggattatttttgtcctattcacttggtacttttatgtagaaagtactgattgcagctgttccccactagggtgtcactgaatgagttagctatttggaggtgtatgttcttctctgtagctctgggacatgtcgttgaagtggtatgggtgctcatgatgatccttagccccttagcacctttccatttggatgccgagaagtaaggtgctcatacttctcagtttgcttgtcatagtcccttttactcctattgtagatctgttggc

SEQ ID NO: 889460 - DNA, 633 bp, Homo sapiens
atgctttttttggatgttcaaatttaaatttggtatattcttaacttattgacagatgtgtggtggcattttgtgacacttgaaattatcacacacaatagattatgcagcagtttcgcatattgcagtttataataagcacttcagaactattttatacttctgttctttgttgatttacatacaatctttctttctctttaaatacatatgcttatgtataatttgaggttgtatatgaaaataattttcttttaaaaatgttgaatttcatgcttaattgaacagttaccaaagcatgtatggggattaggggctgggggtargggaaggaaattacggctatactcattatcagaatttggctcatagcaatgagacattcaattctttaaacactagttattttaaaagattttaagtaaattactctaagtattaactttttgttagtgatatgtctttttcataaattagtatgaaatccagcagaggagctaaagctaaaacaggaaaacaccattttttcatttttagtatgagagttgtgacgatttatgatataaatttttttttgagtactccctctcataagttattttatcacaggattttgatgctttggttaagtat

SEQ ID NO: 889461 - DNA, 633 bp, Homo sapiens
atgctttttttggatgttcaaatttaaatttggtatattcttaacttattgacagatgtgtggtggcattttgtgacacttgaaattatcacacacaatagattatgcagcagtttcgcatattgcagtttataataagcacttcagaactattttatacttctgttctttgttgatttacatacaatctttctttctctttaaatacatatgcttatgtataatttgaggttgtatatgaaaataattttcttttaaaaatgttgaatttcatgcttaattgaacagttaccaaagcatgtatggggattaggggctgggggtaggggaaggaaattacrgctatactcattatcagaatttggctcatagcaatgagacattcaattctttaaacactagttattttaaaagattttaagtaaattactctaagtattaactttttgttagtgatatgtctttttcataaattagtatgaaatccagcagaggagctaaagctaaaacaggaaaacaccattttttcatttttagtatgagagttgtgacgatttatgatataaatttttttttgagtactccctctcataagttattttatcacaggattttgatgctttggttaagtat

SEQ ID NO: 889462 - DNA, 593 bp, Homo sapiens
ataaatgtctgttgtttgcaactaaataatcttaaatctacaggaagtgatgaaagtaagttctgatatctcgagggaattttccacttggaagagaggaaggaatagcacagttaaatggataatttataaaaagaagtgttgacctacatatttatttaggtaatggaaataccttaatatctctgaaaattatctagttattttgacctatgtgctttttaaaatgtccatattgatgataaggagtggyttttcattccggtaaattcattctgctttgaattatgtaatttaacatgtattcaaattacttctatttaaaagtacacaaattgatctcattttcacttggcattttaatttatcaatacctgtgtggatatttcacagtattttcagtacaggaaatttccttccaaacagtagagattagatacatgtattgtataagatggtatatttatattgccataaatggatacgttaaaaataatgtctacttcaagaaagattgtgggactttattttgttaaagtaatattttggatttcctacatttttatgtcattattttgaaacaaatttatatg

SEQ ID NO: 889463 - DNA, 572 bp, Homo sapiens
tttaacaagatttattcttcttatacacaaacatgctatatagctccacttattatttaggaaatctttaatttctcacgtcatagttttatagttttcaatgtttgaattttgctcacgttattaaatttttcctgaagtgtttttgtgataagtacttcataatacattattactatttttgctttaaccagtcaattatcttttaaacaattttaattgtgataaaatacacataaaartattctgtgttaaccatttttaagtgtacaagtcagtaatgttacatatatcacattgttgtgcaaagaatatccagaatgtttttatcttgcaaaactgaaactctatacccttaaacaacaactcctgattttcctctccctttagcccatggcaatgaccattctaattttaatttctatacatttgactattttagatatctcatatgagtggaatcatacagtatttaccatggctggcttacttcactttgcataacgtccttaaggttcatccatgttgtagcatgtgacaggacttctttcctttgaaagactgaataatat

SEQ ID NO: 889464 - DNA, 646 bp, Homo sapiens
aggaaaagagaacaatatcagcctttagatagtgtgggcaaaactgagagtcacttccctttcagctcagctttgatttcaagttacttaaactctacctgaaaacgcttttgtgtcatatacttgtacgatgtaaatatcatccaaattaaaaatgttaaagcctcaatgtcttctttaagtatttatgaaaataaaacaagaaactatttctgattatattatcaatattgaaaaggaatggtcagtaaatatatgacattttatagtctttgatcaagaaaagaggaaggtaatttgaaagtgtttgtgttgtatttctaaccttatctgctggaatttatgtgttatctgttggaattgccagcayatataaggctatatgttttaaatagctgatttgttaaagagccatcgaaaatatgagtttgaaaataacaaaggaatttaatactacttaataaatattttagggttaaaaataagtgttacattttctttagtggcatatttaaaaagtttcatctcttatttatatctcacagtttcaacactttactgcaaactttaaatactcatggcaggaacttagcatgaacaaaacagtttgcatgtccttatttccatgataaacaaattttcccaa

SEQ ID NO: 889465 - DNA, 618 bp, Homo sapiens
catttccagttaagtccatagtgagtaaacaagaaagcaggggatacagagagccaagtggacggtgattatcattcatagaattgatctgtctgtaggcgtaggtctcctttgctgggtgggttcaggacagggcttcggtcttcaggtggtgaaagacgatggggtgatcatggggttttaggcagaggacaggtcaaaactaacttatagggttaaaataaaacaaaaagacaaagaaagcaaatgtggaacaagggcaatttagggacaagagccagctgcatgcaatccttgatgatgacaatttctggcactgacttgatgtaaatcatttttacaaagaagcctaatggtttatcartagtgctgtataaatacaaatgtctagtctaaatccttctgcctttagagcatgtcccatttctcctcttgtaaatgcagtggcatagctgacaatatataacaagagtcggtagcttactatgtttcagaggtggaagcgggcaacattcctcaatcggcttttcttttgttctatagattaaatatatatatattttttgccagttggtttacttttagcacatgttacaaagaactttagagaagagagac

SEQ ID NO: 889466 - DNA, 584 bp, Homo sapiens
ctgtgattctggtatttcacagtgccagatttctgagttctacgtggatatgtgaagtcttactgcctagaaaactgtgagctgctagatcatcaccttaacagggaaaagctagtttctatgaaaccattttcctcacttgatcatttcaattagaaaaatggaagatcattctttgaaaataaatatttttagggggttccatcttcattttcacatttagaaagataattgaatgtaatttttcattgcatattttacctgtaaaatttttagttattattatattttactcagatggaaacataataatactacagatagcatccaattttactaaatacaagcaccttgaaaagccaacacctttaatggtacatgaaggagtgtgtcaaattaaagraaacaaaactttattattgttctcttttttgttttttacagcatgcaacctcaaagagaaaagtttgaggaaatcacttcaaggacaaaaaattgcaatgtaaagagaattatttatctccaaattccagattacccccctgcccaacccctgccagcagcaccgtccacatggtttctca

SEQ ID NO: 889467 - DNA, 602 bp, Homo sapiens
atagttgtgataaacacttaactaaatgactgttttatttgctttcttagaaattagaatgtttttgaaatgatttgttttttttcatctagctttacaagctatccaggaaaactgagtcaatgtcttattttttctttctacatatttttctgaagcaagcagatatgttttgcaaaaataatttacaggttgtattttattttattatttttatttttgccaagcctgtgtatcattatgtattgagtgagacttccaagagtgtcaaaattgaatagttagtggtgaaatttaccaaacgcagttagctgatggaccctgagggcctcaaataaaaatatccaaggaaaacctcttgaagcgaacttttgtgtttcttcatgatggatgtrttctttgagtatggcatgttcaggtttccagagccctgtctgaagatgaggagacttaaagaggctaccaggttaatccctccctgtaggccttggcatttctttctcagccctcctcgcagttgagcatgttggcaccatctcaatgcctacttccttcccacctcaggctggattagagagggttctctgtgatagacactcatg

SEQ ID NO: 889468 - DNA, 716 bp, Homo sapiens
gggtttcgccatgttgcccaggctggtctcaaactcctgatctcaattgatccaccaacctcggcctcccaaagtactaggatgtcaggcatgagccactgcacccggccacattctaaggaagataagaacactgtactgaagttgctgaaagatctggctaatatgttttggtaggagtaggtatgtaactgggtcctgagggttctggatcaaaggggcaaaaaataaagttgaagatgaaagaaacacgtatgaatataggtccagtctatagatcttaataccatgtcaagcaccactggagatggtctttgctaggaaggtctttgaaagctaggagaaagtaatgattcataaaaatgggggaaaatgctagaaaatattatgacaaatagagaaggagggggtcaaaagacaaaaasagagcatgctattatagaacggatactatctaaggtcagaaaactctacagaccacaatgttcattggaatggtccagaggatacttcatttattacagcaatagggattgtgctgatgagagggatagtggcattgctgagaagctgagtggtggggatcacctgtaggtcagggtaaaaggaggagaagctgtcacagaactaaacttcctgataataatgaagataacaggattgtgaaaaaccagtgttagggcagtgccatgaactgtcagaagcatggcgcatgc

SEQ ID NO: 889469 - DNA, 583 bp, Homo sapiens
gtacaattattttaagaggccattgcataaatatggcagctaagtgctaactgtatggctatcagtaggtctgaagtggatgtgtgtaattaagtggatcgttgtgagttggaagatattcaacagagtccactatgtcacataagtgaagttctgtctaaaagtgtccttctcaagtactttacttttcatactaactataatttttaggacaacatcttcatggttcaaaatcaatttttcaatctatctcttaaaycatgttaaaagagaaatgatcaacaaagcaattctcctagatatagctataaaatggaaaaaattattaacataattacctgcaggttcaggaaactgaagtatgacaagcagatttgggagtagagacaagacttggggaaaacaatcacgagaacagggtgactgcctcattttttgtgtgttttgttttgcagctttgccctgaatggagccacagtcacagtggcatggtgtagggatagctcaaactctggtagaaagtccactggcttactggctaccagaaatagggcaagaaacagggcaaccagagtctccagag

SEQ ID NO: 889470 - DNA, 583 bp, Homo sapiens
gtacaattattttaagaggccattgcataaatatggcagctaagtgctaactgtatggctatcagtaggtctgaagtggatgtgtgtaattaagtggatcgttgtgagttggaagatattcaacagagtccactatgtcacataagtgaagttctgtctaaaagtgtccttctcaagtactttacttttcatactaactataatttttaggacaacatcttcatggttcaaaatcaatttttcaatctatctcttaaatmatgttaaaagagaaatgatcaacaaagcaattctcctagatatagctataaaatggaaaaaattattaacataattacctgcaggttcaggaaactgaagtatgacaagcagatttgggagtagagacaagacttggggaaaacaatcacgagaacagggtgactgcctcattttttgtgtgttttgttttgcagctttgccctgaatggagccacagtcacagtggcatggtgtagggatagctcaaactctggtagaaagtccactggcttactggctaccagaaatagggcaagaaacagggcaaccagagtctccagag

SEQ ID NO: 889471 - DNA, 687 bp, Homo sapiens
tgaaaggcacttattttttttctgctgttgaaaactctgattaattttttcatttagttactgtatttttagctccagaattttggattctttttgtagtttctatttctttgttgatattcacattttgctcatgctttgttttcctgaaacaagatattttcattttgttttcatttcaattaaataaaattagcgtctatgttckttttaatttaagcatcttcatgagagttattttaaactctttgtcaggaagctcatagatacctgttttcttagggtccatttctggagttttattttgttcctttgatttggctatgtttgtttccttgaaagatttataattttttgatgagatttgagcatctgtaaaaatgatcaactcacccagtctttgcatcctggcttcctgcagtggaagacctactccaatcagcccaactagaggagctaggacctcttaaactttttccaatctattgctcttcctggcatctgtctgcagaactgcaactgtaatatgctgcacatctctgtcttcagcagcttccaaactctgacactggtcctgtcagtgctccaagtcatataagatagaaatcagtctctttaccatcctccagaaaagccagaacattgagtgcaaggtctagtcatttgtttctaacctgagggtccagc

SEQ ID NO: 889472 - DNA, 623 bp, Homo sapiens
aattgcaacgaaagctaaaattgacaaatgggatctaattaaaccaaagagcttctgcacagcaaaagaaactatcatcagagcaaacaggaaacctagagaatgggagaaaaattttgcaatctacccatctgagaaaggtctaatatccagaatttacaaggaacctaaataaatttacaagaaaaaaacaacaaccctatcaaaaagtgggcaaagggcatgaacagaaacttctcaaaagaagatatttatatgtccaaaaaacatatgaaaaaaagctcaacatcactgawccttggagaaatgcaaatcaaaaccacaatgagataccatctcacgccagtcagaatgagtaaaaagtcaaaaaatgacagatgctggcaagagataggagaaataggaacacttttacactgttggtgggaatgtaaattagttcaaccattgtggaagacagtatggtgattccttaaggatctagaaccagaaatacaatttgacccagcaataccattactgggaatatgcccaaaggaatataaatcattctattataaataaacatctatgtttattgtggcactattcacaatagcaaagacaaggatccaacccaaatg

SEQ ID NO: 889473 - DNA, 556 bp, Homo sapiens
cgcatgttccaatcacctccgaccagggcaaagggggaagacccctgtataaaaccatcagatcttgtgagaactcattcattatcatgagaacagcatgggggaaactgtatgcatgttccaatcacctctgacaagggcccttcctagacacctggtgatcacamtttgagaagagatttgggtgaggacataaagccaaaccatatcagtgttcattcttgcctatatgccttgtgaacatagtattcactctgttttgttccccttgcctgctgagacaatgccaatgtgttctttaatatttaattttaatgtatcatctctctgaagattttggtgactgtcttcatttctatttcagtattcattgctatgtaaaaaaccatccccaatcatagtggcttaaaacactcatagtttattatttctgaaatatctcatctttattaggcttagcttggtagttctctgctctgtgtatggtcattcacttagcagcattgagcttggaagctggactggctgatctgaggctaaaaggacaaataagact

SEQ ID NO: 889474 - DNA, 648 bp, Homo sapiens
cagtctagggtgtaagcctgaaatgtaagagagggccagtatttgagttataggtctcctgggaaccagttaggacatatgagtaaaatcaattaggaaaggactgtcaaatagaacatcagtcaattttaaagcacctagaaaagcagttccacacargaatcaagactttctcatactagctgcattttttattgcattcaactaaatgatggatgagaataaaaaacatcaaaagactcataaaagtaagattttaaaaatatgccctgctgcattttcagggacaagattaaaagtaagggtttatatatttatttcttttatatatttcttttcttatatatatatatatatatatttctttttatagatgatgaatgacaagtgtgtcattgttaataggttctctcaaatattgaagaacttagaacttctattagaaaatacctcataaagcaaaactgggccacatgtccatttctgatccaatcactggcaggggaaatgggataactccttggattattagtctcttcctggaggatgaatggaatttacttatcaagatacttagctatgtgtattaggtgtggggtagagattacctgaaaacacaagtcagaatgctcttggaaagaaaggagg

SEQ ID NO: 889475 - DNA, 709 bp, Homo sapiens
atcattttgaaattgagaccaaaatagccaaaatataagatatattaaaaataacaaaatattatcactactcagaatggataaatcaaaatcaaattattaatagatagtaaagtgagagaagaaatgttatacaaaaattataagtaaatactatttattagttcaactagattgtacaggagaagaaatccgagcagaaaatgacattaactgtggataattcaattatcagaggaagaaaacaaggatgttaaaattaatatttcactgtttttatacctggtgtttttaaaaaatgcatggttttgacktcagtgaaggactgaaaaaaacaaatattgtttttaagccttttccaaggcttaaaatcttaaaatctttctgtccagaaagattatgaaggacaacactatgataatgttattagaatgattgattaagaaggaagattacaaagtagaattttggctgatctttctgagacattcttcatgtcatgtgcagcccataatttgaatttgttatcaagaggcctcaactggacccaaagaagtgataaaataatttgtaagaattcaaatactatatatgatggttttttggatctgtctaaagatgtaatatcttgaaaaaagatactaagtttaaaaattttttgaggcatgatgaaaatgctaagtgatgttaagatatacaaaattttaaa

SEQ ID NO: 889476 - DNA, 601 bp, Homo sapiens
caattgttatattctctcactgaattgacccctttatcattattgagtaggattctttatatctttgtatctttttacagtctttgacttgtagtttattttatttgatctacaaatagttattcctgctcttttttggtttccggttgcatggaaaccaatctttctccacctcttcactctcagtctgtgcgtgtctttataggtaaagtgggcttcttataggcagcatataggtgggtcttgttttttttttttttttgcttttgtttttgttttttacccattctgccactcaatgccatttaactggagaatttagtccatttgaattcagtattattattgataagtaagaacttactattgacattttgttgcttattttcctgttgttttgttaytcttctgtttcttttttcctttcctactaccttcttatgtgataagtaatattctctggtagtaagattttatttgttgcctttttatttctagtgtgtcttttatagttttgtatgtgtgtgtgtgtgtggtttccataaggcctacaaagaatatcttaaagattaacaaattagtttaaatctatgacaaatta

SEQ ID NO: 889477 - DNA, 659 bp, Homo sapiens
ggcttcttttgcatctattgagataattatatggtatatgtttttagttctgtttaggtggtgaatcatagttattgattactctatgttgaacaaactttgcatcccagtaatgaagactagatacaaacagctcacaaacatgagaaatgctcaacatcactgatcatcagagaagcataaatcaaaaccataaagagataccatctcataccagtcagaatggctattattaaaaagtcaaaaacaacagatgcttgtgaggtcatgggtaaaaggcaacacttatgcactgttgttgggaatataaattagttcagtcactgtgtaaagcaatttgkaggtttctcaaagaacttaaaatgaaactaccatttgacacagcaatttcattactgggtatatatccagaagaaaataaatcatcctacccaaaagacacatacactcatatgtttattacagcactattcacaatagcaaagacatggaatcaacctaggtgcccatcaaaggtggactggataaagaaaatgtcataaatatacactgtggaatactatgcagccataaaaaagaacaaaatcatttcctttgcaacaacatgaatgtaactggaggccattatcctaagtaaattaatgcaagaacagaaaaac

SEQ ID NO: 889478 - DNA, 592 bp, Homo sapiens
ataatcttggctcactgcaacctccacttcctgggttcaagttattcttgtgcctcagtcccccgagtagctgggattacaggggtatgccaccatgcccagctaatttttgtatttttagtagagacggggtttcagcatgttggccagggtggtctcaaactcctgacctcagatgatccatccgcctcakcctcccaaagtgctgggattacaggcgtgagccacagcacccaacctggttgctgatttattgatgaccattttaggtttcacaaatactgctcttatcattgcacaagattatgaacaaatatcttgttttctctagtcaattctcatgtttaacgttggcttgatgtcttcatctccaaataatcatatttttccctcttaattatagagcaaatgaacaatgagatggtatgactcaattagattgctgcattactgaatgcagaaaaactctcatgttctcctatcaccttcgtacccactccactccaacattcattcacagtttatttgtccgtaggtaaataccaagaaagctagattaattagagctcttccctaggtagtttttgcaaac

SEQ ID NO: 889479 - DNA, 595 bp, Homo sapiens
gcacaacacaccctttcatttatatattgtctgtggctgcattcatactacaatggtaaagtttgatagtagcaacagaaatgactcacaaagccaaaaatatttactatctaattctttacagaaaaagctggctgccctctgttctaaactcttaaatttgtggatcagctcatggaatcaacttaagtgtccataacggatggattggataaagaaaatgtggtacatatgcaccatggaatactacacagacattaaaaaaaatcacgtccttgtcagcaacatggatgcagctggaggtcattatcctaagtgaatcaacacagaaacagaacatcaaacactgcattttctcgtaagtggaagctgaactgtgggtacacaggaacataaagatgaaaataatagacactgggggctctaaaagtggggagrgaaagaggaggacaagggttgaaaaactacctattgagtatctatgttcactctttgggtgatgggttcaccagaatcccaaatgccagcattatgcaatacacccatgcaataaacctgcacatgtacccctgaatttgtaataaaaatttgaaca

SEQ ID NO: 889480 - DNA, 604 bp, Homo sapiens
cttattaattaacattaaaatgaagaaaatctgacagattattttaaacaaatggtaaatgatatcatcaatagtccaaatatttatgccttctattaggatggactaagaacagtgcattatttttgtggtattcctgccaaaaacatgcataactgaaaataaattataagaaaacaccacagaaaatctgtatcttttttaaaagtcaaggccatgatacatgaagaaagatttcaaaagtctaagaggtatggcctttaaatgcaatgtgtgctcctgaattggttcattgaccaaaaaagaaatgaagaaaaggggaaacaatttattttactctataatgggcactataaggaaaactgggaaaatcygaagttctgggaattagacaacagtattgcattaacgttaattttcttattttgttgggtgtattagggttataaagaagaattcctttgcttttaggaaacagaaaatttcaggaatttgggccgtcatgtctgcaacttgtaaacagctcaaaacagaaaaagagagagaagaaaaatgtacaatgttaaaaattgtggaatctggacaaagtttgtagagttctttg

SEQ ID NO: 889481 - DNA, 620 bp, Homo sapiens
acaattaagttattattgactataatcaccctattgtgctatcaaatagtaggtcttattcattctttccatttttttgtacccatttaccatgcctccccccaacctccaactacctttttcctcacctctggtaaccatcctattctctatgcccatgagttcaattaatttgatttttaaatcccacaaattagtgataacatgtgatgtttgtctttctgtgcctggcttatttcactcaacataataatctccagttccatccatgctgtggcaaatgactggatgtcattttttactgctgaataatactacattgttcatatttaccacaatttgacacttaggttactcccaaatcttagttattgtaaacagtgctgcagtaaacacaggtgtgmatttatctcttcaatatacttatttcctttcttttgggtatatacccagcagtaggattgctggatcatatggtagttgtatttttagtttttgaggaaccttcaaactgttctctacagtgactatattaatttagtttcccaccaacagtgtgcaatgcttcccttttctccacatcctcactagcatttgttattgactgtcttttggatatt

SEQ ID NO: 889482 - DNA, 610 bp, Homo sapiens
tctttctgtgcctggcttatttcactcaacataataatctccagttccatccatgctgtggcaaatgactggatgtcattttttactgctgaataatactacattgttcatatttaccacaatttgacacttaggttactcccaaatcttagttattgtaaacagtgctgcagtaaacacaggtgtgaatttatctcttcaatatacttatttcctttcttttgggtatatacccagcagtaggattgctggatcatatggtarttgtatttttagtttttgaggaaccttcaaactgttctctacagtgactatattaatttagtttcccaccaacagtgtgcaatgcttcccttttctccacatcctcactagcatttgttattgactgtcttttggatattagcatttctaaaatgctttcgatttgcgtttctctgatggtcaatgttattaagcaccttttcttatctgttagccatttgtgtgtcttcttttgagaaatagctattcaaacattttgcacattttttcttatagagttatttgagcttcttatatatactggttattaatcccttgtcagatgaataatttgcaaatacttttt

SEQ ID NO: 889483 - DNA, 663 bp, Homo sapiens
ttgctagttcctttctcagggatttaaaatgactgcattttctacagcttctcactcttttgagtgaactctgaattatttctgtgtttcttttaagattttctttctttcttcactattcaatgacatctagcttctattttaatgatagaaaagtaatgatcttgggcgatcatctgcaactgcttcactgtaagcaagcagaaacatttttgtgatttgaaaggtaccaggtagatcctttctctgtctgaaactgttatctctaacacacacacacacacacacacacacacacacacayacacacacactgccagttgttatgtctgaagttctcccattgaagggctcccatcagttcattctaacaaacacaagtttcacataccatgtgagagagtcatccctttagatactgaaattacaaaaataatatctgcaatttgcccagcactaattatgcatcaagcacagaactaagtcttctacttatattctctcatttcatcctcacatcatcacaatgaggtaaatattagaaccctcaatttccatatgaagaaagtgaggaccagagaagtgacttggccaaggtcacagagcctgtaagtgttaaatgagcaggtttttctgatttcagagattgagctctacctgaca

SEQ ID NO: 889484 - DNA, 565 bp, Homo sapiens
ttataactgatatgctgtcttttggaaattacttaagcatcagataacataaaaattgtttttatccctctctaataacagtatttctaacttgtaactacttatagaagacatgatggcactagtaaaagagtaaagtatcaaataggaatattatattatttagggtaaggtaaggtaaagtaataaataaaatcaaaatttcagcagtttaatacaattgaagtttatttctcagtcrtaagtgtgtgctcctggttggtggagactcttcctcatgctataatttagggacccaaactttttctaaactgtgactctgctctgtcctaaaggcttcaacattattacctggctctaggtgtatgagacaggtaccattgcttcttaaaagtcgtacctagaacttgaaaacatcacttcctctcacattccagaattatttacagggtcatacctagcttcaagggaaactaggagataaaattccaccgggaacagccatcacgctaaaccatgaaaacgtgcataacttttggtagacaaacctttaaccccattatgt

SEQ ID NO: 889485 - DNA, 652 bp, Homo sapiens
agggctccacttctgcagcagaattctgtctggacatctaggtgtttccattcatccactgaaatctaggcagaggttcccgaacctcagttcttgtcttctgcacacttgcaagaacaacaccatgtggaagctgccaaggcttggagcttttaccctctgaagcaatggcctgagctgtaccttggcctcttttagccatggttggagctggagcagctgggacacagggtgccatgtcctgaggctgcacagaacagcagggccctgggccgtgcacatgaaaccattttttcatcctaggcctcaaggcctatgatgggaggaacrgccatgaaaatctctgaaatgccctggagacattttcccattatcttggtgattaacattttgcttctctttaattatgtaaagttttgcagccagtggcttgaattcctccccagaaaacctggattttcttttctactgcatgatcaggctgcaaattttccaaacttttatactctgcttctcttttaaacataagttccaatttctgataatctctttgtaaatacatatgactgtatgatgttaggagcagccaggccacatcttgaatgcctggatgtttagaaatttcttccaccagataccctaattcagttct

SEQ ID NO: 889486 - DNA, 667 bp, Homo sapiens
aattttttatttttttaaaaagctagtaaaactaatgaatgagtttagcaaaatcacttgactcaatttcaatactacaaaactaaatatagtggcaaaaaagcccagaaaatgaaatagaaaaaaaacccaataccatttacaaaaacataaaaatattaaatacgtaagactgaaatttgacaaaacttgtggaaggtttmtacactgaaatctacaaaatattatcctcaaaataaaggaagccttaaataaatggagaaatgtagcacagccagtaatcagaagatccaatattgttaaaatgttaaattctttccaggttgaccaaggtcaaaggttggcaaactttttctgtgaggaaccagatagtaaatattttaggctttgcaagctatgtatcgtctctattatacattctttgttttttgcttaggtttgttttttgcaaccacttaaaagtgtaattatagctatttttagcttgaaagcactacaagaacagactctggggtgaatttgacacatggactgtacattactgactcctgctgtagattcaatgaatcccagtgaaaatcccaacaggcctttattatgaaattatatggaaatacgaaagtgctaaaatagctaaagattgaaaatcaaaaacaaagttgaaaga

SEQ ID NO: 889487 - DNA, 715 bp, Homo sapiens
gcacaggcaaagatttaatgacaaagacaccaaaagcaattgcaacaaaagcaaaaattgacaaatgggatctaattaaagtacggagcatttgcacagcaaaactatcaacagagtaaacagacaacctacagaatatgagaaaatttttgcaaactatgcatctgacaatggtctaatactcagcatctataaggaatttaaacagatttccaagaaataaacaaacaaaaccattaaaaagtgggtgaaaatatatgaacagacacttctcaaaagaagacatacctgcagacaacagtcagatgaaaaaaatctcaacatcactgatcattagagaaatgcaaattaaaaccacaatgagataccagctcacacctgtcagaatggctattactattataaaaagtcaaaaaataatagatgctggtaaggttgtggagaaaaaggaacacttatactctgctggtggaagtgtaaattagttcaaccattgtagaagacagtgtggtgattcctcaragacctaaagctggaaataccattcaacccaacaatcccattactggatatatatccaaaggaatagaaatctttttattataaagacacatgcatgtgtatgttcattgcagcactattcactatagcaaagacatggaatcaacctaaatacccaccaatgataggctggataaagaaaatgtggtactta

SEQ ID NO: 889488 - DNA, 607 bp, Homo sapiens; identical to SEQ ID NO: 882920

SEQ ID NO: 889489 - DNA, 607 bp, Homo sapiens; identical to SEQ ID NO: 882921

SEQ ID NO: 889490 - DNA, 564 bp, Homo sapiens; identical to SEQ ID NO: 882926

SEQ ID NO: 889491 - DNA, 583 bp, Homo sapiens; identical to SEQ ID NO: 882927

SEQ ID NO: 889492 - DNA, 607 bp, Homo sapiens; identical to SEQ ID NO: 882911

SEQ ID NO: 889493 - DNA, 618 bp, Homo sapiens; identical to SEQ ID NO: 882912

SEQ ID NO: 889494 - DNA, 610 bp, Homo sapiens
aaaccctagaagaaaacctaggcatatcattcaggacataggcatgagcaaagacttcatgactaaaacaccaaaagcaatggtaagaaaagccataattgactaatggaatctaattgaactaaagagcttctgaacagcaaaagaaactatcatcagagtgaacaggtaacctagagaatgggagaaattttttgcaatttatccatctgacaaagggctaatattcagaatctacacagaacttaaacaaatttacaattaaaaaaaccatcaaaaagtggacaaaggacatgaacagwcacttctcaaaagaagacatctatgcagccaacaaacatatgaaaaaaagctcatcatcactggtcattagagaaatgcatatcaaaaccacggtgagataccatctcatgtcagttagaatggtgatcattcaaaagtcaggaaaccacggatgctggagaggatgtggcaaaataggaacaattttacaccgttggtgggagtgtaaattagttcaaactttgtggaagacaatgtggcgtttcctcaaggatctacaaccagaaataccatttgacccagcaatcccattactgggtatataccc

SEQ ID NO: 889495 - DNA, 594 bp, Homo sapiens
ttttaatgacagttttccctaaagatctagaaattttttatttttttattgtaagattatattttatttaactaaatcataaaggaacttgtatggttcattagtcatcctcctcccctttccctgtttcttatcccactctggctttggggaaaagtaatatgctaataaggattataattacataagaatgcatacgtagagtatgctactgttgagtaatgcctacatattatttcttttargctggtggctaaagccacatagagtgattcctaggtttaaacgtccagatatatctactagttagttattttagtagtgactagctccctgaaaaaaatacttccagccacttcccattgcaaagtagcagactgaatacaaataaacttatttctgtaaatcagattctctatttctttcatattttgcttttcctgttattgttattattattttatcataggcatctccagtgttgaattttacttcttcagaggagcttctatgtatgcacacagatatttaatacctgttttgaataatcttatcaagctaaagtgcaataaatttagtcctaagaataatcag

SEQ ID NO: 889496 - DNA, 482 bp, Homo sapiens
aatgaaaactataaaacactgataaaagaacttgaagaggacaccaaaaaaatggaaagatattccatgttcatgttgatggattggaagaatcaatgttgttaaaatctccacattacctaaagtaatctactgattcactgcaatacctatcaaaatactaatagtttttcaaggaaatagaaaaagaatatcctaaaatttatatggaaccacaaaagacccaaaatagccwaagctatcctaagcaaaaaaaaaaaaaaaaaaaaaaaaaatggaggaatccctttaccttacctcaaataatactgtggagctatagtaacccaaacagcatggcactggtataaaaacaaacacatacttcaatggatcacaataaattgccgagaaacagatccttacttctacagtaaactcattttcaacaaaggtgccaaaaacatacattggaaaaaggacaatatcttcaataaaaggtg

SEQ ID NO: 889497 - DNA, 631 bp, Homo sapiens
taactgaaaataaaatgctattttacagtgctattaaaattgggtaggagttgatatgagaagtgaaatcagtcgtttttcaaagaagaccagaaacaaacacaagaaaatctaagagtttaaaaatattaaatatattagattcataaattaatcatgacattggtccaagaggacctcaaactaaaaatacatattgtgcttgttctactcctactgactccctgttttccatttctaagatgctgtagtattatctcaataaaaaattttctggttttgtcaattttctttaatgtgggaaatcattatgatgtatattttcaaagcattttgaatttaaacttaggtaccctggtgttttcagaggtgatataacctttgagatattgctacattactatttgttatcacttaaaaccactcgatatttccygggatcttggattccaaaattaatgaaccagcttagcaaaatcattgcagatcaccaacagctgtttttatttcacaggacacctaagttagcaaaagccttctggggatttcatattgtcagaaagagaacacagcttgtctggaatatcatcatgccagccaccaagttcataaaaaaactctaaggcagaag

SEQ ID NO: 889498 - DNA, 641 bp, Homo sapiens
ttccaaggtggtctcaaatgttttgtttcccttagatgttcttgcctaccccgtcttgcagacaaacttgacccttagctcttcctcctcaagaacaattcttaccccttctgagaccatccttgaccaactattctctgaaactagcaaggcttgacatgcttttcctgctaaaaccctataaagcattctgtcatttttctcaagttagaattttccttgacagctttctgatgctcagtatttttgaaatttgcttaggctaatggtattcttgctgcttttcttccatgraatatactatgtatgtatgtatgttggtatatgtatagttgtgtgtgcgtttgtatatatatatgtgtgtgtgtgtgtgtgtgtgtgtgtgtatacacatataatgagtttaactgtcataatggtttaaagtcaatgaagtgtttaaccttaattctccatttaatcgttatggcaaagaataatattcccccctgtgttacagaagggaatgtaggttcaggcaggatatagtaggaaatgtggtgtgggagacaagatagggaatgtataagtaggataaggttaaaataaaatgtgagttcagttctgacatcatgagtttaaagtcactcctctgaggtatc

SEQ ID NO: 889499 - DNA, 641 bp, Homo sapiens
ttccaaggtggtctcaaatgttttgtttcccttagatgttcttgcctaccccgtcttgcagacaaacttgacccttagctcttcctcctcaagaacaattcttaccccttctgagaccatccttgaccaactattctctgaaactagcaaggcttgacatgcttttcctgctaaaaccctataaagcattctgtcatttttctcaagttagaattttccttgacagctttctgatgctcagtatttttgaaatttgcttaggctaatggtattcttgctgcttttcttccatggaatatactatgtatgtatgtatgttggtatatgtatagttgtgtgtgcgtttgtatatatatatgtgtgtgtgtgtgtgtrtgtgtgtgtgtatacacatataatgagtttaactgtcataatggtttaaagtcaatgaagtgtttaaccttaattctccatttaatcgttatggcaaagaataatattcccccctgtgttacagaagggaatgtaggttcaggcaggatatagtaggaaatgtggtgtgggagacaagatagggaatgtataagtaggataaggttaaaataaaatgtgagttcagttctgacatcatgagtttaaagtcactcctctgaggtatc

SEQ ID NO: 889500 - DNA, 622 bp, Homo sapiens
agactcttttttgtctgtctgccaagtcctccccaccgaatctcacacactgactaatgcatatgcttgktggtgtaagattccagggaatggtctttactgaggctggtaggtgagaatactttcagtcaagacctatgtgaattcttgacttgggcaggttttggcttccactatatttgtaaaggctttcctgttgtatacataccaacatcagcaaaatgggtgttcttccgcttctaattcccattcagtcatctcaaatatgaagtatgttttacaattttaaaatgttaattgtgaaacattttgcaaaatacatattgtttaaagataagaaaaatagaagtaaatttcccgcttagttgtttttaatcatttctactcattactctaaagagtatttttacgccttgtccttttttatttatccattaatgttggaaagtatctacttgctccctactctataaatgaaaaattaaaattctaaaatttcctttaactattcttactgacctctcacttctatcagacaaaaacttgcgcttttatgttatcagtgttcactgtaagtaattgttattattcactgttgctaaatattccattataaaaatat

SEQ ID NO: 889501 - DNA, 673 bp, Homo sapiens
atttgtaaaggctttcctgttgtatacataccaacatcagcaaaatgggtgttcttccgcttctaattcccattcagtcatctcaaatatgaagtatgttttacaattttaaaatgttaattgtgaaacattttgcaaaatacatattgtttaaagataagaaaaatagaagtaaatttcccgcttagttgtttttaatcatttctactcattactctaaagagtatttttacgccttgtccttttttatttatccattaatgttggaaagtatctacttgctccctactctataaatgaaaaattaaaattctaaaatttcctttaactattcttactgacctctcacttctatcagacaaaaacttgcgcttttatgttatcagtgttcactgtaagtaattgttattattcactgttgctaaatattccrttataaaaatatattataatgtattgatttattctcctgcatatgatgaataattgggttgcttccggtttgaagatattataaagttactataaaaattttatgtacttttttttgttgccataagcactcattcctattacatatctaactcagagcagaattggttgtgtatatattcagcttttgtcaatactgcaaaacacttttccagcaaagtgattattgagttatggagtg

SEQ ID NO: 889502 - DNA, 620 bp, Homo sapiens
aaacaccttaagatataatatttgatttccaattaagttgtaatcatgcctacaatgctttccagcttctttctttcaaagctccccatttactagctgttgtccatttctcccgctttctcttttcacacttcacaccttccactctgagagtcagccaaatggaacaactttttgttccttaaatgggtcatgctttctcttactttttactttttatttttttccttagtcttgtgcatgctgtttgctctgatagaacacattgttcacttctctgtttctactcatttttcaagtcttagatttttgtcattaactttttcggggaattttattcttctaatcctccctacaccccakcacaggctgcgagtatttctattgcatttgtactgaaactttcatcagaatttatttcactcttgccttgtctacatctctctctgggctgaaagctcctaagggtaggactgtgttcgttcactggtaaatatttcctttttaaacaaatgcatgtattcaagtataacctacaaactgaaaagtatgtgaatcctaagtgtacagctggttgagctttcacaaaatgacatacacatgttattaccacccacaag

SEQ ID NO: 889503 - DNA, 620 bp, Homo sapiens
aaacaccttaagatataatatttgatttccaattaagttgtaatcatgcctacaatgctttccagcttctttctttcaaagctccccatttactagctgttgtccatttctcccgctttctcttttcacacttcacaccttccactctgagagtcagccaaatggaacaactttttgttccttaaatgggtcatgctttctcttactttttactttttatttttttccttagtcttgtgcatgctgtttgctctgatagaacacattgttcacttctctgtttctactcatttttcaagtcttagatttttgtcattaactttttcggggaattttattcttctaatcctccctacaccccagcacargctgcgagtatttctattgcatttgtactgaaactttcatcagaatttatttcactcttgccttgtctacatctctctctgggctgaaagctcctaagggtaggactgtgttcgttcactggtaaatatttcctttttaaacaaatgcatgtattcaagtataacctacaaactgaaaagtatgtgaatcctaagtgtacagctggttgagctttcacaaaatgacatacacatgttattaccacccacaag

SEQ ID NO: 889504 - DNA, 620 bp, Homo sapiens
aaacaccttaagatataatatttgatttccaattaagttgtaatcatgcctacaatgctttccagcttctttctttcaaagctccccatttactagctgttgtccatttctcccgctttctcttttcacacttcacaccttccactctgagagtcagccaaatggaacaactttttgttccttaaatgggtcatgctttctcttactttttactttttatttttttccttagtcttgtgcatgctgtttgctctgatagaacacattgttcacttctctgtttctactcatttttcaagtcttagatttttgtcattaactttttcggggaattttattcttctaatcctccctacaccccagcacaggctgcgagtatttctattgcatttgtactgaaactttcatcagaatttatttcactcttgccttgtctacatctctctctgggctgaaagctcctaarggtaggactgtgttcgttcactggtaaatatttcctttttaaacaaatgcatgtattcaagtataacctacaaactgaaaagtatgtgaatcctaagtgtacagctggttgagctttcacaaaatgacatacacatgttattaccacccacaag

SEQ ID NO: 889505 - DNA, 578 bp, Homo sapiens
ctaccttggttaggctgctatcatttcttacatggtctactgcaaagtctcctaatcatgaactactaaacagaagcaaaagcaacttttgctcttgacccctcacagtcttatttcaacacagtagccagaatgtcagagtaactctatcaaaactcacattacttctccaaagttgttccatcacattcagaataaaagttaaagtcattaaaatggccttcaaagtttacactgtttggcacttgttacctctctgaaccacctcctactatcatccctgattgaattttgttccagctacacattacttttgacttgcctcaaaataaccaggcatgcctctgcctcaaagactcccacccaagcctcaccactcctgttcatacacctgcctcttttcctttaaatattkatatattttattcccttgcatcctacacatggatacacacacacacacacacacacacacactcacactcacaccctggccgcattcctgctgtattttgttccatagcacttgtcattcagtagcataaaatgtgttttaattacatagtctcttcatttac

SEQ ID NO: 889506 - DNA, 585 bp, Homo sapiens
gggacaaaatgccaccagtctctttgcatagcaagagcaacctttacttcagttcccggcaagtttctcatctccatctgagaccacctcagcctggacttcattgtccatattagtatcagcattttggtcaaagctatttaacaagtctctaggaagtttcaaactttctcacatcttcctgtcttcctagccctcaaagtctcttagaagttscaaactttcccacatttttgtcttttgagccctctaaactgttccaacctctgcctgttacccagttccaaagtcgcttccacatttttgggtatctttatagcaacaccccactctgcagtatcaatttactgtattagtccaatctcatgctactgtaaagaactgcctgagacttggtaatttataagggaaagaagttttattgactcacagttccacagggctggggagtcctcaggaaacttacagtcatggcagaactgaaagcaaacatgtctttcacatgatgacaggaaggagaagtgccaaataaaagggaaaatgccccttgtaaaaccatcagatctcaagagagctcactcacta

SEQ ID NO: 889507 - DNA, 579 bp, Homo sapiens
atctagtcatgaattctcataatttttgtttgttcatggaaaactttatttctctttcatttttgaataatagctttgatggatatagtattcttggctcacagtttttttttttctttcagcactttgactatatcatcccattctctttctgctgagatatctgtgattagtctgatgataatccttttgtatgtgatttgatgcttttcttttgctgtttttaraattatctttgtctttggtttttgacagtttgactataatgtgccttggagaggatctttttgggttcaattcatttgtggttctttgagcttcctgtatctggatgtcaatatctcttgcaagacttatgaagttttcagccattattttgttaaataggttttctttgcttttttccatcatttctccttctggaactaccaaaattgaaatatttgttcacttgagggtgtcccatgtgtcacataggttttcttcatgctttttaattcttttttttagtctaattggattattccaaaacgcttgtcttcaagtttagaaattctttcttctgcttaatctagtctt

SEQ ID NO: 889508 - DNA, 579 bp, Homo sapiens
atctagtcatgaattctcataatttttgtttgttcatggaaaactttatttctctttcatttttgaataatagctttgatggatatagtattcttggctcacagtttttttttttctttcagcactttgactatatcatcccattctctttctgctgagatatctgtgattagtctgatgataatccttttgtatgtgatttgatgcttttcttttgctgtttttagaattatctttgtctttggtttttgacrgtttgactataatgtgccttggagaggatctttttgggttcaattcatttgtggttctttgagcttcctgtatctggatgtcaatatctcttgcaagacttatgaagttttcagccattattttgttaaataggttttctttgcttttttccatcatttctccttctggaactaccaaaattgaaatatttgttcacttgagggtgtcccatgtgtcacataggttttcttcatgctttttaattcttttttttagtctaattggattattccaaaacgcttgtcttcaagtttagaaattctttcttctgcttaatctagtctt

SEQ ID NO: 889509 - DNA, 579 bp, Homo sapiens
atctagtcatgaattctcataatttttgtttgttcatggaaaactttatttctctttcatttttgaataatagctttgatggatatagtattcttggctcacagtttttttttttctttcagcactttgactatatcatcccattctctttctgctgagatatctgtgattagtctgatgataatccttttgtatgtgatttgatgcttttcttttgctgtttttagaattatctttgtctttggtttttgacagtttgactataatgtgccttggaraggatctttttgggttcaattcatttgtggttctttgagcttcctgtatctggatgtcaatatctcttgcaagacttatgaagttttcagccattattttgttaaataggttttctttgcttttttccatcatttctccttctggaactaccaaaattgaaatatttgttcacttgagggtgtcccatgtgtcacataggttttcttcatgctttttaattcttttttttagtctaattggattattccaaaacgcttgtcttcaagtttagaaattctttcttctgcttaatctagtctt

SEQ ID NO: 889510 - DNA, 579 bp, Homo sapiens
atctagtcatgaattctcataatttttgtttgttcatggaaaactttatttctctttcatttttgaataatagctttgatggatatagtattcttggctcacagtttttttttttctttcagcactttgactatatcatcccattctctttctgctgagatatctgtgattagtctgatgataatccttttgtatgtgatttgatgcttttcttttgctgtttttagaattatctttgtctttggtttttgacagtttgactataatgtgccttggagaggatctttttgggttcaattcatttgkggttctttgagcttcctgtatctggatgtcaatatctcttgcaagacttatgaagttttcagccattattttgttaaataggttttctttgcttttttccatcatttctccttctggaactaccaaaattgaaatatttgttcacttgagggtgtcccatgtgtcacataggttttcttcatgctttttaattcttttttttagtctaattggattattccaaaacgcttgtcttcaagtttagaaattctttcttctgcttaatctagtctt

SEQ ID NO: 889511 - DNA, 586 bp, Homo sapiens
gtgaatttggccaactgcttatccttacatttaagccagttacacacccacacagatgccaaggtgtcatctctaaaatattgggagggaaaaccttggattcaatgctgtcttactggaagtgataaccaagcattactcagayaaaaaaaaaaaaactttttgcctattgctgaagtggttatatagtaatgattttacttttaaactttcaaatatttatttttctatatcctggcaatactattgatagtgctcaggagaatcattaactgttattagataaagtataatagaataaataatattggttagttaatgttggattctgaaaacatctcaaatgtattaatgtaaagttgtaataattttaaacattgtaacaaatctcctttgaagatcctatttgtcactgttcgatctggagcgcaaatgaatgaagcctgctgtgacttaggctgaagccactgtatggagttgcccatgtgaagagccactgagtgcagatcagtggctggaatttaggctgtccttccttgagacgtattgatgggcgcatgaagcagatgctcactgggaattgcag

SEQ ID NO: 889512 - DNA, 586 bp, Homo sapiens
gtgaatttggccaactgcttatccttacatttaagccagttacacacccacacagatgccaaggtgtcatctctaaaatattgggagggaaaaccttggattcaatgctgtcttactggaagtgataaccaagcattactcagataaaaaaaawaaaactttttgcctattgctgaagtggttatatagtaatgattttacttttaaactttcaaatatttatttttctatatcctggcaatactattgatagtgctcaggagaatcattaactgttattagataaagtataatagaataaataatattggttagttaatgttggattctgaaaacatctcaaatgtattaatgtaaagttgtaataattttaaacattgtaacaaatctcctttgaagatcctatttgtcactgttcgatctggagcgcaaatgaatgaagcctgctgtgacttaggctgaagccactgtatggagttgcccatgtgaagagccactgagtgcagatcagtggctggaatttaggctgtccttccttgagacgtattgatgggcgcatgaagcagatgctcactgggaattgcag

SEQ ID NO: 889513 - DNA, 668 bp, Homo sapiens
ctatgggagctgcaatcatttaattttgtgaagtgactggtgagtagtgatgtcttctttaggacaaaggtaaaaggattttacttgtaggcataaggataaatatgaaggattccaaattcaggtctctaagttgggaggatatgtttgaagagcaagtgatacttttaaacatttgaagtgttttgaagtaatgtgtttcttttttttttttccttttttctttctagtgtgcatagcagtgatccccaacctatttttgctgcaaaatgacattaggaatatttcatggtgyttccagatttctccaggacactttaatatatatcagtttaactttattaaaactggcacatgttttatttaggagactgggtgatttagaggcctctcttcttatcctgtggataccatagaatattgcaaattcatgggtggtgaacagtagcacatacattaatacaatatgatataatatataccaagggagatacaagaaaaactgctgagcctttctcagcctatggaactaatctatgacatcatcaaaagcataaaatgatgacagtgcagttttcagagatgcaattactttaagtatctctcgggcatgaaaggaacaaattaatcttattaccagtcatttaatgaactaaccatttatcata

SEQ ID NO: 889514 - DNA, 668 bp, Homo sapiens
ctatgggagctgcaatcatttaattttgtgaagtgactggtgagtagtgatgtcttctttaggacaaaggtaaaaggattttacttgtaggcataaggataaatatgaaggattccaaattcaggtctctaagttgggaggatatgtttgaagagcaagtgatacttttaaacatttgaagtgttttgaagtaatgtgtttcttttttttttttccttttttctttctagtgtgcatagcagtgatccccaacctatttttgctgcaaaatgacattaggaatatttcatggtgcttccagatttctccaggacactttaatatatatcagtttaactttattaaaactggcacatgttttatttaggagactgggtgatttagaggcctctcttcttatcctgtggataccatagaatattgcaaattcatgggtggtgaacagtagcacatacattaatacaatatratataatatataccaagggagatacaagaaaaactgctgagcctttctcagcctatggaactaatctatgacatcatcaaaagcataaaatgatgacagtgcagttttcagagatgcaattactttaagtatctctcgggcatgaaaggaacaaattaatcttattaccagtcatttaatgaactaaccatttatcata

SEQ ID NO: 889515 - DNA, 644 bp, Homo sapiens
cagacactaaaaaatctggttatttgtctctctgtatctggttagaaggactacgattcgtgggaaatgggatcagtgaactagagagtaaaatctggctggggaaaccacgtaagtaaatggaacagagctgtgtgtcatccactcagctcaggccattttctagaaagccttccttgacatgcctttattgacttaagttctgctacagcacattgcatttatcacattatattgtaatgatctattatgtgtctatcatcaccacataagcatgtaaagccatgtcttatttattcatggaacasatacaatatcatcacctgtgcttagatttctgacccaggaataataataatatatttacatgatatactgttaaaatgtaataaagatgtatgtttccttccaattcattggaaggaacgtaaatgtagggatccacattttgctatcagccaactaacaggtttcattcaaattaattgaaaaaaacttctgtcaaagtaaagtgttgatcattttgacctttgtgaataactcatcttaacccaatacatcctccaggaaacaatgtagttaaaattcacaaaccacaatagaaagaactcctctttttataatcacatggtgatctgcgaaaa

SEQ ID NO: 889516 - DNA, 644 bp, Homo sapiens
cagacactaaaaaatctggttatttgtctctctgtatctggttagaaggactacgattcgtgggaaatgggatcagtgaactagagagtaaaatctggctggggaaaccacgtaagtaaatggaacagagctgtgtgtcatccactcagctcaggccattttctagaaagccttccttgacatgcctttattgacttaagttctgctacagcacattgcatttatcacattatattgtaatgatctattatgtgtctatcatcaccacataagcatgtaaagccatgtcttatttattcatggaacacatacaatatcatcacctgtgcttagatttctgacccaggaataataataatatatttacatgatatactgttaaaatgtaataaagatgtatgtttccttccaattcattggaaggaacgtaaatgtagggatccayattttgctatcagccaactaacaggtttcattcaaattaattgaaaaaaacttctgtcaaagtaaagtgttgatcattttgacctttgtgaataactcatcttaacccaatacatcctccaggaaacaatgtagttaaaattcacaaaccacaatagaaagaactcctctttttataatcacatggtgatctgcgaaaa

SEQ ID NO: 889517 - DNA, 644 bp, Homo sapiens
cagacactaaaaaatctggttatttgtctctctgtatctggttagaaggactacgattcgtgggaaatgggatcagtgaactagagagtaaaatctggctggggaaaccacgtaagtaaatggaacagagctgtgtgtcatccactcagctcaggccattttctagaaagccttccttgacatgcctttattgacttaagttctgctacagcacattgcatttatcacattatattgtaatgatctattatgtgtctatcatcaccacataagcatgtaaagccatgtcttatttattcatggaacacatacaatatcatcacctgtgcttagatttctgacccaggaataataataatatatttacatgatatactgttaaaatgtaataaagatgtatgtttccttccaattcattggaaggaacgtaaatgtagggatccacattttgctatcagcmaactaacaggtttcattcaaattaattgaaaaaaacttctgtcaaagtaaagtgttgatcattttgacctttgtgaataactcatcttaacccaatacatcctccaggaaacaatgtagttaaaattcacaaaccacaatagaaagaactcctctttttataatcacatggtgatctgcgaaaa

SEQ ID NO: 889518 - DNA, 630 bp, Homo sapiens
taatattgttaaaataacaatactacccaatccctatttaatgatagggatttaatgcaatccctatcaaaacaccaaagacattcttcacaggaatagaaaaaaaatcctaaaatttgtatggaaccacaaaacacaccaaatagccaaagcaatcctgagcaaaaagaacaaaactggaggcttcacactaccagatttcaaaatattctacaaaattatagtaaccaagataactggcataaaaatggacaacagaccaatggaacagaatagagaacaagatagagaaccctgaaataaatctatgtttacagcccactgattctttytttttttttttttttttaacaaaggcaccaagaacattcactgggggggaagaacaatcgcttcagtagatgatgctgggaaaactggataactatatgaagtatgaaactagacccttatctctcaccatatagaaaaatcatatcaaaatggattaaagagttaaatctaatacctaaaatgttgaaaccactagaataaaacattgggggaaacactccaggacatcggtctggacaaagatggcttgagtaagcccataaaagcacaggcaaccaaagccaaaatggacaaatg

SEQ ID NO: 889519 - DNA, 644 bp, Homo sapiens
gaaggaactcacttcttgtcacaattttatgaccaatattattccatgagaatgtatggtactttcctgcttttgcatccattttatgagtatcattccgtcttttatctgcacgcttccttaaagccttcttctgctcacattttttttttctccaaagtcctctatcacttacttctctcatgtattacttttaggggcatataattatacattgyttcaaatatttatttatatattttttcatgtagtaatggttattgctacatcttacatttcatctgcagtgtttagcagatggcagatatttataaaatttgaatgaatgattaaatattgagtaacatatatatctcatataagcatctaaacatgttaatacacaagatagtaaaagcaaaccgatcttttggaggaatgtaagtgctcattcaatatggtggcatgggatcaatatgacaatataactactgtcttcaacctaatggtagctcatttgttacatgttcttaaatacccataattaacctttagatccttttcattgttaaagccactcatctgaaaagtctgctttttttccttgaagattggaagcagaaaaagatatagttttggaagtaaaccaaatttggataggctct

SEQ ID NO: 889520 - DNA, 644 bp, Homo sapiens
gaaggaactcacttcttgtcacaattttatgaccaatattattccatgagaatgtatggtactttcctgcttttgcatccattttatgagtatcattccgtcttttatctgcacgcttccttaaagccttcttctgctcacattttttttttctccaaagtcctctatcacttacttctctcatgtattacttttaggggcatataattatacattgcttcaaatatttatttatatattttttcatgtaktaatggttattgctacatcttacatttcatctgcagtgtttagcagatggcagatatttataaaatttgaatgaatgattaaatattgagtaacatatatatctcatataagcatctaaacatgttaatacacaagatagtaaaagcaaaccgatcttttggaggaatgtaagtgctcattcaatatggtggcatgggatcaatatgacaatataactactgtcttcaacctaatggtagctcatttgttacatgttcttaaatacccataattaacctttagatccttttcattgttaaagccactcatctgaaaagtctgctttttttccttgaagattggaagcagaaaaagatatagttttggaagtaaaccaaatttggataggctct

SEQ ID NO: 889521 - DNA, 644 bp, Homo sapiens
gaaggaactcacttcttgtcacaattttatgaccaatattattccatgagaatgtatggtactttcctgcttttgcatccattttatgagtatcattccgtcttttatctgcacgcttccttaaagccttcttctgctcacattttttttttctccaaagtcctctatcacttacttctctcatgtattacttttaggggcatataattatacattgcttcaaatatttatttatatattttttcatgtagtaatggttattgctacatcttacatttcatctgcagtgtttagcagatggcagatatttataaaatttgaatgaatgattaaataytgagtaacatatatatctcatataagcatctaaacatgttaatacacaagatagtaaaagcaaaccgatcttttggaggaatgtaagtgctcattcaatatggtggcatgggatcaatatgacaatataactactgtcttcaacctaatggtagctcatttgttacatgttcttaaatacccataattaacctttagatccttttcattgttaaagccactcatctgaaaagtctgctttttttccttgaagattggaagcagaaaaagatatagttttggaagtaaaccaaatttggataggctct

SEQ ID NO: 889522 - DNA, 689 bp, Homo sapiens
tgatttcacaacaaaatggcaaagccaaagtgcacgtatctgtagaacttgactctctcgcaccacctcatgagctgtgagaaactggatccaattatattactttagaaaagacgctcaatgagtatagccacatctggccactgcaatactgacttccccttctgctgtctcttttctccctggcctttccattttcccttacccttctctgaattatcagaaaacaaaattggagaggaaacgtcccataaaaggatcaaagaagaagaaagaaggaaaaaggaagagaaggaaagaaagaatgatgggaggaaaacggttgagagtcattaattattgccttacaccaagtcacggggaaaatctgaagcctttgatgatggcagtgtctgtccaaatatacatcttctgaaagtgatactcttgtgtttgaaattacccatttaaaacattattaatttggtcaaactaatagcctctattatgccatattttamttgcaaagaccctcaggaagagaacacattaaagtgttatttgaaaaattaattcaccttaatgtgaaataaatgatcagagacttcccaatgctacagctcatataatttgtttctaaaggaaatacatggagattaaatcagagtggggcagggtgggtggatgcctatgggcataggcatagaaaa

SEQ ID NO: 889523 - DNA, 585 bp, Homo sapiens
aaatatgacaatactagaaaaaagaaaggtaagtgttgaagccagtagctgcattttcagtatgacaatctatttccatttacaacatttttttttttttttgctgatgtctgtacttgtgagtgtataagaaagtttctcatccatggtaaagrgcattaatgaaattactgtgtgacactccttgaaaaatgagagaaatatatatttagtttccataatgaaatccatatttgcttggtcatggcccaaattggttttgaaaagtatatatttcactgaggcagatgaagtgtccaaaattaataaggataaaaaataagaaaaatttaaggagaaaattttcaattaaagatgagtaactgttgattactcaggtccaagaatcaatactgattaatgttatgtaatgtagcagatcttgccaggatgaagatatttgagtgtaagctcagaatcataagaaacagcttctttgtaacttgcattttatagctgcccacatcatcctattctatatccataggctagaacttcagtcaaactgagtttgccattcttgggagatctcaggagattattcct

SEQ ID NO: 889524 - DNA, 625 bp, Homo sapiens
agtgagcaaggtcaattcaattatctgtataaaaatatgtcagtgaaagcctgcttttattctgcttaatttagaatttattctttcacttatttttgaggaagttttaaagcaattaatgataactataaaagtgctgtttaacaaaaaatcactggtgagtacagtgtwtataatgcatagctctaaagaaatacctattgctctttataattgtctaaccctttaattgatttcataaatcaaagtttttaggcaagtatggcctatattaaaaatgaacacttgagcctaatgaatattttgttgatagaaataatttctgaatttctctgctgagtagcaagatagcactctttagtacaggaagggaaactttagaaaaatgggatgctataaaacttaaagtaagaattggaactgaaagtaacacattaatttccttggcataaatttctgctttatcatcctgaagctttattttggcacaaaggtagcaataacactaatctctcttctggaatccaaaccaaagatagattattttgtctctaaaaatttcattatgaatgactaagtagagaatagatgaaaaagtattttaatttaatgttaagaatatgca

SEQ ID NO: 889525 - DNA, 664 bp, Homo sapiens
gtttgagaatgataatgaattgctggaagcttaatcagatggttgctcttatagcagctgtagtttccagatgtggtctcttcatgggagcaaataaacagagcacctagttcctggtacacagatagcagtctggctgaactttttgtctctactcaaacagcagagaacatcagaagcattctgcttttcccttggaaagacaaatgcacagcaggggggaaaggcaaatctcacaaaaatacaggggcctatcaactcagtggcaactataccaggccatagcaggccttgaaagcactagttgtgcaagaacttagtcgcatctgtccattttgctatagtgtcgtcctacctatgacttacatctttagccttktgaagagtttcctggaagaaatgggcctagtatgatcaggaacataactgctgcagcataataactagcatcagggtttgctgtgtgggaaatgaagtttcctcccactgggtagaaccttgagcatgataccctattgtctataagacctggacagagaaatggcctgagctcagtagctacattgcttcctgagcatgtaataatgtggtggtgaagttaaagaaattaaaggaagaatttttttaaaaagtgagaagtacaatgactatgtgtgtggatgta

SEQ ID NO: 889526 - DNA, 561 bp, Homo sapiens
aaacaaactacaaatagaataaacttaaagatttccacagctcaacactatatgatcaaattgttggaagtcaaagcaaaggtaacctcaaaagcacaagacaaaaatgactcattccattaaggaaacttcaataaaattaacagtctatggtatatttgttatgaaaatccaaagaaagtacaattgtatacttacaattttagaaaggattaaatgttattggaaagtggatggtgtatggtgaggatgtgcagtattcagtaaaatgatcaataaaatgtgtaatttacatatcagaatacattctggagcaaggagcaaggagaaggaatagagastaagttgatatctatgtcttaatctgttttttttctccgttttggtttctgttcatgatggtatatcataatctcttatacgtgtgtctacttacatgcatatattacatattcataaaacatttatttgtaaaattaatagtttcatgtttagtaatggcaatgctatagaatttattgtagacgtatgaaactgtatatagttcttttatctctctaa

SEQ ID NO: 889527 - DNA, 620 bp, Homo sapiens
atgtatatacacatattctgcttaaacatttgtgtcgattgatttgacttttctttaaatccaatatttctccaatatctatttttctaacatctttaacaccataaataataaaatgtttcatgattttaattattatgacaagtatgctttttatacagagagattaatttccttgtctatttctgtcaatgggtacygttgaaaataaattgtgtttaaaaagtttttgtatgattataggcatgaattctgtggcaagatggtctgaatttgaaccctagcttcctcaaatattaactgtgttactttcggcaatttacttaaactctatgagtctcacttttctcatctataagacgggagagtaatagctcctagtccctagtgttgttttgtgaatgatttaaaatatataaatcacttagcatagtgtccagaacatattaatgctaggtgatagttggccattattataactcaatgtgcatttatttaggtattcagatatcttacagagatttttcagaataataacatcctaatttatgaaaaattacttcctgctactgaaaattaattaggctatccttttataaaattatatattcgacatttat

SEQ ID NO: 889528 - DNA, 620 bp, Homo sapiens
atgtatatacacatattctgcttaaacatttgtgtcgattgatttgacttttctttaaatccaatatttctccaatatctatttttctaacatctttaacaccataaataataaaatgtttcatgattttaattattatgacaagtatgctttttatacagagagattaatttccttgtctatttctgtcaatgggtaccgttgaaaataaattgtgtttaaaaagtttttgtatgattataggcatgaattctgtggcaagatggtctgaatttgaaccctagyttcctcaaatattaactgtgttactttcggcaatttacttaaactctatgagtctcacttttctcatctataagacgggagagtaatagctcctagtccctagtgttgttttgtgaatgatttaaaatatataaatcacttagcatagtgtccagaacatattaatgctaggtgatagttggccattattataactcaatgtgcatttatttaggtattcagatatcttacagagatttttcagaataataacatcctaatttatgaaaaattacttcctgctactgaaaattaattaggctatccttttataaaattatatattcgacatttat

SEQ ID NO: 889529 - DNA, 479 bp, Homo sapiens
atcaaaatccacagccaccctcagttcttagaaactcagatgcccttgaatgcaggcatttacagaaaagagaatgagtcatttgtatagatggagctatttactggatgttatcatttttaatgccatagtactctctattttctttcctcttacgttctcattatcaagttttcctttggcacctatttctccagatgctaacagtgaatacaattttcctacccaaaaatttctttcaatttttgggtaggaacaaacagacatgaatataaataacagcaggggtagtttgctcttaaagatgttccccggrtgtttctttcttggaggacgctataattgtccaatttaactctgttagcattttggagaataacagatacatagaacagatatccttatggtagaattatctgagtgcaaatttgtttaacggcaaacatttagtcagtaattcatatggaagctaatatttt

SEQ ID NO: 889530 - DNA, 611 bp, Homo sapiens; identical to SEQ ID NO: 886114

SEQ ID NO: 889531 - DNA, 674 bp, Homo sapiens
tgattttttaaaaaatgtttaaacattaactattagtcccctttgtattagtgaggcttctgcaaagaaatagaaccaatagttaatctctcaggattattctaagaaattggctcatgcaatcatagaggctgacaagcaccaagatctacaatcaatctgaaaacccaagagagctgatagtatagctccagtccatgtccaaggcttaagaaccaggagagtgaaagtgtagttccagtctgagaccatgtaggattkagacccacgaagacccaatgtttcagtttgagtctgaatgcaggagaaaaccaatgtccccacttgaaggcactcaggcaggagaaattccctttactcccaggagggtcatcttttttgctctattcagacattcaactcactgaataagccccactcaccttgaaaaaggcaatctgttttatttggtctaccaattaaaatgtaaatctcatccagaaacaccgtcacccccacacctagcacaatgcttgaacaaatatttgggcactctggatcccggtaatgttgacagatgaaataatcatcacattctgcaaatgcatttctctgtaatttcagtattttactcactcaaactgtagttgtttttgagataagagtcaataaaggtcatgcaagggcatttaatc

SEQ ID NO: 889532 - DNA, 674 bp, Homo sapiens
tgattttttaaaaaatgtttaaacattaactattagtcccctttgtattagtgaggcttctgcaaagaaatagaaccaatagttaatctctcaggattattctaagaaattggctcatgcaatcatagaggctgacaagcaccaagatctacaatcaatctgaaaacccaagagagctgatagtatagctccagtccatgtccaaggcttaagaaccaggagagtgaaagtgtagttccagtctgagaccatgtaggattgagacccasgaagacccaatgtttcagtttgagtctgaatgcaggagaaaaccaatgtccccacttgaaggcactcaggcaggagaaattccctttactcccaggagggtcatcttttttgctctattcagacattcaactcactgaataagccccactcaccttgaaaaaggcaatctgttttatttggtctaccaattaaaatgtaaatctcatccagaaacaccgtcacccccacacctagcacaatgcttgaacaaatatttgggcactctggatcccggtaatgttgacagatgaaataatcatcacattctgcaaatgcatttctctgtaatttcagtattttactcactcaaactgtagttgtttttgagataagagtcaataaaggtcatgcaagggcatttaatc

SEQ ID NO: 889533 - DNA, 609 bp, Homo sapiens
ttctctactctgagaactgaaacctttataatgttgctgagagaaattaaagaagacctaaataaatggaagagataaatcatgttcatacctctgggtacttaatatttttaagatgtacattcaccttaatttgctaaaaattcaataatatcccaatcaaaatcctagggagcttttgtttggtggaattaacaaatcggttctaaaatttatatgggaatccacagtatctacaagagccgaaatrctagtgaaagtgaataacagagttggagaactaacataactaagaacttaacataatttcaagacatactacaaagccattataatcaagactgtgttatggttgttaagatagatacatagatccatagaacagggtagaaaatgaagcaaaaaaatatatatatatatacagacatatatgaacaactgattttcaaaagagtaaaagtttttcttctagggtttttatggttttgagttttacatttaattctttaatccatcttgagataatttttgtataaggtgtaaggaaggggtccagttttagttttctgcatatggctagccagtgtgcccagctatttattgaatagg

SEQ ID NO: 889534 - DNA, 609 bp, Homo sapiens
ttctctactctgagaactgaaacctttataatgttgctgagagaaattaaagaagacctaaataaatggaagagataaatcatgttcatacctctgggtacttaatatttttaagatgtacattcaccttaatttgctaaaaattcaataatatcccaatcaaaatcctagggagcttttgtttggtggaattaacaaatcggttctaaaatttatatgggaatccacagtatctacaagagccgaaatactagtgaaagtgaataacagagttggagaactaacrtaactaagaacttaacataatttcaagacatactacaaagccattataatcaagactgtgttatggttgttaagatagatacatagatccatagaacagggtagaaaatgaagcaaaaaaatatatatatatatacagacatatatgaacaactgattttcaaaagagtaaaagtttttcttctagggtttttatggttttgagttttacatttaattctttaatccatcttgagataatttttgtataaggtgtaaggaaggggtccagttttagttttctgcatatggctagccagtgtgcccagctatttattgaatagg

SEQ ID NO: 889535 - DNA, 587 bp, Homo sapiens
gtaggggtacacagtaatattgatgaggtaaacaagtgaattcttaatcaatagtggtcattgtcctacttcttcctaaaaggaattaatttccaaccaaacctggataatatttcttctgtttttattcttcacatgaatagatagagttacctctaagagttatagagttgggaattttgtccagccctgacatttattgaaacaaatgttatctatcaactcagtgatataaattttaattttcaataaatgagaatctcttaaagaaataatggtagtaataatgatgaaatatctttgcaaaagatatcaaagtttcagattgtataatagtttgaacatcaagttgatcatttgaaaaatttcgttatttaagtattcaactttgtccaaaggatgtagacctgtattaggagacataataaaatattatcaataataawtgtgccttatttgaataaattaatatttgagagcctttctgactgacaatgtcagcaggaaaaatggaaatgaaacatttgcattagcagattcagaagtgctagaaaaggtacaaatacggaagctggggaatttcacgg

SEQ ID NO: 889536 - DNA, 621 bp, Homo sapiens
cttttgtctcacagctctgaagattctttacttcatcttgacttcagatagcttgacgactatgtgccttggtgataatctctttgcaatgaatttcccaggagttctttgtgcttctggtatttggatgtctagatctctagcaaggccaaggaagtttttctccattattccctcaaattggttttccaaattttcagacttcacttctctctcaggaacaccaattatttttaggtttggctgttttatgtattcctttatttcttggagactttgtttattttattatttcttttttctttgcctttgactgattgggttaataaaagccttgtgtttaagttctgaaatactttcttctacttgttctagtctattgttgaaattttccactgcattttgttttttcttaagtgtgtatttcayttccagaaattcctattacttttttctttatgatatctatttctctggagaaaaatttattcatatcctgaatttttttcttaatttctttaagttgcttttcacttttctacagtatctccttgagtagcttaataattaactttctgaattctttggcatttcagagatttcttcttgatttgaatccat

SEQ ID NO: 889537 - DNA, 671 bp, Homo sapiens
ttagcttatattgttttcattatgaattgtaagatacaggtggcttcctggtgctgggaggtagatgctcttgtaaagatggccctgataactccctgctcctcacaaaagagacacagaattacaggagaagcaatgcctctcgggagggaatctcttttctcatctttgcccacagcctgagctctgagtccctctgtttattttctctcagtttgtgcttaaacttgaatgtcctacagatcttgggtctctttaaatcctctcctggtatctgagagcccttggcctggaaaggttgtgtytctcctagggggctggcttcacagtgtgtgctcagtgaggttgcacagggcccaacacttcaaagggctcagcatttgaggtttaatgctctggagtggctgtcttgaaattcttaataaatttatctctgaattctgtaagtcagtcaaatgggacaatggagcatgcacttgatccagtgggggcctggagccacagctcgcgatgcagtcctgtatactgccacctttctgccttcccaggacaggttctcagccatccattccccatttccaggtgccccaggtctacctggccttccttaccctatccactgctgtggctgctgtggctgtccacctagggcagtgacaggattgtgtcta

SEQ ID NO: 889538 - DNA, 685 bp, Homo sapiens
ggataaccttaatcttagactggtgagcaatttatggtactttgatatcttccttttaggagctttgggcattttaaattgatcatatagtgcatggcatgcagcattagaacaaaattagaatagatttgaatattaagcaaagggactggagcagaggcccagatatcaccactggaggcatcaaagggataaaactgtacttcatctcctccacaggagcatgcaagcgtttgtggttgtaggtgggtgcctctgtactctctcccaaacagcaatcctttctgctgttacaaaatgcaactattccttttggggacttccaagtcctttatggtcagtccatatgttgtgattgcactgaccacaaaggtgatcataggaargcgtataactgaggatagaccaaataaattcagtcttatgattttatctggtataatcagaagagaggaagactttttcactggagatggcaagatagtggagtacatatatggtgtttccagcgactattttttactactatatgtaaagagacatctgttaatgaaatcagtagatctaaaagataatgaaagacattgctgaggatattatttgagcatctggacttggtgctttctaagtcattcttccctgaattttcagttgattgtgacaagagttcaaatttgagttaagt

SEQ ID NO: 889539 - DNA, 418 bp, Homo sapiens
tttattaaagcttcaaatctttttttgtgtttttgttgttcaatttactagaattcataatggggttagggtccaattttccttaggatgaattatcttagtcatttatctatatctctacttttcttgtaattatttcattatatctgtatctctctcatacatttcaattatatgcaatgttcaactgtgtrtttctgttctctgccatccctaatttacaaatttgtgtaatgctgttgctttgttgtaattgattttcataattataatctttctattttattcaaattctggattttgttactgggttcttattgtcttcaactcatttattaagttttaaaagtaataaatagtactgttgaaaatttttctttgattgagtttgcttccaaaatcagtttttggaaatatt

SEQ ID NO: 889540 - DNA, 631 bp, Homo sapiens
taattgaataacaaatttccatttttttctgaatttggggaattaagagttcattcttctgataaagcaaaataaattacaatatactcatttttcttttaagattcagacgatgcaaataaaagttagatgaaatttacagcaaaataaaatagaaaaaattaacgtgtttatactgttgttcaactgttcagatttctagtttygtactatgtattctttattatcaacatactagaatatgatgtaattcaagaacatttcatacataatcactttgataaaaaaggagattggcaagagcataaaaatatttaaaacactagattaatgaatccaaagctacataaagatcttataataacagtagtaaacattttgagaaatgtgtagaaactcctaactgcagggttttataaccaatatgttataactaatataaaagcaatatgttgctaatagacagccatacttcacactaagttctctaatgggataacttgcaggattcataatttaacaacagattgaaaaaggaaaatttttagattcagtagcaaacattttggatttctcaacaacactttctccctaaattgctgtgaaatacattattcatcaatacctagat

SEQ ID NO: 889541 - DNA, 631 bp, Homo sapiens
taattgaataacaaatttccatttttttctgaatttggggaattaagagttcattcttctgataaagcaaaataaattacaatatactcatttttcttttaagattcagacgatgcaaataaaagttagatgaaatttacagcaaaataaaatagaaaaaattaacgtgtttatactgttgttcaactgttcagatttctagtttcgtactatgtattctttattatcaacatactagaatatgatgtaattcaagaacatttcatacataatcactttgataaaaaaggagattggcaagagcataaaaatatttaaaacactagattaatgaatccaaagctacataaagatcttataataacagtagtaaacattttgagaaatgtgtagaaactcctaactgmagggttttataaccaatatgttataactaatataaaagcaatatgttgctaatagacagccatacttcacactaagttctctaatgggataacttgcaggattcataatttaacaacagattgaaaaaggaaaatttttagattcagtagcaaacattttggatttctcaacaacactttctccctaaattgctgtgaaatacattattcatcaatacctagat

SEQ ID NO: 889542 - DNA, 617 bp, Homo sapiens
ccctacatctcagaagagattggggacctagattaaatattcttaaagaaaaatattttcaaccaagaatttcaaatccagccaaagtaagttttttaagccaggagaaataagatccttttcagataagcaaatgctcaggaagtttctaccaccagaactgttttataagagttcttgacaggagaactaartatagaaaggaaagactgctcgtggctaactcaaaaacagacttaactacacagaccagtgacactataaagcaaccacataaacaaggcaccataattaccagctaataacacaatgacacatatcaatactaaccttgaatgtaaataggctaaatgaccccacataaaaggcacagagtggcaagctggataaaaaagcaagatccaatggtaagctgtcttcaagaaatccatctcaaatgtaatgacatccattggctcaaaataaagggatggagaaaaatccaccaagcaaatggaaaacagaaaaaaaaagcaggggttgcaatcctaatttcaaacaaaacagagtttaaaccaacaaaaataaaaaagacaaaggaggacattacatatggtaaaggattcaattcaacaaaa

SEQ ID NO: 889543 - DNA, 589 bp, Homo sapiens
acatattttttcccacttcttgaatttaagattactgtatcacacacttcttggtttgtatattttggcatcactgaataaacatcatttatgcttttttcttgaggagtttatatcaaaatttttatatgccaagtttcttgacaggattcctaacatttcataattcaatggtagatatagtcagtgacacagctcagtattacattaaacacaacatgataattcctgtgactgctttgttttccttttacttataaccgatttaaatattttcataaagagttatggttttccagacataagtaagatttcaagaactacagaatacatattaacattgtcagtcacaaagttaactttgccaactacttatatctamcatcacaactatggtatttttcagaaaactatctatctagctatcatatctatctatctatctatctatctatctatctatctatctatctatcatctatcaccttgtaataacaagaacttgaggcagctccttttttagctttaattaatcagaatgacttaaaagaggttttataaaatttaattattttggctctacattaag

SEQ ID NO: 889544 - DNA, 647 bp, Homo sapiens
tggaaaaaatcaaaataagaatagtatttcttttcttttttctttaatctgtatttgtcaaaccttttaaagccaaatgtgattcaggcactatatttccatttacgagcctctctctgagttatttttcaagagctttacaatatgcctaggtaagcttataattttgctcctctaataatacttttctttggtaattaagccctgtggagagtttaatgctccagtttaacgtatttctagaggactagtacgtgcagagttggcaactatarcggatgcaaagttgaaaaagtagatcccagaagatgtaaaaaataatttttttgtaaacatcaaggtatatctcagaggaagatcctctgagaccaccacctctttaatgaagttctgatattcaggtattagtttctcacagttttccatgacgaaaactctgtacataaaacttaatgttgttatttttctttctgattttaaatagatgtaaaggagcacatcttgggacaaaaagaagagctctgaagaataatatttcttgacagataaaaattatctgaaatgcaagtttctgtgtccataaataatgttttattgaaacacagtcatgcctcttcatgtctatattgtctgtggttccctctaca

SEQ ID NO: 889545 - DNA, 513 bp, Homo sapiens
tagtgtctagttttcccagttctactttttgaagaaattatacttccttacccattgtgtatccttagcactgttgctaaagatgggttgaccatatatgtatgagtttacatctggtctctttattttggtccacttaatatatctgtctttatgctagtaccatactgttttaattactatggtttctaccacttctattctgtaaagtcctggaagtcttagccagaaccattaggtaagagaaagaaatagaaggaatcaaaattgtaaaggaacagaataaaatgttctctgtttgtagatgacatcatcttgtgtgtagagaaccctaaaactccacytacacaaaatgttagaactaataaacaaattgagtaaatatgcaggatacaaaatcaacgtacaaaaaatcagttgtatttcaaaacattaacaaggaaccattctaaaaataagctaaaaaacaattccatttacaatagcataaaaatcatacaatatttagaaata

SEQ ID NO: 889546 - DNA, 617 bp, Homo sapiens
atcataagctttacccacgtggtaacaccaattacagctgttgtaccagatgtagttgcattgcttgagtgcattaacgcatgccctggtatccggtatgcagctattgatataatacgtgctttttccttttcacctgttagtagagtccactaaagctgtttacgttcagcttgcaaaaccacaatatgcctttattttcatacctcaggagaatattaactcttcagccctatgctaaagtttagtccacacyacaatacacatttattttcataccttaggagaatatcaactcttcagccctattctatagtttagtccacaccacagtacacctttattttcataccttaggagaatattaactcttcagccctatgctgtagtttagtccataccacaggacacctttattttcataccttatgagaatattaactcttcagccctatgctatagtttagtccacaccatagtacacctttattttcatatcttaggagaatattaactcttcagccctatgctatagtttagtctacaccacaatacacctttattttcataccttaggagaatattaactcttcagccatatgctatagtttagtcca

SEQ ID NO: 889547 - DNA, 604 bp, Homo sapiens
ggaaaccctgtctctactaaaaacacaaaaattaatggggcttggtgtaatccagctactcagaaggctgtgatcccagctactcaggaggctgaggcaggagaatttgcttgaacctgggaggtggaggtttcagtgaactgagatcgcaccactgcactccagcctgggcaagagtgagatttcatgtyaaaaaaaaaaaaaaaaaaaaaaaaaaaaagacatgtctggaactaagaagaaaatgagatttcatggacttacagttccacatggctggagaggcctcataatcatggcagaagggaaggaggagcaaatcacgtcttacatggatggtggcaggcaaagagagagagcttatgcctggaaacttccatttttaaaacagtcagatctcatgagacttattcactagcacacgaacagcatgagaaagaccatgattcaattatctcccaacgggtccctcccaccatgtgggaattatgggggctacaagataagatttgggtggggacacaaagccaatccatatcattctgtctctggcccctcccaaatctcatgttttcacatttcaaaaccaatcatgcctttccaa

SEQ ID NO: 889548 - DNA, 604 bp, Homo sapiens
ggaaaccctgtctctactaaaaacacaaaaattaatggggcttggtgtaatccagctactcagaaggctgtgatcccagctactcaggaggctgaggcaggagaatttgcttgaacctgggaggtggaggtttcagtgaactgagatcgcaccactgcactccagcctgggcaagagtgagatttcatgtcaaaaaaaaaaaaaaaaaaaaaaaaaaaaagacatgtctggaactaagaagaaaatgagatttcatggacttacagttccacatggctggagaggcctcataatcatggcagaagggaaggaggagcaaatcacgtcttacatggatggtggcaggcaaagagagagagcttatgcctggaaacttccatttttaaaacagtcagatctcatgagacttattcactagcacacgaacagcatgagaaagaccatgattcaattatctcccamcgggtccctcccaccatgtgggaattatgggggctacaagataagatttgggtggggacacaaagccaatccatatcattctgtctctggcccctcccaaatctcatgttttcacatttcaaaaccaatcatgcctttccaa

SEQ ID NO: 889549 - DNA, 564 bp, Homo sapiens
gagagaaagcttgtgcagggaaattccctttttcaaaaccatcagatcttgtgagacttatacacaattatgcgaacactcccatgattcagttatctcccactgggtccctcccactgcacgtgggaattatggaagctacaataggagatttgggtgaggacccagagccaaaccatatcatagsctttctataaaatgtattttctgttgatgcaatttatctttaattaaaattaactttaatatgtattgtcaaaatcgtggtctctaaaatagttatatatatatgaagatacatgtatacaataataagagttttgttatatatccactccaccttaaaataaacacaaacagtacagttgaaacttcctgattacttatttccagttgaagaatatcataatttttaatttcatgcatacttatatatttttaaatgatataatgtggttttattttttaagttttgcaaatgaaattctatgcaaattctttggcaactttatttttctgaaaacctaattgtaattttcatacttggagactacattagttttc

SEQ ID NO: 889550 - DNA, 580 bp, Homo sapiens
gtaaattggtacagccattatggaaaacagtaggcaggttcttaaagatattaaaaatataactattatataatcctacttctagatatatactcaaaggaaatgaaataattatcttgatatttgcaatctcatgttcactactgcattattcacaatagcgaagatatgaaaacgtgttgacagatgaatgaataaagaaaatgccacacacacacacacacacacacacacacacagaggaatatttttcagacttaaaaaagaaaatcctgccatttgcaactctgtgtatgaacctgtagcatgttaggctaagtgaaatcagatgcagaaatacaaatactgcatgatctctctaattgtggaatctaaaaaagttgaactcacacaaacagagagtagaatgrgggttgccagaggctgtggggtaggaaaaacagggagctgttgatcaaagggtacaaagtttcagttacttaggatgaataagttctggaaagctaatgtagaacatggctactatagttgataatatagtattgcatgcctcaagtttgataagggaaaagatattaag

SEQ ID NO: 889551 - DNA, 600 bp, Homo sapiens
taagtaaagaatagtgatatggtttggctgtgtgccaatccaaatctcatctggaattcccacgtgttatgtgggggacccggtgggaggtaattgaatcatgggaacagttctttcctgttttgttctcatgatagtttgtctcgggagatctgatggttttacaagggagagttgccctgctcaaattccttcttctgttgtctgccaccatgtgagacatgcttttcatctactgccataattgtgaggccttcccagccacgtggaactgtaagtctaataaacctctttcttttgtaaattgcccagtctcaggtatgtctttatcagcagcatgaaaatggattaataaagtcacccttgattttgccattattaaaataaagaatatayattagtttgctcataaaataaaatactatatgagagttaaatgtatttatatgtccaacataagtaacatttaaaaatgtagtattggatgatgtaagcaagtcttaaaatatatatattgtaatgataagatacaattggccattgaacaccacacgtttgaatagcacaggttcacttttttgcagactttattctgcttct

SEQ ID NO: 889552 - DNA, 664 bp, Homo sapiens
tttcaagaatgtattacatgtatccaaacatcacacagtaataaataaatatgtataattattacatgtcaattagaaataaaatgctacttaaaaaataaaaaaattaaatctaaagcaaaatattgacaagaagaatctaacaatcattctcaaaattatttggccaagtagagwtattcttcagtaatatgaagctgattttataccaacatatttatgaatataatatgtaagtaaagtagaaaatcaaatgattatattcattgatgctaaaagacatttaataaaatatagaagccactttcaaaaaaattataaatagaagaaaactttaaatgaatacacaataatttggtaaaaccaatagcagtgtttattctaaatggtaaacctcaaaatttatttttataaattcctaaagaaagaatctttttgtctgatgtcaacttaactattctacacctttgaggtcaaaggaaatatagagaaaaataaaatacttttcaatattttgtaatacaaaaaggaataaaattgtctcatgttgtcatgtaattacacacctacatggaagaaattctagtaaatgtctacaacacggaagagaccctagtaaattaataatgaaattattaataatgaataatgaaatgtatgcttt

SEQ ID NO: 889553 - DNA, 624 bp, Homo sapiens
taccctcagacgtttggctcattgccaagctaaacaaaccttcacaatttgcagaaagtaaacttaaatatcgttgttgtcaacttaaaatcagtgagttgggtgaaaacaatcaagtaccaaagtcagaagtgtacaacgactgtcacattagtgccatgagacatggcctyatttggtgaaactgtgtgtattttttaaagcagctgtaggcaagcaaatacttcatgacgttaaatcaaccacataaggaaactgaaataagtaattactctagggaagtgagcaattaacaactgagcacacatacggatttctttgaatgtaagtcaataagactttatgtttccagagaagaattctctcccaattatatttctccctaacagtaagaacagtagggtgggaagagtcaataatacatgctcaataaacatgatttgaatgaataaattggtatttgttaaagaactataaaaactacagtaataatggagaaaattttctcatactcctttagatatttttgattattttttcttcccccatgcacttgctaatagtttctctcatgtcttagtccagtcaggttggtataacaaattaccatagactgagtggcat

SEQ ID NO: 889554 - DNA, 624 bp, Homo sapiens
taccctcagacgtttggctcattgccaagctaaacaaaccttcacaatttgcagaaagtaaacttaaatatcgttgttgtcaacttaaaatcagtgagttgggtgaaaacaatcaagtaccaaagtcagaagtgtacaacgactgtcacattagtgccatgagacatggcctcatttggtgaaactgtgtgtattttttaaagcagctgtaggcaagcaaatacttcatgacgttaaatcaaccacataaggaaactgaaataagtaattactctagggaagtgagcaattaacaactgagcacacatacggatttctttgaatgtaagtcaataagactytatgtttccagagaagaattctctcccaattatatttctccctaacagtaagaacagtagggtgggaagagtcaataatacatgctcaataaacatgatttgaatgaataaattggtatttgttaaagaactataaaaactacagtaataatggagaaaattttctcatactcctttagatatttttgattattttttcttcccccatgcacttgctaatagtttctctcatgtcttagtccagtcaggttggtataacaaattaccatagactgagtggcat

SEQ ID NO: 889555 - DNA, 660 bp, Homo sapiens
tttaatcattcacagggttacctgttttcacataaatatttggaataaaatatttaagaaggattcttatagcagctctagggaattggacctgagaagtatttttttctaaaagagaaggtaaaattggttgtgcaactgataataccacccattcacatcctaagaatatcaacttctaatttttcttttttatgtttttgcctgcatattgtaattcattattaagtaaggagattttttaaaaatacattsttataatctccttgttaatgcagtttttctcattaatgaacaggaaaattcactttattgatataatttactattcactttttcttaactgtttcaactagtttgccatcaagggtttgtcctgtcttggtcagtctcattcatatgtgattgactacagatggtattaaatagacagatggtattaaacaaagactagaagctagtgatcattaagttattcaatgctcctactttcaaaggggcagtttttcactacactgtcatcctttttataatataaagttgcatatatatccatatatgttatatatatatacccatatatctctgtatgtgggtattcctatatccatatctcatatctccatctatatgtatatgtgtatttctatacacccaata

SEQ ID NO: 889556 - DNA, 614 bp, Homo sapiens
tcatgactgcccggtagtattccattgtgaatatgtaacacatcttctttatccatttatctgttattggacaccttggctaatttcatatcttggccatgtgaatagtgtaataaacatatggatgcagatgtctctttgatgtactgaggtttttttaatttggataaatctatagtagtgtgattactggatcatatggtagtcctatttgtagttttgtggagaacctctatactgttctccrtagtgactgtactactgtacattcccaccaaccatgtagaaaagttgctttttctccacatattcaccagcattttttattttttgtctttgtgataatagccatcctaactggactgagatgatacctcattgtggggttcatctgcatttcccagatgattagtgaggttgttgagcattttaaaatatacttgatggacatttttgtgtcttcttttgaaaaacgtctgttcaaatcacttgtcaatttttatttggaatgcttttttttgctactgagatgtttgagttccatatatattctggatattaatcttctgttggatgaatagtttgctaatattttctttcattatgtagctttt

SEQ ID NO: 889557 - DNA, 646 bp, Homo sapiens
ctaattgcttattttatttcagttttaatcttcaggtcctgagcaaattatccatcataaccagctgatatggtttggctgtgccctcactgaaatctcaaattgagttatatctgtcagaattcccaagtgttgtgggagcgacctgggggaggtaattgagtcaggggggctggtctttaccgtgctatcatcatgatagtaaataagtctcaagagatctgatgggtttaacagaggtttctgcttttgcttctttcatatttttctcttgccaccaccatgtaagaagtgcctttcacctsccaccatgattttgaggcctccccaggcaagcaaaactgtaaggacaattaaaactctttttgtttccagtttcaggtatgtctttatcagcagcatgaaaatgaactaatacagttaattggtaccaggagtggtgtgatgctgaaaagacacctgaaaatgtgcaagaggctttggaactgggtaacaggcaaaggttctaacagtttggagggctcagaagaagacaggaaaatgtgggaaagtttggaacctcctagagacttgttgaatgcctttgaccaaaatactgatggtgatatgaacaataaggtccaggctaaggtggtctcatatggag

SEQ ID NO: 889558 - DNA, 626 bp, Homo sapiens
aataataaaatgttttatacaaagaatcttaataaattcttaaataattccatcaattttctaagaaatttatgtattagggttctctagagggacagaactaataggttgatgtatatataaagtggagtttattaaggagtatttactcacacaatcacaaggtgagctcccacaatargctgtctgcaatcttcagagcaaagaagccagtccgagtcacgaagttgaagaacctggagtctgatgatcgagggcaggaagcacgcagcatggaagaaagatacaggccagaagactaaaccagtctactattgccacattcttctgcctgcttttattctggccatgctggcaactgattagatgatgcccacccagattgagagtgggtctgcctttcccagtccactgactcagatgttaatctcctttggcaacaccctcacagacacacccagaaacaatactttgcacccttcaatcccatcaagttgacaccaaatattaaccatcacaagttaggataaatttgatgtcacattcctgtgtatgtatttctagagggggagtactagtctgactatagcttactggatgacaaccaaaaaaaaaattagtataat

SEQ ID NO: 889559 - DNA, 669 bp, Homo sapiens
aaacacatgggatatttttaaacaaatcaatggaattaagagagggcagaagaatgtcaactgactgccagaaaaaatgaagccatagtctgaatatttggggaatgggaaattctgtttgggacagggcaataattctactggtgaaatcccagggaaattattgttgaagtgaaagcaggtaccaggtatggcaatagtgagaagtgagtcccaaaccataggaatcaatgggaaaattttaaatggggaattgatctcctttatttctcacctcaaccttccagaagataagaagctccatcagtaaaatagctaggtatctatccattcatcgaatctgccaccaaaacagcactgacaaacacatctctgatttaatttttaaaaataagttggcaaaaaaacataagcatattttaagaggtgatttaaaaaaaaactagaaagaacaaagaggggataatttaccttagtgttattagaaaaaatwgagaaacaaacaaacaaaaaaagcttaattacatcctgaaaaagcttgatgataatgcatccatgaaccaaaataggaactgtttaacatgaagcaacgaaccgtagcaataaaggccactttgacttcactaaagccaacaataaaagaaagttgggagagatagccaagaaaat

SEQ ID NO: 889560 - DNA, 663 bp, Homo sapiens
gttctttagcttaattaggtcccatttgtcaatttttctttttgttacagttacttttggtgttttcattataaagtttttgccagggcctatgtccagaatggttttatctagtttatcttccaaggcttttataattttaggttttaaacttamgtctttaattcatcttaagtttacgtttgtatattgtgtaaggtaggaaggaaggaaggaaggggtccagtttccatcttctgcatatggctagccagttatcccaacaacatttattaaataggaagtcctttcctcattgcttacttttgccaactttgtggaagatcaaatggttgtaagtgtgtggccttatttctaagctctctattgtgttctactggcctatctgcctgtctttgtaccagtaccatgctgttttggttattataaccttatagtatagtttgaagttgggagatgtgatgcctccagctttgttttgttctttgtttttgttttttggcttaggattgctttggctatttgggctcttttgtggactcatatgaaatttagtatagttttttcgaattatgtgaagaatgtcattggtagtttgatatgaatagcattaaattataaattgcttttggcagtatggccattttaacaataatgaatctt

SEQ ID NO: 889561 - DNA, 663 bp, Homo sapiens
gttctttagcttaattaggtcccatttgtcaatttttctttttgttacagttacttttggtgttttcattataaagtttttgccagggcctatgtccagaatggttttatctagtttatcttccaaggcttttataattttaggttttaaacttacgtctttaattcatcttaagtttacrtttgtatattgtgtaaggtaggaaggaaggaaggaaggggtccagtttccatcttctgcatatggctagccagttatcccaacaacatttattaaataggaagtcctttcctcattgcttacttttgccaactttgtggaagatcaaatggttgtaagtgtgtggccttatttctaagctctctattgtgttctactggcctatctgcctgtctttgtaccagtaccatgctgttttggttattataaccttatagtatagtttgaagttgggagatgtgatgcctccagctttgttttgttctttgtttttgttttttggcttaggattgctttggctatttgggctcttttgtggactcatatgaaatttagtatagttttttcgaattatgtgaagaatgtcattggtagtttgatatgaatagcattaaattataaattgcttttggcagtatggccattttaacaataatgaatctt

SEQ ID NO: 889562 - DNA, 663 bp, Homo sapiens
gttctttagcttaattaggtcccatttgtcaatttttctttttgttacagttacttttggtgttttcattataaagtttttgccagggcctatgtccagaatggttttatctagtttatcttccaaggcttttataattttaggttttaaacttacgtctttaattcatcttaagtttacgtttgtatattgtgtaaggtaggaaggaaggaaggaaggggtccagtttccatcttctgcatatggctagccagttatcccaacaacatttattaaataggaagtcctttcctcattgcttacttttgccaactttgtggaagatcaaatggttgtaagtgtgtggccttatttctaagctctctattgtgttctactggcctatctgcctgtctttgtaccagtaccatgctgttttggttattataaccttatagtatagtttgaagttgggwgatgtgatgcctccagctttgttttgttctttgtttttgttttttggcttaggattgctttggctatttgggctcttttgtggactcatatgaaatttagtatagttttttcgaattatgtgaagaatgtcattggtagtttgatatgaatagcattaaattataaattgcttttggcagtatggccattttaacaataatgaatctt

SEQ ID NO: 889563 - DNA, 545 bp, Homo sapiens
ataaaaactctcatatgatataatatattcataccataatctagttttctagaaaatgttaagtaaggtagctgctctctgtctccaaccctggaatatgtgttcctcttcttgcttcttatatccactttaattgttaaagtaaaactgtgttatattttcctgtttacttctctagaattcgatttaactataaattattttaggacacagaatggttctcatttattctcatttatccttataaccatatttgttaccaaaacctgaagcaaaagttcacaggtgctacacagatttctgtggaaagtaaaaatgtgactcacctgacattttccatacatttgataaactaaaccatgtcaatctatgaaataagaataccagaacttttttaaattataaratctatagaagagaaaaatagtacttaataagtgatatattaaatgcattagattttaagatggtgattaacattatattaaaatggaaatactaacttttgaaatcagttcttaaaatagaactgatctattcaaagg

SEQ ID NO: 889564 - DNA, 622 bp, Homo sapiens
tgttataacataatatatgttataacatagcaatgaaaactcttttcctcattgttctttgttagaatagagtagctgttctgcaaaagttcttaggggttcagatattatttgaaaaggagtcacatatgatagagccgtctgaggaatttggaagatctagagatgatacttccaagatcaagatcttacatgaagtgcaattatttcagcawcatatcagttgcacagtcagagttttaaaataatattgtattacaagactttttaaaaagttttactttaagttctatacagcatgtgcaggtttgttacataggaatgcatgtgccatggtggcttgctgcatctatcaacccatagaagacaattttaatcacattttttggcatacatgtattatggaaatattcaaactaatttgtaaagttacttgaaatatgtgtatttgtatcaccttgtggtagatggctctactccatatataacatgtttctccaagtactagcattgggattgcaatgggattggtaaggagggactagtggaaagagaccaaccacgcctataacccaaaatctagtaaacttggggtgttcaggaaaaaaagcaatcaattagc

SEQ ID NO: 889565 - DNA, 622 bp, Homo sapiens
tgttataacataatatatgttataacatagcaatgaaaactcttttcctcattgttctttgttagaatagagtagctgttctgcaaaagttcttaggggttcagatattatttgaaaaggagtcacatatgatagagccgtctgaggaatttggaagatctagagatgatacttccaagatcaagatcttacatgaagtgcaattatttcagcatcatatcagttgcacagtcagagttttaaaataatattgtattacaagactttttaaaaagttttactttaagttctatacarcatgtgcaggtttgttacataggaatgcatgtgccatggtggcttgctgcatctatcaacccatagaagacaattttaatcacattttttggcatacatgtattatggaaatattcaaactaatttgtaaagttacttgaaatatgtgtatttgtatcaccttgtggtagatggctctactccatatataacatgtttctccaagtactagcattgggattgcaatgggattggtaaggagggactagtggaaagagaccaaccacgcctataacccaaaatctagtaaacttggggtgttcaggaaaaaaagcaatcaattagc

SEQ ID NO: 889566 - DNA, 576 bp, Homo sapiens
aaaatacagcggaagcttcttggtcttcaatgtacgcattcaatatccatgaggacataatcttacttgtttcctgtgttttaccacagaaatttttgaaagagttgtcaccattcactttctccatatattctaaaggagcttgtgtcagggtcaaaaataaagtatccggtttctaaatctaaagcctactctttagtctttatcatattagatatcacaagctgcctttgacagaatagaccgtttattgtggcttaaaatacactgaagtattgctgtttctgactcaatatcttacaatggtttttagaaagatatctctttctgaatttagttgaattttccccaaggcctagagaagactcagcaggcagaattgatgaccttttcgtccaatgtaaagggctcagttaggtcargttcattgtgtctggtttccttatcctttaagatgatttcgctcccaggaatttcctcagtctcttagcagaatttttgtggttcatcccacctagtgcattggagagctccgcatcatagtttaggctaagcttgtactaggaatgtactggg

SEQ ID NO: 889567 - DNA, 631 bp, Homo sapiens
aatcttttcccctttttaaatatacttatgtattaataatgttacaatctatttataggagacattattaaaacacagccaagagaactcaaaacctaatgatctgattgataaaacgtatgtataaagaacagtaatctaaccacctgtgttagtctgatagggctgccataacaaaatacyatggactggatagcttaaaaacagaaattgttttctcacatttctttaggccagaagttgaagatcaaggtttcaacagggttgatgtctcatgaggactctcttcttggctttcagacatttaccttctcaccgtgtccccacatggcctttcctctgtgcacctagaaagagagagagagagagaactcatttattgctggtgagaatgcaaaataattgtcactttgggagacaatctgacagtttcttataaaactaagcatactgttaacatacaagccagcaatcatgctatttggtctgtacctagaggagctgaaagcttttgtctgcacaaaagcctacatgctgataattatagctttgttcataatccccactacttggttgaagcaaccaagatgtccttcagtaggcatatgaataaacaaactgtggtgcatcc

SEQ ID NO: 889568 - DNA, 624 bp, Homo sapiens
atttctgtattacttcctgtattcctgcctctaaatatgttctagtttgtcttatcctgaaagttttcttctttagatccttaaatttatctgtttcttttctttctctgaaaacattttgaaatgtagacatatcttgctttcactgggtcattatctactcacttttcaaactcttttttttttttttttttttgtgagatagagtctcgccctgtctcccaggctagagtgcaatggcgcgctctctgcttactgcaaactccgcctcccgggttcctgccattctcctgtctcagcctcccaagtaactgggactacagacgcccgccaccgcgcctggctaatttttttgtattttttagtagagacggggtttcaccgtgttagccaggatggtctcgatcttttgacctcgtgacccrcccgcctcagcctctcagagtgctgggattacaggagtgagccaccgcgcctgaccattacccatgctcttaatcatgatttgtgtttcctcttggccaaatcctgtgttggcctatctcacttataataagacggggactgctgtcctccagaaaatgttaactaaaagtactgaattcttcatggcatatgctgaat

SEQ ID NO: 889569 - DNA, 640 bp, Homo sapiens
gtaaatcctgatttgggacagaattccaatatttatatgaaacatgaaaatgtggatcatttctctgttgttatgatatttatccaatggctctgttttgttccacttagggaagcctatttaattaaaaaaatacgtgctgatttgtgcatgattttgtcaggaagttatttgttgttacggctttgtatttttgctgttatgtatgtactctctcggtacctggctacacaaaattaatgctcctaacttatccagatcactgtgtcttggtaagcttctcccatcctgtttctcttactcttctgtgcccatcttcatatatgaactaaaacaatcctctaatttgcttaatgtctttaaagtggagtatgtagctgaatcaaacagaatatttgcaaaacttgtcactcatatwttgagtttctactttagtgtcttagtgctttctcgatatgggagaattcatgtcctccattcagaagtatgcactaagtaagaggtatcatgtctggttcttgattaggtactaatcttgaaatattatcctacaataggttagagcacgtatatctcctgataatatattgaatatgatagatttaaataattggttaactaaatactaaagcaaattgct

SEQ ID NO: 889570 - DNA, 649 bp, Homo sapiens; identical to SEQ ID NO: 883152

SEQ ID NO: 889571 - DNA, 649 bp, Homo sapiens; identical to SEQ ID NO: 883153

SEQ ID NO: 889572 - DNA, 632 bp, Homo sapiens
caccataacaggtatcattatgtagtgtttcctatattctgatagctattgaattattattttattatacattcttgtaagtatacgtgtagacatgaaaataaacatgcacgacctatatgacatgctatgttcagtgatgacagctgtcttcccatttttttgatgtgttaaatgcaagaggtttatttctttttaaaaagttgttgtgggtacatagtagacatatatacttatggagttcatgagatattttgatacaggaatggaattcataataatcaygttatgaaagatgggttatccatcttgtcaatatctattctttgtgttacacacaattcagttatactgttttagttattttgaaatgtacaattaaatttttactgactataggcaccctattgtgctatcaaacactaggccatattcattcatttggactattttttgtacctgttactaagcctttttccaactccccactacctttctcagcctctggtagccatccttctactctctatctgcatgtgttcagttgtttggatttttagatcccataaatacataagaacatatgacgtttgtctttttgtgccaggcttatattacttaacataatgacc

SEQ ID NO: 889573 - DNA, 550 bp, Homo sapiens
gttgtgggagggacccagtgggagataattgaattatcggtcagtttcctctatactgttctcatggtagtgaataagtctcatgagatctaatggtcgggaaaccccttttgctttgctctcattcttctcttgtctgccaccattttgagacgtgcttttcacctttcaccatgattgtgaggtctccccagcaatgtggarctgtaagtccattaaatctctttcttttgtaaattgcccagtctagcatatgtctttatcagcactgtgaaaatggactagaacatcagactccaagttcttcagcttttggactcttggacttacaccagtggtttgccaggggctgtcaggccattgaccacagactgaaggctgcattgctggcttccctacttttgagattttaggactcggactgatccaccactgacttctttgctcctcaacttgtagatggcctatcattaggctttaccttgtgagtgtgtgagtcaattctctttaataaactcctttcatttataaatctctcttattagttctg

SEQ ID NO: 889574 - DNA, 633 bp, Homo sapiens
ggatgaatgaatttagaaaatgtggtgcatatgcataatggaatagtattcagcctttaaaaagaaggaaatcctgccatttgaaacaatgtagatgaacctgaggacactatgttaagtgaaataagccaggcacagaaagaaaaatcttgtatggtctcacttacatttgaaagattaaaaagttgaacttatagaagcagagttagaagagtggttaggagaggctggggatggagtgggttagggagatgttcatagataatacaaaatttccacttaatacgaagaataagtttaagagatctattatacaacatgattactctagttaataataatatattgcagcttgaaaatgactaagggagaatttgtgttctcaccacaaaaaataagtgtatgagataaygcatttgttaactagattaatttagccattctgcaatgtatacattttcaaaacataatgttgtacatgataaatatgtataatattttcaattaaataaataaatacaatgttttaaaaatgtaacatgtacagtttaagggttaggtcataaaggaaaataatttaactcctaccttgacttccctgccttctttctgtctgcaatggagatgtatttt

SEQ ID NO: 889575 - DNA, 435 bp, Homo sapiens
ctgttgcctttttcctaaaccatccatgacccctcctcccatcctgtgcctgtaaaaactggcagagaggaaggtagctggacattgaagcctacggttggatgtcagagagaagcggcttgactctagaaagacagcttggtggcataacttcgragaagaatctggtcagagatggtcggaattcaggggaagatgatcatcctgccccatccccttttcagctccccttcccattgaaagccacttttatcagccataaaatcacctgaatttaccatccttcaattcatgcaacctaatttctcttggactccggacaagagctcgggagacccaagtatggatacaaaaggcagagggcccattgagctgttaacatttaagcagtccacggatggcagagcaaaaaaagcactgtaacactccctctgg

SEQ ID NO: 889576 - DNA, 553 bp, Homo sapiens
gggagggtcatccttttggtttcattcagaccttcagcagattgaatgaggcccacccacatcagagagagcaagtgagctgctttactcagtctactgacttaaatgttaatgtcacccaaaaacacctccacagcaatacccagaatatgtatcaccaaatacctgggcacatattggccaagtcaagttgctctataaaattaacattacagtcccctaagactaactttatagatttttgaaatttgtattttcttttggttattaactattttttaaccyttaaatgtgttaattacggacctttatgttagacatattaatatcattaaatcatttcacatcttcactctcatccaactcatttaaaattatatttacagagtttagtttttaaagatctttaagatattttaatgatacatttaaaattcagacattgtttttataacttcatttttttctagttaaaatctaggatacttgttcaaatcattctaaaattttggtccccataagtcactaatttcaggttatagtgatctcattt

SEQ ID NO: 889577 - DNA, 601 bp, Homo sapiens
cagaagaaacttctaagcagcaaagcattcaagacgtgacagagtataaaagtttagaaaatttgcagccagtctatgcagtgggaaagaaagctcattttctctggagaaactaaaatctgctgcagaaattcacataattaattaggacccaaatgctaatcaccaagacaatagggaaaatatctctagggcatgtcagaaaccttgcaggcagctccttccatcacaggcccggaggtctaagaggtaaaaatagtttccttcctggaccatgccaagggctcccagctctgtgcagtctcaagacttggttccctgtgtcccagctacttcagctccagccatggctaaaagaggcaaaagtacagctcagggcattactttagaggatgcaagccccaaaacatggcagcttccatgtgatgttgagcctgtggrtgcattgaagtcaagaattgaggtttgaaaacaccacctacatttcagaggatgtatggaaatgcctggatgtccaggcagaaggttgctgcaggggtggagccctcatggagactctctgctagggcagtgcagaagggaaatgtggggttggaacccc

SEQ ID NO: 889578 - DNA, 519 bp, Homo sapiens
taatctaattaaaaatggacaaaagatcagaatagaaatttcttcaaaaaaatgttaaatagccaataatcacattaaaaattgctcaacataattagtcaaatgggaaaatgcaacacgaaactgcagtgagatgatgcttcatgcctcctaagatggctatgatgaaagacatctaacaaacattgtcaaggatgtgaaaaaatgttatcctcataaattcctggtggtaaagaagygcagctgttttagaaaacattctggcagttcctcaaagggttaaacataaacttaccatatgacctagtaattccacttctaggtaaatctaagagatataaaaacatttgtccattcaaaaacttctacattaatcttcatagtaacactattcttaatagccaaaaggttgagacaacctcagttttcattaacaatggataaataaaatgtagtatattcatacaataggataacattaatataagaaataaagtattgaagtatgctccaacatgg

SEQ ID NO: 889579 - DNA, 625 bp, Homo sapiens
cacaccttaattttgttcaggtcagctctgattttggttttttcttttcttctgctagctttggggttggtttgctcttgtattttttgttccctttagtatgatgttaggttgttaatttgagacctgtaactgtatggttttgggagatcttcttgatatcaactgctatttttattttaatgtggtcaaagaatatggttggtataattttgattttttggaatttttgagacgtgccttgataatctgtctaacactgtctgcgaggtgttgaaatctcccacttttatcatgttggttgtctaaatctatttgtaggtctctaagaactgtttttaaatgtgagtgctccaatactgggtgtgtatatatttaggatagttaggacttcttgttgagttgaaacctttatygttatgtaatacttttctttttcatttttgattgttgttggtttaaagtctgtttatctgatcctaggtatcaagccttgctctttttagttttccatttgcttcttatttcttttcatccctttactttgagcctatgagtgtcactgcatgtgagatagatctcttgaagacagcatacaattgagtattgattttttattcaactt

SEQ ID NO: 889580 - DNA, 588 bp, Homo sapiens
atgtataaatttaatgtgtgtgaactaaaacacaatgtaagaaattttgccctcttcctgtggctgcattttgaattttatctggaaattttttgagaatgttttgcatgctctgtgtgtcaggttttaggtagtcttttgtccttgttaagatctggtactccactttccctcattttaaataactttcacttgactttcatttccatgccaataagttcattctagtaataaaattttattgtcactctttccaagtttttattttcaccgttttatgaatactatcaggagacaagaaagagctttacccttatataccaatgtgccactcaaatttattttctraagttaatcaaaaagttttggagaatttattttcccctatgattatctaaatgtgtcaattcacataacatatagatattccaaaaattcagcaccacagaagaccacattaacaccattgtaatattttaattattggactgagtggatcttagtctttttaaatgaaaagaggattccaccctctctaccccttaccctggctcaatatctctcacataatagatgcaggaaaataat

SEQ ID NO: 889581 - DNA, 761 bp, Homo sapiens
agtaggctccttaatattatatacagtactgaactgtgattaagatggatattccggtttttcaaaatttatatttagttggtatttctaacagaaagtgattcaaacatgtacatataatgtatgcttgtgcaataccattaggaaacctaaaaagagtattaataataaagttataaaatcacatctgacatttatcaaaatttttctgagagaaattacatggtttgaaatggaaaagaaaatgagaagggagattatgaggaaaaggattcttccttgattttcctccaaagagatgatgaaaacaaagaatgaatggtcatggctcamgaaaattaactttacagcagaaaccatcatttatacttgcccccaaggctgttctgtaggttaaacccatttttttttaagattttctttaacaaactattcttaatcattttgccacaattgtggaaatgactaatttttctgtcttaagtggaaaaactatcagcactattacctgactacattttaaaacttaacagcttttatgaatcagagaagtgaacaactggtacttccctgaattaatattatagttttacatttttttaaaaaactctctcacagttgccagcttcattactgaaaatcaatgagttttcatttttttataggaatggtttatctataaactataaaactacccagataaaaagaattttttttgtccttacagagatcttagtgtttttgtatcttggccaaaactg

SEQ ID NO: 889582 - DNA, 761 bp, Homo sapiens
agtaggctccttaatattatatacagtactgaactgtgattaagatggatattccggtttttcaaaatttatatttagttggtatttctaacagaaagtgattcaaacatgtacatataatgtatgcttgtgcaataccattaggaaacctaaaaagagtattaataataaagttataaaatcacatctgacatttatcaaaatttttctgagagaaattacatggtttgaaatggaaaagaaaatgagaagggagattatgaggaaaaggattcttccttgattttcctccaaagagatgatgaaaacaaagaatgaatggtcatggctcacgaaaattaactttacagcagaaaccatcatttatacttgcccccaaggctgttctgtaggttaaacccatttttttttaagattttctttaacaaactattcttaatcattttgccacaattgtggaaatgactaatttttctgtcttaagtggaaaaactatcagcactattacctgactacattttaaaacttaacagcttttatgaatcagagaagtgaacaactggtacttccctgaattaataytatagttttacatttttttaaaaaactctctcacagttgccagcttcattactgaaaatcaatgagttttcatttttttataggaatggtttatctataaactataaaactacccagataaaaagaattttttttgtccttacagagatcttagtgtttttgtatcttggccaaaactg

SEQ ID NO: 889583 - DNA, 527 bp, Homo sapiens
atgttctggcttcatgtgaaacaagttttgcttttactgggtgtttctcttcatgtggcccagggcaaggtattgcaactatttcatgctgaactttaaaactcaacggtttgcggccgggagtggtggctcacgcctgtaatctcaacactttgggaggccgaggagggcggaatacgaggtcaggagattgagaccttcctggctaacatggtgaaaccccgtctctactaaaaataaaaaaaaattagctgggcgtggtggcgggtgcctgtarttccagctactcgggaggctgaggcaggagaatggcatgaacccgggaggcagagcttgcatctcgccactgcactccagcctgggcgacagaccgagactccgtctcaaaaaaaaaaaaaaaaaaaaaaccaaaaaacacgcaactgtttccaagaggtttcttttttgacctcagttcttcagttgctactggagtcatgaaactctcatgtcacttctttaatgtaggtttgacttcggtctgtcat

SEQ ID NO: 889584 - DNA, 682 bp, Homo sapiens
ccttttcttcataaaatgttcccttttaaattgttcaagaagccgcaaagcaaattgaatacttaatatacaccctgatttatttatacttttttaaaagctctttatatttaaggataatcctccttttataacctgtggtctcttatttttaatacataattttgatcacttgtttttaaaaaatgccaaacttttaaaacatataatctcttaacctgattataataaaaaaatagctttgatagcttggtctggttattagaaatttaaactgtgcttttgtttttttcatgccatttccctttgacctaatttttgacgtgtatgcaaatactcaagacctataaaacacatacgtcttgagagtcagtagctgcctactccaagtgggaaaagactttaggaaactgtttcaataatcacattcatggagtatagtgacacagaaaccaagtctcactaccttttcatgtgttctagttctttccaaagggatattttgtaaaactacataaagggcaacttatatgactastatttccatcatcgaagaggatatgataatctcgaatatgaggtcagaatcctcccccagtcttcttctgatcacagaagtggtaaaaggagataaacacacaggacacttcatcagtagccaggtgctattgtctcaatactt

SEQ ID NO: 889585 - DNA, 549 bp, Homo sapiens
gacctggtaggaggtgtttggatcatggggacagtctcccccatgctgttcttatgatagtgattgagttctcatgagatctgatggttttataaggggctcttcccccttcactcactctctctcctgccaccatataagacgtgcctgctaccccttcctccatgattttaagtttcctgaggcctccccagccatgcaaaactgtgagtcaattaaccctcttttctttataaattacgcagtcccaggcagttctttatagtagtrtaaaaacagactaatatagagaaatttgtaccaggagtggggcactgctataaagatacctgaaaatgtggaagcgactttggaactgggtaataggcagaggttgggaacagtttgagagaactcattgggaaatggagcaaaggttgctcttgctacactttagcaaaaacacttgcagcattttgctccggccctagacatctgtggaactttgaaattgagagagatgatctgaaattggaacttatacttaaaagggaaacagagcataaaagt

SEQ ID NO: 889586 - DNA, 632 bp, Homo sapiens
gcagaagaatgaaactagacccctatctctcaccatatacaaaagttaattcaaggtcgattaaatactttaatggaagatcagaaactataaaaatcctagaaaaaaatcaagaaaaaacttctccggacattgccttaggcaaagaatttataactaagccttcaaaagcaaatgcaagaaaaataaacaaaagaaatttaattaaactaaaaggattctgcacaacaaaagtactaattaacagagtaaataaatgagcaccctacagaatgcgagaaaaaatttgygaattatacctctgatgaatgactaatatccaacaactcaataccaactcaacaagaaaaaaacaaataaccccattaaaaaatggacaaaggaaatgaacagacatttctcaaaagaagacatacaggcagtcaacaaacatatgaaaatataatcagcattactaatcatcagataaatgcaaattaaaaccatagtaagataccatcttacagcagtaagaatggctattattaaaagttaaaaaaaaacagatattggcatggatgcagagaaaaggtaatgcttatacacagttatgggaatgtaaattagtaaaacctcaatggaaaacagtatgg

SEQ ID NO: 889587 - DNA, 578 bp, Homo sapiens
ctgctttaccattggcagctgattagattgtgcccactagattaagggtggatctgccttccccagcccactgactcaaatgctaatctcttttggcaacaccttcacagacacactcaggatcaatactttgtatctttcaatacaatcaagttgaccctcagtattaaccatcacaacctgtttgcaagttctgtatttttccatttctgcaaatttaggctctgcttgaccacaggccccaattcccagtgtttaagcagagaaatgctaggtgacacagagaggtctattgagttacctgttcataacaactgtaccttctctcgtgagattattatgakgattgagtgcaataatacctgtaaaggccaaagaaaaggacttaacccagagcaactattcagtgggtgctagctgctattcttagaatactgaaaatgttgacttcatgcttaaatgacatcaatttggctcatgtgatgttcttagctcattcagaacgttgtaaacaattacccattttcttttggttctgcatatagctagaatttttttttatttcattcttgaagtcg

SEQ ID NO: 889588 - DNA, 570 bp, Homo sapiens
tgggctgtttatcatactgctctgagttgacaaggtcatgcagaattttcgtgtgaagagagactgtaacctcaaggtccaaattccctaggctgtgttggaggtacactggtatgagaaagtgataacagagcaggctgggctttttatcktccccagatcctctggaacatctctttgaaggcctttttacctaggtgcaattttgtcccccttccattaaagattactcaattatctcaatagcttctactagggataagtgaatttacctcagccttctaaaaggaaaccagactcctacaagttgctaaaatacacttgctaacccatgaccaggtcacaaataaacttgcttataaaatttatgtggattcttcgcttcacgtgtcgctcctctactccactttgagccttcttctactaacgtgttttctttttttaataatgaacatctgtgacagcatctttgccaaaataaataaaattaagaagatgattctgtgggttatgctaaacaattttttaaacaggttcagatttcttctgaacggagtacgaaataaatgt

SEQ ID NO: 889589 - DNA, 676 bp, Homo sapiens
tttgcctttagtcattaaactttttcttttgactccatcaacttccagatggtgtatttatttaaaaatcaaaataagcactgaagtatgactaggaacacaaaatccagtttttttcattttagaaaacataatgccccaaattactgctttttcagagaaataagaatccactaagccgatacatttactttgaaaaaccaacaacctcagtcaataatttaaataatttcaggcygggctcggtggctcacacctgtaatcccagcattttgggaggagcaggcgatcggatcacgaggtcgggagatcgagaccatcctggctaacaaggtgaaaaaaaaaatagccaggcgcattggcgggcgcctgtagtcccagctactcgggaggctgagcttgcagtgagccgagatcgcgccactgcactccagcctgggcgacagagcaagactctgtctcaaaaaaaattaataaataaaaataaatttaaaaaaataataataatttcaataatttcaaaagatgatttaattatatcaacagctttgggaatgttaagaacatctacatttgttgctgttatttattattatttggttttgttgtgttaaagcaaactaatatgccctgagaaagagtctgtatttctatatttgagtccttgtggacaaac

SEQ ID NO: 889590 - DNA, 664 bp, Homo sapiens
tatttgatacttactccagtttaaattggatgttaaaaaaatactcaaagattagaaaatataataaagtaacatgccctggactgttctttagcaagtactgctgctttaaaataaaatgtaccaattttaaatgcatagttcaaagtcttaactaatgtatacagtcatgcagcctacactgtaacatgatacagcatatccctatcactccaaaaagttcttacatggccctttgcaatccctcccctctctcatactttggtccctgaaaagcactgccctatattttaaaatcctggtttttccctttctagaattacaaagaaatgaaattattcagtatgtagtcttttacgctgcctcctttaacttagtataattctttataaactcatttatgttgytgcatgtattaatatttgatttcttcatgaggcatatatgcaaacattgtactgggccaattgtatattcctgtatttttttgtttgtttgttttggttttggggtctattctgttttgtttttgagacagagtcttgctctgtccccaagttggagtgcagtggcgcaatctcggctgattgcaacctctgcctcccgggttcaagcaattttcctgcctcagcctccaagtaggtgaaactacaggcccacctca

SEQ ID NO: 889591 - DNA, 564 bp, Homo sapiens
tcacgttaaagtgactaacagaatgtttaaatttcttcaacgtaaatgatagcttatggatagcaactattaatgggcattttgtttttttgtttctgggtttttgttgttgtttttaattaattaattttattttatcttwtttctttttagaagcaccgtctcacttgtcacacaagctggagagcagtggcatgatcatagattactgcaatctagacctcctggcctcaagctattcttccacttcagcctcccaaagtgctaggattacaggcatgagccaccacacctggccaaatatttagctttttaaaagaaaagagttggtcattatttgtaaagaaatctgcccattcccttagtaaaatcagccaggtcagttaccggttcagggattaaaataaataatttgtagttgtgttataatagacactattttccagggtcggcaatggtaaacaaccattagaaacagaaacttcgagcaccctgccatagtgaaatgtggccctctgtggtaaattaaagatggccacaaatattttcctatgttttatattg

SEQ ID NO: 889592 - DNA, 589 bp, Homo sapiens
atctaatttttatcttgattgaattcagcattaataaatttgaatttttttcactaaaatattatttggcctatgaatatcctggcaaaaaccaaccacataagactaggtttttatcaatttataaacaaataggttgattttgaaaaagttatctttttaagtatctacaaggaatttagaaaatgcaaaatatcttataaatttgaaggttgatatagtagattcactttaactctttctacaggaaactttytcagaatatgaatcaataaaataaataaaaagtgtttacttctgtatcttatgtagaaattattactaaggtaggaatgaatcctctcttaatagtccatacaatcactttattcaatcacttatatatttaccaagaaaactacaaatcttatactttgtatacaggaaagactgttaaagtatgagatatacccatattgtaatctatttaagaaaacaaaactaaattatgaaaaaataatcaactttgtgatattgccctatgtaaaatttcttctacttcacagtctatatactacagcttctctataaaaaactctctcagctcttc

SEQ ID NO: 889593 - DNA, 598 bp, Homo sapiens
ttcagtgtgcttataaaaaattgaggaaagtacaatcattgagtgataataattttgcctagaagaggcatttagaaccatttatatttataatgcagctaacattttgactggtgtattaatatcatccagagaaacagaaacayatatacacacacacatatatatacagatgtgtatgtatattacatacacatgtttatatatacacagctgtatatatacatatatacatgtgtgtatgtatatgtatatatataggcacatatagcctattgataattctggagagagaaagagagagagagattttaaggaattagattacaaaattgtgagagctagcaattccaaaatctgaaggataggctagcacgctgaagacccaggtaagagttgatgctgcagtttgagtttgaaggcagttttctgttaaggccttcaactaattggatgaggcctaccaacaaaatggaatgtaatctgctttggaatgtaatggaatgtaattgctcaaactcagctgttttaaatgttaatcttatctaaaaaataccttcataatacatgcagaatcatgtttgaccaaatatctggg

SEQ ID NO: 889594 - DNA, 598 bp, Homo sapiens
ttcagtgtgcttataaaaaattgaggaaagtacaatcattgagtgataataattttgcctagaagaggcatttagaaccatttatatttataatgcagctaacattttgactggtgtattaatatcatccagagaaacagaaacacatatacacacacacatatatatacagatgtgtatgtatattayatacacatgtttatatatacacagctgtatatatacatatatacatgtgtgtatgtatatgtatatatataggcacatatagcctattgataattctggagagagaaagagagagagagattttaaggaattagattacaaaattgtgagagctagcaattccaaaatctgaaggataggctagcacgctgaagacccaggtaagagttgatgctgcagtttgagtttgaaggcagttttctgttaaggccttcaactaattggatgaggcctaccaacaaaatggaatgtaatctgctttggaatgtaatggaatgtaattgctcaaactcagctgttttaaatgttaatcttatctaaaaaataccttcataatacatgcagaatcatgtttgaccaaatatctggg

SEQ ID NO: 889595 - DNA, 693 bp, Homo sapiens
cctatcacatcaccaggctgcaaactttccaagcttttgttctctgcttcttcttaaatgttttgcccctaggaaatttcttctgccagataccctaaatcatctttctcaaattcaaagctacacagatatctagggcaggggcaaaatgccaccaatctctttgttaagcatagcaagagtracctttactccagttcccaagaagttcctcatctccatctgagaccacctcagcctggactttattgtccaaatcactaacagcattttgatcaaagccattcaccaagtctctaggaagtttgaaactttcccacatctttctgtcttatgaacccttcaagtccctaagaagtttcaaactttaccatattttcctgtgtttttgtgagtcctctaaactgttccaacctctgcctgttacctagctccaaagttgcttccacatttttggttatctttacagaagcaccccactcctgataccaacttactacattaatttgttctcatgctgctatgaagaaatacctgaggctggatgacttataaagaaaagaggtttaattgacttacagttctgcatggcttggaggtctcaggaaacttacaatcatggaggaagacacctcttcacagggtggcaggagagaaaaatgagttcaagcaagggaaataccaggtgtttat

SEQ ID NO: 889596 - DNA, 628 bp, Homo sapiens
atatctcagttcaagtaggcagaaagagaatgaatcctctctctttcatctttttgctctattcaattatcaagggactaaatgttacccacccacaatggggaagccaactcagttcattcagtctactgattaaaatgctaatctcttctataaacactcccatggacacacccagaaataatgtttaatcagctatctgggcatcctgtgatccagtcaagttaacaaaattaactttcacaaatactctaattgtcaatgtggcacttatattcctctccttacatacttaaatactatgatataaagccaatatatcttatgttacatgataagagaataggagacagaagaaaaccacrgtattatatacacaatatatacacaaccaaaaatgcatttataaaaaaatggggagatcatatttattacaatcaaaattatcattgctgtaactggtcatgtagtcatagctagtatttataactactttattcaagtatccattctgtattccctttgtcttcaggaagcacctcagctggtagtgtttttttgtcttttgtggttacccaattttttattcctgaagggctgtgatcactaacaaccttgtcttcattgg

SEQ ID NO: 889597 - DNA, 647 bp, Homo sapiens
gtaaaggaggatggaagaataattgatgcacaaatgattcttctgtcaataaagctatgattatatgctgtatgatactgtaatggtggatacatggcattaggtatttgtcaaaaccaacagaactttacagaagaaatagtaaaccttaatgtacgcaaatttraaaagaaacatatagtatgtctggagatccctgacaccatctaagcaaaaaaaaaatctaactgtatttcacatgtgtgacacaacctcactgaagttggtagaggaagaaaatgtgctaacctaagttactttatatacgatataaatgaattttatttgtctcatgaaccctgtactttagttgacaaaaatgtttttgttaagaggtaacttaggttacaagtgctctgctgaatgaattgattaatgccattatcttgagagtaggttagctacctaggaagtgagttcttgataaaaggattagttcagcactattcctatttctctgtcacatgcatacatgctgtcttgctcttctgccttccaccatgggataacacagaaggaaggtccttgttacatgtaggttcctcaaccttggatttcccagtctcgagaactgtaagaaataagtctctgttctttataaattaccc

SEQ ID NO: 889598 - DNA, 647 bp, Homo sapiens
gtaaaggaggatggaagaataattgatgcacaaatgattcttctgtcaataaagctatgattatatgctgtatgatactgtaatggtggatacatggcattaggtatttgtcaaaaccaacagaactttacagaagaaatagtaaaccttaatgtacgcaaatttaaaaagaaacatatagtatgtctggagatccctgacaccatctaagcaaaaaaaaaatctaactgtatttcacatgtgtgacacaacctcactgaagttggtagaggaagaaaatgtgctaacctaagttactttatatacgatataaatgaattttatttgtytcatgaaccctgtactttagttgacaaaaatgtttttgttaagaggtaacttaggttacaagtgctctgctgaatgaattgattaatgccattatcttgagagtaggttagctacctaggaagtgagttcttgataaaaggattagttcagcactattcctatttctctgtcacatgcatacatgctgtcttgctcttctgccttccaccatgggataacacagaaggaaggtccttgttacatgtaggttcctcaaccttggatttcccagtctcgagaactgtaagaaataagtctctgttctttataaattaccc

SEQ ID NO: 889599 - DNA, 647 bp, Homo sapiens
gtaaaggaggatggaagaataattgatgcacaaatgattcttctgtcaataaagctatgattatatgctgtatgatactgtaatggtggatacatggcattaggtatttgtcaaaaccaacagaactttacagaagaaatagtaaaccttaatgtacgcaaatttaaaaagaaacatatagtatgtctggagatccctgacaccatctaagcaaaaaaaaaatctaactgtatttcacatgtgtgacacaacctcactgaagttggtagaggaagaaaatgtgctaacctaagttactttatatacgatataaatgaattttatttgtctcatgaaccctgtactttagttgacaaaaatgtttttgttaagaggtaacttaggttacaagtgctytgctgaatgaattgattaatgccattatcttgagagtaggttagctacctaggaagtgagttcttgataaaaggattagttcagcactattcctatttctctgtcacatgcatacatgctgtcttgctcttctgccttccaccatgggataacacagaaggaaggtccttgttacatgtaggttcctcaaccttggatttcccagtctcgagaactgtaagaaataagtctctgttctttataaattaccc

SEQ ID NO: 889600 - DNA, 617 bp, Homo sapiens
tcactatgtcttttgtatacgtcttaccacagagctctgccattggcacagccaccatcttacactatttctttcagtcagggttggatttaggagatgacttttaagcaaccaaaccatgcagtggcacaccttttgccaagggaagtttttgggttttttttgtttttgtttttgtttttttaaratggagtctcactctgttgcccaggctggagtgcaccagcacaatctcagctcactgcaatctctgcctcccaggcaattctcctgcctcagcctcctgagtagctgggattacaggcgtgtgccaccacgcccggttaattttttttatttttagtagagatggggtttcaccatgttggtcaggctggtcttgaactcctgacctcaagtgatccacccccctcagcttcccaaagtgctgggattacaggcgtgagccacaacacctggccaggaactgttaatagcacaccatgtgccatgtagactacaatttcactatcagttcccattactgagtgcagatgctacatgcccatgggaccatttctggtgaactttttgatcattgaatggagggatccagtttgttcttctcatagagccaa

SEQ ID NO: 889601 - DNA, 617 bp, Homo sapiens
tcactatgtcttttgtatacgtcttaccacagagctctgccattggcacagccaccatcttacactatttctttcagtcagggttggatttaggagatgacttttaagcaaccaaaccatgcagtggcacaccttttgccaagggaagtttttgggttttttttgtttttgtttttgtttttttaaaatggagtctcactctgttgcccaggctggagtgcascagcacaatctcagctcactgcaatctctgcctcccaggcaattctcctgcctcagcctcctgagtagctgggattacaggcgtgtgccaccacgcccggttaattttttttatttttagtagagatggggtttcaccatgttggtcaggctggtcttgaactcctgacctcaagtgatccacccccctcagcttcccaaagtgctgggattacaggcgtgagccacaacacctggccaggaactgttaatagcacaccatgtgccatgtagactacaatttcactatcagttcccattactgagtgcagatgctacatgcccatgggaccatttctggtgaactttttgatcattgaatggagggatccagtttgttcttctcatagagccaa

SEQ ID NO: 889602 - DNA, 663 bp, Homo sapiens; identical to SEQ ID NO: 882987

SEQ ID NO: 889603 - DNA, 663 bp, Homo sapiens; identical to SEQ ID NO: 882988

SEQ ID NO: 889604 - DNA, 663 bp, Homo sapiens; identical to SEQ ID NO: 882989

SEQ ID NO: 889605 - DNA, 606 bp, Homo sapiens
gttctagttgcactgactgttgaaaactgacatctgagttggaaaggagagaaatgtttaaaatagagacatgttgaactcaccaaataaggagggaaagaagagagaagaagaagaaaagaaataagaatgtatgtttctgcaagttcaacaattaygtgtgttaacgcaggagcttaaagtaggagctctggagtacacagactcagagcaccatgaacatagttgggaggcacagcaggttaacagagatacggagtgaagagatagctggaggatgcatggcctataggatctattgcttggaagaagtcaggagggcacaagacaagctgagactgcagtgaaagacctgaattttccaccttgagaggatgagctatagtgaagtgccttcatttgcccaagccctcaaagctaactcagaagttaactccttaatacagttttctttaatgtccagattcaagacaccctttgctctttactcttccccagtacttttcctctgcatactcttataaatatggtagccatgaatctcattctgcaaacccaatttttttaactttaaaatttttaggctttaaatccagcattttaaaa

SEQ ID NO: 889606 - DNA, 580 bp, Homo sapiens
taaaaaacataaatatgtaagctccacacctgaacaactgaatcagaatttctgggcgtactattaaatctctacaggtaattctgataagcagccaaagttggaaaatatttaggcctgagtgatttctgtttgtttcagaatgtaaaacaaacaaacaaacaatctaatcactgactactgtttttcttgttcacttttaaaacattaagtagacatagtctgaattgaccacttgagtttctgccaaatttcacagcagacatattcttgcctgacatggtcaaaaaagttattttatgattcaaatcccttccaccccatcagacggatagtagaaygaacattaaccctgaaaacatcttcctctgagtcaaggtttctcgccattggcagtattgacattttgggttggataattctttactgtagggtctgtcctgtgcataataggataggtagaatccctgccctctacccacacaatgtgagtagcatacctcctatccccagttgtgacgactaaaaatgtctcccatcgtggctgactgccccatggagggcaaaatcaagggcaaaa

SEQ ID NO: 889607 - DNA, 585 bp, Homo sapiens
atcagggctctataaaaatacagcaaagagaggccatttcatttgaggaaatgttatatgtagatatttttaacttgagtctagaaaattttctagaagtataaatatgtagcttaaatatgtttcttaaagatcactggataactaaaactgatggcttgcctcacatccttgtyttaagattcacctgcttaatacccaggaactcctgaaatttaaatacttgattaaacattaagacacctgaaaattaaaagtttaatgtaatcatctgacctcaaattatgccaaaaataaaactgctccttttctaaaatgattaataaaaaagatggcaatgaaaaattgtaacacaaaaagcagatgggtatcgattcacttctcttccaaacaaagtctttgcaactcagctttctcattgtaaatgtagagttttacaaatccttacctacttttcaaatttaactggaaaataaattgaaatgatgtatgtgaaagtattaaaactatgagccatatcagtgcaatatgatgaagagttgaggtaatttgaaaatatttagcctggagaaaagaagactcaca

SEQ ID NO: 889608 - DNA, 667 bp, Homo sapiens
atataaatgtgcatttaattcatatttctacaaaactgatttgtatgaaaagttaaatctttttgaaaaaaccgttccccgagattctttagctctagatgtactaaaatttatattttgaaataatttatcagaaaataaattcattaaaagtataaattgtgttgtaccaataaataaattcccagataagcaagccagaaaaattatgcaatgaatcattatatcccaccaataaagttttataacatattctgttgtcaccaaaaatattactgtttgcatttataagtttatgtttactcatttattactattgcccttattgcatgttataaataaaatatttttacatgaaaaggctttatattaaggttttggtccagttttgctaaaatataaattccaaaaccctatgctgaattaagtgtgaatccactgttatgccaaccattcgaatcagaatcacctggaattcttattaaatatacaaatcccttggcctcaccccaaacctattctgtcaaasccccttgggaaggcagggctgcagggaaacatgagcatttgcctttataatgagctcccaaagttcctttaaccacacttcctttatttgctttttgaagaaagggcactgcgtgttaattttgcattttcccccaca

SEQ ID NO: 889609 - DNA, 646 bp, Homo sapiens
actctttttctattctcgaaattgtgagatcctctgacaaattctgctaacagttccaaggtttaaaactggggaagttagagacatgttattattattttttttaatttcaacttttattgtagacacagggagtacatgtgcaggtttgttacatgggtatattgcacccaggtattgagcatagtactcaatgggtagtttttcaacccacatctcccttgctccctcccctgtctagtggtccacagtgcctaatgttcccatgtgtatgtccatgtatgctcaataccataatcctaagtgaattaatgcaggaacaaagacatgtttttgtttttgtttgaatgctacatctggggctggctaggattgaraaaacactatgtcttgctgatatgtcagtcgcaacttcagcctcttttgtgtgtgtgtgtgtaaaaaagaaatcttttttatttatttattttcaaattataaattcatagggtacatatgcaggcttgttacatgggtgtattgcataatgctgggtttaggcttctagagaacccatcacccaaatagtgaacatagtatccaataggtagtttttcaattcttgtccccctttccaccctccccacttttggatttctcagatcta

SEQ ID NO: 889610 - DNA, 646 bp, Homo sapiens
actctttttctattctcgaaattgtgagatcctctgacaaattctgctaacagttccaaggtttaaaactggggaagttagagacatgttattattattttttttaatttcaacttttattgtagacacagggagtacatgtgcaggtttgttacatgggtatattgcacccaggtattgagcatagtactcaatgggtagtttttcaacccacatctcccttgctccctcccctgtctagtggtccacagtgcctaatgttcccatgtgtatgtccatgtatgctcaataccataatcctaagtgaattaatgcaggaacaaagacatgtttttgtttttgtttgaatgctacatctggggctggctaggattgaaaaracactatgtcttgctgatatgtcagtcgcaacttcagcctcttttgtgtgtgtgtgtgtaaaaaagaaatcttttttatttatttattttcaaattataaattcatagggtacatatgcaggcttgttacatgggtgtattgcataatgctgggtttaggcttctagagaacccatcacccaaatagtgaacatagtatccaataggtagtttttcaattcttgtccccctttccaccctccccacttttggatttctcagatcta

SEQ ID NO: 889611 - DNA, 630 bp, Homo sapiens
aatgtggattactcagttcttggaagtgtgttagcctgcactgcagagaccatcactctctctctcctctggttcccgtttgcccagctatcacccttaattgatttatgggggaccctgctcttctttatgaccttgcctctcatgttctctcaagttagtttctttttgtaaaactatacctttgctaatgaaataccaccaatggacgctataaggtactcttgaaacatgtaatacaacacattatatactgcccaaaggggtagtactaactacaaaggatgaaaaaactacgactactgtaaaagtttacttttaggaatgtgttttttctccttatgttttaatctcaaaaaaggtttacactccgatccctttatttcaatctacatattcttaaactgctaaatgtctagaaataattataatacaactaatgtttactcagtatttacyatggcacaacaccagaaaagctttttatgtgtcatctcattttattgctatggcaaacttacaggagagatattatcattatgccaatttcacagatgaggaagttaaaccatcattagactaattctaattttaaaagcctagtttgcacattatgcactatttatacat

SEQ ID NO: 889612 - DNA, 611 bp, Homo sapiens
aagatgagaaaaaacatgatattccaaagatcagaatgaaaccaaaagttaattttttaaagaataaataagatttatagacttataactagactaataaagaaaaaagggagaagatccaaataaacacaatcagaaatgacaaagggagcattaccattgatcccacaaaaatacaaaaaaaaaaaaaaccctcagagaccattaggaacacttttatgcacacaaactagaaaacctagaagaaatagataaattcctggaaacatacaacctcttaagataaaaccaggaagaaactgaatacctgaacagaccaataacaaattctgaaattgaatcagtaataaacagcctaccaagcaaaaaaaaaaaaaaaaaaagcccccggaccagaacgattcacagccaaattytaccagatgtatacagaagaactggcaccagtcctattgaaattataaaatattgaaagggagagactcctctctaactcattctatgaggccagaatcattttgataccaaaatctagcagagacaccacaaaaaaaaaaatttaggccaatgtgcctaatgaacatagatgcacaaaccctcaacaaaatgct

SEQ ID NO: 889613 - DNA, 662 bp, Homo sapiens
atattccctggcttctggtgcaccatctcagccatttttaccaagttcaactagcttggctaaaatgagaaaagtttaatgcacttaaaaaaaaaaagacgacgaagaagacaaagcaacagctttagtatgcacagtgaaagtgcctgccctgttgcctgcaaaattaatgaaaagaaaatatcactgaaattcactacacacwcagcctcctccatgaaactccctccaacccaatagtcgacaattatcctccccaacctggatagctaaaacacttattgtctcccctgccctttctgctgtgtgcatatcctgttcctgttgtgattcacagctttctgtataggtgtttcccttcccaactagaaagtaaagtactaaaaaatcctgggaaatcatgggttgtgcctcttatatccccagttcctagtatggccttgatcaggatccatatttaagcaaataagggtttaataatgatgaatttacccacacccccattgccaacgtgaataatggcctttgttctggtacccacgaatcttattttttttaactttggaaaaacagtaaagggtcagtatcttgtcccttaataccaaaaatgaaggcccttttgtcaagcagtttcactgtgcactggttactaccttgtctga

SEQ ID NO: 889614 - DNA, 554 bp, Homo sapiens
agcctcacaggacttagaggtgattgccagtatatgctcacaactttcttaaaaatcagaactgccagcacttggggaggctaaggcaggtggatcacctgaggtcaggagttcaagaccagcctgtccaacatggtgaaatcccatctctactaaaaacacaaaacttagctgagcatggtggtgcatgcctgtaatcccagctactcaggaggctgaggcaggagaatcgcttgaacctgggaggtggaggttgcagtgagcctagattgtgccattgcactccagcctgggtgacagagcaagactctgtctaaataaataaataaataaataaataaataaataaatatcagaagtaatccaataaatrtatcaccttcagtgaaaatcagctgaaacaccaaaccagacccataaaggctccaggtattggaattatcagataaagaacatagagtacctatgttaacatgtgtaaggaaatcagagaaagatcaaaacaaaactacaaaaaatgacaaggcagactttttaaaataaagaatttctag

SEQ ID NO: 889615 - DNA, 618 bp, Homo sapiens
gaatatgacaaaggagtagtgactactgtgagatttttaacatatattctacccttctaccatcatatttggtgtggaggaaggcaggggcaaatagcttgtcattttgattagcaggtcactggacaggtagaagtcatatctggtctatggaagcaaatgtacaactcccacagatcatggattttgagctgatgcagtttcttaatcaaaatctggaattttcctcttagtgatgggataggtgtggtttccaagtgggaagaaaggtgcaattttcccacccaaagaactaagagtgaatttggcagtcagagaaatggacggtagaagtatcaatgtctccactaaccttgctagtcacttgtagctgggaagcagctacccagttaagaagtgcatttatttactctgcttgcgttcagatgtgatcwtgtgattagttgtcaacaaagttaggtgaacagaaaagatgtgagccacttccaggcaaaggatgtaattaattggtttgcttttgtccattccacttccccttgtactcatggatgccaatatgatgaaaggtggagccacaatccagaagactgggactctgagtcacccatggaaaagagt

SEQ ID NO: 889616 - DNA, 613 bp, Homo sapiens
aaatttttttatatggtgagaaataaggatacagttttattcttctatgtgtggcttgccagttatcccagcaccatttattaaatggagcgtcccttctccaatttgtgttttcatatgctttgtcagagatcaattggttgtatgtatttggctttatttctccattatctattctgttccattgttctatgactctatttttataccagtaccattctgttttggtaactatagccttgtaatacaacttgaagtcagataatgtgatgcctccagatttgtacttattgcttttgattgttttggttattctggctcttttttcatttcatataaattttaggattttctaattctgtggctactaatgttggtattttgatgggaattgcattaaatctgtaaatygctttgggtagtatggccattttcacaacactgtttcttccaatccatgagcatggaatgccattccatctgtttgtgccatctgtgatttctttcagtatttttttttagctctcttcttagagatctttcacctgtttggctatttctaggtattttatactctctacagctgcagtaaaatttattgagttcttgattt

SEQ ID NO: 889617 - DNA, 623 bp, Homo sapiens
aaagaaacagagttggtgagaaaatataaccactgtcaagactttttttcaaaaaaaattaaaagctgagaaatgtgcccaataactggacagaaaagtagaaccaaggaaggactttttttaaaaacatggaagattccagaatgtttgtatatagaagaaaatgcccagaagagaggaaatattgatgatacaggaaaaagaaaatatcattttatatgaggagtgaagaaattaagatgtcaaggatgacgtctaagtttctggcttgtgtaccttaatgaatagtgaaaatctttaccaaatcagaaaatagtggaaaattacgtttataagaaagatcattagttcattttgtaacatatgttaagttgcaggagttgtgagttatctaaaagacacaaataggcagtatggctcctagaagataaattagatctaaagaaataaactttaagacaactggacatgataataayttaagccaagggtgaaggcaagatctccaaggtcctcttaattttttgtggttaaaggatctcctatatccatgaacttatcaccctaatttgtgaaataaagaaaccatattttaaggacctgttttatatgttctgtacagg

SEQ ID NO: 889618 - DNA, 520 bp, Homo sapiens
tgttgtgataatgtcagaattattcatacttggttaggtacataggtacaggtacaggaagccacatataagaatcacccaattatttactgaatttcattttttgttgttatatgtgatataaaacttatgtgaaagaaaasatagagattaatagaataaattatctttaagggcataatgctatagctgttttttaaagagcagctcaatctcctctcctctcttctccttttctcccttttctcaccttgcctcgcttctcccatgcttctcctctcctttcctgtcctctcagaaatggagaaatggagttgagtagctatgggtaattgcaagtggttcaatgaaatataggcccttggaagctcaaagttaacaaacggaagttaataatgcttgcaaagtgtcttgaggtgaaaatgtattttcctagtcacagatataaaaagtaaataactagtatgtgttcatctgtgaaatctttggcatttaaaataaatcctcattctctgggtgg

SEQ ID NO: 889619 - DNA, 586 bp, Homo sapiens
atacagccatgaaaaagaacaagattgcatcctttacagaaacgtggatggaactggaggctgttatcctcagcaaactaacacagaaaaccaaatgccacatgttctcactaataagtgggagctaaataatgagaaytcatggacagaaagagggaaatagcagatactgaggcctacttgagggtgggggctgggaagagggagaggttcagaagagaaaaaactatctgatactatgcttagtacctgggtaattaaatactctgtacaccaaacccctgagtcatgagtttacctatataacaaacctgcacatgtactcctgaacctaaaataaacattaaaatattttacaaaaataaaataaattaacaattaaaaaaagaaaaaaatgagacaataaatagatcctgggaaaaactgtccccagaagtgttcttttaaatttgcactacagatgtaatccaagttgagtaaaatagaaaagcatggatttgctgttcctgaaagtcattcatggttaattgccgaacactttcatctgcagtgtctgtggaagggtagaaccttaagtagtttttca

SEQ ID NO: 889620 - DNA, 598 bp, Homo sapiens
tggctctgtttttcttcatctttccccttctaccatgttatgatgcagcatgaaggccttcaccaagtgcaggtgccatgctcttcccagcctttagaactgtgagctgaataaacttcttttctttataaattactccatccgtcatatggtgttatagcaaaagagaatggactaagacatgggacaaagattcagtaggcttattaaattatctatgtaactacagagagctagygaaccaatttcagcttaggggaaacaggaaattcggaaacaggaagcccagagaaaaatggcactggactgtgactcctattgcctcaggttagatcatctgacttcacaaggtaaaagcttctgcacacaaacctgcttcagcccttttccaccaatgggacacccttgctatgtagagtagtgcaaaactctgtcatttacttgtcatgggacattgggtaagtcactctgtattagtccatcgttttgctataaagaaatacctgaggctgggtaatttataaagaaaagaggtttaattggcttatggttctgcatgctgtacaagcatggcactggcatcttctcacttctggtg

SEQ ID NO: 889621 - DNA, 598 bp, Homo sapiens
tggctctgtttttcttcatctttccccttctaccatgttatgatgcagcatgaaggccttcaccaagtgcaggtgccatgctcttcccagcctttagaactgtgagctgaataaacttcttttctttataaattactccatccgtcatatggtgttatagcaaaagagaatggactaagacatgggacaaagattcagtaggcttattaaattatctatgtaactacagagagctagcgaaccaatttcagcttaggggaaacaggaaattcggaaacaggaagcccagagaaaaatggcactggactgtgactcctrttgcctcaggttagatcatctgacttcacaaggtaaaagcttctgcacacaaacctgcttcagcccttttccaccaatgggacacccttgctatgtagagtagtgcaaaactctgtcatttacttgtcatgggacattgggtaagtcactctgtattagtccatcgttttgctataaagaaatacctgaggctgggtaatttataaagaaaagaggtttaattggcttatggttctgcatgctgtacaagcatggcactggcatcttctcacttctggtg

SEQ ID NO: 889622 - DNA, 598 bp, Homo sapiens
tggctctgtttttcttcatctttccccttctaccatgttatgatgcagcatgaaggccttcaccaagtgcaggtgccatgctcttcccagcctttagaactgtgagctgaataaacttcttttctttataaattactccatccgtcatatggtgttatagcaaaagagaatggactaagacatgggacaaagattcagtaggcttattaaattatctatgtaactacagagagctagcgaaccaatttcagcttaggggaaacaggaaattcggaaacaggaagcccagagaaaaatggcactggactgtgactcctattgcctcaggttagatcatctgacttcacaaggtaaaagcttctgcacamaaacctgcttcagcccttttccaccaatgggacacccttgctatgtagagtagtgcaaaactctgtcatttacttgtcatgggacattgggtaagtcactctgtattagtccatcgttttgctataaagaaatacctgaggctgggtaatttataaagaaaagaggtttaattggcttatggttctgcatgctgtacaagcatggcactggcatcttctcacttctggtg

SEQ ID NO: 889623 - DNA, 530 bp, Homo sapiens
attcttctgagaagttcaacaagaaagacagtaaaaggtacctgaatttaaggtcctaaaaggtcattgttgacaataacatgagttgtttcagtggagtgatgggtactgaagccagattataaaagattaaataaatggtgagtgagagagaagaaaatggagactaagtgtacacaaccctttcaagttgttatttaagagaaaataaattagagagcaaagtgaagtaaatggaggattttattaagatgggcgtgactgttaaaatgccattggaaaggattcagtagagtggtggaaattggagaggtgaggrtaaaaaaaaaagagggaagacaaaatatgcaatggcctttaacagaaattggcagaaaaggatcctgcagaggagttataggttttaaccccttaagttcttaaagggaatgggtccctttttaattcaaggaatggggagaaaagtctagcagacaggcagcgtcaagaagaatttgtagacttctgggagtttcaatggcaatgcctca

SEQ ID NO: 889624 - DNA, 599 bp, Homo sapiens
agtcagaacacttgagattcatatcctcataacttggaaggttattcttttgtttggacaaagaatactggagttttttaaatgtttgtacttcaactcatccatacttatgatataatccccaaaaagcagccagcaacccaaacctttaaggctgccaaccaggaaaaataacttagcacaacaatgatcttttctaaccataaataatggtatcttgggccaagcttcctagatagacttggattgaaacagctctttaccctagggctattaacygtataacatggatattgagaggaaaaaggcaaaaagaaaaaatgcaaaggaataaaattaattcttaaaatacctcaaattttgaataaatggggacatggacttcttgaatggtagttctgtgaattaagacaagccatttcttggtatgtgtgcagaaatcctagaagttgtgggatgcttgaaattatgtttatgactccaaaactcaagtgtgcatgtcaaatataggttgtagggacagatctcaactaatctctgtatggtatttggctctaacaccaaaataataggacctaaaagagaaacaacattaaagt

SEQ ID NO: 889625 - DNA, 599 bp, Homo sapiens
agtcagaacacttgagattcatatcctcataacttggaaggttattcttttgtttggacaaagaatactggagttttttaaatgtttgtacttcaactcatccatacttatgatataatccccaaaaagcagccagcaacccaaacctttaaggctgccaaccaggaaaaataacttagcacaacaatgatcttttctaaccataaataatggtatcttgggccaagcttcctagatagacttggattgaaacagctctttaccctagggctattaactgtataacatggatattgagaggaaaaaggcaaaaagaaaaaatgcaaaggaataaaattaattcttaaaatacctcaaattttgaataaatggggacatggacttcttgaatggtagttctgtgaattaagacaagccatttcttggtatgtgtgcagaaatcctagaagttgtgggatgcttraaattatgtttatgactccaaaactcaagtgtgcatgtcaaatataggttgtagggacagatctcaactaatctctgtatggtatttggctctaacaccaaaataataggacctaaaagagaaacaacattaaagt

SEQ ID NO: 889626 - DNA, 561 bp, Homo sapiens
acttgatcctcatctctcaccttacacaaaaatcaactcaacatggattaaggacttaaacctaagacctgaaactataaaagttctagaaggtaacattggaaaaacccttctagacattggcttaggcaaggatttcatgaccaagaacccaaaagcaaatgcaataaaaacaaaaagaaatagctagcacctaattaaactaaagagcttttgcacggcaaaaggaacagtcagcagagtaaacagacaacccacagagtgggagaaaccttcacgagctatacatctgacaaaggactaatatccagaatctacagcaaactcaaacaaatcagtaaaaaaaaagaacaatcccatcaaaaagtgggctaaggacatgaatagacaattctcaaaagacatacaaatgrccaacaaacacatttaaaaatgctcaacgttactaatgatcatggaaattcaaatcaaaatcacaatgtgataccacctcactcctacaagactgtccataatcaaaaaatgaaaaaacagtagatgttggcatggatgcggtgagca

SEQ ID NO: 889627 - DNA, 581 bp, Homo sapiens
ctcatctctaaagagagaaagagggaaagagataaacagagaaagaggaaagaaagaaagaaagaaagagaaagaaagaaaagaaaagaagaaagggaagggaaggggaggggaggggaggaaggaaggaaggagaaagaaaggaaggaaggaagggagggaggaaggaaggaaaggaaggaaggaaggagaaacagagaaggaaggaaggaaggaaggaaggagggagagasggacggacgcagggagggagggagggagagggagggaaagaaagaaaagaaagaaagccaagaaggctgatatatatttaacattcttattatgaataataatcttaacattcatatttaacatactttggcatattccaacccaaagagaatccacagagcagatagatttgggagtagcttatcctcactattcccactcatcctcccctaccctttgaacgtaccagctttacaataattctgtatgtgtctgaatattcatgtgtctgactctctcactaggttgtaggtactttgctaagctttgtatctttgctacataatatgatgccaattatatagcag

SEQ ID NO: 889628 - DNA, 649 bp, Homo sapiens
tgtaggtactttgctaagctttgtatctttgctacataatatgatgccaattatatagcaggatttccatgaataaatggaacggtaagatggagcttgaaaagttttccaccacatctccaactggttgcttaatgttcctgtgaatatattgcttagccattcagacaccacatatctmaaataaaattcatccgttctttaaaactttcttcccttaaggggttagtagtggtttttaacaatgtggttcatcagaaaggtggaaaaatcctaaggtccagatgtgttatggatccacgtgactattgaaaacatttaggaagagatgtggagataaaaacagtagaagtaaatatttttaggaagatagaaacgaaaattgctgggcattagctagcaagtatttgtggtctagccagaagtattaatggcatttttaaagtatttgaatatctgatgctattgaatgatagtataatggcattcccagagttatttaatattgatataaaattccagcttttgcccatttagtatgatattggctgtgggttggtcataaattgctcttattattttgagatacattccatcaatacctagtttattgaaagtttttagcatgaaggggtattgaattttattg

SEQ ID NO: 889629 - DNA, 649 bp, Homo sapiens
tgtaggtactttgctaagctttgtatctttgctacataatatgatgccaattatatagcaggatttccatgaataaatggaacggtaagatggagcttgaaaagttttccaccacatctccaactggttgcttaatgttcctgtgaatatattgcttagccattcagacaccacatatctaaaataaaattcatccgttctttaaaactttcttcccttaaggggttagtagtggtttttaacaatgtggttcatcagaaaggtggaaaaatcctaaggtccagatgtgttatggatccacgtgactattgaaaacatttaggaagagatgtggagataaaaacagtagaagtaaatatttttagraagatagaaacgaaaattgctgggcattagctagcaagtatttgtggtctagccagaagtattaatggcatttttaaagtatttgaatatctgatgctattgaatgatagtataatggcattcccagagttatttaatattgatataaaattccagcttttgcccatttagtatgatattggctgtgggttggtcataaattgctcttattattttgagatacattccatcaatacctagtttattgaaagtttttagcatgaaggggtattgaattttattg

SEQ ID NO: 889630 - DNA, 534 bp, Homo sapiens
tgtgaccagaataaaaagcaggcagaagaacgtgaaaggactagactggctgagtcttctggtctccatctttctcccgtgctggatgcttcttaccctcaaacatggaactccaagtttttccgctttgggactcttggacctttgaccacagactgaaggctgcactgttggcttccctacttttgaggttttgggacttggactagcttccttgctcctcagcttgcagatggcctattgtgggacctcaccttatgattgtgtaagttaacactcattaataaactcatatatatatgtatatatgtatawcctattagttctgtccctctagagaaccctgactaatacagacaggaatatagagcaatgtctagacagagcctgagaccctcctcacctccaaagcaccttgtgtttttctctccttccccttctttgcccaccctctccttaggaattttcagcaaatccatatcttagaaagctgcagggaggagttggcctgatgggcttgccacacttgggccc

SEQ ID NO: 889631 - DNA, 618 bp, Homo sapiens
tgtgtatgagtttgttattgttttaaaaattacatatttatatagcacccatgcaagaaacagtttttacagatagcacataatttcatttgtcttcaattcatctactgtaatgtaattagaagaaaaacgtattagtattccaattatagataaagcaaaagattagtactccgcctgagatcacacaacaaattcattctaaaattctgacttcactggagttgcttcccagaaataaaaaaagagagagagagatagagagtctttgaacagtcctagytgaaatgtagcctattcaatactaaaaattattcaaataagtagtccatccacactccataatggacagtcttcctcttggcttttttgttgttgttattataaagaagggaatatcctaaagggtcaataatcctccttctatttctccatttttctgtctccataaggcaacatcactgaatgtattaatgggcttgctcagttagggtttttaatccctcccagtttgcccagaatgttctcagttttagtactgaaagtcctgtgcccagttaacccgtcttgggcaaacctggacagtccctatcagcagtggaaataaacactgctttg

SEQ ID NO: 889632 - DNA, 600 bp, Homo sapiens
ctactggatgtgggtgcaaggtgtggtgttggccttaggaacaaggcaaaattcaatgcgtaagcaatcattgaggagcacagacttaatggtcagtcactggagttcctgaattaggaattttaaagatcccctgacaaccataaaagttgggtgaccaactattctagttttcccaggaatttccctacttcagcactgaaagtgcagggcctagaaacccctcagtcctaagacatctggtcaccctaattgtgctcttagaagactacagcctagatccacctacatctctgggtcagttggctccagccataaggaaagaaagcacacatgagaagaggaggagccagctggaaaacgaggcagagagccaggatgctcaytgcaacctatagccttcaagagaggataaaagggcacccagaaatattgtctataaatgctgaaatgcatttgctttaaatgggcaaaacacgttaaatgactcctcaggcctgcagcttttctaaactcatgaaagtggaaaagttcagcacaaacagaaccatccagacaccccgtagatggaagtctctctcactgccttttgacagtcat

SEQ ID NO: 889633 - DNA, 623 bp, Homo sapiens
actgtcagtgattaactgttttaagtgattcattaacatgccaggttatcttataaattaaagcattttacattattaacttttgatttcagcaacataaatgcttaaacaataaattggtctgtattacctgggttgttttctttaatggtaactaaatagaataatcctyttggtgaaaggagatctggaaccaggggaaaaaacctgtccatgacttcccgaccatttttgccaccagcccaagctgcctctattccgtgacttcctacctgtgaacaattagaaagaatgttttcttttaactcaagtttgatttagatcacaaactgaatctttttgacaagtaatatcaccaaaaaagtatatattttgcattttactgctgacgaaggagcagtcaagttgaatctaagtttcatcattttttagtgtgtaaccttggataaattagtaatcctgtttgtgaattactttcctcttttatctgtaaaattagaaaaagaatagttccatatgtacaattagaaaaataataagtggataaaaaatgtttttattaataaaaaaatatttttatccactgttaggaataaataaggaagtatatttaaagttttgag

SEQ ID NO: 889634 - DNA, 623 bp, Homo sapiens
actgtcagtgattaactgttttaagtgattcattaacatgccaggttatcttataaattaaagcattttacattattaacttttgatttcagcaacataaatgcttaaacaataaattggtctgtattacctgggttgttttctttaatggtaactaaatagaataatccttttggtgaaaggagatctggaaccaggggaaaaaacctgtccatgacttcccgaccatttytgccaccagcccaagctgcctctattccgtgacttcctacctgtgaacaattagaaagaatgttttcttttaactcaagtttgatttagatcacaaactgaatctttttgacaagtaatatcaccaaaaaagtatatattttgcattttactgctgacgaaggagcagtcaagttgaatctaagtttcatcattttttagtgtgtaaccttggataaattagtaatcctgtttgtgaattactttcctcttttatctgtaaaattagaaaaagaatagttccatatgtacaattagaaaaataataagtggataaaaaatgtttttattaataaaaaaatatttttatccactgttaggaataaataaggaagtatatttaaagttttgag

SEQ ID NO: 889635 - DNA, 623 bp, Homo sapiens
actgtcagtgattaactgttttaagtgattcattaacatgccaggttatcttataaattaaagcattttacattattaacttttgatttcagcaacataaatgcttaaacaataaattggtctgtattacctgggttgttttctttaatggtaactaaatagaataatccttttggtgaaaggagatctggaaccaggggaaaaaacctgtccatgacttcccgaccatttttgccaccagcccaagctgcctctattccgtgacttcctacctgtgaacaattagaaagaatgttttcttttaactcaagtttgatttagatcacaaactgaatctttttgacaagtaatatcaccaaaaaagtatatattttgcattttactgctgacgaaggagcagtcaagttgaatctaagtttcatcattttytagtgtgtaaccttggataaattagtaatcctgtttgtgaattactttcctcttttatctgtaaaattagaaaaagaatagttccatatgtacaattagaaaaataataagtggataaaaaatgtttttattaataaaaaaatatttttatccactgttaggaataaataaggaagtatatttaaagttttgag

SEQ ID NO: 889636 - DNA, 621 bp, Homo sapiens
aaatgttacaagacagagacagaacagggaacattttaaccttgctcagggcatgcccttagaaactataaggattgatgatgcatcaagattaatttgatgacttgcatttcaaccaagagggcagattttcaggaacgcatattctgacttggagctgggaaaggcacaaaccctgggcccagtccatctttggggactgagaacagagagttgagaactcatcttactaataattcctgcaatattggagtgtgtgtttttaacttggagtcagacacacttttcctcacccgcagagtggacagtaaaagtaatccagaatgttgcatctgtgttagctcttcttagaagggcctggagctgctacaggaagtttctcatttggaattatgaagttctttcttctcttgggccactttctcttgcaagtccagctgggcattaccctgccccstggaatttactccaacacagaatccttcatgcttaaccccaattccactgtctgggccttcggagtcagagccaaagctcagcagcagataaagtacaaaagctagcaaggtagaatttgaagcaaactgccctggtgtatggtttttagggctgccataacaa

SEQ ID NO: 889637 - DNA, 639 bp, Homo sapiens
tcatatgctgtcaggctacaatggcagagttaaatatctgcaacagagacaatatggcacacaaagctgaaaatatttactgtctggccttgtacagggagagtctgcccaccccggtgtagataaagtataacataccatcaattaagaaaaaatgtaatgacaattataccaaaaagtagttataaaatggcagaaaaaaatcaaaggagtatcttctaaaagctattgccaaagtgattgaggcattccttgtacattatgaacctsagcatccactataaagaatatcccgttaaaagccatgcttaataattccatgcaaattgtagatgttaagacataatcatttaatcacaaatgtcttagggttacagtaacaaaagcagccagttcaagaatttacttttttatacctacattttcactatccttagagaaatatttcagctaagaaaaaaataattttcttttttgtctttttttttcttaaaaagaaggttaagtacctttggtaagtatctttcaaatatcacaagaaggcaccagcatgtatatctcagtaattttttagccttcatatattatttgtgaaataaaatacaaacacataaaacaacacaaaacaaggtataaggc

SEQ ID NO: 889638 - DNA, 555 bp, Homo sapiens
atgttgtagtgattgaatagtttttaaatattagtattttcatttcaataaaatacatttaaatgtaaaacatgatctatgcaaaaacttgtatatgaatgcttctagcagcattattcatgataaccaaaaagttcaaatcacctttcatcagctgatgaaaggatgaacaaagtgtggtatattcaaacaagaggctattattctacaataaaatggaaaaaagtatacactacaacatgatgaactttgaaaayattatactaagtcaaagaagccagtcacaaaaggccacattttgtatgcttccatctgcatgaaatgttcaaaataggcgaatccaaagtggcagaaaatagattagtgttttgccagcccctggaggagggggaggaatggggagtgactgctaattagtactgggtttctttgtggggtgatgaaaatattctggaattagatagtggtgatgattgcataacttcatgaaaatgctaacaaccattgaaatgtacactttaaaaggggggactttgtggtaatgaattatgtctc

SEQ ID NO: 889639 - DNA, 528 bp, Homo sapiens
ttaaaatgaaaaattgtttaaaataatgttgagcacattacaaataatatgttagtgcttactgacattataattgtaattacttgtattacagcatacatgccaggaatacaaagacttggtcctatcccccctcaagcggagagattcttttttaaagaattatttaatttaaaaaaagaaagaaaagaaatgaggaatgactatgaaaatgtgtaactaatayagtaaaaccaacaaaagctgtaaataagatcaaaaaactgcaattttatgaaggattgaagtattacaaggctaagaaaaactaattttttctactccatctcctatgaactgtttgagcaaacatattttcactgattagatgttttcactgattagatattttcatgaatatattttctatgaactgtttgaacaaagacattttcactgattagatattttccctgattagatattttccctgactagatagatcaattatgtttttaaaaagacaaactatatcttgcatacctaccc

SEQ ID NO: 889640 - DNA, 528 bp, Homo sapiens
ttaaaatgaaaaattgtttaaaataatgttgagcacattacaaataatatgttagtgcttactgacattataattgtaattacttgtattacagcatacatgccaggaatacaaagacttggtcctatcccccctcaagcggagagattcttttttaaagaattatttaatttaaaaaaagaaagaaaagaaatgaggaatgactatgaaaatgtgtaactaatacagtaaaaccaacaaaagctgtaaataagatcaaaaaactgcaattttatgaaggattgaagtattacaaggctaagaaaaactaattttttctactccatctcctatgaactgtttgagcaaasatattttcactgattagatgttttcactgattagatattttcatgaatatattttctatgaactgtttgaacaaagacattttcactgattagatattttccctgattagatattttccctgactagatagatcaattatgtttttaaaaagacaaactatatcttgcatacctaccc

SEQ ID NO: 889641 - DNA, 631 bp, Homo sapiens
tatatttgacgtaactctaagttctcgtaagaaatctcaaacctgtctctaaatctcctctgttttcatctaaagattttgttagtgtatatctttgagcattcagaagtagacagttgcaactacaaattcatttcatctgttccacaatggyttggttacattgaaggattatttaacgactctataacatcctagttatattttctgagaaatttatggtccttatcgggcctcaatcaaatgtcattcatgtcttatttcacatgtagttagaaggggagtgtgtgtaaaatatggccatgaggtgactcttgcagtatctttactcatcttggaaacagaaaaaatgagctagtttcataaacttaatttctttacctcttcagttttctctacctgaaatattgaggcttctctttaactcatcttttaaagcacagaatttcctaaactttttaaaaattaaatgacttttcctgattttgcagttttcttttcccttcatgaacgttatcactgcagaaaaagcaacgcttgtactttcaagactataaaataagcccagtttataaaattattatttggaggctaaatatggaatttcagatactcactctgaaccacaaaa

SEQ ID NO: 889642 - DNA, 619 bp, Homo sapiens
aagtctgtctgtgatataaactcacataagagcaaagcagcttggaaacaatttgacagggatccagaaaagcttcagaggcagtgacgtttcaaggaggctttgaagaattaataggattcatctcggcagaagtgtttagaggatatcctagcgagggtagcttaaacaacaaacatttatttctcacacttctggaggctgaaartacaagatcagggtgcccatattttcgagctctggtgagagccctcttccgtcttgcagacttccattttttcacttgtccttacatggcagaaaagagggtgaggcaactctctgaggtccctgttataaggacactaaccccattcctgagggctccactcttatgacctaataacctcccccaaagcaacacatcataataccatcaccttggggattacatttcaacacaggaatattggaaggacacaaactttgagtccatagcagaggacaatctccccagcatctttgccttcagttgcacaactatgaggcatgttatacacagcctttgagaggtcccagcagaaaggatccctggttgcccaccaccatgatctggttgataattccccactccctcaaa

SEQ ID NO: 889643 - DNA, 635 bp, Homo sapiens
gacaaaggtactctgcaaagtcagtacttttctggtattgccttttgcaatgaatggcatcaccacaggctgagtttccaatttgggagaccaggattcatgcttagcacctccctcttcttccactgccatatccagcccaccacaaagtcccatccattttacctcctaaatatctcccagattcctccacttttctccattgctcatgccatcacccagtcacagccaccatcatctctcaccgggaggacagcgagagcaaacattcacccttactccgccactctattaacagcacagaagctcatgtctctccccagcttaaagccctgcattggttcccactgcacttaggataaagtgaagtggcctctgcccacctattccgcgttgactctcaggmctccctcactcattcttgatgctccagccacaatggccaacctttagttccccaggaaaacctgtgatccccaactgggggctttgcatgtacagttcctcttgctaggatgctctttccccaggcccctccttctttactcatttaactcccattcctcctttgcatcctagcctagtagcactttctcagggaaccttccctgtccctgggaaccaaaccaggtctc

SEQ ID NO: 889644 - DNA, 635 bp, Homo sapiens
gacaaaggtactctgcaaagtcagtacttttctggtattgccttttgcaatgaatggcatcaccacaggctgagtttccaatttgggagaccaggattcatgcttagcacctccctcttcttccactgccatatccagcccaccacaaagtcccatccattttacctcctaaatatctcccagattcctccacttttctccattgctcatgccatcacccagtcacagccaccatcatctctcaccgggaggacagcgagagcaaacattcacccttactccgccactctattaacagcacagaagctcatgtctctccccagcttaaagccctgcattggttcccactgcacttaggataaagtgaagtggcctctgcccacctattccgcgttgactctcaggcctccctcrctcattcttgatgctccagccacaatggccaacctttagttccccaggaaaacctgtgatccccaactgggggctttgcatgtacagttcctcttgctaggatgctctttccccaggcccctccttctttactcatttaactcccattcctcctttgcatcctagcctagtagcactttctcagggaaccttccctgtccctgggaaccaaaccaggtctc

SEQ ID NO: 889645 - DNA, 676 bp, Homo sapiens
ccaacaatagacagtaaataaggtgattttaaatagaaacacacataaggtatgtgatgatcagatagtgaacatactgtgaccagaggctcctgggagcataaccctgtatttcccctaggagcaatggttcagtatttgctaattcagtgtttacagtgactttatagaagacaattactatgaataatgagaatcaactgaactgcatcacattatggtcctggagtatgaataggacccagaacagacagtaatgttaaaatataagggcctggggccaggcatgatggctcatgcctgttattctagcactttgggaggccaaggtgggcggatcacctgaggtcaggagtttgagaccagcttggccaacrtagcaaaaccccgtctctaataaaaatacaaaaattagctgggcatggtggcgggcgcctgtaatcccagcaactcaggaggctgaggcaggagaactgcttgaacctgggaggtggatgttgcagtgagccgagattgcgccactgcactccagcctgggcaacaagagcaaaactccatctcaaaaaatacatatataagggcctggatggaggttttgatgggctccaccgtgagaaactaagaaagtgtcatgcgaaataggagagcactcaactggagctggagaaacaccaga

SEQ ID NO: 889646 - DNA, 429 bp, Homo sapiens
atttgttttgcagcaataagtaatgaagataaccacaaaaatgagataagtgacaaaatgtagttgatgaatgcaccttaaaaacagaatcttgccaggtgcggtggctcacgcctgtaatcccagcagtttgggaggctgaggcrggtggatcacctgaggtcaggagttcaagaccagcctggccaacatggtgaaaccctgtctctactaaatatacaaaaattagccgggcgtggtgttgggcacctgtaatcccagctactcgggaggctgaggcaggagaatcggttgaatccgggaggcagagtttgcagtgagtttgcactccagcctgggcaacaagagtgaaactttgtctcaaacaaacaaacaaacacggaatcttactgagatagggagtctgggatggctgcttagtgtagtgtc

SEQ ID NO: 889647 - DNA, 429 bp, Homo sapiens
atttgttttgcagcaataagtaatgaagataaccacaaaaatgagataagtgacaaaatgtagttgatgaatgcaccttaaaaacagaatcttgccaggtgcggtggctcacgcctgtaatcccagcagtttgggaggctgaggcgggtggatcacctgaggtcaggagttcaagaccagcctggccaacatggtgaaaccctgtctytactaaatatacaaaaattagccgggcgtggtgttgggcacctgtaatcccagctactcgggaggctgaggcaggagaatcggttgaatccgggaggcagagtttgcagtgagtttgcactccagcctgggcaacaagagtgaaactttgtctcaaacaaacaaacaaacacggaatcttactgagatagggagtctgggatggctgcttagtgtagtgtc

SEQ ID NO: 889648 - DNA, 429 bp, Homo sapiens
atttgttttgcagcaataagtaatgaagataaccacaaaaatgagataagtgacaaaatgtagttgatgaatgcaccttaaaaacagaatcttgccaggtgcggtggctcacgcctgtaatcccagcagtttgggaggctgaggcgggtggatcacctgaggtcaggagttcaagaccagcctggccaacatggtgaaaccctgtctctactaaatatacaaaaattagccgggcgtggtgktgggcacctgtaatcccagctactcgggaggctgaggcaggagaatcggttgaatccgggaggcagagtttgcagtgagtttgcactccagcctgggcaacaagagtgaaactttgtctcaaacaaacaaacaaacacggaatcttactgagatagggagtctgggatggctgcttagtgtagtgtc

SEQ ID NO: 889649 - DNA, 705 bp, Homo sapiens
ctcctggtgtttgctttttctcttccaactccaagcaatgacaatatcaagttttttactccatgttagcactcttagaacccaatattttaaaaattgactaaaattctaagagaaaatgtaaaaagaaaaaaaattacaactcccattcaaaagatgaaaaataacagcctaccactaattgacattttcctgtacgccggacactgtgcaaggtttctacagacatgggaagagggattactctctccattttggaggtgtggagatgatatggtttgactgtgtccccacccaaatctcgtcttgaattgtagcttccataattcccacatgttatggaagggacccggtgggagttaattgaatcctgggggtgatttcccttatactgttcttgtggtagtgaataagtctcacgagatctgatggttttataaggggaaaccccttttgcttggctctcatactctcctgcctgccgccatgtaagaygtgcctttcgccttccgccatgattgtgaggcctccccagccacgtggaactgtgagtccattaaacctcttttttttttttttttttttttaaataaagcaactggtcttgggtatgtctatcagcaggatgaaaatggactaatacaggagccgaggcctggaaagagttttccttgtcctgtgtcccactgctggtcagtggtgaag

SEQ ID NO: 889650 - DNA, 615 bp, Homo sapiens
aacctggaggcaggggtgctatgactttaatccatagtcacatctcagggtacaggtgtcaaagagcagttgttcaagtgggagacttgtgttgatctgggtaatcccccacctttaaagcctagttgttttgccccaccccccctccaatattttcttgacttagtgagtgaatacttaaagacaaaaggagctaaggcaatgaagatggagggaatgaagttctgggaaggctggaggggtatgcagatttgtaggggttacagatgtcatgctgcatctgtggaaatgaggattcaaaaccaaaggtgggtagggaataaatgtggawgtgtggatctttcctgaggttagggaggaggacaggggacaagggttacactgactacacatcaaagttttttcaggatatgtattatgtcttactgtccaaatattatgctatggtgttccttatagccatgaacatgtcacctatctgtatgatttagctccctcatttttgagagtcaggcaagacaacctgctattagaggagaaaatgatggtgtttgtatctaggttttattaaaaatcattccctaactatggcttatagttatttaaattgttttc

SEQ ID NO: 889651 - DNA, 555 bp, Homo sapiens
gaaatgataagataatacctttattcaatggttagtgattgctttgtgacataattcctttttagctccttgaattaagtttgaaaatgtgattttggaattatttagtaaatatggggagctgtatcctgatcactttcttgacttgattacatatttctaaggaaaataaaatttaaaatttaatagtwtatatatatccattttattacttttagagagtgagtaaaggaatacttaaagcatttggtaattctactgaaaagttggatgaagaactaaaaaataaagttaaaggtaatgtctgactttttgaactaaaacactatagttgaattcctctgtaccttaggacaagattgctggcacatatatttccaagtccacaattattaatgtataatttctctttatcaacgttgattagtaaaaattattcagtgctccagaagtgaacagttttaccccatggtgtattctttttatgtattaaagatagaactatgatgaattacagttttacttttcaaaagcttaaaattataattagcagta

SEQ ID NO: 889652 - DNA, 637 bp, Homo sapiens
ttgttgtaagggttatcatttgtgatttaaagaaaagggggagtataaaacttttcttcaaatataacataattttatgtggattttattcttaggatttaattttagatacctttacagaaacaagccaaggagtaagaactgagagcaacaagaaaactataaaaagtcagccctgtgattttattattttgacggtatcaccactgtactttaataactcctgagatcatcagtgtgcaacattaacattcacagtgacaaacccttgtacaagtgttttgtggagttaaaatttaacttttaacttaagttctttaagaatttatatatataatatgtatttttttttcttttttgagatggagtcttgctctgtcgcccaggctggagtgcagtggcgcgatcttggctcattgcaacctccgcctcccaggttcaagcaattctcctgcyctagcctactgagtagctggaactacaggtgtgtgccaccacgcccggctgattttgtttctgtatttttagtagagatggggtttcaccatgttggccaggctagtctcaaactcctgaccttaggtgatccgcctgccttgacctcccaaagtggtgggattacaggcgtgagccaccg

SEQ ID NO: 889653 - DNA, 644 bp, Homo sapiens
cttgaccttcacatttctcttttatagagtagggacaatctgtcccttagagtttgttaatgcatgtagtacacttagtgatgtaatatacttaccacaatgtcaaacatatagtcgacactcaatagataataggtatggttattataaagcagtcaaaatgagccttgtattcaatagttccctgtaagaaaagcatgaagtctaacatggcttataggtcttacctctcaccagctttatctagcaacattttcgcctctgaaatcaacactccagagatgttgtaaattgttcagtgccttgaaattcagcatttcttctaactcccaggccttggaacctgtgctgccttgccttggagcatgctatcaacacctcccactcatccttcacctatcagcttaagtgccttcctccacttcartgctaagctgtgtctccctgccccattctctctagagtgcctatgctgttatactcacttgcccagtagtggccttctccatgtgactccatgaaaccaggagccatgttttgttcatgttgctattcctaaaccttagcagagttcttatcccacagtaggtattccactaatacttattcagtggataaataaattacaaaactatttagggaac

SEQ ID NO: 889654 - DNA, 587 bp, Homo sapiens
agtcagtgacattggggatttgtgttactgcagcctaacctcctgtatcctggctgatacattcactttttgagatagatgtattaagaaaaaattgtacagacagaaactaaaatatggcaagccaaatatcttatatscattatttaacaaattcttcagaagaacatattgccaaaaaatccctttagaagttaaaaaatgttttataatgtaaatcattatggcctaataaatgtgtgtattgataaaatgttatagtatctcaacaaatgcaaattaacctttacaaatcttggaaaatcctttaactaaaggtaagttttaaaataatatgcctatcaaatgatggtaccatatttactgaaaggagaatctacttttacttccataaatatgtttaaaagaattagagcatcttgggaaaactgctgaatttagggctaaggcagtgaaagtacaaggtgtgtcaggagcattttgcagtggccaaaggtaaggaagtgttgaaataaataaagtaaaagggacatatcaaagggataaagaacaaacctgaaagcagttccaatggctgtttctaacac

SEQ ID NO: 889655 - DNA, 620 bp, Homo sapiens
acacagatagcaagttaagtgtggagcccagctttgaacccaggaatctgactacaaaaactgaactctacatagctattcctcttcagctgagaatgcagttacagaaaaaggccaaggtgccttcaaagttctgtagttagtgggttccaggtgtggctttgcatcagttacttgtgccacggacactttctcggttttagtttcttcatctatagccgtgtttcccaacagggagtgattgtacccygccccccgccccggggcacatttggcaatatcaggatacattttggatggatatagtggaggtggggtgggggagcgctatacaaccagtgggcagaagccaaggatgctgctcaacattgtgcaatggatagcaacagggcccccaccacaaagaatgatctgaccccagtatcaacagcactgaggctgagaacatctgctttatggaggaggcttaagacccacacatgcaccccacatcactgactattctaagtgttccaggagctaacgtgcacaaaactcccgtggcagaaactattggctgaaactgcaaagttcccagggggactcgatcctcttgggtggatcttcttcgagtttacttc

SEQ ID NO: 889656 - DNA, 586 bp, Homo sapiens
cccatcagcactgagaaagttataggggcagctctgaactaaagtctcaaatatagtatgatgtgaacgtgaccatacacgccccaggtagagttctggcagcaacccgctagaccacagacccctcgcaacaaccagatctttgtcttggtcctgttctcttccactaggttgaagagtattcagttctgtgtatctgtatcactacccctaccccagccttctaaggaggtgggacacttcatctgctgagccagcaactagaccttcatcatgacgtgtggggagggggctgatggagctcccaagttttgctcagaaaaagggagtgggtaagggatgaatgggagagagaaccactcaaggtgaaragagtggaggatgggaaacctgcatacagagacaggagcaagggaagccatggagaggatttcttaaattaaagctcccctttacttgggcttctagaagcctccatgtcatttaaagtgattagaactggagagagaaagacacaaagtggccagatagtcaaaatgtcaaattcttttgaactatgccgttatctgcaactgagatattttca

SEQ ID NO: 889657 - DNA, 586 bp, Homo sapiens
cccatcagcactgagaaagttataggggcagctctgaactaaagtctcaaatatagtatgatgtgaacgtgaccatacacgccccaggtagagttctggcagcaacccgctagaccacagacccctcgcaacaaccagatctttgtcttggtcctgttctcttccactaggttgaagagtattcagttctgtgtatctgtatcactacccctaccccagccttctaaggaggtgggacacttcatctgctgagccagcaactagaccttcatcatgacgtgtggggagggggctgatggagctcccaagttttgctcagaaaaagggagtgggtaagggatgaatgggagagagaaccactcaaggtgaaaagagtggaggatgggaaacctgcatacagagacaggagcragggaagccatggagaggatttcttaaattaaagctcccctttacttgggcttctagaagcctccatgtcatttaaagtgattagaactggagagagaaagacacaaagtggccagatagtcaaaatgtcaaattcttttgaactatgccgttatctgcaactgagatattttca

SEQ ID NO: 889658 - DNA, 633 bp, Homo sapiens
ataaggatggggctcccataaagggatgaatgcccttgtaagaagagacgctgtaggatgtgctctccctctttttctttctaacatgaggacacagcaagaaggtggctgtctacaagacaggaaaagagccctcaccaggaactgattctgccagtgccttgatcttcaacatcccagcctctggaactgtgagaaaatttttgttgtttcagctacccaatatacaatattttgtccatggcagctcgagcagactaagacagtagcactattttgttaaccatattttgaaattgataatagtgattttgtactgacaatgtggggaggaaagttgctaaacagctataatatttcaacaatgaaacaacagcttttytgaaaatcataggataggagatcatattgcttgatagcttggaaaaccatttacaggaagaataaacttactaaaagaggacaccaatttttgtttaactataaagtagatgcttgagacatgtggctaaataaatggaccaaaatatataaagaaacaatgacccatatttcttagaacatagctgtaattttccaatagacagtaaaagggaagtgatgacacttcactcagtattgggttgaatcata

SEQ ID NO: 889659 - DNA, 577 bp, Homo sapiens
ctttccaacatgagcttaaacatgtttggaagaagaaaaataactaacttattaagtatgccattttattttgctttgattgttccagaattagttaaagatagggaagatagcccccaaaatgtaaattatcaaataatcataaaagtaaaaatattgtgctaattatttcaaaaatgacaaatcaaactgggaattgacatattaagaacgacattttctatgtctggaatttttggagaaaaagttactatagattagataatgtttgaataactaaagcctgattcttagcagaaaaatctcttttgctttgaagtattttaacttaaatgtttctaaaatctgccttacaaaaagtatgtcctatatatcaattattgttctgaggtccaatgaacaaacaaacccaagaatgctggagttttcacttargttgggcccacctccaagtctcaagtctcagctcctctgaggtggagactgccaggcatttgatggctggctagagaggaagaaggaatagggcagaatgaacactttcactttggtctttaacagaggtttatctccattc

SEQ ID NO: 889660 - DNA, 562 bp, Homo sapiens
tccatcctatgtactagaaccacaggaggcagctgcctggcacgtctttcagaatttttcaggacatagtaaaattatcttcatccttttggtagcttctatttaaaacacaacttcaaaggtctaatatgactaacttcatttaacaaatctctaaacaaggaaaataaggtttgcagtacccttttgcaatggagaagtatacagaaagatcaaagtatttccaaaagtattatggagaattatttatgtcttctaaaagattatatccctgtgcagtttcctatgataaggacctggattaactttgttctacaaagaaagaaagcctgatgtattatatgcttttccactgcctccttaagtggagccaaagaacaaagcattttccaggaggaatgaagttgtatctgtcctcagagctgcytagagatcaaaagaatctttctagcagttttattggaaatttcagaggcccttaactaatatttagcttcataaatgatgggtgttacagggtgggaaaaaattcccacttgtaaactaatgggtggttgtcaat

SEQ ID NO: 889661 - DNA, 618 bp, Homo sapiens
ttgaaataagatcattgcagatataattagttaagatgagatcatactggcttagatctacgccaaaatgactgatgtccttataaaaagaggaaatttggtggatgcagtggctctttcctgtaatcctagctctttgggaggccaaggtaggcagactgcttgagcccaagagttcaagaccagcctgggtaacattgcaagaccctgattctacgaaaaatgcaaaaaattatctgggcatgatggcacatgcctgtagtcctacctacttaggaggctgaggtgggagaattgcttgagcccagaaggtcaaggctgcattgagccatgattgtgctactggcatttcaacctgggtgacaaagcaagaccgtgtctttttaaaaagaaaaaaaatggaaacatagacatgcacacagggagaacaccatgtgaagatgaaggcagatatctgggtgatrcttcataagccaaagtaatgccaggttgccagaaatccaccagagtctaggagagaggcacacaagattcagcctacagcttcagaagaaaccttccctgctgacaccttgatctcagtcttccagccttcagagctaagagataatcaattta

SEQ ID NO: 889662 - DNA, 621 bp, Homo sapiens
agtttgaggaattggttagttagctccacattttgacactcaccatgtgtgtaacacagcataaagcctcccctctgtgagctattagatgagaaagatgaaacaatactggcacatctgaaaaagcataagaatgagcagaatggtgccagtcatgcaacagagagtggtgaaaatagtgtgtgcactcatttttggaaagagtgattggcatctggtgcttgttcaygaaaatgtagaatttcaggacctgggaaagagttcattcaatattttgactggctgtggtttaaatgaacaactgtttctgaacactcctgtgccaatgactgtctccccatctgctgaccatcaccccgtcagtactcatctgtgagcagcatctctgtgagccacgcttcagcgcaaggtttgctgtgctgcaatctgcttctgtttgcatacgaaaagagaaaagtgaataaatgtttcaaaattcctacgttggaaagattctgaatccaccccagtcgtcatctacttctttatttagaattattcatatgtgcgttatttacagtttctccatgtggtgtgctttcctttgtgtttctcttaacatttttaatgaccaaaggcaaa

SEQ ID NO: 889663 - DNA, 629 bp, Homo sapiens
cacagcactttgatcatctgaaatgctatgacttaatggcctcgttctgtctttatcatctgtcttctttgctgggaggtgagctccctgagagcacggctttgtcccatccccagagcagcaccagcacttggtcactcaagagatagctaccaattaagtaaagggaagaatgcctgtctggggcctggctccctaagatgctgatcctggggtgcaatgacaggtgatccctgactctcttaatactcatccaacaaggactcttcaattcgattttgaagctgtttggccttacatttgcctaacacccacccaacacagcataggaaggccaytggatccaaagggttacaagtcataggaccaaatgccaggcatcttggatgagcctgctttggtcaaagaaccttcactgcattctccttcactctggactttgggttttcccattcatgggttgggtagcatgaccaacctcaaacactagattcaagtgcaatttccaaccttgtttggactgtatcacgcaaagcacacgcacgcatgagagtacacgtacagggtcacagacatgttatcatatagggcatagatcctcttttagcaagccaaccacagtgttggtc

SEQ ID NO: 889664 - DNA, 620 bp, Homo sapiens
ataccacattttctttatccattgatgaatctttaggtcgatctcctaacttggccattgtaaataatgctacaatgagcgtgggggtgcaggcatctctctgacataccaattttatatccatctagtgactctttcttgacagagaaaaacttttctctgaacctcccccaaattttccttcaggtctcactgsccaaaacgaggtcacatgactatacctaaatcagtcatgacagacaaatggagggggttgtcgttagaccagtcaggcgtggctaatccctttgcacccatacggtggccaagtgtgtgtacttaggaggcacacattttgtgctgtggagaaaggctgaacttcctcacaaagactcagaaacacttggcaaatctaaaggacagtcaagaaggagacataaaacagatacaaaactggatacaaaatatggtgactgcgttaagaagacctcccattggagacagctttacagaagagatgagagtaggagaatgatttagggagagaggtgggtggtgaatacagtgggcccttgaggagaaaacacctgggaagtcctggcttgcaactcctactctggaggtgaccctggaaaagtctg

SEQ ID NO: 889665 - DNA, 620 bp, Homo sapiens
ataccacattttctttatccattgatgaatctttaggtcgatctcctaacttggccattgtaaataatgctacaatgagcgtgggggtgcaggcatctctctgacataccaattttatatccatctagtgactctttcttgacagagaaaaacttttctctgaacctcccccaaattttccttcaggtctcactgcccaaaacgaggtcacatgactatacctaaatcagtcatgacagacaaatggagggggttgtcgttagaccagtcaggcgtggctaatccctttgcacccatayggtggccaagtgtgtgtacttaggaggcacacattttgtgctgtggagaaaggctgaacttcctcacaaagactcagaaacacttggcaaatctaaaggacagtcaagaaggagacataaaacagatacaaaactggatacaaaatatggtgactgcgttaagaagacctcccattggagacagctttacagaagagatgagagtaggagaatgatttagggagagaggtgggtggtgaatacagtgggcccttgaggagaaaacacctgggaagtcctggcttgcaactcctactctggaggtgaccctggaaaagtctg

SEQ ID NO: 889666 - DNA, 587 bp, Homo sapiens
cttgaaaacagttcaaatatattgaaagaataaaagaaaagaaagaaagaaaaagagtgagagagaaagagagagagagaaggagggagggagggaaggaagggggaagggaagaaagaaagaaggaacgaaggaaggaaggaaaagaaattatcccttgaatgcctgactaccttcacacctaacataatcggaagcagaaattctgattggacgctgagttcctcaaaatcccccaaatggagtaatcactgttggttccctgcccagctccaacagcaccctgccatccttagaaatctccaacacatacaccatagacttggctcggaaccactcttcagggtattcatttcttggttccttatgsccaggactggacacataattttcaggacccactgcaaaatcgaagccccttgttgaaaaagaattaaggatctcaaggtggtgacaggggaacattaacccgagtgtggacccttctaagcatggggcctcctgttactgatcaggtcacctgttcatgaagccagccctggctactccctacaggtgagagatacaaattccttagcacgacatcc

SEQ ID NO: 889667 - DNA, 545 bp, Homo sapiens
ttatagcttaatatcatcatgataattacaaaagcggcaccttggatcacaacgttctaatgtagacatggcagttacaattaaaattagttcattctacacttatcacctgccaagttctatgctagatccattgaaatagtcacctagattggttaagggttattaaatttaaaagaaaaaaataaatttaaactaaaacattgtctgaaactaaaccaggttggcacgccctctaagaaacatcacctggtttggtgcatcctcgcagaaagagagccatacagtgaagtggaaacacacccaaaagctctgcaatattcctagaagttctcgaatctcctccttaacagagctgcagaagggaaacacagacaggaagcacctgtttgactcasacagcagccctaatgcagtgccactcaggagcattccctcatttgaagaccccccaattacatgaaattatcaaccccattaaattccagccactgccattaactatcattagggctaaatcagttatctgatcacatcctgaaaaa

SEQ ID NO: 889668 - DNA, 599 bp, Homo sapiens
ctgaagtgccattcaccttttcctgaattgtcatttttctcaaactgttgactaaggatgaacatctgttaagaagtgccacctcctgtctgagaaacatggagcatgtaaagccactgtagggaagatgacatgcaatcactataacgcacgggctttcctttaagtcagctttgccatgtaatctcytcagcatgcattagctgtgtagccattgggatgtttcttaactgctatgaactcaattacatcatctgtaaaatgtctttgaaataactatctcattaggttgaaggccatgaggatttaatgagataaagtatatataaactgctgttcatatagtaggtgctcaataaatgctagcttcccttctgcatttccgtttatatgctagcaaggtcaagagcagatgcataaacaagaccgaattttctagtccgtatttataagatcttaactcatgttcagtaattaacactaatatacacaaatgaatatagaacaaaatgacttatacacactttcaggtatctcacacacaaatgctttaaatgccgttgaaaagttttgggaccttttcagtcactttgaatatt

SEQ ID NO: 889669 - DNA, 599 bp, Homo sapiens
ctgaagtgccattcaccttttcctgaattgtcatttttctcaaactgttgactaaggatgaacatctgttaagaagtgccacctcctgtctgagaaacatggagcatgtaaagccactgtagggaagatgacatgcaatcactataacgcacgggctttcctttaagtcagctttgccatgtaatctcttcagcatgcattagctgtgtagccattgggakgtttcttaactgctatgaactcaattacatcatctgtaaaatgtctttgaaataactatctcattaggttgaaggccatgaggatttaatgagataaagtatatataaactgctgttcatatagtaggtgctcaataaatgctagcttcccttctgcatttccgtttatatgctagcaaggtcaagagcagatgcataaacaagaccgaattttctagtccgtatttataagatcttaactcatgttcagtaattaacactaatatacacaaatgaatatagaacaaaatgacttatacacactttcaggtatctcacacacaaatgctttaaatgccgttgaaaagttttgggaccttttcagtcactttgaatatt

SEQ ID NO: 889670 - DNA, 605 bp, Homo sapiens
tgcctactaacatttaatcacaatgattactgcattttgcatttaaactttttaaattagtatgtaattattataacttaaccattaaagaaatgcataaagcaaaagtgaaggctatcccagaattaaaatgtactaaaacttcttttactaattataaaatgaatttacattgtatctgatcttcacccatgttgtgtgtatgaatagcttaattcctttcaaatgagcagtattccactacacagacataccagagtgtaattattgattctcctactgataaacacttagattatttccactttgaaactattatgaaaaatgctggtattaacatccttatacatgttttttttagtggaactttttcgttttcatttctctgggctggagagyaagcaaagctaagttgtaaggctggaaaacagaacaatgcttgctgctaagggtggcacaagggggtttctgaggtcatggaaatgctctatgccctgactggtatggtgattgtgcaggtatatacgtttatcaaaacttataaaactttgagccttaatgtgtgtaaattatactctatttataagaatcataaaaaagaaaaa

SEQ ID NO: 889671 - DNA, 611 bp, Homo sapiens
tcaagatgagaagatcacttgagctcatcggttcaagaccagactgggtaatatagggagacttcatctctattaaaaaaaataaaactaaatgacattgttccagagatcctagccagcatgacatggcatggcaaaaaaataattgatataatcatcagaaaggaagaaataaaattgtcattatttgtaggctatatgattatttacttagaaaattcaagagaacctacaacttatyagagcaaagaaatagaggtaaaggaatagctcagatgaactgattagagagattaacaacagaccaacatatgcatgtgcatttcacatatggcagaaggtcatataaaccagtggggaaagaatgaactattcaaaaaatggttctgggttgactgactatccatttggaaaaaaacaactttctttcattccagttacaaaaaaataaattccagatgaatttgaaaaggttttctaaatttaacatttatggaagaaaaatagagatttgttttagaactccaaggcagagaagcatttctaaaccaaggcacagaaatgacacataacaaagaaaagagtgatacacttttttgctatattaaaat

SEQ ID NO: 889672 - DNA, 661 bp, Homo sapiens
atattcacacatcatacataaacactagtggaaaattagaaatagtaaggtcaagagtgtattatgtgtttgtggggcaatggaggttctcttcaatttcataatgacctatgtagggaaatcatggtccataacaaagggaagtgtcagaagagatgaaagaaagcaaaccttggttaaacagtccctatcagcactagcacaaggcaaagatatggatattcagctctatgagcatttgtctatggcattcttagyacgtagttctgatttaagaataactcagcagtacagtctaatgctattccctcagatgactgtttagagaagtgactgaactgcttgacttggaaacttactgataactaccactggtacaattttcagccaaaatgactaaactgggaattaacttatattggtttgctagagctgtcataacaagtaccacaaactggatgacttcaacaacagaaatatatatcatttctctcacagttctggaactcagaaggccaagatcaaggttggtaaggttggttcctcccgacggatgtgaggaagaatctgttccaggcctccctcctagcttctggaagcttcaggagctcttcagtttgttacattctccccatgtctttacatcaccttctatttgtgt

SEQ ID NO: 889673 - DNA, 661 bp, Homo sapiens
atattcacacatcatacataaacactagtggaaaattagaaatagtaaggtcaagagtgtattatgtgtttgtggggcaatggaggttctcttcaatttcataatgacctatgtagggaaatcatggtccataacaaagggaagtgtcagaagagatgaaagaaagcaaaccttggttaaacagtccctatcagcactagcacaaggcaaagatatggatattcagctctatgagcatttgtctatggcattcttagcacgtagttctgatttaagaataactcagcagtacagtctaatgctattccctcagatgactgtttagagaagtgactgaactgcttgacttggaaacttactgataactaccactggtacaattttcagccaaaatgrctaaactgggaattaacttatattggtttgctagagctgtcataacaagtaccacaaactggatgacttcaacaacagaaatatatatcatttctctcacagttctggaactcagaaggccaagatcaaggttggtaaggttggttcctcccgacggatgtgaggaagaatctgttccaggcctccctcctagcttctggaagcttcaggagctcttcagtttgttacattctccccatgtctttacatcaccttctatttgtgt

SEQ ID NO: 889674 - DNA, 589 bp, Homo sapiens
tcacattgggagtcaggtcttcagcacatgaattgacagtcagagggacacagttcggcccatattgggaggcacgtggttatcagtttttggaggtggttgttactgatgttcaccaatttccagttcttgtctatttctggtgaagtgctggttacatgtcttcactcccttgaaattcagcttggctatgtgattagtcatggttcatgaaatatgaggtgtgtcacttttggcatttcatgactgttactcagctctcctcccatgtcttcccctgttagcaagccccaaagccccttggggaggtcatgatgtcataaaatgacaatctagttactattgcttcaaaagaactaaatggcgtaaaataatcattgacttatgctcatggaagatggggatctgtagataaatcagggtctgtgagtyctgagtcagcagtagaatatgctgcaattaaaaacttgatgtaagaatattatttggccaaaaagaaaaggaaggtgtactgatccatgccacagcatggatgaatgttgagaacattatgctaagtgaaagaagacaggcccagaaggtcacatat

SEQ ID NO: 889675 - DNA, 576 bp, Homo sapiens
gaaccaccacatcagagtctgagttaacacaaacttgctctggcataattgaaaaatcactatgctaaactttgtaaagaatacaccaccattcccccaccccccatgaagtacaccctagagtgtttgaagattatattatgagtggcccaaatgcctgtgtttggcatttgttaaacaatcctagaggagctgccatccttggggttctgtgggttcatccatggctgacacctctcatcctgaatcccttgggtctcacrggccctggaacaatctatattctcccggttgaagatgacagcatgtcagtgtacttaaaattcaatttcattcttcctaatctatgcaccattatgcaggtctttgaaatagtctccaaagaaggtaagtctatattgattccattcccttacatagcaactggtgtgtagcaacccatagtataatatgagggggagaaaatattgattctgggaaacttaatattattaaaagacagttgtattaaatctctttcctggatttagctgagcactttttttttcatttttccattttcaaaaaaatcaatga

SEQ ID NO: 889676 - DNA, 609 bp, Homo sapiens
gcattcagtagaataacttttcttttactaagcagagtttatcattagtttgatgtctactgaaagcataccactacatctaagactcccattagcttgaagctcaccccagtacatggctactactgaaaatttttgtcctaaaatgccctccaagaatagagcatcggactgctgaaataaaacttctctggataactcaagacgggatctgcaatgggttgtctgaaaaccaagttcatctgaagatgcaaaaggctaaagacgtggcgatcaattgtctcccaattcttaattcayagctgcattaatcataagcctctccaaaataaaaacagttaaacattttgaaacaaaagacatttcaaaaaatgtatacactggcgaacatttttacttaatagacatatatctatagaatagctgtattcaactttaaaagctgttactctagtgtgtactaaatagagcccagaaacacaaggtccccttccctcttgcttcaccagaggtctccccaaaccctgacccacattccttacccctccctagtgttcatccaggagggagcccagtggcagagccagctgtcccagtagcatagcggta

SEQ ID NO: 889677 - DNA, 625 bp, Homo sapiens
acattactcagactgtgccgacttgcagggtgaggttaagttgcagggtttcagccacccatcaatcctaaggtaactcacaaggcatatttgtattattccatcacttaagacaactttaatccagtcccccattccattttcatttctagtcttgaaatacttaatacagggtaaattgattatagaaaaaagtaacactcttggcatagaatttaatttttgcagtttattcattttaattgrtgtctacactcaaaacctttgacaaacaagaaatttgaaagatctgataattaaacagttaatccaaacttcctcctgtaggaaaaattgtaatttttaggactaaaaccaaaaggcaaactttgaatatatttgtatttcttttcatgtttgagaaatcacttaaataatcactcgtatcagtcttatacataaaatttatagttttaaaagtttctttcaaaggctatcattaggtgatctggcactgtctaataaaattaaaaatacataaggccaggcaccatggctcatgcctgtaatcccagccctttggaaggccaaggtgggggcattgcttgagcctaggagttcaagacaagcctaggcaacatagaga

SEQ ID NO: 889678 - DNA, 689 bp, Homo sapiens
gtggagatatatgtcccatataaattaaaatcctaaaaataaaaagatataagtataatatacagtatatatacacacacatagcatatttttataaacacatacatctctatgtatgtaaatcatatattatatatatatatagctaaaattgcaggatagggtaatgatgtcttagaaaaccaacaaaagaagcacaaaccaaaaggaaaatgattgatacaactgactctattgtaattaaaatgtctgtgtatcaagagggaccattaaaaacttgaaacaagcaaagacttggaggaattattattactttctgtggctgagaaaatgtttcaaagatggctgctgtgatatattccatcgcatcccatatgtctttcttaagtgtgatgttgacactcttcccacagagtggcaaagttcacgtcccatacctttgaccctagctgaaacttccagtctgccttgatcgacagagtacatggagagcaaggctaagtcagttctgaggctgagccacaraaaacatcatgcacttctgctttgtctcctgtgagacttgctctcggaacccaccaccacactgcaagggagcccagggcacagtggaggggccatgtgtaaatcttccaactgatagcctcatctgaggtcgagtcaaccgccagcaatagctaccaggtgca

SEQ ID NO: 889679 - DNA, 625 bp, Homo sapiens
tattaatttaaccctgctgttctaggtatatcagaagtcccatagagtaggcctgttttaatttcccaagggaccacataaaacattgtacctggtgtgctcaagttcagtgaattactatcaggacttcttggagtcttctytcccctaagatgccccagtttccatgttgttggcacatggccaggtgcagtatcccctccaaacctatgactggatcactgattggaattctccctggggggctgccccttccttcacattctcagctccatgccccgccaccccctcctcaagtaaacagctcttgagatttgacccaggaaaagtcaagtccaacagaaactcccagaacattataccccggccccatttgttttgaaaatagtatcgaagcttacaattgcaaacatacaagtgcttaattattgctcagtatccattttatttctagatattcattgaattccattcaaatgtcgatattagcaatattaaaaatagatggctgcaatttttctactgattatataaagacagacactttaggtaatggtcacatatgacatgattaaattgttttgctgtcattgtgttaattgtgtgccaaagttaaacatattca

SEQ ID NO: 889680 - DNA, 621 bp, Homo sapiens
tgaagaaagcctcacttccatcccagctttttcactgttccccacgagtaagtaagtgaacggcaaatgtgcaagggagttaaagtgtaaattcctcccggcccatataattgacttgctgaatttttgcagtaacaaaagactgctgttcaaaacatttccagtgacattttaagactacctataaagagaagttcgggccrggcgcagtgactcacgcctgtaatcccagcacttttggagccgaggcgggcggatcacgaggtcaggagatcgagaccatcctggctaacacggagaaagcccgtctctactaaaaatacaaaaaattagccgggcgtagtggtgagcgcctgtagtcccagctactcgggaggctgaggcaggagaatggcatgaacccgggaggcggagcttgcagtgagccgagatctggccactgcactccagcctgggcgacagaacaagactccgtctcaaaaaaaaaaaaaaaagaaaagaaaagttcgcgttggtcatttttgtgctgtttatgatgtataatcattggcactgtccccacagtgtcttaatcctgatattcagcaaatatttatccaacaggggtttacttatttattt

SEQ ID NO: 889681 - DNA, 584 bp, Homo sapiens
gaggctactaagcacttgtactataaatatggcaagaacctggaggaactaacattttattttaattctaagtaatttgagtataagtgccacatatgaccagcggctactgtaccgcacagctcagtcttagagaccacatggttcattacaagcatcagactcatcccaagcaaggacagcccaacgttaattaaactaagcagatcaagagctgccagatcacatgggtagtatccagaaygacctccatataagatgccaacacctagccgggattatggagttaagacaaatatttgtttttacacttttataaagcaaacagccctgattggacatcaacccaagttacagctgagcccttctctatttattaggtaattgtgtctaaactatgtttttgtttctctcttcattgttccatatgtcacatgcccacccacaatacacacacaaacacactcccatgagtcaaaccctacacgctcagtgctttgatgtttcagcctctgccatctgctctgcagctggctatcatgagggctgcagcttggagctgctggaaaatagaaacttgctca

SEQ ID NO: 889682 - DNA, 521 bp, Homo sapiens
ttatttctcctggattgttacattgaaaatccaggtctctcagtttagacctttggggagactcttcagtcctctccccatctgctaaccttgaccaaacacaaaggagagaggggcttcagaggagggtccctcggaccttggtgggcaggacccactttccctgtgcagaaggaaacttgaaatcaggagactgagcctcacccagggacaggccccaccrctgtgccctgacaggcccttgtggacagaaagggacagggcgtagcctcacttcgaccctctgggtttgctgtggggccagctgggcctggtgtggctgagctccagagtgctgtcagccactcccagttccctcatgacctgggcagggaatataatatcacctctatctgtgcagtaagcacagcaatgtcagggacactgtttttagaatctggcttgctcccctcccccagcccaactgattatctgtcctggttgccaggcacctgtttgcattagatacagaacactccgca

SEQ ID NO: 889683 - DNA, 637 bp, Homo sapiens
ctcatgccttccaagtatcaaagtcataacaaacttcctctgtgtgagtccacaaggcattcttcctctgggggaatcactccctttccattgtcctgatactcyctctgtggggctgtagaggagtgcatggcttttgccctacttccaagccttctcagggaacacagcagggacaaagagctgaaggctcagccttggccatggcccatcaggcccactgcaggcttctcctgggagaagatccagagcctcgggctctgggctcccatatgcagggagaacctccgaccacagaaattggaaggagctaccactgcctaggagacatcttcccttgagctttttcaagggctgaacaaacagagcccacacttgttcacggaatccatgggcctcagcacatcagagagaggagaagaaattgacccagagtgtaacccacccccatcttcgggccccaccaagaattgtcagtgatgccagaggaagaggcacctaattcaacagatcaatggagactcacatcacccacaagcaccacttatctgctatttcatcccacaccagtacctgatcatcaaccgttgcaaacactcattgctgtaattgtatcattagtttcaatcacagccaa

SEQ ID NO: 889684 - DNA, 637 bp, Homo sapiens
acaggcccatgaacctcaagttatttgagggaccttgagaaaagaggtattcatccatttatacaggtattacagacacagtctgagactgagtcagatttttggcttgacttcttaacatagctaggaagccaaggggctttttaaaaagtctaatctgagattctttatgaaaatattccagcaaagccaacttasaacaagcctataggtcattcatcattcttactaaacttttgtaaataatcaggtcaaagactaaacttaaacaaaacagtctgtctatgattatctttggttgaaatgggaggattcgagagaaaaaattatgtcatagaaaaaaacttcacatatgcctgttattacattctagccttgtccatttgtttctgagctttgtatctggactgaatcacacatttttattttcctccaatatatggctgagacactcagactaatgtttccaatttttcttccacccttctgacttagaattattagaaactaaaactgcctttttcctgaggctgaagctagtcaacttggctttgaaggaatattattgcaacagcttatatttggacaaaactttctacacgcaaaatgcaggctacaaaaatctgtcagattgcca

SEQ ID NO: 889685 - DNA, 575 bp, Homo sapiens
agggtttagggagaaattgttagtaacacatttcatttgagaaaataaatttcttttagggaagatgaaggcaagaggagctctagagtgagcaagaagggattggtgattttttttttatatcattctttggcacagagttctaggaaatcagttgtgtgataggagacccactcctgtatagcaaagctaccatggatgaaggccttctagacctgggattgtaggagttctaaccatcactaaacttctttagtgcggcagatttttcgctgactccactgccattcctgcttgattctagtgaggcttctgatataacaatgctagaaaactaaaaaccccacttaccagagccaggattttgtaygtggatgagattcttccaagcagatgtccacatacgagactaggagggtttgagcaatgggaggcagtggccaggctcagggacactggaggtctttgcaagcaacagacacgttggttctcctggggcagttctagaagagtttccagagtctggttcctagaaacttaggtacggagcagtacgtggtggcaaccatggtgtt

SEQ ID NO: 889686 - DNA, 651 bp, Homo sapiens
cattttgttcttatatcaaaaggacacagattataaagctgtaaattctccctaatttaatctacatgatcaatgtattctcaatgaaatactgagtaattttgtgaaatttgaccaaacgatacaaaattcacatagagaaataaatatgaaagaatacaaagaaatatgaacaaaaatgatgagaagggactactttgatcagatactgagatakaaaactacagtcactaaaatagcctgatactaatgctttgacagaacaatattctggaataaagagttcagaaacagaaacacaaacaaatacatatggtaacctagtctaagataaaggtagagaaagtggacttcagtaaatgatgagaggtaggctagaatctacctggaaatcaaaacaaaagcagattcttattgcatttcttacactaaaatgacggttagatgggttcaaaatgtaaatgtttaaaaaattattaaaagaaaacacagagtgtggaaaaacataaagcctagaaccataaaggaaacaactgataaaaataactgcataaaaatataaaacttccttataattaaaaaaataataaagttcaaaggcatcttacaaactggaaaaaagattttcaatacatatgacaaagacctaat

SEQ ID NO: 889687 - DNA, 661 bp, Homo sapiens
tggcaaaaattaaagaatcagataaaacatattattgttattataactgtgatgaatactgataatgcatattataaaaaataaagcatatctgtgtatgtgtagatatgtaaagttctctaagatacgttcattttccaatcaatgtctacatgtaaaatagagttaaattctcatttttaagatttaagactttcatttggtacagtggtaggctgaataatggtcccctaaggatgtccatgtcctaatccctagaacctgtgttactatatatagcaaaagggactttgcagatgtgatcagtttcaggtcttgaggtgggaagattatcytgagttatcccagattatccatgtggacctaatgtaatcacatgggcctgtctaagaaggacacaggaggggtcagagtgagaaggctctgtgatcacagaagcagagtcagagggagaagacacgacgctgctggctttcaagatggaagaaggggtcacatgccacagaatacaggcttttctagaagttagaaaagggaagggaatgatcctcccttggatcctctagaaggaatcagtcctgctgacatcctaactttagccccttaagactcatttcagacttctgacctccagagctgtaagaaaataaatttgtttgaa

SEQ ID NO: 889688 - DNA, 666 bp, Homo sapiens
tgggtgagaatatttgtaaccggcacaatacttatacatgaatggccactgtgaaatgggtttctaaggggcgatattataatttgctttcttaagagcactgactacaaagacatctcctaaactctttctttgtaaacttaccagaaacccttgtatccccatggatgaatccagagcttttcagtggctcaggtttctccttctaacagtgcttgaaattccttccacagagaatgaagcttttaattctagaaccaatgttcagattgtgcaaaggcatggatttaaggtgacagctattaacattggcaaagttctttctattgtgaaaattgctttcatatatatttggtttattttgccctccggacagtcctgggcttcattattgagtaacttattttctgtttgaagaaacggaggcttagtggtttaagaaagctgattaaagtcaaatggcaaggatggggtaaatgatggagctctaagcattgggtgtyggcgtctgtaatatttgtgcatgactgactacacagctctccttctgagtcagtggcttttaagctctttggaaccacagtaaattccttttacctcatgactcagtacacacatatgacccaccaaacagtacttgccttgaccattccccatgccttctaa

SEQ ID NO: 889689 - DNA, 622 bp, Homo sapiens
atctatgtgttatctatcttcatcatcatctatgtgttatctatcttcatcatcatcatctatgtgtcatctatctatctgcctaccaatctatctaatctgtcttgtcatctatcatctatgtattaatctattacgcattttgtactggtcagatgcwaggctttatttgagcctacagtcatgcaccatgtaacaatgttttgatcacgatgaactgcctatatgatggtggttccataagattataatgtagctgaaaaattcccatggcctagtgacatcatagctgttgtaacattgtagctcactgagtttgtggtgatgctggtgtaacctgctgggctgctggttgtataaaagtctagcacacacaattatgtaagatatataatacttgctaatgataataaacagcgatattactggtttatatatttactacgctatactttttatctcttagagtgtactcttttacttatattaagaaaggtaacgataaaacagcctcaggcaggtccttcaggaggtatccagaagaaggcattgttatcatcggagatggctgctccatgccagtgggacaagatgtgcaggtggaagacagtgatatggatga

SEQ ID NO: 889690 - DNA, 678 bp, Homo sapiens
cacttgctcttcctcccacagttggatctggctgggttgctccccagctgccatcccagatctcatttcctggagtccatgtctaccttcttttggtttatactcttttgtgaatggagcacacccttttggagtttccagagaaaaggtgcatgacaggtgaaacttttgatatcttgctaatgtgaaaatgtttgctgatattgctgtgaatagcttgacagtttggatttggaaatggagtagaaaataatttccttcccagtccatctctggaagcacacactgggagtggttgcccttgaggaggaaaacagsttagggatggagcgagacttacttcactatataactttttgtactattcaacttttagaaaccatttgtagacactgctttacgaaacttaaatagacattagtaaacagaaatcatgagcaatatggagaatatactgcccccagtttaccatgtgctgcattgtatttaatatttagtcctatgagcaatgcatttattgccatgcaagaattttagcattgaaagggttttctatagaccagaaatggtgcaagcccaaacatgatcataattgcatgttataatggaaattcataaccttgttatctcagagcttttagaaaatttgtgaagatttggacattttagggaaaagga

SEQ ID NO: 889691 - DNA, 639 bp, Homo sapiens
aaactaggagaagccacggtatgtggtctgccagggtgtcttcttgctataaactctgaatgacatcagaagggaaaagagtacgaaattcagagtgaaaggcctgagtttgggtcccagccccactgctgtgaatgcaaatcytgggatgttgccagctggcagagttggttttttatggaggctctgagggaaggtcttccatgcctcttccttagcttctgatgttgctccaatccttgccattccttggcttgtagatgcatcactccagtctctgcatccgtcctcacatgatgttcttctctgcaggcctctgtgtctcaaatctcactctgcatttctcttatagggacacctgtgagtggatttagggcccattctaaacccaggttgatttcatcttgagatccttacctaattacatctgcaaagaccctattttcaaaggttccattctgaggatccggtggacatgtgttttgaggaatactattcaacccaatacagctgtagagttagggggtagagtggaaaggagggcatggcagtggcttccaccggaagcacctgatctgccagggagagctggtgttcggattcaaaagacacagtctgagtcactggatggacaacctg

SEQ ID NO: 889692 - DNA, 657 bp, Homo sapiens
aaacccaggttgatttcatcttgagatccttacctaattacatctgcaaagaccctattttcaaaggttccattctgaggatccggtggacatgtgttttgaggaatactattcaacccaatacagctgtagagttagggggtagagtggaaaggagggcatggcagtggcttccaccggaagcacctgatctgccagggagagctggtgttcggattcaaaagacacagtctgagtcactggatggacaacctgggggttaccactggtaaatacagaaaggttacagcacacagttgatttatggagatccattcatttaacaacttgaaaaattggctaccttccaggttctgggtctggtaatgaagtcatagaaggcccccaaaatgcaasagtcctgaagggctcccaggctcgcttcaactgcaccgtctcccagggctggaagctcatcatgtgggctctcagtgacatggtggtgctaagcgtcaggcccatggagcccatcatcaccaatgaccgcttcacctctcagaggtacgaccagggcgggaacttcacctcggagatgatcatccacaatgtggagcccagtgattcggggaacatcagatgcagcctccagaacagtcgcctgcatggatctgcttacct

SEQ ID NO: 889693 - DNA, 651 bp, Homo sapiens
tctctatctattccagctcatctcggatggtgggagatgtggagatagacagcattaggaaagtagtttgacttccttataatcctacagttctgctctgggcatcttactatggggagaaaggtgatccctagacctggttcagctgcagctgactgcctggtgcatagacttctattctccatgcagagtcatttaacattgacacaggaatagcaaactactattgcaaggtcaattttccaggaaaattctaaggaagaacatctaagagctgtttttgaactccagtctgtggttccaaagtggtggatggccattgatttcaaagcaaaccccatgttccttcataggaagtctactgtttcagtattttctaaagactagtatctaacaaaatagcatgcatttacattaagataccacccaagcacrcagggttgagtgacagccttttgttgaataacaattcacaattaaacagatcaacttaaatgtgtgtggtttgacttcagcgtggtgcgctagggagaagtgaagggctggatgaaaactctcttgggaacatcaatgtagttcccatactgtccctttctgtgacgataaaaacgttctacatctgtggtgactgagcacttgaaatgtggctag

SEQ ID NO: 889694 - DNA, 639 bp, Homo sapiens
ccagccttgtccctaccatggctacttaaatcagagcatgcattttctatgcagaatacttacagaatgaatgatttattctaaaagcagagaggggacatgaacattgattttgcttttaagtggtggttcacattgtttgcagaatctctcagctgtctagaaccattgacaagtgcacttgagtggccactttccactcgctggctcacctggtgccccagcttctcaaaacagggggacacaggcatccccatgtggctgaaagacacacatttagggtaattatcattatgtattttgtttgtttgtttgttggtttttttttttaattggccagaaggtcattgtagagttggaatttccctttgtggagtcycagaagcatgatgcagaggaatgagcctggaaagaagagattgagcctagtttcaacttgctgtgtggccttgggcatgtcacctcactcatctgagcaacatgcttattggtaaaagacctggttcttctcccagtgtgcctatgggtccttgagtttcttaattattgatgggtgcttgtgaacttttagttggagggaggattcctggatgtcctacaatacataagaaaagcctgcaaaactttcaaatatcccca

SEQ ID NO: 889695 - DNA, 611 bp, Homo sapiens
taacttgcatgaggctaccatgctagtaagtaacatatgtgtaatctgagccttgagggtgtgatgctacatcctgtgtcttgaccactattttatctgtctttactcacccataatagtggcaagagaacacagcacagtgcagggcttgctgggggccacacctgcagaagatacaaagaatggagagaagaaaaggagcagaagaaggaggaagtgaggccatagcccataacattttttggcagcagtagcagagcccagtaacagaacaattggatgttgaataaaatgaagagtgagccattaactcctcagtacagccaaggttaagatatcaggtcatgatccagagaygagaagatcaggcctgcaaaaccaacctgctgtcccagctagaaaagtattatttatttcctagggaactaaaataagaataaaaacccaacttgtacttgtgtccatgattagtatcttattcctgatttaacaactcacttgatattctcagtaatttattgcagcatgagtgttattctcaagtaagtcctttagttcactattactattaaaataaccgcaatggatattggttgaaatagaaatatctg

SEQ ID NO: 889696 - DNA, 586 bp, Homo sapiens
ctgaaatgccttgttttgggaacacaaaagtatttggggctgctgctggaatgggcaggagaccatttatgaagatgttgctacctcattttcatagtaaaacttccttttgggaaacttcaactgctcagagaagaaaaggatgtttcctatacygaggactggctacataatttgtagggctcagtgcaaaatgaaaatggcagactctttatttaagagttgttgaagccaggcacggtggcttgcatctgtaatcccagctactcaagaggctgaggcaggaggatcttggaatgtctaagcattgaggagttggatctgaaaagcagtgaatacagcaagaaaggacaagccaatctgtaagaaccttgggtccatgaagatatggaatagatacttaaagatactaatgtgacttgtgcctatggtgaaagtagtgtcacaaggaattaaatgttgtttaagacatactgtaaaatgatcaaactacactacaggtgccttgccaacacccagatgttattactccagaactttggatctctactatatgccaattttggtgaacacccagatgttatta

SEQ ID NO: 889697 - DNA, 610 bp, Homo sapiens
gaaataagatattcaactgtttgtcctacagatccagacatttcatatggctcaatctaacatctgatttcacttaatccttacaataagtctatgggagaggtgccattgaattcattttttggatggtgaggagccgtggtccatggatgtgaaggtatttctaaggctgcatggttaggaggccggcagaggccattgtctgatgctaaatcgcttgyactcttttgtatcttgctctgggtctcaggaccctcactgtgaatttcaaaaggcttggactaaaacccagtgcttttcaataagatgcagtcttgttctctgaggaggcatgtgacataaaggtgggtggtttagtgtcatgaagactggggaggagaccctttggcttatagtaggtggggtagagggtagaagccccctgcagtgtgagtcagactgactgatgaccaagcattttgctccaaatgccttttgcttcctgtttagaaacatgggcccacatgaaccccacatttcttcagacagtggaatccaatcactcagccttcaataaatcccaacagacgagggcggtactttgcttcgatggctgcctggtgggatgacc

SEQ ID NO: 889698 - DNA, 654 bp, Homo sapiens
ccaattctccttttcttcgtagtaagtagagactgcagttgttgttctcttccaccaaagagattgttgcttcctttgttaggcagagagggtaaggactaattggcttaatacagaggttgagctgagctgggtgttgagcttcagttttagtgagactcagtctacatctagttcacggctcttctagccttttgatctgagcccatccgggtttctatctcagtcctgaaagactgtgaaagatttcattctgccyttcagaggtttttagcttagctcttgaacttcacacctgtattggtgtctatttctgcataacaaattacctgaagtttagaagctcaaaacagcaaatacttattttgtcatggtttctgtgtgtcaagaatttgtgaacagcttagatgggtgaatttggctgcaggtctctcatgaggtttcactcaagctgttggctgcagatgccacagaatgaagactggactgggactggaagacctgcttccaagcttggtcctgtggctgtgggctggggccttttgtctttttttgctgctggccaaaggcctcatttcttcaccatgagcttctctgagagttcttatgtgtcttgatgacatggtgattcattatgagtgattcaagcatgag

SEQ ID NO: 889699 - DNA, 580 bp, Homo sapiens
ccagctgcttttactgttaaaattctccccctctggactttttttcagcatttcccttgatgtaacctttctgggtcttttccactttctcttctttttcctcttcttactggacattctctcctaatttcactaaaactcatgycttacacttccatttctatttgaatgacttccaaattttcacctgtagtctcttacctttctctcaggcaacaaaccagatttcaagtgcttatcagatgcctccatataattggctcattattaccctaaacacaatatgttgacctgaaatttaagttgcataacctccatttggccttcaaaactcaagtcatattgctctttcccctggcatcctctgggtcctcaggctgcatggagtggtttggagttggggcggggggaagtttttctctgggatccctgtgttcctccatcaggacagtcatcactgcattgcattttcgttagctgtctctcctgtttcttagagcagtaattcttgaccaggggagattttgctctctgaaggacatttgacaatatatggagacattttctgttgtgactattt

SEQ ID NO: 889700 - DNA, 580 bp, Homo sapiens
ccagctgcttttactgttaaaattctccccctctggactttttttcagcatttcccttgatgtaacctttctgggtcttttccactttctcttctttttcctcttcttactggacattctctcctaatttcactaaaactcatgccttacacttccatttctatttgaatgacttccaaattttcacctgtagtctcttacctttctctcwggcaacaaaccagatttcaagtgcttatcagatgcctccatataattggctcattattaccctaaacacaatatgttgacctgaaatttaagttgcataacctccatttggccttcaaaactcaagtcatattgctctttcccctggcatcctctgggtcctcaggctgcatggagtggtttggagttggggcggggggaagtttttctctgggatccctgtgttcctccatcaggacagtcatcactgcattgcattttcgttagctgtctctcctgtttcttagagcagtaattcttgaccaggggagattttgctctctgaaggacatttgacaatatatggagacattttctgttgtgactattt

SEQ ID NO: 889701 - DNA, 580 bp, Homo sapiens
ccagctgcttttactgttaaaattctccccctctggactttttttcagcatttcccttgatgtaacctttctgggtcttttccactttctcttctttttcctcttcttactggacattctctcctaatttcactaaaactcatgccttacacttccatttctatttgaatgacttccaaattttcacctgtagtctcttacctttctctcaggcaacaaaccagatttcaagtgcttatcagaygcctccatataattggctcattattaccctaaacacaatatgttgacctgaaatttaagttgcataacctccatttggccttcaaaactcaagtcatattgctctttcccctggcatcctctgggtcctcaggctgcatggagtggtttggagttggggcggggggaagtttttctctgggatccctgtgttcctccatcaggacagtcatcactgcattgcattttcgttagctgtctctcctgtttcttagagcagtaattcttgaccaggggagattttgctctctgaaggacatttgacaatatatggagacattttctgttgtgactattt

SEQ ID NO: 889702 - DNA, 555 bp, Homo sapiens
ggggcggccctggacccagctcaagaaaccatttttccctcctaggcctctgggtctgtgatgggaggggctgctgtgagggtctctgatatgccctggagacattttccccattgtcttggcaattaacatttggcttctaattatttatgcaaatttmtgcagccagcttgaatttctctccagaaactgggtttttcttttctattacatcaccagtctgcaaattttccaaacttttttgctttgtttcttcttgaatgctttgccgcttagaatttttttctgccaaataccctaaatcatctctcaagttcgaagttccacagatctctagggtaggggtaaaatgctgccagtctctttgctaaagcatgacaagagttaccttaactccagttcccaacaagttcctcatctccatctgagaccctcagcctggacttcattgtccatatcgctaccagcattttggtcaaagccattcaacaagtctctaggaagttccaaatgttcccacattttcctatcttcttctgagcccttcaaactctt

SEQ ID NO: 889703 - DNA, 555 bp, Homo sapiens
ggggcggccctggacccagctcaagaaaccatttttccctcctaggcctctgggtctgtgatgggaggggctgctgtgagggtctctgatatgccctggagacattttccccattgtcttggcaattaacatttggcttctaattatttatgcaaatttctgcagccagcttgaatttctctccagaaactgggtttttcttttctattacatcaccagtctgcaaattttccaaacttttttgctttgtttcttcttgaatgctttgccgcttagaatttttttctgccaaataccctaaatcatctctcaagttcgaagttccacagatctctagggtaggggtaaartgctgccagtctctttgctaaagcatgacaagagttaccttaactccagttcccaacaagttcctcatctccatctgagaccctcagcctggacttcattgtccatatcgctaccagcattttggtcaaagccattcaacaagtctctaggaagttccaaatgttcccacattttcctatcttcttctgagcccttcaaactctt

SEQ ID NO: 889704 - DNA, 628 bp, Homo sapiens
catgcctttattctagacaataggatattagtaaaaataatgtatacacttccgtatctggctcatgaaaacctctcatcaaaccctccatactcccttcttcccccatctatttagctgtaaatgaggagaaatccagggttgtaaatcataaggtggaaggggcctggatgcctgaatcaccatgtggaacaggccacccaagagagccctgaccaaaaatacctctgttggactatattattatgtgaagccactgagatttagggaacatttatttcagcagtcagcctcccttgaccaaatcctctgtgtccccagcatagaccctgacatacaacaggcactcaaaatgacttattaaatgactggaggacattgaatttccccaggcaagacctgcttctrtgagagttttcaattgttcccccactgagtaagtcataccccactgcactagccaggcctttctggctgtgtctagagatagaactttgaaagcacaaaggaaaggaagaaacattattgctaatcctatgtgttttgttgcagtgtttttttgtttgtttgtttttgttgtttttttggtaaatcccacagctcagtccttatgtacaacattttcctt

SEQ ID NO: 889705 - DNA, 616 bp, Homo sapiens
atgcacctggacatcccttctgagctgcagatgcttctgtgtctcatgtgtccaattggctgagatgtttcacacgggcaccttagaccgacatagtcacaacagcactcaccatcttctatccaaacctgtgcttctcttgccccatctcaggaaatggccccatcatcttctcagttgcaagaaccaggacctggaattctcttcctgctgtcacttgatgggccctttggaggtccacatggacaggacaggtcagcagttgggctctccccctgatctgatggtgctccccaacactgrgctctgtttcagttccctgaacgtggtttgcttctcccaccccgggcccttgggatgccatgatccagggccttgggatgcctctgtctggagtttttcccaccctctgccttcttcctggcaactcttactcatctctcaggttctagcacacgtcatttcctccaggaagtcttccctgatcaccagcttaggtcaggtcagggctcccatgtctctgttgagactcttcttcatcattgcacttgacacagtccactcaggggtgatctatcaacgtctgtctcccccactagcttgcaaaccccaccat

SEQ ID NO: 889706 - DNA, 699 bp, Homo sapiens
ctttacatatacttaagatttcgtgtaatagtgtccaattcgattgaatcagtggtgtcctttaaaagctcattatataaacaggccgatgtgaaatgctaagctggtgacagggcagccccaacctcattagtcagttagatcaccggcaagtctgcctgctgacaggccatgccacaaaggcccactacagagayagattgcactcctccatgaacaatgtattcagtcgattcacaatctaatgagagccaggcttccttttaatagtcccacaacatttcaccctttggcactaaagagaaatttaactgcaatgcactgacttttgtggctgctttctacagagagagaaaggatacaatgccttttaaagcctcagaagtttccatttttagttataagagctagatcctctgtggacagacacctctctcatgcaggacccaaaagatccaaaaagcttttgaggccacagtaatacctggtctttttcagggcaaaacacgagagaatgtgtaaagctagtgggtaaaacttcacagtcttcaattcaagacagagtgagtcagcattccatttgtagagtggcgggaatgcgtgtggggttatggcttgctgagcgtctttattctacaatgtgtgtgatgctcgcagggggtggatgtgcttacaaagaccaatgacaccacctcccac

SEQ ID NO: 889707 - DNA, 644 bp, Homo sapiens
aagccaccaatcctggccaagaaagtttcttaaaatagatgtagcaatttgtcaagcacctccaccaaatacctccttcaagttcatagttatttttcatccaggttccttctttgccgtctttaaaaatgattcatttcatttctcaggcactattctatgaatttccatgtcatcacttttttkctgagttcttgctaggagccagaattggctgaaattcctatgagagttcccccacagttgcattttggatgaggatttcgaatttcacatgacaaaatataaatgccgctaaatgtaactccagaggtacaagcagtggcgtcggaggccccttctctggctccttaatgcccccattagtattacaacaaggaaaagagacatgggctgaagagtcaggcagatactggcagaagtgagtccagttaaaaacacatcatggttctgtaacccgccctgctggccccctctgccttcaacctcttttgaggtaacgtagctcagagttcagacatccataaaagcctgtgacagggagtagggcaggaccagtgacataatttgtggccccaatgaaaaatcaatacgatgccccttgttaaacattgattagaatttgaagatggggacagcaacat

SEQ ID NO: 889708 - DNA, 586 bp, Homo sapiens
tcctcactgaatgcaatcatttctagcttttgatttaaagtgagagatgtgcaatgaatgattcctcctctcactgaaacaccggagactgttgtggggccattcattggcctaatttcaatattgttatgtcttaggaagtagggaagctgagaaatggtcaatattgttgtcttaggaaatagggaagctgagaaatggagactgggaaatggttggttagtagagtggtcagaacacacacaacatttatcgattaagtttgccatctcatatggctacwgaacaattataatagtaacattataatagtaacaccagagattactgattaccaatcaccataacagacataataataatgataaagtttcaaatgttgcaagaattaccaaaatgtgacatacagacacgaagtgggcacacactgttggaaaaaatggtccccatagacttgctcgatgcaggattgccacaaaccttcaacttgtaaaaaatgcgatatctgggaagcacaataaagcaaagtgtggccgggcatggtggctcactcctgtaatctcggcactttgggaggccaagtggg

SEQ ID NO: 889709 - DNA, 560 bp, Homo sapiens
ttaatataaatctttaacttcagacagttacttttgcaatgtggatgaatattgtaatggtagattaatgtatagtactcttggagaatcataaacatcacagaatgtctgtgtttgatatacattagagaacactagcagcttatttcatagatgaagagtgtgagccttaatgggaatttggtgacttgaatagaagttcaaaataagactgaagcttacagtttagatgtaatgagattactgccagttttctrcaagttagcctaccctattttaatttttttgaataagtactaccatactctgcttaattttaaaacgttgcaatggcgtcccaaaataatgatagatttaatgctaaatagaatagatgggcaaagaaaaccacatttctaaaactaaaacaaacattatgaaaagctatttcatggctctttagaaaaactttgatacatagctttgagacatattttttaaaaaaccatttattgaaataagaaatactaaaaatattatatgaatacaataaagcaaaagctcacggacgttagtcctca

SEQ ID NO: 889710 - DNA, 607 bp, Homo sapiens
ttgcaatgaaccattaagatactgccatgttttaattctctgcatagtatggagtaccattaggtgttttctggtttattcacttgttttatttgtttattgtttgtctctcctgactgagaagagagtcaatgaaggaaaggaccttgcagacctttttcattgttgtattcctcagtgtctagagtagtgcctggcatgaagcagatgttctgtaaatgaggattaaataaataaacacaaccaccaaatgaacctttatgcagcctggtttaccaagaatatctagtgatttgaggaaattctcaagacatatggttattaaaaaccgatttataattatgtgcaggcatatctaatatacaatgcacaatacatattctataatatataatgtaatgcaatatrtatgccccgtaataatagtatacacatattattatttccatgtgtgtgtgtctgtatgcgttctcacaaaagtaaaactcacagggttggtgggaaaagaagcttggggaagaccacaggaaacctatgcaactttgtaacaagggcaactaaaagccacttattggttcctggagagagaacttggacacctcagaca

SEQ ID NO: 889711 - DNA, 597 bp, Homo sapiens
gctccttaaacaatccctgaaggtccaaccataccagcaaatgctgcaatataaataatattcacaaagacaggtgagagctattgccttaccaggggctggactcatggctgttagaatgagcagcaatgagtattctattcactcactttggctttaaataagaagccaattttacgcttaaaaatckctgagtgcataaacacaaacatatagaaatctggagggaggctaaattttacacagtctacccacctgctgtttgaaataagagtgctatagttaatgtaaattacgtgcaaagaatgcagattgagaagattagagaaccatcaacttagtttgatcaaatgatacaatgtgcttgaaagtaatttaatacaaccatagagcatttcaatgtttctttctttggaaggggactttttaaaattttatcagtttcatactatgatttatccttctctccagggttgttcatactgtggagtttttctacaggttagcgtaagcttgagcagtgtcagtgacaggatgtctccccactggtgcatgatgatttctcctacagtgtcccacatagcatcaggtatgttc

SEQ ID NO: 889712 - DNA, 597 bp, Homo sapiens
gctccttaaacaatccctgaaggtccaaccataccagcaaatgctgcaatataaataatattcacaaagacaggtgagagctattgccttaccaggggctggactcatggctgttagaatgagcagcaatgagtattctattcactcactttggctttaaataagaagccaattttacgcttaaaaatcgctgagtgcataaacacaaacatatagaaatctkgagggaggctaaattttacacagtctacccacctgctgtttgaaataagagtgctatagttaatgtaaattacgtgcaaagaatgcagattgagaagattagagaaccatcaacttagtttgatcaaatgatacaatgtgcttgaaagtaatttaatacaaccatagagcatttcaatgtttctttctttggaaggggactttttaaaattttatcagtttcatactatgatttatccttctctccagggttgttcatactgtggagtttttctacaggttagcgtaagcttgagcagtgtcagtgacaggatgtctccccactggtgcatgatgatttctcctacagtgtcccacatagcatcaggtatgttc

SEQ ID NO: 889713 - DNA, 597 bp, Homo sapiens
gctccttaaacaatccctgaaggtccaaccataccagcaaatgctgcaatataaataatattcacaaagacaggtgagagctattgccttaccaggggctggactcatggctgttagaatgagcagcaatgagtattctattcactcactttggctttaaataagaagccaattttacgcttaaaaatcgctgagtgcataaacacaaacatatagaaatctggagggaggctaaattttacacagtctacccacctgctgtttgaaataagagtgctatagttaatgtaaattacgtgcaaagaatgcagattgagaagaktagagaaccatcaacttagtttgatcaaatgatacaatgtgcttgaaagtaatttaatacaaccatagagcatttcaatgtttctttctttggaaggggactttttaaaattttatcagtttcatactatgatttatccttctctccagggttgttcatactgtggagtttttctacaggttagcgtaagcttgagcagtgtcagtgacaggatgtctccccactggtgcatgatgatttctcctacagtgtcccacatagcatcaggtatgttc

SEQ ID NO: 889714 - DNA, 669 bp, Homo sapiens
tcatacaactagtaaatggaagatctagaaggagaatccaggtcttctgattccaagtgcaaagcctctttcccttatagtagcggaggaggccaagggtgcagagtgtctgaccacaggggtatctgacagcctgactgtcttcaagcctgaacacccttggaagcccctcagtctggggcctgagtccatttacaggagactcctcataaagtccktgaaatttccactttctcagctgcaaggcaagacccaaacatctcccgcaagcctattgcatatttgtagaattaagcagacgagactggctacacaatttgcaggacccagagcaaaatgaaaatatggaggcttttgttcaaaaagcaggaaaaaggtgccattaaagttctaaaatataaagctttttccttccttctgtggtctccctctctccctctgtcatgatggcctttattttttatttaatatcccacttcctctggcatggtgatactggctggtcaagtgctgaccctccctaactcccagtaacagccctgtgacttggcatgcacactcatgtgccccaccacatgcctggatccccaccatcatcatacccaggccagggtggggacgtgtagtcaggcctctctcagtcgaataggtgaccttcagtgacctgga

SEQ ID NO: 889715 - DNA, 663 bp, Homo sapiens
tgaggtcaaaatggtcacagtatccatcttagcatggtgacatcagagtgattttattttttaaaatttactagttttttaaatttaaatatttttaaatttaatttttttatatttaaaaggtatctgctaccttttaataataaacatgtactaccaatgtattcaataatttataaaaagaatatgatacaaattaagacccctaattttttttttgtttttttttttttttttggtgagattgggtctcgctctgtcacccaggccggagtgcagtggcacgatctcggctcactgcaacctctgcctcccaggttcaagaagttcttctgcctcagcctcctgaatagctgggmgcacaccatcacgctcggcaaatttttgtattttcagtaaagacggggtttcaccatattggccgggctggtcccgaactcctgacctcatgatctgcccgcctcggcctcccaaagtgctgggattacagacgtgagccaccatgcctggccgagttaattttttattaatgtttagactctccaactggaacatgcccccttaatgaaggaaataatacaggatacatctgtgaaccttgtctctcttccccggtacatgtgttcatgtgtatgcatgtgtggatggacatgaaacaaaagc

SEQ ID NO: 889716 - DNA, 651 bp, Homo sapiens
gaaatttgcaactaagactatataaaacatgcttgatgttttttgaaagagaagcatattcttgttttctctaatgacttggattttacagttcacactgaatgcaaataataagactctattaccttcaatgcaaggatcttcaattagtctaggaaactggtttctgtattagaaaaataygtgcatatctgttaagatgaacacatggcttaatgagggatcaacttgcctgtatattagagtttcagtaaaatgctcttggttttggaaacaaaggtttaagaggatacgttagctttatattcttacgtgggaacttattacctgacagacatcaagaagtgatgtcaagaatacctaaaagctatttaagtttaaatagtaatttaggtttattaaaaccatattagttatttaggtctaataccactgtttacagtgttcctgaaagattattacatagtccaaataatggatactgatggtcattgcatgctgaaatgacctgctggcttgtctgcttgactttgtcatcaatcaaggcaactgtggactctgctaaggccatgtcatgtaatccaatggaaaggtccagtcctatggccactgggcacaaggaatgtcagcccatcttggatgttgtcagtg

SEQ ID NO: 889717 - DNA, 578 bp, Homo sapiens
tttaactatagtattaggagtaaaatatctgtggaaattactgtacagaaatcaattgtaaatcatggcaatttagaattactgtaacaaaagtccataggacaaagaagatgagagataagggatagagggatgcctatacaggaatcaaatagattctttaatggtgataaatcaattaatcaagatataaatactggaaaaaccaataaaaatataaccaagttaatttggggagtggcatacttagaatactttataatttcatctctggccatagtgggaagttgacactgtatttggaaaaagaagaaggctggctgcgcatggtagctcacacctgtaacctcagcacttcggaaagccaaggcgggaggattgcttgagccyaggagttcgagaccagcctgggcagtatggtgaaactccatctctaccaaaatatacaaagttagtcaggtgtggtggcacatgcctgtggtcccagctactcaggaggctgaagcgggaggattgcttgagcccgggagtttgaggctgtagtgagccacagttgcaccacggcaccccagcctggg

SEQ ID NO: 889718 - DNA, 683 bp, Homo sapiens
ctgttgtacaattggagaaactaaggctggaagagatggagttagtacatcgcagagctgggatacaaagccagacagtctggccctcagaacctgtgctcttgactttctccccaaatggtagtgaactctgcaataaggaacatagataagatgcacagaaagtttggtgacaawgtgcggacacaaatgtggaacacatagttttatttattacttggtagacaattctttgtaattcagtgggttctcggattttcttggattgaaacagaaatttctcccttgaacactgagttgataatagctcagttcacttccttgcatttctttaggggtgctattttaatgtcgggagagatatcaagcagcagaagagattctatattaaaatgatattttctatttggctacgaaatgaaagaaatatagatacggacaagagctaagtgaggaggcctggtggcaacaaaatgtcccaaacccatgcagccctccacaaagacctcattgtgtcaggctgtaacaaatgaacccaaagtcattctctaatgtttagagacctctttcaagaacagcaatatagatctttaaccaatccaaaagttaatttgccatttatgttgtttatacttcagcaattatttaacattttttaaaatttttattttaagttcaggggt

SEQ ID NO: 889719 - DNA, 683 bp, Homo sapiens
ctgttgtacaattggagaaactaaggctggaagagatggagttagtacatcgcagagctgggatacaaagccagacagtctggccctcagaacctgtgctcttgactttctccccaaatggtagtgaactctgcaataaggaacatagataagatgcacagaaagtttggtgacaatgtgcggacacaaatgtggaacacatagttttatttattacttggtagacaattctttgtaattcagtgggttctcggattttcttggattgaaacagaaatttctcccttgaacactgagttgataatagctcagttcacttccttgcatttctttaggggtgctattttaatgtygggagagatatcaagcagcagaagagattctatattaaaatgatattttctatttggctacgaaatgaaagaaatatagatacggacaagagctaagtgaggaggcctggtggcaacaaaatgtcccaaacccatgcagccctccacaaagacctcattgtgtcaggctgtaacaaatgaacccaaagtcattctctaatgtttagagacctctttcaagaacagcaatatagatctttaaccaatccaaaagttaatttgccatttatgttgtttatacttcagcaattatttaacattttttaaaatttttattttaagttcaggggt

SEQ ID NO: 889720 - DNA, 549 bp, Homo sapiens
aaataaaagccaaaggagattttaaaaaacatcctcaagaagcctgttcagagagcctgagtgaacatgggcaagaatcccatactcacttcctatacgtccagaaagaagcagaaaagaggctctggcatggtggctcacacctgtaatcccagcactttgggaagccaaggcaggtgaatcaaatgaggtcaaaagttcaagaccagcctggccaacatgatgaaacccagtccgtactaaaaaaaaaaaaaaaaaaaaaaaaaaaaaaaaaaaaattagctaggtgtggtggtgcatgcctgtagtctcagctactcaagaggctgaggcaggaraactgttggaacctgggaggtggaggctgcactgagctgagatctcgccactgcactccagcctgggcaacagagagagactctatatcaaagaaaaaaaaaaagaggccccaggagagcaggatcttggggtgggtagatgtgcactactcatgactaacacggtgaagaagtatccaacagcaatgaaggtgaagtccatactactgta

SEQ ID NO: 889721 - DNA, 676 bp, Homo sapiens
ccagatggcttcactgttgcctcctttcatccccgtcactaatctgtgaaaaggcagccctcacattaagacactttcctgaagtggcagcgacagctcagtgagggctgctgtgctgcactgggtcggggctgacgttcccaacctcactgctaatgagaagacttgaaagattactgacatgttcatgttcatggaggtggccggaagtaattaagcactcttcaataaagggctaccttggcaagttcaagatttgaatgggaaaagggtgatggctgggctgggtgcacatgttacctgcatctccaagaccctgtccttcttggcgtctttccctgcttatcagaccagttctgggcactgataacaccacagagcatttgctcaatctctaycacctgatatcctgaaaagggagtggaggcctttttgcagacttctgggctcccacagcccttgtgctgcagcatgctgcctgccttctcttctgtcatcaatgaaatatggtggagggagctatgctgctgatgcagcttggaggctgtaagggaccagagtcaaatgggccatcgagggctggctacacagttactgggctggccatgtgatagagagtgcagaccactaaaaggcacatagcagaagaatactgagtaacacagaaaaaaatcaa

SEQ ID NO: 889722 - DNA, 608 bp, Homo sapiens
ctgctcaacatcactaactattagggaaatgccaattaaaaccacaatgagatacgaccttcccctagccagaatggccattattaaaaagttaacaaacaatagatgttggcatggatgtattgaaaaaggaacacttacacactgctggtgggaatgtaaattagcacaatctctacagaaaacagtatggaggtttctcaaataactaaaagtagatctaccatttaatccagcaatcgcactactgggtatctatccaaaggaaaagaagtcactatatcaaaagacacctgcatgtctatgtttatcacagcacaattcacaattgcaaagatatggaatcaacctaagtgtccattaactgatgaatggacaaagatgttttatatatatatatatatatatatatatatatatawaatcttgaaattttatatatataaagatgttatatatagattaatcttgtatatcttgtgtgtatatatatatgttagatatatatcatcttgaaattttcacatgcatatatatatatatatatatatacacacacacacacccccacacacatcgtgaagtactactaagccataaaaataatg

SEQ ID NO: 889723 - DNA, 590 bp, Homo sapiens
tgggttttggagctgtgaaaggaaattaaattttgggaccccaaattcgtttagccaaagagaaaagtcaagctgggaactgggtcacgcaaatctgcctccaccttttggttcctaaacaagatggctacaagatgaaaagctacacgcttccctcatattttgcccacaaggaaattcctggtgagctgttaaagcttccccatggcaatgcaacttgatagcctatctttacaggtgcagtcgctctgcccaccagacacaaatgtataactgaacgttcccctcyccattttgtctgtggtatgtaaaatgcacattccccacagttttcctctgccccttttgtttatgtgaaagctgtgtgcttctcaatatctcatcctttcccctttaaatttggagccctcaaaatcaccttcggagaaaggaatagacctgtctcctgggagcatcctcaactttggcaaataaatatcctaaaatgattgagacttgtctcattattttcctcgattgacagagctattttttttttttttaacataaagtcattccctgggcctcaaacagttcctggttgggggaag

SEQ ID NO: 889724 - DNA, 549 bp, Homo sapiens
accatgtgagcacacaatgagtatgcagctacctgcaagccaaggagaggccaaacttgccaacacttagtcttggacttccagcctccagaatgtgtgaaaatacatttatgttgtttttgttacccagtctgtggattttgttacggcagcctgaacagactaatccatgcttcattccatccacatttgttcaattgagaccagcaggctcaccatgcataaaaaccatggcagatcttgttaaactcccaacttcccaagccccagcccagacattctaattcagttggtccaagactgrgattcagaatgtgggtgacttcagaactccgcctagagaaacagatttcacagcttggcagagtgagcaaagccagcacacagcaggtgcttaataaatgctttctgaatggatgggttaatggatgaacacgctctttcaaataaaagagtacaaagccaaactcagataactttatgacatttctcacttcagcaagcagtgtttggtgagtcaagtggtttatctgtagttgggaccctcat

SEQ ID NO: 889725 - DNA, 549 bp, Homo sapiens
accatgtgagcacacaatgagtatgcagctacctgcaagccaaggagaggccaaacttgccaacacttagtcttggacttccagcctccagaatgtgtgaaaatacatttatgttgtttttgttacccagtctgtggattttgttacggcagcctgaacagactaatccatgcttcattccatccacatttgttcaattgagaccagcaggctcaccatgcataaaaaccatggcagatcttgttaaactcccaacttcccaagccccagcccagacattctaattcagttggtccaagactgagattcagaatgtgggtgacttcagaactccgcctagagaaacagatttcacagcttggcagagtgagcaaagccagcacacagcaggtgcttaataaatgctttctraatggatgggttaatggatgaacacgctctttcaaataaaagagtacaaagccaaactcagataactttatgacatttctcacttcagcaagcagtgtttggtgagtcaagtggtttatctgtagttgggaccctcat

SEQ ID NO: 889726 - DNA, 595 bp, Homo sapiens
agcagcatttgcactgcctggtgtggcttaaagtccctgccctgctgttccatccctctgatctttccaagcaggtggctctggcctctgtgtctctttagggcatttgctctgttaagctccatttttctctgaccttcctattcctgatagtgtccctatatggacatacaggtgaagctctcacttcctaaatgcttccagccacactgccttcagamaaaatctaccccatgtatggtagatgccaaaaatagccataatcctccatgtctccaagtatcatagcctttacaatgatcttcacaactcctcctatcaagtcccatagtcttcttctccactctagccacatggggcatctttgtatttcacattggcccacagaatgtgaaagaagttgctgtgtaccagcactgagtctaagcttctgcacactctctctctgaaacctactgagctaccatgtgaggtagtctagggttgcctgctggacaacaggaaacaatgatccagttctccttatcttcctaacacatagctggcaaccaaccccaggagaagagccacctctctgacaggcagctgctcataa

SEQ ID NO: 889727 - DNA, 595 bp, Homo sapiens
agcagcatttgcactgcctggtgtggcttaaagtccctgccctgctgttccatccctctgatctttccaagcaggtggctctggcctctgtgtctctttagggcatttgctctgttaagctccatttttctctgaccttcctattcctgatagtgtccctatatggacatacaggtgaagctctcacttcctaaatgcttccagccacactgccttcagacaaaatctaccccatgwatggtagatgccaaaaatagccataatcctccatgtctccaagtatcatagcctttacaatgatcttcacaactcctcctatcaagtcccatagtcttcttctccactctagccacatggggcatctttgtatttcacattggcccacagaatgtgaaagaagttgctgtgtaccagcactgagtctaagcttctgcacactctctctctgaaacctactgagctaccatgtgaggtagtctagggttgcctgctggacaacaggaaacaatgatccagttctccttatcttcctaacacatagctggcaaccaaccccaggagaagagccacctctctgacaggcagctgctcataa

SEQ ID NO: 889728 - DNA, 595 bp, Homo sapiens
agcagcatttgcactgcctggtgtggcttaaagtccctgccctgctgttccatccctctgatctttccaagcaggtggctctggcctctgtgtctctttagggcatttgctctgttaagctccatttttctctgaccttcctattcctgatagtgtccctatatggacatacaggtgaagctctcacttcctaaatgcttccagccacactgccttcagacaaaatctaccccatgtatggtagatgccaaaaatagccataatcctccatgtctccaagtatcatagmctttacaatgatcttcacaactcctcctatcaagtcccatagtcttcttctccactctagccacatggggcatctttgtatttcacattggcccacagaatgtgaaagaagttgctgtgtaccagcactgagtctaagcttctgcacactctctctctgaaacctactgagctaccatgtgaggtagtctagggttgcctgctggacaacaggaaacaatgatccagttctccttatcttcctaacacatagctggcaaccaaccccaggagaagagccacctctctgacaggcagctgctcataa

SEQ ID NO: 889729 - DNA, 595 bp, Homo sapiens
agcagcatttgcactgcctggtgtggcttaaagtccctgccctgctgttccatccctctgatctttccaagcaggtggctctggcctctgtgtctctttagggcatttgctctgttaagctccatttttctctgaccttcctattcctgatagtgtccctatatggacatacaggtgaagctctcacttcctaaatgcttccagccacactgccttcagacaaaatctaccccatgtatggtagatgccaaaaatagccataatcctccatgtctccaagtatcatagcctttacaatgatcttcacaactcctcctatcaagtcccatagtcttcttctccactctagccacatggggcatctttgtatttcacattggcccayagaatgtgaaagaagttgctgtgtaccagcactgagtctaagcttctgcacactctctctctgaaacctactgagctaccatgtgaggtagtctagggttgcctgctggacaacaggaaacaatgatccagttctccttatcttcctaacacatagctggcaaccaaccccaggagaagagccacctctctgacaggcagctgctcataa

SEQ ID NO: 889730 - DNA, 615 bp, Homo sapiens
tgccttctgcaaggaaacttggagagagagagagacagagtagagtttgctccaggtacagacctggagattgcagaaggctggtggccttgagtctcacttccagggtgctccacactctctgtgagatgagcagcacagaggaggtcataaggctgtgaccgacaacaaagcttattgcaggggtgaaggagcaggggagaagtgagcaatcacttgcaattttaccaggtgctataaaatcactgacggggactttttttttctttttttaattgaactgcttcccaaggtcaaatgcccaaaacaaaaacctcttcatctggasaaggctttatttcatccaagcatctctaagcatttattccctatctgtcacattttgcatgatgtagaggcaacatttccacttatcattaactaagtggttagacaaggtagttatcaatttcacaagggtggaggtatttaggcaattttcatcaatgacattgtgatgggttaattttatgtgtcaacttgactgggttaagagatgcccagataactggttaaacattatttctgggtgtgtctgtgaaagtgttttcagaagagattaacatttgaatcagt

SEQ ID NO: 889731 - DNA, 607 bp, Homo sapiens
tctatgtatatgcctatctatttatctatgtatctatctttcatctatctgcctttctaccatctaattttcttctgcatatctaccaattatctatctatctatgtatatgcctatctatcgtctatctgcctatctgtctatctattatctatctatgtatctatcgatcgatccatccatccaccccattaggctgtacctgatgggggcagcatcatgttcctcacatggtcaagcatggctgtgtgccaggggccttcaagcaacatttaaagctaaagccaacgatagaaaccataattaataatattttcagacaggttgccaaataacatacatgtaagygaagaccagatgcatttcaaaaatgttcaagaaattgaatgtgaataaattcattgcttaaaagagaatagcaaatggtgcatgctgtgtgatatggtaacgacaacagcaatactagcagtggtcatctatcaagtgctagttatatgctaaagactgtgttaaatgttttgacatccatcaccttactgcatcttcccaaaaccacaggaggtagatatgattatctcaggaaactgaaactcctgaagttacatag

SEQ ID NO: 889732 - DNA, 611 bp, Homo sapiens
ggcggatcccggggacatcgtagatctcctcgcccgtggctaggtaccatctgagagtcacaggagggatgcctgctgcggggcagggcaccagagtccccgtggtgctggcaaacactacctcttgcagagatgcattgacaaagtagaggctggagtgtaggtcttcactgaaaactgcaagaagacaacacagggatccataggtgagtaaaacatgcctttgacatttgcagttcaatgtctggcctcagaaagttatcctgaaaattaatcatgaggcgcaggctcaaataaaaccaaataattcaaattttctsaaaatgctgtgagcagacaggctgatactaaaaaataaggcaccatcctaatttcacattttgtacacaaactgttaagttatcctggatgttaatttttaatagattgtttttttgcctcatgccccaaaccctgttctctccccacactgaccaccattggactgtatatattttatattcacttattgtctatcttctgccactagagataagcctcatgaggacaaggtcttaatttactcccactattacctggagcatagagcccagctctcactggactctcag

SEQ ID NO: 889733 - DNA, 583 bp, Homo sapiens
ttacacttactcagaatttagtgggggcataggaataagatgagaacaccaaggccctcttatggaagattaacctgaagtcagtgcagaaaaagtgactggaaatggagaaagaggatgaacacaaaatagtgagagtggtctctggttttctaaagcatgagactctgacatgctgaaaagatcaagtctagcttgggcaatgatttacttccttggttttctagtttttcagctaaaaaactgacacttaaaaatgtctacagtgaaatgctgttggacagaagggatacaattatatatttaaaatggacaaatgggtgcttaatatctttcatattcacatgttaataaaacatgtgaatgcacatgcatgcactcttccagaatcactctaccaactgttttccacctatgcacamtaaaggaacttatcttctctgctgtcttcctgaatagcagttctcaaaccatggttccccataccaacaacatcagccttacctgagtgattactagaaatgcaatatctcagcccccaaactcagagtgacagagtaagaaaagtcacctgtgtgtttaa

SEQ ID NO: 889734 - DNA, 611 bp, Homo sapiens
ttatcaaaaaagttaagcagtatcccctaaattacccacctggcaagcggtagtcagagtttgaatgcctctgtctcaaaagtacaatttccaaaaggtacttttcactaaacaaatttatacttacacttactttactgaagaagacttctgcattgagatataacattccactctaattggagctcagaagactttcatttcatgatctttatggcctgaatacagagyggctgaatcaaccactttgaagagctacagaacagattttattgacggcaactagcaaaaagcagtacatcccacaaatgaatgcagcagtgctcccacagacatggttcatatagaaattcacatggtaaaataccactaatagactccccattcaataccatcttgcccaaaataaattgtttctgcatcatcaactcctggcaacaactttgctatatctgagttgtcatttctcacaataatggccttttattccacttggggcctgtcacctggaacaaataaggtctttacaaggtcccagaaaatgagaaaatgttctccataaattatatttttctgagcttattccccactctgacataatacaagaggtt

SEQ ID NO: 889735 - DNA, 620 bp, Homo sapiens
cctcctgtgatccttgactgatgcctggcttggctgtgctgtttttctgggaagttagatgttattctcatgccatatctctggctacagctcatggactgtgcctggcctccagaatcttcccctttctgcacctggcaccaagccttctaatacatccctaccttcccagctgggacagggtccmcaagacacctcactgagaatcaacacgatcagtccccatagtgtgtgcatgtgacactggggagcctggagctgatgcacttacttataatcacaacattcccaaagcacaacttggagtttggctctttgccttccttcttctggaatgcaacagtcattgttgaatttctaccctcacctaaccaggcaattccttatggaaagagtcagtctggtatctgaactcagtgaatgacttcaagttaaacccaaggctgcatccatgatccttccaagtagtggactttatcatccttgagtctggctcatcacgaagatgcagttttgctaaatctaagtacagctcttatctgctccaagtctcccagctcggtacctgttatcaaatgtttttaggagagagtctgtttccttatcttttctagcttcta

SEQ ID NO: 889736 - DNA, 620 bp, Homo sapiens
cctcctgtgatccttgactgatgcctggcttggctgtgctgtttttctgggaagttagatgttattctcatgccatatctctggctacagctcatggactgtgcctggcctccagaatcttcccctttctgcacctggcaccaagccttctaatacatccctaccttcccagctgggacagggtccccaagacacctcactgagaatcaacamgatcagtccccatagtgtgtgcatgtgacactggggagcctggagctgatgcacttacttataatcacaacattcccaaagcacaacttggagtttggctctttgccttccttcttctggaatgcaacagtcattgttgaatttctaccctcacctaaccaggcaattccttatggaaagagtcagtctggtatctgaactcagtgaatgacttcaagttaaacccaaggctgcatccatgatccttccaagtagtggactttatcatccttgagtctggctcatcacgaagatgcagttttgctaaatctaagtacagctcttatctgctccaagtctcccagctcggtacctgttatcaaatgtttttaggagagagtctgtttccttatcttttctagcttcta

SEQ ID NO: 889737 - DNA, 516 bp, Homo sapiens
gaacaagcaatggggaaaggattccctatttaataaatggtgctgggaaaactggctagccatatgcagaaaactgaaactggactccttccttaaaccttatataaaaattaactcaagatggattaaagacttayatgtaaaacctaaaaccataaaaaccctaaaagaaaacctaggcaatatcattcaggacattggcatgggcaaagacttcatgagtaaaacaccaaaagcaatggcaacaaaagccaaaattgacaaatggaatctaattaactaaagagcttcagctcagcaaaagaaactattatcagagtgaacaggcaacctacagaatgggagaaattttttgcaatctacccatccgacaaagggctaatatccaggatctacagggaacttaaacaaatttacaagaaaaaaacaaacaactccatcaaaaagtgggtcaagtatattagcagacacttctcaaaagaagatatttatgccgccaaaaaaaaaaaaaaatga

SEQ ID NO: 889738 - DNA, 627 bp, Homo sapiens
cactgtgtcatggatcatcaactagttgacctggatagctggtctgcaaattatttgaacccctttttccaatatctctgtcttgttatactattcacaacacaatctctcggctccagttgaatgcattacctcctccatcacataaacttattgcctgtccamaattgcctggactgataatcttcaggcctgttcttagtcaaattgaaaaaaaaaaagtacctcttagtaaagtgaacaattgcatcaacaaggatctcaaccttcagcatttaatgactacgtatcccttggtctatactccttctacacaataagattgataggcctttaacatgcactgtgtcatggatcatcagctagttgacctggatagctggtctgcaaattatttgaacccctttttccaacatctgtgtcttgttatactattcacaacgcaaactctcggccccagttgaatgcactacctcctccatcacataaacttattgcctgtccacaattgcctggactgataatcttcagagctatgcagccactggatattttcctctcacacaaacacatctatcccattcactacaccatgctctggctcacagccctataatctcactccac

SEQ ID NO: 889739 - DNA, 595 bp, Homo sapiens
accatatgattccctgcaccacctcaggactttacagagtccctcactagcaaaaggacctttcaacaaaatgcagccccttgaccttggacttctcaacctccataactgtaagaaataaattacttttctttataaattacccagtttcaggcattctgttataagcaatacgaactaagacagaaaattggtaccaggagtggggtgttgatgatagtgaacacctgaaaatgtggaagtggctttggaactgggtaatgggcagaggatggaagctgagggagcaggctagaaaaagcctggattctggtgagrgcttagaaggcaagaaaactaagggaagtttgtaactccttaggaattggttaaatggtggtgaccagaatgctaatagagatatggccagtaaaggccattctgatgagatctcagatagaactgaaaaacaaggtattgaaattttgagtaaaggccattcttcctataaattggcaaataatttggttgaagcgtgtccctgcccaagggctttatggaaggccaaacttaagaatgatgaactaggatatctgacacaaggcatttcttcttt

SEQ ID NO: 889740 - DNA, 631 bp, Homo sapiens
ggagagaaaatcaagggtgtagctcagagaccatttgctaaacatattagtatgaatagaagggagccaggtgcttttcctcaagatagcagaaaaaagagatcctgaaggcattttaaagatcttgaggctgcctctctcatcacaggcccagaggcctaagatggcagaatggtttcaggagctagaccaagggcaccctccataggctcagtgcccaaggccaccagaggactctgtttcctgcactccagaacggtgctccacaactgccctagttaggctcaagagaccctaggtatggcttgtggcacagctctggaaggaatacacatgtcagtrtacatgtagcgctaattctgcaggctcttggcagcatgcatgtggtgctaattctcaggtttgcagaaagcaagagttgtagaggattggcagcctccacccagatttctaaggatgtcatcaaaagcttgggggcccaggcagggacttgtcacagggggggttgccaccacaaagagtttccactagagcaatgctgtatgtaactgtagggtcagagctgctgcagagtccttaccagggtaatatctaatggagccatagaggcaggacctccaccaggatccca

SEQ ID NO: 889741 - DNA, 493 bp, Homo sapiens
tgtgaggagtagggggtgacaatacctatgccaccagctatggcttcgcccaagcacagctcctggcatggatctggcagtaaatacatggggttttcctccctagtccatgcatggacctcagtggcctttggtttgtcagtttttttatattccttcgagatgaagttcatccatttaaaaaaataaaatacaaataagtttgatttagcaaaaatctgtgggtgacatttgctaaagttggatttatgtctcatttaatatttattgggattaagtcactgctggcctcaccccaaaacccatagaaaaagagaagytcaggtctttctaagggaagtcacgtcttacacttccccttttcaggagaggcctagtgagaatgtggttttgctccaggggctggggctggggtgggagcctggaggatcctttctaaaggctgataccccccagttattgggggcaagggggctgagaagcatttcttctt

SEQ ID NO: 889742 - DNA, 575 bp, Homo sapiens
ttttaaaagcttgattattcttgacagggcacagaggaatgtccttcactacgtatgccaggatgaagtgaatttataagcccacaagtagatctgataagcatgcagaaatcatttgtattatgtgcataaaacagtgcccgattaaaggacagtcacattttcttctgacaaaatgtctgtggcactccagaaaacaggctttattttttaaggtttacctcataatgaaamaaagtttgaagtggaaactcttaaaatgcacaggtaggagatgcaatgatacaatccaatgcaataaaataaaataaaaccatgaatgagcacatttggaagaatgaattctccagttaaagtaggccgggcacggtggctcaagcctgtaatcccagacctttgggaggctgaggcgggaggatcacgagggcaggagattgagaccatcctggtcaacacggtgaaaccccgtctctactaaaaatacaaaaaattagccgggcgcggtggcgggcgcctgtagtcccagctactggggaggctgaggcagaagaatagcgtaaacccggggggtggag

SEQ ID NO: 889743 - DNA, 635 bp, Homo sapiens
gttgaaagttaaacatcaatttgcatttggtttaggaaatccttgtcaccttttcatgaaatttcagctgtctcagtggatttggcaagatcaaagcccagcactcagtcagccccagttttaatccctgccaacagtcatcatttgattcttgagcacaaagagctactactggtgcactgctgcccacagtgctatgacttcatgcggccttgttttcacctgcttccattcagctgggtgcatggcttccaatattgcagagatttgcaaaattggtacaaggagaatctaaactgcagatgcyttcagctgccaggcatggacttaaaggcgttcctgatccacatgactcaggattacagccacagaccttggcgggcccctcagctgctctgagaagaggcaggatctacctgactccaaagaacactcacttacaattgcattacctacccctctgatattaggttggctcaaaatcatggattttggcattaaaaggtaatggcaaacatcacaattacttttgcaccaacctaatatatactgtcatatattcaggaaaaaattactttgtgaatgtcacatggttaatatcaacattagtcagaacatctaaagggggaataccc

SEQ ID NO: 889744 - DNA, 600 bp, Homo sapiens
tatagccatgtgcctccatgctcagataattatttgtattttttgtagagacagggtttgtcatgttgcccaggctggtctggaaatcctgagctcaagcaatccgcccgctgcggcttctcaaagtgctgagatcatagtcatgagacataacgtcagctcagcttttatttttaggaagagattgcaaagaattggtatcattttttttctttaagagttggtagatttcactagtgcaaacactggtgcctgatgctatcttttttggaaggttattaattattgagtcaatttctttcattgatataggcccattcagaatatctgtttctccttatacaaatcttgatagtytgtgtccttcaagaaattagtttatttcatccaagtattcaaatttatggctacagggcttttcataaccctattatccctttaattattatccttttaacatctatgaaagcattcctgatgagttctcttttatttccaatattaataattcatgtcttctttttgcttgatagccaggttagaggtttaccaattttattgacatttttaaagaaccagattttagttttgctgattttc

SEQ ID NO: 889745 - DNA, 647 bp, Homo sapiens
atgagcttataacattttgttgttgccaccttctttcaattcttccttctttattaaactataaattctatggggaaagggtttctatctgtcacattcacagttgtatgccttgagcctactggtcaaccctcagcaacacttgttgaataaatgagcccaagatatctcattgtacwcctttaggctcatctacaggcaggttctatattctgagatgaaagaggatattgtatttctttcctagattcttcctgggttggccgtatacccagtgctatagtttggatgtttgtccccttcaaacctcaagttgaaatttgatctccagtgttggtggtgcctaatgggagggctttgggttatggggtggacctctaaagagtacattaatgccccttctgggacaggttgggggtgggaggaaggggagagtgaattctagctctatttgttcccatgagagctggttgttaaaaagagtctctcatcttcccccttctcctgattcttctctcaccgtgtgatctctacatacaccagctgccctttgccttctgccatgattgaaagcaggtgagaccctcaccagaagctaagcagatgctggcgctctgctacttgcacagcctgcagaactgtgagcc

SEQ ID NO: 889746 - DNA, 523 bp, Homo sapiens
tgcacacatatgtttattgcgccactattcacaatagcaaagacttggaaccaagccaaatgtccaacaatgatagactgggttaagaaaatgtggcacatatacaccatggaatactatgcagccataaaaaaggatgagttcatgtcctttgtagggacatggatgaagctggaaaccatcattctcagcaaactatcacaaggacaaaaaaccaaacaccacatgttctctctcataggtgggaattgaacaatgagaacacatggacacaggaaggggaacatcacataccagggcttgttgtggggtggggggaggggggagggagakcattaggagatatgcctaatgttaaatgatgagttactgggtgcagcacaccaacatggcacatgtatacatatgtaactaacctgcacattgtgcacatgtaccctaaaacttaaagcatggaaaaaaaaaaaaagaatcagggtgggaggatccatgtggtcattattatttgctttttaaataaata

SEQ ID NO: 889747 - DNA, 686 bp, Homo sapiens
acaagattaggataaagattgcagagccacaggccaaatgccctgttcccctgatctggtggggcagtgatgttgtgtattataactgctggggggtgagggtgagtagtcattttggtttaatagtgggaggtctgctcagttggcagggggtagaggtggggagagggagtccagataaatgaattttggaaaatacatctctaataatcctttgcagccagtgactttattcttacttattcaaaaaataagttacggttaattatacctacaacacctctatttaaattcagatttgctcagcagccctttgtctttattcatatgcataccaagtgtttaacataattatggttgggcatttgaactttgtttttctttaacataaagaaatgctactaytaaacatatttgtaagcagaaaataattaaagaaagaaaattggagatataagacattttttaatttagaggactagcccatggagtctaacatctggcttaaaggatatccagatggaggtgagatcacatggagggaagagcatgctcaaagaatccaagaagctttctcagattcaaaggacatgattttccaaactgaaggggcccatcaaatatctagcacaacagaagaatatagacctacacctcagcacacttacgtgacactttaggataca

SEQ ID NO: 889748 - DNA, 619 bp, Homo sapiens
aacacatgtaaactattatacgtgtatactagacttgaacaattaagtaaaagtggcagatggtgggagccaggtgtctcactgtaggagtggaggattacagacaagcaagggaggaggcaaaaatgattcatgtagtaatagattagcgttagagtcatcagtaaaaacttacatttagtttaacatacatacagatagttacgtatggaaaaaaatgtattaatatgtgtagagatcagcacatatagcccctaatcttggtttctaataccaatctctaacaaaataartcagaattcttcggataaatatttaattctaggagtgggacagaaaatacccaagatgagcctgcaattgtgttaccagaatgtaaagaaatgctcaaagaaacaatgatggagtcgggcgtggtgtcacatgtctgtagtcccagctactaggaaggctgaggcaagaggatcccttgaatttgaggctgcagtgaggtatgatagcaccctgcactccagcctgggtgaccccagcagacactttgtctcttaaaaaaataataaagaggtaatcccagcacttaaggaatccagggtgagtggatcacctaaggtcaggagtt

SEQ ID NO: 889749 - DNA, 522 bp, Homo sapiens
ggcgtggtggctcacacctataatcccagcactttgggaggccgaggcaggtggatcacgaggtcaggagatcgagaccaccctggctaacatggtgaaacctcctctctactaaaaacacgcacgcacaaaaaaattagccaggcatggtggtgggcacctgtagtcccagctattcgggaggctgaggcaggagaatggcgtgaacccaggaggtggagcttgcagtgaacagagattgcaccactgcactccagccagggygatagagcgagactctgtctcaaaaataaataaatgaaataaaataaataaaatgagagacctgagatgctttcacttgaacacttagaggcgactgtagggttattaattggcttaatttcaatatcactgtgtcgcaaggaatagggaagcccaaggggaaggagacaggggaatggctggtaggtggagcagtcagaacacacatcacatgtatagattaagtttgctatcttctgtgggtgcagtaggtggtgc

SEQ ID NO: 889750 - DNA, 610 bp, Homo sapiens
tgaaaagggttagacagcaagtattttggtctttgtgggcccttctgtctttgttgctatgacttaaacgaatggctatggctgtgtttcaataaaactttatttataaaaacaggcagttggccagatttggtcccaagaaggcagattgctaacctgtgatgtacaggcttgttcagattcagggtttttttgttttgttttgtttggcgataacatgtcatagatgggyagcattgcggatttccatccgaaggcttagaatgtcagggtgtttctctttccctctccctctaatattatcagccatgtacattcggtgtccagattcattaactcattaagggaagtaaaatggcaacattctaattctatcgtcccttcatttattagctgcaatacttttacaaagagaaactcgcctttatctactatttgcttatactgacgtatagtttgtacaggaaagttaagataatacatgcttgatccctttcctttctttaccagcttttaaaaataatgagttgggcttcttagcattcttcaaagataatcaatgtacttttaaaaagaacattatgagcaaatagatttcaacataattgaa

SEQ ID NO: 889751 - DNA, 598 bp, Homo sapiens
aaaactttttttaaggcctaaggtatgaaataattaatcattagtacatttttatttgatgcactgggaatttttaataatttcactctaagtagttcccctcaaatacatgagcttttattttatatctttttagtaggcataactcaagtatataaggtagatttttaaaaagacattgtatggtatcttaaagttagcattcagttttctactgtactattttactaaatttttcaatacttcatttttatagacttctaatccctgctaccttatattatactatattatactttcctatacatttaatttgaaggcttttcagaactttgacatggctatgggcttagggattgtaggcattttccatgagacaaaaacatgtgacttccagcattgttttaatttgattattaaaaagtacacaaatattagtggaggaaaaaggacctacaayatagtgatgatgatggtggcggtagtggtgatgatgacaataataataacacatggtatgattttaagggcaaatagatatgcaaataggcttaatcctgaatacagtgaaagaaaactaaggcattgcaggcataaa

SEQ ID NO: 889752 - DNA, 597 bp, Homo sapiens
tctgtacaatggaaataatagcagtttctccatgtgccagatgctatgtgttgacattcagtggggtatctgccttcaaaatgctcccctaatccacagggtaaggcctggagactcacattccatctttctataccagtgggttccagggaagttctgccaatgagaagctgtcatgggctttctggagttggcctggagatcagtggaaggtagctgtttgagcatcagcaccagacagatgtggaaatttgcagcagtttccaagcaaccttctgagaattgtgcactttggagctccaagaatatgtgacctcccattatcctaagcaagccccaccaagccctaactgatacctggcttcatagartggctgagaaaatcaagaaagtttgtacatagaacgtgctcagaacagctccaacaacattgtaagcattcaataaatgtcagctactatgttcattccgtattattcccaatactatgaattaatctatgcatatcagttgaccaaagcttcaaaactacaggaagaaggaaatggtaggagagctcagcacttcccctacagaccttgtattagtctgtttcca

SEQ ID NO: 889753 - DNA, 601 bp, Homo sapiens
atttttaaggaagtaacaagacaaagaaaaggacttgggttctccagggcagcagcttgcaggaagacacataatggtaaataaaggcgagttagggaagcttgctcgtggagatgcctctggtatcatctccagggtcatcagtgcccaaggttgtcttccgtggttaacctttgttctcccataggagaagaaggcagggcaggattccttttgtccttataaacctgtgtcctacttttaggcaaataaagggagaggagagctctttcctgtamctacttcttcttaattgccttcagttcaacagtcatttatattttggggtggtatattctggtccccacaatacatatgtagacgcaggcatacacacagaggaagagattattttcttttaagaggtatatcttggccagggatttccattccactgtgcagcctgactgcattcaaaatgcaggcaatgaaggaggccacttggtacactgcattctggaagagaaaaccaagacttgaacagacataaaagatttaaatttcaggctttcaaagttgagggctggaccagaaacaggcccccgccccctccccccccccc

SEQ ID NO: 889754 - DNA, 606 bp, Homo sapiens
tgtattaaaaacagttatgtttaacgaatttatctacaaataaaaattttaacaaataaattatactaagaaagcatatgggtaaagtctgcttgtaagtttaatctcatctatggcatatcatgaatatgttttatttaatattatattttcattctatttcgtttgcttctcataactacttttaaccaagtgtctctatgagaaatgttacctcactattcattgacaatgtaattgaactaagtccagcatatactagctcctctacagttaaaaaygaagtcaagacatttggactattaagaaaatattaagaatagaattgaaaaagtccaaattagatcaatgacacaacattttatttgtttgtttaatcatctaaaatgggaaaaatactttatcatacctcaatgttttaaaataatatcaattttagctattgatctttagaaaaattttattgaggaaatcaaagaaaaatcaggaaatgaaataattatcaagaagaaaacatacatatggttgtaagtggactataaactcagagaccttgggtttaatctcatgttctagcatgcattagctgcatggttatctaatctt

SEQ ID NO: 889755 - DNA, 485 bp, Homo sapiens
taaagtcatacccaagactgggtaatttgcaaaggaaagaggtttaatggctggggaggcctcacaatcatggtggaaggcaaggaggagcaaagtcacatcttacatggtggcagccaagagcacgtgtgcagggaacccctttataaaaccatcagatcttgtgagacttatttactatcatgacaacagcatgggaaagacctggccccatgattcaattacctcccactggatcccttccacaacacatgggaattgtgggaacgataattcaacatgagatttgggtgrggacacagctaaaccatatcttcatagaagagatggaaagtctgggcttagacaagttgcttccctgggatcacaaagctggtgagcagttcaacaggattagactctaaatctcctttgaccttttctcttcactatgatgggaatggaaagtatcatcagaaatgatagaaagtgtctataaaaggaac

SEQ ID NO: 889756 - DNA, 594 bp, Homo sapiens
tgtgggaacgataattcaacatgagatttgggtgaggacacagctaaaccatatcttcatagaagagatggaaagtctgggcttagacaagttgcttccctgggatcacaaagctggtgagcagttcaacaggattagactctaaatctcctttgaccttttctcttcactatgatgggaatggaaagtatcatcagaaatgatagaaagtgtctataaaaggaacactggcacggggcttgggacactcactgcctgtgtctgctcatccctcaatgagttaaatcaccttaagtgagtcatctgatctctctgaatccacctgctcttacgtayagagagcaaagtagttggacctaggtgatggctaaggcccttttcagcattgacatttttggtatctcccaaaatacaaattggcaaatttcattgggatttgcttttagaagtggcttctgttagtcagtccccccacagatggtcaagtccatgctgcactgcacaaggctttgatataaaggagcacaaatttcctgtcatttatgtaaaatacatcttcttggcttggaaatcaaagagattttttaactgcca

SEQ ID NO: 889757 - DNA, 642 bp, Homo sapiens
aaaacataggtccacacaaaaacttgtgcacaaatgtgcatagcaacattatttataatagccaaaaaatggaatcaacccaaatgtttgattaatgggtaagaaatgtatatataaaatatggcttagccatacaatggaatatattcaaatacgtaaagaaataaaattctgatacatgctacaatatggatgaaccttgaaaacaggctaagtgaaacaaacaaacaaacaaacaaacacaaaaggtcacatattatgtgattccatttatatgaaatttccagaatgagaaaatccacagagtcagaaaggagattcgtgtctgcctagggttgggggaaaggagattcgtggctgctaatgggcacatggcttcttgtttgggtgatgaaaatgttttaaaattgaccatggtgatggttgcacaggtctgtgaccmtgctaaaaccattgaattgtacactttacattggtggattttactatgtgaattatatcccagtaaagctgttatataaaaagggatatattactggaattccaaggttattaacaaaatgcaccttactttaagcatcaagttaaggtgctctattatctgtgaaagagttgaagatatagaggactaaacccacttcg

SEQ ID NO: 889758 - DNA, 630 bp, Homo sapiens
tgctgagtcattcttagggtgggctaggagaaaatgtgttttggtctgaaggagggaggaagaagacaaaaacaagtaaattagaaaacgtggttgcaggattgaaatctgatcctgaaaaagagagaatagccatgagtataatgtttaaaaatacacacaaagaaatccactgtggtgggagtcacaagaagttcaatcattatctggtctcgtcatctcgagtgaagctgtccactcccaaagccgactgcttggtccatagctcttagtttttgcatctggaggcttttgtggttagtgttggtttgaggtcatttgagctgatccattggtctgggtttgttgcctgtttctactgactcttgagtacttgggtcaacaccttggatcttgactgccctggcatttgctaggaggacctkaaatggctccttccaaagaggtctgaaaagtttttgccttgaggtctcttccagcggacccacaccaggctggaggtcagaaaagtctggccggcatttcctctggctggcatttcctttgggcacgagacttggtgtgtgaggctaatccttgacaatgcttaactgcgtacatgaaatggagcagagccaggccttgctggag

SEQ ID NO: 889759 - DNA, 516 bp, Homo sapiens
aggtaggacagcgaaggcgtattgccagccttgccagctgaaagccaactgcttctggtgggtctcatggacaggaaaatggtgtttgccaggtgaacagctgcatgccaggtaccagtagatgtgttcattggctcaaactgatacagcagctgccattggagtcaccagctggttaagcctacaataatccactgtcattttccaagatccatctgtcttctgcacaggccaaacaggagggttgaatggggatgtggtgggaatcaccacacttgtgtctttyaggttcttgatggtggcactaatctctgcaatccctgcagggatgcaatattgttttagatttactattttcctaggtagaggcagttctggtgacttccacttggtgtttccagctatgatggccctcattccatgagtcgaggacccaaatggggattctgccagctgctgtggatatctattccaattatgcatctggaacaaggaaataaccataggatgggtttg

SEQ ID NO: 889760 - DNA, 559 bp, Homo sapiens
ggtctggccttgtgggctccagctcatgctcattggttccagcttgtccttgttcttcctcattttataacctccttcccttcccaaatgccatcagatgcaaagataagagccattgagagacctcttagtcagatcccacagtttgacccaaaaggccaaatcctctaagcaatcccttttaaacacacacacacacacacacacacacacacaaacacgcacacaccacatcattatagcaagtggaacacaaaaccaaatgagtgctcagcatggaggaaccttgaggacactatgctcagtgaaatatgccagttacaaaaagrcaagtactgtatgattccactgatatgaggtccctagagaagtccaaagtagtcataaagacgcaaagtagaatggcaggtgccaggggctaaggggcgaaggtgaagggttgggagttagtgtttaatgggtagagaatttcagtttgggaagatgagaacattctgaaaatagatggcggtgaaaatagatgattgcatgacagtgtgaatgtacttaatgccactca

SEQ ID NO: 889761 - DNA, 606 bp, Homo sapiens
aagaacccaaaagagtgagaggtaacaacattttgaatgggacatctgagagagacactggaattcagcaaagaagcaactggaattcagcaaagaagcgacaggaaatatctgaggcacagaaggcaagggaagggaggcagctggcccagctagaatcagtcgggagcccacagagactccccagtccagggaaatggtaaatgagagattcccagctgtctacatttccaccatggattcagcatggacctgaaaccctagccatgggagagcctcttattcttcacatgccctgagacttacatagggatttgccaggatgccacataatggcattgctccagagaaagagcccacactgggtctcacacacccaccargtcctgagcagctgtagcatggtgccattttgagagcccagcccctaaaagtctgcatcctgccctggggcccaacagatcttgtatctccacatcccttcagctctgccgaatcccacaacccccaccaacccaagagggctgcaggagtgcaataccagctggatgcatcaataaggcaggggttcatgaacttgcatgtaccctgagtacaggctttccc

SEQ ID NO: 889762 - DNA, 600 bp, Homo sapiens
gatatgtcctctgttgaaatgatataacatcaaagataacaagtggttcccatgggcttccagaaaatcaaacaaacaaacaaatgaacaagtcacccacaagcaataaaaatcagattagcatcagacatctcatcagcagcactgaaggctacagactcacagaacaacactcatgatgtccgggaggtcagcattcagcccacgctttcaaagatgagcatgctgtaaataaacaggttaaacaraagataagcagttcttaagataagcagtaaacatgacagcaaattattaaccataaaactattaagtaagcatatgtgtttttctaaggctaagtagcatgtattttatcctctgggggtgtggtcatttgcttttctacatttttgtttgtctgtttgtttatagagaaggggtggtcttgccatgttgtcagtctagcatcaagcttctgggctcaagtgatccttccacctcagcctctcaagtagctgggactacaggtatgcaccaccatgccaggctcttttcaaaatattttaaagtagtggaaatattttttcaaactgaatctgacctagaagtcaagtctgt

SEQ ID NO: 889763 - DNA, 600 bp, Homo sapiens
gatatgtcctctgttgaaatgatataacatcaaagataacaagtggttcccatgggcttccagaaaatcaaacaaacaaacaaatgaacaagtcacccacaagcaataaaaatcagattagcatcagacatctcatcagcagcactgaaggctacagactcacagaacaacactcatgatgtccgggaggtcagcattcagcccacgctttcaaagatgagcatgctgtaaataaacaggttaaacagaagataagcagttcttaagataagcagtaaacatgacagcaaattattaaccataaaactattaagyaagcatatgtgtttttctaaggctaagtagcatgtattttatcctctgggggtgtggtcatttgcttttctacatttttgtttgtctgtttgtttatagagaaggggtggtcttgccatgttgtcagtctagcatcaagcttctgggctcaagtgatccttccacctcagcctctcaagtagctgggactacaggtatgcaccaccatgccaggctcttttcaaaatattttaaagtagtggaaatattttttcaaactgaatctgacctagaagtcaagtctgt

SEQ ID NO: 889764 - DNA, 529 bp, Homo sapiens
tttttctaatgggtacaggaagggactgggtttggggaggaagcccccagaggcgaagtgccactgtcactccactgtattgggcacaccctgtcacctgactcaccgtgaggctgagctggcccctgctgggttgagwccccccctccatgctgtccgctttgggaggaagtcgctctgcagccctggcctcggggtgggggttgtgctctacctcctggaagacacagcagtgacagagactgtttggaatcctgctgggaaaggagctttgtctcttctccccgtgtatgtgtcgctcatgcgccggtgttggtctggacagatggatgtttagtttacacacagcgttacttgattttggtgccgaaactgttccagcattggccgctgggagttcttgcagttgcccccagctccctttggccccattgacgtgggggtcgtatttttagctctttcccactgccgagcaccaacaggtaacccaggcgcatcttggacatctcctgccagtcctgctgtttct

SEQ ID NO: 889765 - DNA, 601 bp, Homo sapiens
tttttctaatgggtacaggaagggactgggtttggggaggaagcccccagaggcgaagtgccactgtcactccactgtattgggcacaccctgtcacctgactcaccgtgaggctgagctggcccctgctgggttgagaccccccctccatgctgtccgctttgggaggaagtcgctctgcagccctggcctcggggtgggggttgtgctctacctcctggaagacacagcagtgacagagactgtttggaatcctgctgggaaaggagctttgtctcttctccccgtgtatgtgtcgctcatgcgycggtgttggtctggacagatggatgtttagtttacacacagcgttacttgattttggtgccgaaactgttccagcattggccgctgggagttcttgcagttgcccccagctccctttggccccattgacgtgggggtcgtatttttagctctttcccactgccgagcaccaacaggtaacccaggcgcatcttggacatctcctgccagtcctgctgtttctctagggagccctggcccctgtattgcaggaggtgtgagaccctgagatctggggctcggtgcgcctgtccca

SEQ ID NO: 889766 - DNA, 577 bp, Homo sapiens
gctaataattggacagacgtttccttaaatgcctggaatcagtgagtctcatagactttcccaagagaccccatgtgtgtaacctaccagtttataagtgccttagccttcattttctgattgtgcagagtctcaatgtcagctcagtgtgagagcttagggctatctcagggcactccagtttcttttctgggcattcgcacaaccttgagtaggtgcatagctctatgtatgcaccatggccttctagatttccagaaatatacagtttttaataccctgtgggcatctcattccccagattttccttttaagcttttgagttaatatattatttgttccaactgttgtccactgtctcaggtagtcacaaaattaaacaattgtctttgttttgaaagatacctctaargaaaatacttttcagtgagctccgtgtcaggtcaaataaatgtaacctggcaagtggaacctgttagccataacaaataataagactttgaaggagctctaactctgttttgtcctcttctgttgctgccaggctgttggttttcactctgattgtaggtggttg

SEQ ID NO: 889767 - DNA, 595 bp, Homo sapiens
attattgattgaatctctgcctctcctggggtctctgtaaggggatggtgaggatggcagcctccctgggtactaggtggcacccagtaggtgcgcctttcccagttggtgggtggtctgtgttccatgaagacaggaccccagaggtgtcgcctttatgctgtatgacattgaagctggtccctggctctgcgtggcctgaggggaaggggttcactccagctggtcrcctcgctgccccctgcccgtggccttggtggccagtccttctttcccggttgaagaccccacgaagaatgatttctcacgccttcttcagccggctgtgtagtctgggtggtctccaggagtgccagtggaggcagcagcccccagacaattcctttccaaatcagggctggcccgggggaagtaaggcccagtttggaagcctgctgccccgggaggccgagcagtgagggccacctccctgtcttcatcacattttcaccgcttccgggggtccttcccctcagtcccaccatgggggcgcctctagtagctcattgtcccggcttcctcccaaacgcttgagagggcgcgtctctgagagtca

SEQ ID NO: 889768 - DNA, 595 bp, Homo sapiens
attattgattgaatctctgcctctcctggggtctctgtaaggggatggtgaggatggcagcctccctgggtactaggtggcacccagtaggtgcgcctttcccagttggtgggtggtctgtgttccatgaagacaggaccccagaggtgtcgcctttatgctgtatgacattgaagctggtccctggctctgcgtggcctgaggggaaggggttcactccagctggtcacctcgctgccccctgcccgtggccttggtggccagtccttctttcccggttgaagaccccacgaagaatgatttctcacgccttcttcagccggctgtgtagtctgggtggtctccaggagtgccagtggaggcagcagcccccagacaattcctttccaaatcagggctggcccgggggaagtaaggcccastttggaagcctgctgccccgggaggccgagcagtgagggccacctccctgtcttcatcacattttcaccgcttccgggggtccttcccctcagtcccaccatgggggcgcctctagtagctcattgtcccggcttcctcccaaacgcttgagagggcgcgtctctgagagtca

SEQ ID NO: 889769 - DNA, 581 bp, Homo sapiens
attgtcaggctgcaaattttccaaatgtttttgctctgcttcccttataaaactgaatgcctttaaaagcacccaagtcacatcttgaattctttgctgcttagaaatttcttcccccagataccctaaatcatctctctcaagttcaaagttccagaaatctctaaggcaggggcaaaatgttgccagtctcttcgctaaaacattacaagagtcacctttgttccagatcccaacaagttcctcatgtccatttgtccatatagttgtccacattctrggaaaagccattcaacaaatctttagaaggttccaaactttcccacatttttctgtcttcttctgagccctccaaactgttccaactcctgcctgttacccagctccaaagttgcttccacattttcaggtatcttttcagcagtgccttactctactcgtaccagtttactgtattagtccatttttatgccactgataaagacatacccaagactgggaaaaaaaagaggtttaatagactcacagttccacatggctggggatgcctcacaatcaaggcagaaggcaagaaggatcaa

SEQ ID NO: 889770 - DNA, 470 bp, Homo sapiens
aactccctcaccatcatgagaacagtatggaggaaactgcccccatgatctaatcacctcctccaggtctctccctcgacatatggggattacaattcgagatgagatttgggtgggggcccagagccaaaccatatcaaagatactcagtttgacagtttctccaagttctctaaaatttagccttataytatcaagccatgagaccggtaggtttataacccattattgtgaacttgcagaattacttctcaattgctctgtataccgtgcctcagtgtgcctcggtgcatgctacaagaaggaactctacgaaagtcactctcagagcttcccatgggagatttttatctcaagtctttgtgtcttttcacaaaccattgatatgctattaatgataaatgcacagattttcgaaaccaattaggcatctcattttgttctggctggttgctaaaatgggcagaaat

SEQ ID NO: 889771 - DNA, 668 bp, Homo sapiens
ttccacaacctagcaagacagaccaatattcaaattcaggaaattcagagaatcctagtaacatcctccatgagaagatcaaccccaagacacataatcatcagattctgtgaggtcaaatgaaggaaaaaatgttaagggcaaccagagagaaaggccaggtcacctacaaagggaagcctatcaaactaacagcagacctctcagcagaaaccctagaagccagaagagattggaggccaatattcaacattcttaaagaaaagaatttccaacccagaatttcattaccagccaaattaagcttcataagcaaaggagaaataagatccttttcagacaaacaaacactgaggaaattcatcaccacaaggtctgccttgcaagagctcctgaaagaagcactaaatatggaaaggaaaaactatatyatccattacaaaaatacactaaagtacacagaccagtgacactatgaagcaaccacataaacaagtctgcaaaataactggctagcatcatgatgacgggatcaaattcacacataacaatattaaccttaaatgtaaatgggttaaatgccccaattaaaagacacagattggcaagatggataaagacttaagccccattggtatgctgtcttcaagagactcacctcacgttca

SEQ ID NO: 889772 - DNA, 605 bp, Homo sapiens
ggtcagggcagcctctgtatgccctctgccccaacactggctgatgtggtttggctctgtgttcctgcccaaatctcatcttgaattgtactcccataattaccacgtgttgtgcgagggatctggtaagagataatttgaatgggggcagtttcccccataatgttttcatggtagagaataagtctcatgagatctgatgggtttatcatgggtttccgcttttgtatcttcctcattttctcttgcctccaccgtgtaagaagtgcctctcacctcctgccatgattctgaagcctccccagccaygtggaactgtaaattcaattaaacctctttttcttcccagtctcaggtatgtctttatcagcagcatgaaaacggactaatacactggcccagggctggcctcattcacctgccaagggtgcagggaggcggtgcaggagtcatgaatgtgcattttgcacctgcagctgtgcagcagatggatcctctgacccaggctaccatgtttattcccagtgcatgtcagctgccctttgtcagcctggcctgtcttggctccaattctagctgcccagccgctgtcatcctcttccctc

SEQ ID NO: 889773 - DNA, 605 bp, Homo sapiens
ggtcagggcagcctctgtatgccctctgccccaacactggctgatgtggtttggctctgtgttcctgcccaaatctcatcttgaattgtactcccataattaccacgtgttgtgcgagggatctggtaagagataatttgaatgggggcagtttcccccataatgttttcatggtagagaataagtctcatgagatctgatgggtttatcatgggtttccgcttttgtatcttcctcattttctcttgcctccaccgtgtaagaagtgcctctcacctcctgccatgattctgaagcctccccagccacgtggaactgtaaattcaattaaacctctttttcttcccagtctcaggtatgtctttatcagcagcatgaaaacggactaatacactggcccagggctggcctcattcacctgccaagggtgcaggraggcggtgcaggagtcatgaatgtgcattttgcacctgcagctgtgcagcagatggatcctctgacccaggctaccatgtttattcccagtgcatgtcagctgccctttgtcagcctggcctgtcttggctccaattctagctgcccagccgctgtcatcctcttccctc

SEQ ID NO: 889774 - DNA, 620 bp, Homo sapiens
ccaaagcaatttatagattcaattctattcctgttaaactaccattgagattcttcacagaacaagaaaatactattttaaaatttatatggaaccaaaaaagagcctgaatagccagggtaatcctaatcagaaagaacaaagctggaggcatcactctgctcaacttcaaactatagtacagggctacartaaccaaaacagcatggtactggtacaaaaacagacacatagaccaaagtaactgggattacaggtgggccaccagtactgctaaattttgtaattttttggagagacaggatttcaccatgttgctcaggctggtctcaaactcctgagcacaagccatccaccctcctcagcctcccaaagtgctgggattacaggcatgagccattgtgccatgcctttattcagcctcacttttaaaagtgtagttctcaaacttcattacccataagaataaagaagagaacttgttaacatatcagattactaaactccattccaaacttctgattcagttaatgagggaacactgtgactattaaacgtaaacaaatatagaaactgatgagctatctagatgcatttattccaacaaccaccatctctgt

SEQ ID NO: 889775 - DNA, 638 bp, Homo sapiens
ttggaccagatgaggaagggctccccgcaatgcagtatacctactctaccaaaaagcagccagactacttctttaagagggtccctgatcccattcctcctgactggatgagacctcccaaaaggggcctccagccacctcctacaagcatgttcaggctggcaatgagtcagtaccaccctggtacagagcttccagagaaaggagctggctgccatatttgctgttttgcagccttcactggtgatacctccaggtgcaggaaaacccgaggcwactagggtctggagtagaccccaggaaaaccacagcagccctactgaagagtgtcctgactgttaaaaggaaaacaaacaagcagaaaacaacaagaacaacaacattaagaaatacctggcaaaaaccccattcaatggtcaaacctcaaagattgaaagtagataatccccacaaagatgaaaaataatcaatgcaaaaacactgaagactcaaaaaaccagagtacctcttatccttcaaatgaccacaacacctctccagcaagggcacggaactgaggctgagatggctgaattgacagaagtaagtttaagaaggaaagtaataacgaactccactgagctaaaggagcatgttgt

SEQ ID NO: 889776 - DNA, 638 bp, Homo sapiens
ttggaccagatgaggaagggctccccgcaatgcagtatacctactctaccaaaaagcagccagactacttctttaagagggtccctgatcccattcctcctgactggatgagacctcccaaaaggggcctccagccacctcctacaagcatgttcaggctggcaatgagtcagtaccaccctggtacagagcttccagagaaaggagctggctgccatatttgctgttttgcagccttcactggtgatacctccaggtgcaggaaaacccgaggcaactagggtctggagtagaccccaggaaaaccacagcagccctactgragagtgtcctgactgttaaaaggaaaacaaacaagcagaaaacaacaagaacaacaacattaagaaatacctggcaaaaaccccattcaatggtcaaacctcaaagattgaaagtagataatccccacaaagatgaaaaataatcaatgcaaaaacactgaagactcaaaaaaccagagtacctcttatccttcaaatgaccacaacacctctccagcaagggcacggaactgaggctgagatggctgaattgacagaagtaagtttaagaaggaaagtaataacgaactccactgagctaaaggagcatgttgt

SEQ ID NO: 889777 - DNA, 646 bp, Homo sapiens
aaacagagatatagaccaatggaacagaacagaggcctcagaaataacaccaaacgtctacaaccatctgattttgacaaacctgaccaaaaaaagcaatagggaaaagatttaataaatggtgttgggaaaattggctagccatatgcagaaaactgaaactggaccccttccttacatcttatacaaaaatcaactcaagatggatcaaakaattaaacataagacccaggaccataaaaatcctagaagaaaacctgggcaataccattcaggacataggcatgggcaaagacttcctgtctaaaacaccaaaagcaatggcaacaaaagccaagattgacaagtgggatctaatgaaactaaagagtttctgcacagccaaagaaactatcatcagggtgaacaggcaacctatagaatgggagaaaatttttgcaatctatccatctgacaaagggctaatatccagaatctacaaagaacttaaaaaaatttacaagaaaaaaaaaaaacaaccccatcaaaaagtgggcgaagatatgaacagacagttctaaaaagaagacatttatgcacccaacagacatatgaaaaaatgctcatcactggtcattagagaaatgcaaatcaaaaccacaatgag

SEQ ID NO: 889778 - DNA, 548 bp, Homo sapiens
cacattccattcaagtgcacaagaaactttctctaggatagtctatattataaaccataaaacaagtcttgatgaatttagaatcattatggatatgaattatgcatatagacagagataaataaggaaaagacttcaacaatgctataaaccaagtagacataacagaaatctgtaaaacactgctaccaacccagaagattatatacattycactcaagtgcacaagaaacactctccaggatagtctatattataaaccataaaacaagtcttgatgaatttaaaatcattgaaatcatacaaaatatgttctctgacctataatagaatacaaatagaaaaaataactgaagaaaatttgaaatatcacaagaatgtggaaattaaacaatacactactaaacaacaaatggttcaaagacatatcacaaaagaaatgagaaaatactttgagatgaatgaaaaggtaaataaaacatactcaaaatattgggatgaggctgaagcaatgctttcagaagttatagctgtaaatgactatttta

SEQ ID NO: 889779 - DNA, 604 bp, Homo sapiens
ggggttttctaaatatacaatcatgtcatctgcaaacagagacaatttgacttcctctcttcctatttgaatagcgtttatttatttctcttgactaattttcctggccagaacttctaatactatgttgaatagaagtggtgagagagggcagccttgacttgtgccagaagacatttgtgtggccaaaaaacgtacgaaaaaaagctcatcatcactgctcattagagaaatgcaaatcaaaaccacaatgtgataccatctcatgccagttagaatagagatcattaaaaattcagaaaacaacagatgctggggaggatgtgaagaaataggaacacttttacactgttggtgggagtgtaaattagttcaaccrttatggaaggcagtgtggcgattcctcaaggatctagaaccagaaataccatttgacccagctatcccatttctgggaatatacccaaaggattataaatcattctactatacagacacatgcacgtgtatgtttattgcagcactgttcacaatagcaaagacttggaaccaacccaaatacccagaaattatagactggattaaaaaaagtgacacatataca

SEQ ID NO: 889780 - DNA, 638 bp, Homo sapiens
ttggaccagatgaggaagggctccccgcaatgcagtatacctactctaccaaaaagcagccagactacttctttaagagggtccctgatcccattcctcctgactggatgagacctcccaaaaggggcctccagccacctcctacaagcatgttcaggctggcaatgwgtcagtaccaccctggtacagagcttccagagaaaggagctggctgccatatttgctgttttgcagccttcactggtgatacctccaggtgcaggaaaacccgaggcaactagggtctggagtagaccccaggaaaaccacagcagccctactgaagagtgtcctgactgttaaaaggaaaacaaacaagcagaaaacaacaagaacaacaacattaagaaatacctggcaaaaaccccattcaatggtcaaacctcaaagattgaaagtagataatccccacaaagatgaaaaataatcaatgcaaaaacactgaagactcaaaaaaccagagtacctcttatccttcaaatgaccacaacacctctccagcaagggcacggaactgaggctgagatggctgaattgacagaagtaagtttaagaaggaaagtaataacgaactccactgagctaaaggagcatgttgt

SEQ ID NO: 889781 - DNA, 650 bp, Homo sapiens
tttttctgtcctttagcttaaaactgccttaggacttgggtttagggagcttgtgcctagtattagatacagccttctgggaggaagggcatccaaacacattgttggaatcccattcccagaccctctcaccatgcactgtcctataaatcatcacatcaaagcctgagctaaggaggggtgaccaaattccctcaaacggagcccactgctgtcctggctaagcagggtctaacactagaccatcaacaagcaccatcacacaccrttaacaaacatgagacttcttacgtggtgccactatccttaccttacatgagttaaatgaaaactctgctgtaatggatttctagagagcacattagagccccaggacaagaatgaaaccatgaagggctgtggtcatccctaggtgaaggcttcagaaagtatactgaagccctcagtaaagccttcattttatttctaggtgcttgctttctaaaacacctgtgcccattttgtttggtgagcatgagaatgacatgccagtaagagatgcaggggatagagtcaccagttcataatcacttgttgatttcagatagaagcaacccacacttatgaaagacaagccacatgaattattttactttctacttgattccttt

SEQ ID NO: 889782 - DNA, 663 bp, Homo sapiens
gtactgcctactggagctgtgagaagtaggccaccgtcctctggacaccagaatggtagatacaccaacagcttgaccatgcacacaggaaggccacagacaatgccagctcatgaaagcaaccaggaggggggatatgtcctgcaaagccacaggggtggagctgcccaaggccgtgggagcccacctcttgcataagtgtgacctggatgtgagacatggagtcaagggagtgcattttggcactttaagatttgactggactrctgagttttggatttggggcctgtagcctctttgttttggccaatttcaaccatttggaacaggtatatttaccccctccctgtacctccattgtatctggaaagtaactgacttgcttttgactttatgggctcatagctggaagggacttgccttgtctcagataagactttggagagtggacttttgagttaatgctgaaatgagttaagatgttgggggactgttgggaaggcgtaatttgctttcaaatgtgaagacatgggatttgggaggagccagggcagaatgatatgatttggctgtgtccctacccaaatctcatcttgaattgtagttcccataattcccacatgttgtgggagggacctggcagaagacaattgaatcatgggg

SEQ ID NO: 889783 - DNA, 575 bp, Homo sapiens
tttgatgactttaggatactatattaactcttaattgaattaatacaagtttaggtgtaaagatgatgtttatgttgacaaaaattattaatgttttacatatatgaaattaataatatattttttgtatttgtagaatactttgaaatctattattagctaatattttatattcattttgmgttttcacattattgttagatccagagaaaagtaatattttgtgaatactcaaatcataaacattttgctggatgcattcatagatattttatttaaaatgtacactaattgaagttttataccattttatgattcatcaaacacagcaactgaatactggcgtatagcaacattacagatgttagtctaacataaaactcataacacattttaaaaagggtaaaaggaaggaaaggaaaagggatacgaggctgtagaaagattttaaaaacaaacgtcatatgtctgaacctttacctggagtttcatattttgtgaaaagcagtttgtaagtagaggactcgtaagtgcacctagtacactgcaatggcacagacacggcagatagtcaa

SEQ ID NO: 889784 - DNA, 650 bp, Homo sapiens
acaactatctgatctttgataaacctgagaaaaacaagcaatggggaaaggattccctatttaataaatggtgctgggaaaactggctagccatatgtagaaagctgaaactggatcccttccttacaccttatacaaaaatgaattcaagatggattaaagacttaaacgttagacctaaaaccataaaaaccctagaagaaaacctaggcattaccattcaggacataggcatgggcaaggacttcatgtctaaaacaccaaaagcaatggcaacaaaagacaaaattgacaaatgggatctaattaaactaaagagcttctgcacagcaaaagaaactaccatcagagtgaacaggcaacctacaaaatgggagaaaattttygcaacctactcatcttaagattcttatacatccccgatctatccatgcagtagtgacaggagatcattcatattagtgtttcttcctttaagctgggaatcctcataaatatagtattctctgttgtttatcttataatgtattctaaaatctattccccaactttgttttttagcatagaaattctccacagagaattttaatatagtgcctcctataacaataacttcaaaaatctcatgatacttttaagaaagttgttat

SEQ ID NO: 889785 - DNA, 650 bp, Homo sapiens
acaactatctgatctttgataaacctgagaaaaacaagcaatggggaaaggattccctatttaataaatggtgctgggaaaactggctagccatatgtagaaagctgaaactggatcccttccttacaccttatacaaaaatgaattcaagatggattaaagacttaaacgttagacctaaaaccataaaaaccctagaagaaaacctaggcattaccattcaggacataggcatgggcaaggacttcatgtctaaaacaccaaaagcaatggcaacaaaagacaaaattgacaaatgggatctaattaaactaaagagcttctgcacagcaaaagaaactaccatcagagtgaacaggcaacctacaaaatgggagaaaatttttgcaacctactcatcttaagattcttatacatccccgatctatccatgcagtagtgacaggagatcattcatattagtgtttcttcctttaagytgggaatcctcataaatatagtattctctgttgtttatcttataatgtattctaaaatctattccccaactttgttttttagcatagaaattctccacagagaattttaatatagtgcctcctataacaataacttcaaaaatctcatgatacttttaagaaagttgttat

SEQ ID NO: 889786 - DNA, 668 bp, Homo sapiens
acaggagaaaggatatcagagattgatgactaccttgccgaaataaggcatgcagacaagattagaaaacaaaacaaaacaaagaatgaaaataaacgaacaaaacctccaagaaatatgggactatgtgaaaagaccaaagctatgattgattggtgtacctgaaagtggggggtagaatggaaccaagttggaaaacacacttcaggatattatccaggagaacgtccccaacctagccagacaggctgacattcaaattcaggaaattcagagaacaccactaagacactccataagaagatcagctccaagacacataatcgtcagattctccaaggtggaartgaaggaaaaaattaagagcagccaggaagaaaggtcaggtcacctacaaagggtagcccatcagactaacagcagatctctcagcagaaacactacaagccagaaaagagtggggggcaattctcaacattcttaaagaaaagaattttcaacctagaatttaatatccagccaaactaagctgcataaatgaaggagaaataaagtccttcaaggaaatgccaaggtattttgtcaccatcaggcctgccttgcaagagctcctgaaggaagcactaaatatggaaaggaaaaaccagtaccaaccactgcaaaaacat

SEQ ID NO: 889787 - DNA, 621 bp, Homo sapiens
acaatgtactaaaaaagcaaagccataggttcatctcaaaagatgcaaaaagaaaacataattcagtatacatttatattaagttcgtgtaaaagtaattgcaatttctgccattacttttaactatttttacaccaacctaattaaaaaaagagctccaaaaatttaaaagagaagataacttctttaacctactaaacatgtcttcaaaatgtacaaagataccatcaaacttgatgataaagaactgaattccttcccctgaagatctggaacaaaacatgtacgtctgtttaattacttatatttactattgtaactggaggatctagccaataaaagaggacaagaaaaaataaattaaaattacatagattggaaagtagaaattaaaattgggatgattcgcagatgacctacttatgagtgttgaaaacctatctataaaaatgcctctacaatcagtaaataaatttagaatggtcraaggatatgagattaatttacaaaagctaaatgtattgttatacaatagcaatgcaccattagaaactgaaatttagaaaaattattgcatcagtaatacaaaatacttaggaataaattaaacacaaaaaattg

SEQ ID NO: 889788 - DNA, 712 bp, Homo sapiens
gagttcactcatgatttggctctctgtttgtctgttaatgatgtataggaatgctagagatttttgcacatggattttgtatcctgagactttgctgaagtggcttatcagcttaaggagattttgggctaagacgatggggttttctaaatatacaagcatgtcatctgcaaaaaggaacaatttgacttcctcttttmctaattgaataccctttgtttctttctcctgcctgattgccctggccagaacttccaacactatgttgaataagagtggtgagagagggcatccttgtcttgtgccagttttcaaagggaatgcttccagtttttgcccattcagtatgctattggctgtggatttgtcataaatagctctcattataatagctcttattattttgagatacgtttcatcaatacctagtttattgagagtttttagcatgaagggctgttgaatgttgtcaaaggcttattctgcctctattgagataatcatgtggtttttgtcattggttctgtttatgtgatggattatgtttattgatttgtgtatgttgaaccagacttgcctcccagggataaagccaacttgatcgtggtggataagctttttgatgtgctgctgaatttggtttgatagtatggtattgacgatttttgcatcagtgttcatcagggatattggtccaaaattatcttttttt

SEQ ID NO: 889789 - DNA, 639 bp, Homo sapiens
gtctcactttctttgaatctccagaatctagctccatgagcaagatattatagggatttattaaaatttgctaaataatggaataaacatcttaatgtccaattggaatacttgattctttatagatatccactcaacatagttttttgtgtgtgtacctactcatgccaggcattatacgtacatgagacagacacagcctgctatccatggtacttttggcataaggagttataaaaagcattaaggaggtaatttgcagccaagtgtaatattagagtggtgagaaggctcakgctgttttgacagtctatagcagggggggaaagttacctcatgcagttagttacttagatactcctttaaccaaatacataggattaaattgctagacgttttcgtagactcagaaagccatatggtgcaagtgccttcactgcctacattataatgaagtcttctcttcaacatcagaatactatgttttatgttttttgtttgtttgtttgctttttgagatggagtctcactctgtcatccaggctagagtgcagtggcgtgaacttggctcactgcaacctctgcctgctgggttcaagcaactctttgcctcagcctccccagtagcttggattatag

SEQ ID NO: 889790 - DNA, 652 bp, Homo sapiens
tgttgtttatggcctaaataggcaatgattctcaaatgtttgtgcatcagaatcacttgttgggttgttaaacgcaaattgcttgtcctcccctctggagtgcctgattcagtagatccagtgtcggagggtgcagtaagaattggtgttcctaatatgctcccatgttatgctactggtgccactggtctggggactaaaatatgagaaacactgcatttaaggatgcctttattcccagacctccaaagtttayatttctgtacaaatcctgtcactactaataattttactttttcacattttctatatttttaccttaatctgctatttctaccttgaatattcaagttcagcaaacatttatggcaaggctactatatggtggcaccattctaggagctagagattcattaactaatgaagcaagcaaacacaagaaaaaatttcctgccctcacagagattatacgtagtgtttatagtcagttaaatgtatgtttcatgcttaatttgaaaagtgttcccaagaaagatactgtagtcacagcaatcttattccacacaattaatttaatttcaactaatgtttattagaaaaaagatgcagatcccaggttccaagatggccaaataggaacagctcgtctaca

SEQ ID NO: 889791 - DNA, 652 bp, Homo sapiens
tgttgtttatggcctaaataggcaatgattctcaaatgtttgtgcatcagaatcacttgttgggttgttaaacgcaaattgcttgtcctcccctctggagtgcctgattcagtagatccagtgtcggagggtgcagtaagaattggtgttcctaatatgctcccatgttatgctactggtgccactggtctggggactaaaatatgagaaacactgcatttaaggatgcctttattcccagacctccaaagtttacatttctgtacaaatcctgtcactactaataattttactttttcacattttctatatttttaccttaatctgctatttctaccttgaatattcaagttcagcaaacatttatggcaaggctactatatggtggcaccattctaggagctagagattcattaactaatgaagcaagcaaacacaagaaaaaatttcctgccctcayagagattatacgtagtgtttatagtcagttaaatgtatgtttcatgcttaatttgaaaagtgttcccaagaaagatactgtagtcacagcaatcttattccacacaattaatttaatttcaactaatgtttattagaaaaaagatgcagatcccaggttccaagatggccaaataggaacagctcgtctaca

SEQ ID NO: 889792 - DNA, 610 bp, Homo sapiens
ttgtgtttgcatttctttgcagcctcccttcctgattcattctctcaggatgaccctctacaagaatatcagcttacacaagcttccccaaggtttcaggatgttactttttctgccccttctgtgcagattaatagtcttaaaaaaaataagaagcagcgtgtctggaaaatgactgaaccagaagtcagacaactcattattgcaaaactacaactactacttatcctcctaaaaggaataatggcatagtatgaatgagagccagaatttaggaaggctctactaagtgtttgacaccattaaaccctttatatttcctacctccaaccaccaaaacaacctcattgggatagatgatgatttgcttctctatgaagcatattcataaagcaggaatgtagtaataggaaagctgtgtgtgtaakgcacaagagagaattggttcatgtgagattttattttctctctgtattaattttacacagtgagtaacagcagctaaaaaagtgcactagtccagtgggtcacagcaagctggtgaagagaacagtcctgtactgatgcttgctctcaccctggtgtttgtcttgactcagtttccgcatat

SEQ ID NO: 889793 - DNA, 602 bp, Homo sapiens
caactctcccccattcagctcttaggagtcaggtgagtggacaacatcctcagatctaagaatgagactttgaatggtccaagtcaataatggtcatcccttctctctgaagggtgaggggttcagaaacccaggcttgcacctgtcagagcttgaggctacrtgtaggttggctgtgaatgggggagcagccttctcactctggccctctggaaacatgctgcctgggagcttctagaatccatcatacaagtacagagatagccaccctgaggatgaagctgtcaccaaaaggaggcaaaagaattggaaagaagtggagctttattgcttaacctgctgtatagacactgttaacttggacttcctgttatgtgagacaaatttctttattctttaagagagtttgcagggtattttttttttgcttcttctatttaaaaatatcctaaacatagaaatatgaaaatcagatatgataaataacagccacacaattaatagtgtttgctaagtcctcaaaagaagtcatttaattttctttcctctgttttgctttacttttttattgattctttcctcttctctctgcaacccaaaca

SEQ ID NO: 889794 - DNA, 602 bp, Homo sapiens
caactctcccccattcagctcttaggagtcaggtgagtggacaacatcctcagatctaagaatgagactttgaatggtccaagtcaataatggtcatcccttctctctgaagggtgaggggttcagaaacccaggcttgcacctgtcagagcttgaggctacatgtaggttggctgtgaatgggggagmagccttctcactctggccctctggaaacatgctgcctgggagcttctagaatccatcatacaagtacagagatagccaccctgaggatgaagctgtcaccaaaaggaggcaaaagaattggaaagaagtggagctttattgcttaacctgctgtatagacactgttaacttggacttcctgttatgtgagacaaatttctttattctttaagagagtttgcagggtattttttttttgcttcttctatttaaaaatatcctaaacatagaaatatgaaaatcagatatgataaataacagccacacaattaatagtgtttgctaagtcctcaaaagaagtcatttaattttctttcctctgttttgctttacttttttattgattctttcctcttctctctgcaacccaaaca

SEQ ID NO: 889795 - DNA, 602 bp, Homo sapiens
caactctcccccattcagctcttaggagtcaggtgagtggacaacatcctcagatctaagaatgagactttgaatggtccaagtcaataatggtcatcccttctctctgaagggtgaggggttcagaaacccaggcttgcacctgtcagagcttgaggctacatgtaggttggctgtgaatgggggagcagccttctcactctggccctctggaaacatgctgcctgggagcttctagaatccatcatacaagtacagagatagccaccctgaggatgaagctgtcaccaaaaggaggcaaaagaattggaaagaagtggagctttattgcttawcctgctgtatagacactgttaacttggacttcctgttatgtgagacaaatttctttattctttaagagagtttgcagggtattttttttttgcttcttctatttaaaaatatcctaaacatagaaatatgaaaatcagatatgataaataacagccacacaattaatagtgtttgctaagtcctcaaaagaagtcatttaattttctttcctctgttttgctttacttttttattgattctttcctcttctctctgcaacccaaaca

SEQ ID NO: 889796 - DNA, 643 bp, Homo sapiens
ctttaagagttggggaattgtgagtttaattaaagtccaaatgatcagtttggtgcatcatatcgaaaatgtcctacatgtcatttagtattcctaacaagccatatttcatcaacttgcagacttagtaatgtacccttgaaactatacatggaagtaaactttgtgcagaaaagggatgtctatcaatatctgtcgcttattttaggtgagacactatgaaatctaatgggaaagaaattcttgtctttcatttattcttcagctctctgggacctaacttgcatctgccatattggaaggaacaagagaggaacaatattcgcagcccacaaagcacttgtagttcatgagggatatgctagtatacaaggaaagcacagtccaagaagcgtttgatgtcataggatgrgcacataaaatgcttaaggtacttgttgagtaccttgttactaagtgccaattatcagccccaggccagcatcactttcttattgttcttctcttcctgaagtgagcctccactgcccagcctttgtagttcttgcctcccaaggttggctgcagtactgggcaaagccattcatttcccctcacctttgttgtctttaaagagagccttgtatgctctttcactcacttt

SEQ ID NO: 889797 - DNA, 485 bp, Homo sapiens; identical to SEQ ID NO: 874962

SEQ ID NO: 889798 - DNA, 485 bp, Homo sapiens; identical to SEQ ID NO: 874963

SEQ ID NO: 889799 - DNA, 597 bp, Homo sapiens
atgatctccttgactctccaaacctggaattggtttcaaacaggattagaattcttacttactggcagaaaaacatttgttcctggggtcagcaatgccttatatttcccagaacatatttcacagcaaatcagcagtggtaccgaggatggagttctagattctctctaacaaacttcagacacgaagcaggatatagacctcctccatcgyttagttctttcatctctgaggagcatgcccaacagaatggttgaagaataaattacattgcagaggggctgtgtttttatctccacaatactctttaatatgattctgtgctacaatcgaaactttatttaaataaattataggtgtacttctctctcctcattaatttattcattctttggttgtcattttttaaaaacccaaacacataagaagaattttctgtgtgttagatactgtgctagatgttagagaatcaaaggaaaacaaacaaaaacaaaaacatggtaccagcccttgaaggactcttagtgtctagtggaaaaagattgtcacattaacaaacaagcaaaataaagacatgcaattgctactgctggaaat

SEQ ID NO: 889800 - DNA, 617 bp, Homo sapiens
ctatggaatgggagagaaattttgcaatgtatccatctgacaaaggtctaacatccagagtctacaaggaacttaaacaaatttacaagaaaaaacaaccccatcaaaaaataggcaaaggatatgaacagacacttctcaacagaagacatttatgtggccaacaaacatatgaaaaaaagctcacatcactggtcattagagaaacgcaaatcaaaaccacaatgggataccatttcatgtcagaatggtgatcattaaaaagtcaggaaacaacagatgctggagaggatgtggcgaaataggaacacttttacactgttggtgggagtgtaaattagttcaaccattgtggaagacagtgtggtgattcctsaaggatctagaaccagaaataccatttgacccagccatcccattactgggtatatacccaaaggattataaatcattctactataaagacacatgcacacatatgtttattacagcactattcacaatagcaaagacttggaactaacccaaatgtccatcaatgatagactggataaagaaaatgtggcacatatatgccatggaatactatagagccataaaaaaggatgagttcatgt

SEQ ID NO: 889801 - DNA, 679 bp, Homo sapiens
aggtatccataatgtagttttccttattttttaaataaaacttgtaaaatctaaatattttcaggtaagctgacaggtattgaaatggatttttccccaggagggtggaaatgagggcagagagtagaagttagagaacagtcaattgcttgcttttctgttcacatcagtgatatttttaatcatgcagattaggttttataacataatatcctttcactttttcttatctaaaacttatctaactctactcttaaagagcagcataagaaatcttggaaacattttaattcccaggctgcattgccttttrctttaattttgaaggatgaagaaatcttagctaggaagtatctagagaatttcggaagattcctcgagcagaacagtgcttaatatattactccttttacacactaggtatgcttttgtggtataagaaaatattacctttgagaggtcatctgagcttacagctcacccacagaactttccattcgagcagcatcattccatgtctggaacttacaacctgcttctgctttgtaaagggcagattttgaatattcagttccaaacccaaagaaagggcaaggaacaaagagtataggaggagagagaaatagtttacaaatagaaagttagcactttatagacctgagctgcctgctgcctcgtc

SEQ ID NO: 889802 - DNA, 591 bp, Homo sapiens
cttgtcctcagtcttcttctgagggtagagaaaacagtggcccaccttcccgtttgctgttgggagttgggagtgttggcctcgatcaactccagccttttctatggcattttccttcttttttcaggactgtgatggcacctatcttttgttttacaatattagaggtgttctacccctcagtgttctggccctcagtggccaccccaatggctgcaggcatgtgcatgggatggatgggtgagcagcagcttcctgcacccttccctcctggccgcggagcatgactctgtccactgcatatgttagtggtgtccaatggccatgcrgggtgggactgagccacagccactgctcaggcccaaagcagcctcaagagcccaggacccacactgccagctggccagctaatatggtttggctctgtgtccccatgcaaaactcagcttggattgtaataatccccacatgttataggagggacccacttggaggtaactgaatcatgggggagagttttgcctgtgctgttcttgtgatagtgcataagtctcacaagatctgatggttttataaaggggagttcccctg

SEQ ID NO: 889803 - DNA, 591 bp, Homo sapiens
cttgtcctcagtcttcttctgagggtagagaaaacagtggcccaccttcccgtttgctgttgggagttgggagtgttggcctcgatcaactccagccttttctatggcattttccttcttttttcaggactgtgatggcacctatcttttgttttacaatattagaggtgttctacccctcagtgttctggccctcagtggccaccccaatggctgcaggcatgtgcatgggatggatgggtgagcagcagcttcctgcacccttccctcctggccgcggagcatgactctgtccactgcatatgttagtggtgtccaatggccatgcagggtgggactgagccacagccactgctcaggcccaaagcagcctcaagakcccaggacccacactgccagctggccagctaatatggtttggctctgtgtccccatgcaaaactcagcttggattgtaataatccccacatgttataggagggacccacttggaggtaactgaatcatgggggagagttttgcctgtgctgttcttgtgatagtgcataagtctcacaagatctgatggttttataaaggggagttcccctg

SEQ ID NO: 889804 - DNA, 664 bp, Homo sapiens
tcattgccttcatcttcatatggtattctccctatgtgtggatctgtctcaaaatttccaatttttataacgataacaatcatgttggattaaggcccatgttattgaactcattttaactttataacctttgtaaaaattctatttccaaataaagtcaaattcagaaatattgagggttaggatttcaacacataagcttgagagagacacaattcaatacataccaagtctcaaactggaaacattccaaatgtccaacgatattaaagtaataaataaattgtggtatattttacactggaataccaaacaatagttgaatagataaaatattactaaatgtaataactacatggygcaagtattttaacaaacaaaagcagacatcaaaatatacatacttaataaatattgaatgatcagttaccaaagtattattgaagtggctacattatctggggtacataccctggggtttgttgtctcatgccaggaaaatttaccacatgggcatacacaaagagtttaggagtggaggtttaataggaagaagggaagagaaagagaaacagctttctctataaaggggcctctgagcagaaaggactggctagcggcaaatgtaccagactcctagagccattcccgttctttctgatac

SEQ ID NO: 889805 - DNA, 653 bp, Homo sapiens
tccatcatatcttatttcttactggagataaaatgtctacagctcagttttggaagtagcatcttcctacatggaagaaaaaataataattaaattatagccttcatgacctgactgttggtatgtaagaaaaaaaaatgtaactggtatgtaagaaaaaaaaatgtactgggacatttgttaagaacagcaaggaaaactttcttcaagactattgcaataggggagaaagattgaattcaactttgctgaaacaaaacttcaatgctgggatgaactaatgaaaaattcctgaagcatgttttgaggaggttggtcaatatgattaggccatttaggccgtctctgtttgctgattgtcacttgtaamagttatattcctgactttccacagaggctgggaaacagaggatccctctttcttgattattagatttcaaagtgatgacttccatgtctttgagaaagatattcctgtgttgtagaagatttacatcttaaaggtcagaagaagaatgtcctattgtaagttttataaagtaaatactctaagaaaagagacatcagggtcctatagtcaggaagaaacttatctaaagtttattcaagctgagaacaacattaaaactgccttggtcaagtaggacctttgt

SEQ ID NO: 889806 - DNA, 636 bp, Homo sapiens
atgtcctgtgctctgtggcagcagcagcagtgccttcggctctgggtctagttgaatagcctcttaatttttctgagtggtcccagaggtatactgctatcccagagtttctagaaactaccctatattttttcagttacttcctttttagattaaataaaccraagtgattactttcaagtaagaattctggtacaaaaccaaactcacaagtaagtgaccaaaataggattatgaagatataaagttggtaaagtatttaagtggattaagtggatatacaaaaatgctgtgtcacatatgaaaaagccaacatcgaaggatttcatcctaagacatcagaaatccataaaatagaaagatagcccaccaaggttgaagaaatatgagacataaaataattggtcaaaattgaggactaagtttgagcaacttgtaaaataagatgaacatggacagtgacacaatgaagacagtttttaaaacttttgctatatttttattttctcctgaaaagatatttctaaacagtcactgaatgtgaaggagtcagtgagtgtcagtgagtagttcaatcaatgtcacaaaaaatgagagaccaaaaaaagactggcaggaagtaaaggagggggaaag

SEQ ID NO: 889807 - DNA, 636 bp, Homo sapiens
atgtcctgtgctctgtggcagcagcagcagtgccttcggctctgggtctagttgaatagcctcttaatttttctgagtggtcccagaggtatactgctatcccagagtttctagaaactaccctatattttttcagttacttcctttttagattaaataaaccaaagtgattactttcaagtaagaattctggtacaaaaccaaactyacaagtaagtgaccaaaataggattatgaagatataaagttggtaaagtatttaagtggattaagtggatatacaaaaatgctgtgtcacatatgaaaaagccaacatcgaaggatttcatcctaagacatcagaaatccataaaatagaaagatagcccaccaaggttgaagaaatatgagacataaaataattggtcaaaattgaggactaagtttgagcaacttgtaaaataagatgaacatggacagtgacacaatgaagacagtttttaaaacttttgctatatttttattttctcctgaaaagatatttctaaacagtcactgaatgtgaaggagtcagtgagtgtcagtgagtagttcaatcaatgtcacaaaaaatgagagaccaaaaaaagactggcaggaagtaaaggagggggaaag

SEQ ID NO: 889808 - DNA, 600 bp, Homo sapiens
caaccagtgaggaactgggggagggacttgtgtgctaggaaataaattacctgttatgactgccctgtgtgtgcctgcccccggccccgatcttgcaagatggttattaaaaagtctcacttttgctgttcttagtgcctctaagtccattctctgggtttggatgggcgagtgtgtttctcacacccatgatccaatcacctcccatcaggtctcttcctagacatgtgggtattatggggattacaattcagatttgatttgggtggggacacaaagcctaaccatatcaccatgttgtgagggatgtgggatgaggagcagggtacgtttagggttgaagaggaaaactgactgatgcttaggtgggcaatagtctagtctctaggcactgtgctggrtgggattactgacccggtcaatcccagccaccagaggaggatctaaacattttaacaaaagcctctaaagcatggggcccctaaggcataagacccatggtaggggccacactttcacattctaagggtgatacggaccacttgaattaattagacaagtgataatgtgatgacattatgttaggacaacataacgtat

SEQ ID NO: 889809 - DNA, 669 bp, Homo sapiens
atttaattatgtggataggaaaatacagcatgctaaagccattttaaaatggaagttgtatgatattatttagaacaagtcaataaatagttgatattataattataaaagtgacatatgaacatattaaaatatccaaacaacaaagaaagtaacaaaattaaaaataaactctgccctctttacactgaggtccactccctaaaatarctactgttaatttctgtttgtatttatgttgctagacattattataatactaaatatatttatttctaaatttctttactgttaatgtaagtagtttctttttttcccttaaagggttctttgattgacttactctttcttttatatccttcccactgtctcttcgacagtattttagttgtatcacttttacatattctagttatgtgtaatattttaaaacagattttaggccatgattcaatgtagtactttggtattttctagcaaacattatttagcctgtattttgtttttagttggtgttgtagcccattcgtgctgctgtgataagacatcttagactggattacttataaacagcaaaaatttctcacagttctagaggttgggaagtctaagcgcaaagccctagcaggtttgatgtctgatggggcctggtccttgcttctaaggtgg

SEQ ID NO: 889810 - DNA, 669 bp, Homo sapiens
atttaattatgtggataggaaaatacagcatgctaaagccattttaaaatggaagttgtatgatattatttagaacaagtcaataaatagttgatattataattataaaagtgacatatgaacatattaaaatatccaaacaacaaagaaagtaacaaaattaaaaataaactctgccctctttacactgaggtccactccctaaaatagctactgttaatttctgtttgtatttatgttgctagacattattataatactaaatatatttatttctaaatttctttactgttaatgtaagtagtttctttttttcccttaaagggttctttgattgacttactctttcttttatatccttcccactgtctcttcgacagtattttagttgtatcacttttacatattctagttatgtgtaatattttaaaacagattttaggccatgattcaatgtagtactttggtattttctagcaaacattatttagcctgtattttgtttttagttggtkttgtagcccattcgtgctgctgtgataagacatcttagactggattacttataaacagcaaaaatttctcacagttctagaggttgggaagtctaagcgcaaagccctagcaggtttgatgtctgatggggcctggtccttgcttctaaggtgg

SEQ ID NO: 889811 - DNA, 644 bp, Homo sapiens
tgtatctagctaatctggtggggacttgcagaacctttatgtctagctaagggattgtaaatacaccaatcagtactctgtgtctagctcaaagtttgtaaacacaccaatcagcaccctgtatctagctcacggtttgtaaatacaccaatcagcactctgtatctagctcaaagtttgtaaacacaccaatcagcaccctgtatctagctcaaggtttgyaaatgcaccaatcagtgctctgtgtctagctgatctcacggggacttggagaacttttgtgtctagctcagggattgtaaacgcaccaatcagcaccctgtcaaaacggaccaatcagctctctgtaaaacagaccaattggctctctgtaaaatggaccaatcagcaggatgtgggtggtgccagataagagaataaaagcaggctgcccaagccagcagtggcaacatgctccagtccccttccacaatgtggaagctttgttctttcaccctttaaaataaatcttgctgctactcactctttgggtccaggctgcttttatgagctgcaacactcactgcaaaggtctgtagcttctctcctgaggccagcaagaccacgaacccaccaggaggaatgaacaagtccagatgcgccgc

SEQ ID NO: 889812 - DNA, 616 bp, Homo sapiens
tatggaatatagcaaaagcagtactaagagggaagtttatacctattaatgcatacataaaaaaaagaaaaacttcagataaacaatctagcaatgcacctcaaagaattaggaaagcaagagcaaaacaaacccaaaactagtagaagaaaataaataaaratcagagcagaaataaataatttttaaatgaagaaaacactgcaaaggatcaatgaaacaaaaagctgatctttgaaaagttaaagtaaattgacagactaagaaaaacagggagaagacccaaacaaacaaaatcagaggcgaaaaaggagacattacaactgatagtacagaatttcaaaggatcatgagtggctattttgagcaactatatgcaaataaattgaaaaagctagaagaaatggacacatatgtagatacacacaacctaccaggattgaaccataaagaaatctaaaacctgaacagacaaataacaagtaacgagatcaaagccataacaaaaagtatctcagtaaagaaaagcctgggacccaatgacttcacagctgaattctaccaaacatttaaagaaaaactaatatcaatcctaatctaagtattctgaaaaata

SEQ ID NO: 889813 - DNA, 616 bp, Homo sapiens
tatggaatatagcaaaagcagtactaagagggaagtttatacctattaatgcatacataaaaaaaagaaaaacttcagataaacaatctagcaatgcacctcaaagaattaggaaagcaagagcaaaacaaacccaaaactagtagaagaaaataaataaagatcagagcagaaataaataatttttaaatgaagaaaacactgcaaaggatcaatgaaacaaaaagctgatctttgaaaagttaaagtaaattgacagactaagaaaaacagggagaagacccaaacaaacaaaatcagaggcgaaaaaggagacattacaactgatagtacagaatttcaaaggatcatgagtggctrttttgagcaactatatgcaaataaattgaaaaagctagaagaaatggacacatatgtagatacacacaacctaccaggattgaaccataaagaaatctaaaacctgaacagacaaataacaagtaacgagatcaaagccataacaaaaagtatctcagtaaagaaaagcctgggacccaatgacttcacagctgaattctaccaaacatttaaagaaaaactaatatcaatcctaatctaagtattctgaaaaata

SEQ ID NO: 889814 - DNA, 616 bp, Homo sapiens
tatggaatatagcaaaagcagtactaagagggaagtttatacctattaatgcatacataaaaaaaagaaaaacttcagataaacaatctagcaatgcacctcaaagaattaggaaagcaagagcaaaacaaacccaaaactagtagaagaaaataaataaagatcagagcagaaataaataatttttaaatgaagaaaacactgcaaaggatcaatgaaacaaaaagctgatctttgaaaagttaaagtaaattgacagactaagaaaaacagggagaagacccaaacaaacaaaatcagaggcgaaaaaggagacattacaactgatagtacagaatttcaaaggatcatgagtggctattttgagcaactatatgcmaataaattgaaaaagctagaagaaatggacacatatgtagatacacacaacctaccaggattgaaccataaagaaatctaaaacctgaacagacaaataacaagtaacgagatcaaagccataacaaaaagtatctcagtaaagaaaagcctgggacccaatgacttcacagctgaattctaccaaacatttaaagaaaaactaatatcaatcctaatctaagtattctgaaaaata

SEQ ID NO: 889815 - DNA, 640 bp, Homo sapiens
tataatagaacaccaggtagacttccgaggtttttgactctaatctctggttcctagatggcaccactggacctgccctgagactgggctaactcaccaccataaagggaaggacacaggcctagttagatttgccacctgcttattgtagagccccaagttcttgagcaaacatagtcagtggtcagggagtgattacagcaggccttgggtaagaccaagtgcattgcaggctttagrtctgacccaaacagtcagagtgatggtggccacaggggtgcttgtgtaactccacctccagcatcaggtggctcaggacagagagatagagactccatttgtttgggagaaaataagggaagagaacaagagtctacgcctggaaatccaaataattctcccagatcttatcaaagaccatcaacgtggtacgtgtacaagtctgcaagaaccacagctttgctgaccttgaggtgccccctaaagcagatacagcttagatcacaacactcaagtcttttgaaatatctggaaacctttcccaagaaggatgggtacaaacaagcccagacagtgaagactacaataaatacctaattcttcaatgcctaggcacagatgaatatctacaaggatcaag

SEQ ID NO: 889816 - DNA, 659 bp, Homo sapiens
aacatgcataaaatcttgggcaagtcactaatttctctgaacttttcacctatgaaaatgacatagttctcacaggaacgttgcaggcctcatagcgatggtctagctatcaatatctaacagagagcttgttttctggcagggggtgggagggctcagccatcttggtgacacatcactatcccatttttttttctccaggctggtcttgaagttggggcaaaatgaatgccgagcaacaaaattctagggtgtctargtcttcttagtgcagactttaaaactgtaccaaagggatttgccaagaaactcgctgtcatttccagagcaagctattttcatttcccccactggtgctatagcagccggaaactttgctgcagtcctgccctctggacaccatctaaaagcacaagcaagctgtagacatgggcagtgactgggtatccaaggaagacagtcatatatacaataatgactgaaattaatttgtcttatcccttctaggccaagggataaaacaagagaaaagcagggggaaagaaaaaaaaaataacaagggaaaggccctaaatgaacttcaggatcaaaaatagatcctctctaacattagtagaagacggtaatgttatctattgtgtgcacctttagccagaata

SEQ ID NO: 889817 - DNA, 579 bp, Homo sapiens
agtttagtgagcatctggttcaacactgaaaagaatgttgaacagccagggctctgaattttcagaaacattgccaggtaagtaaacagaaaggaagaattttaaaatttcattaataaggacaaatcatgtggagttttgaggatggcttattaaggcttaggagcctttgagaatgataattgctggatggagttcaggtgtactgttgaatgtgagctcatcagggaccwgtcaaacttatctacagagctattttgtagtcgttgtgtttatttatttgttttcttcttactcaggatttgaaatgggaggatagggcaaagggaagcatatcaaaagaaagttctaaaggcttaaccaataggtttagagaagagttaaaaccagccagagactaagagaaaaatggggtgtggaagcctcaatgtaaggtggtgctggagggaatccatttgtgggatcacgtgatcactgaagtgttagcaagttagtaacacagaagtgttagcaattcagtaacacctgatttaaacaagaacattcatctccccatactcacatactgctgtgtgattt

SEQ ID NO: 889818 - DNA, 570 bp, Homo sapiens
ccatcttttcctcttcttctttttagttagctcttagtaaagactttgagaagcctaagcagagagctcctggaggtctatgttaccaggcaggtaacatagatgagtgaagagaaccagtgtaatgtgatggcgagtggtggggactgtggagaattggagtcactgccactaagcaccagttatttggtatcctacaggaatatgggcccagtgttagcaaaactttctcttttttttctttctttttttttctttttttgaggcagagtttcgctgtgtcgcccaggctggaatgaagtggcgcgatttcggctcactsccgaatcaagcgattctcctgtctcagcctccagagtagctgggattataggcaccagacaccatgccctgctaatttttttatttttgtatttttaatagggatggggtttctccatgttggccaggctgatctcgaactcctgacctcaggtgatccacccacctcggcctcccaaagtgctaggattacaggcgtaagccatcgcgcccagccaaaactttccatttttaaagagaagctggaaa

SEQ ID NO: 889819 - DNA, 656 bp, Homo sapiens
agcatttattaagaacttacactgcactaaatgttatatatgacttaatcctcactataaccctatgagataggttacattattgtcctaattttactaacaaggaaaccaagagacaaagctactaaaacacttgcctgaggttagacatcttcttctgtggtgaggctggatttcaaatttagaccatttgactgtagcacttatatgatgagcaygctgtttagtgttatagtgttggtctacctttgaatagacatacttttaaaccatggcaaggaagtgagactgcacattgaaatacgcaaaatttgcctttgggtgccacgtgagaaataatcacatcactagaaactaatcataagcttttgtgtttggttaaagttttattgatccatttttcttgtttactttgtgggatactgggcttaactaggggatacctccactttttacttggccatggtatgaaaacctgtcctctgaatctttagatattttgtcaaattgtaggcaaacaaagacttaaagcaattcaaccttgattaaaataagaccaaaaatgcctccatacttgattaaatttatttcattttaggaactggattataatcaagacaacttctacatgaaaaaatagattaatagtgctccaa

SEQ ID NO: 889820 - DNA, 635 bp, Homo sapiens
aaagaaaacaagactgatatcctgatatccttgatgaacatagatgctaaaatccttaacaatatactagctaaccaaatccaacaacgtatcaaaaagttaatctaccatgatcaatcgggtttcataccagggatgcagggatggtttaacatatgcaagtaaataaatgtgatacaccacataaagagaattaaaaacaaatttgtatgatcatctcaatagacgcagaaaaagcattygacaaaatccctcatccctttataattaaaactctcagcaaaatcggcataaaagggacatacctcaatgtaatgaaagtcatctgtgacaaacccatagccaatataatactgaatggggaaaagttgaaaacattccctctcagaactggaacaagacaaggatgccccctctcaccactcctcttcaacatagtactagaagtcctagacagagcaatcagacaagagtaagaaataaaggacatccaaatcagtaaagaggaagtcaaactgtcactgtttgctgatgatatgagtgtttatctcgaaaaccctaaacactcctctagaaggctcccagaactgataaaagaattcagtggagtttccagatacaaaattaatggacac

SEQ ID NO: 889821 - DNA, 687 bp, Homo sapiens
gtttcagttataattaatatttgttcctcaatacaaaagtaagcatgtttgtaccatatgatccagaaatcaggctccctgatatttacccaaatgaattaaaaacttatgttcgcacaaaaacctacacgtgaatgtttatagcagctttattcataattgccaaaacttgaaagcaaccaagatttacttcagtaaaatggttaaataaactgtggtacatccagacatggaatattattcagtgctaaaaagatgagctatcaagtcatgaaaagacttggaggaactttaaatgcatwtcactaagggaaataagccaatgtgaaaagactgcctactttatgattctacctatatgatatcttggaaaaggcaaaaatatagagacagtaaaaagatcagtggttgctggggggcacagtgggggagatgaataggtggagcacagaggattttagggaagtgaaactactctgtatgatacacaatggtagctacatatcatttcacatttttcaaaatcaaaatatgagcaataccagaatgagccctaatataaaccttaatatggattttgggttataataatgtgtcaatgtaggttcatcacttgcaacaaatgtaccaatgtggtagggatattggtagagagggaggctgcatgtgcatgaaaacagagtatat

SEQ ID NO: 889822 - DNA, 515 bp, Homo sapiens
aaccagacttgcattccagggatgaagcccacttggccatggtggataaggtttttgatgtgctgctggattcggtttgccagtatctcattgaggatttttgcatcaatgttcatcagggatattggtctaaaattatcttttttgtgtgtctctgccaggccttggtatcaggatgatgctggcctcataaaatgaggtagggaggattccctctttttctattgattggaatagtttcagaaggaaaggtaccagctcctctttgtacctctggtagaattcagctgtgawtccttctggtcctggactttttttggttggtaagcaattaattattgcctcaatttcagtgcctgttattggtctattcagagattcaacttgttcctggtttagtcttgggaggttgtaagtttcaaggaatttatccatttcttctagactttctggtttatttgcatagaggtgtttgcagtattctctgatggtagtttgtatttctgtgggatcag

SEQ ID NO: 889823 - DNA, 622 bp, Homo sapiens
tgttctcattgttcatctcccgtttataagtgagaacatgcagtgttttgttttctgttcctgtgttagtttgttgaggacaatgacttcctgctccaaccatgttgctgcaaaggatatgatctcgttcctttttatggctgcatagtattccatggtgtttatgtaccacattttctttatacagtctatcattgatgggcatttgggttgattccatgtctttgctattgtgaatcgtgctgcagtgaacatatgcttgcatgtatcttcgtaataaaatgatttatatatttttaagatatgcccagtaatgaaattgctggatcaaatggtatttctgcctctaggtatttgaggaattgccacactgtcttycacaatgggtgagctaatttacattcctcccaagagtgtaaaagtgttcctatttcttcatagccttgcagcatctgttgtttctcgactttttaataattgccattctgactggcatgagatggtatttcattgtggttttcatttgtatttttcgagtgatcagtgatgttgagctttctttcatatgtttgttgccacataaatggcttcttttgagaagtgtctattcatgtcctttact

SEQ ID NO: 889824 - DNA, 615 bp, Homo sapiens
atttctgagttctctattctgttccattggtttatgtgtctgtttttgtaccaggaccatgctgtttttcttactgtatacagtatcgtttgaagttgggtagcatgatgacttcrgctttattctttttgcttaggattgtcatggctatatgagctcttttttgatttcatatgaatttttaaattgtttcatgtaattctgtgaagaatgtcaatggtagtttagcgggaatagcattggttctataaattactttgggaagtatggtcattttcacaatattgattctttttatcagtgagcatggaatgtttttctatttgtttgtgtcttctctggttcttttgagtggtggttcgtagttctccttgaagaggtctttcactttccttgttagctgtattcttagatattttattctctttgtagctattgtgaatgggatttcattcaagatttggctctctgcttgtctgttgttggtgagtagggatgcttggaatttttgcatgttgattttgtattctgagactttgctgaagttgtttatcagcttaagaagcttttgggctgagacgatggtgttttctagatatacgatcatgtcatctg

SEQ ID NO: 889825 - DNA, 633 bp, Homo sapiens
ttttccaaatttttatgctctgcttcccttttaaacacaacttccaattccacatagtctctttgtcaatgcataaaattgaatgcttttaagaggacccaagccacatctgaaaagctttgctgcttagaaatttctcccatcagataccctaaatcatctctttcaagttcaaagtttcatagatctttagggcaggggaaaaatgccaccagtctctttgctaaagcataacaaaagtcaccttttttccagttcccaacaagtttctcatctccatctgagacyacctcatcctgcacttcatggtccatatcactatcagcattttggtcaaaaccattcaacaagtctctaggaaattccaaactttcccacatcttcctgtctcttctgagccctctaaactcttccaacctttgcctgttacccagttccaaagacgcttccatatttttggatatctgaatagcagcatcccactctctgctataccaatttactgtattagtccattctcatgctgctataaagaaatacctgagactgggtaatttataaagaaaagacatttaattgactcacagtcctgcataattgatgaggcctcaggaaacttacagtcatggaggt

SEQ ID NO: 889826 - DNA, 633 bp, Homo sapiens
gtaggggattttttttttaattctcaaagttaaatgttacaatgattaaataagataaagactgacatgtgtccattggatttagcaatttaaactcaggagtaattttaatgaagtagatgaagaactaaaatactacaattttatgctaagctagtcatgcttagagtcttctcctagatcaggaagcaaaggaaaaagctgtctcaaggaagttataaaggggagtgggaaagtaaaactmgcatttattggtaggctaccacatgctagaagttgtgctaggcacctgccatatgctatctcatttaactctcgtaactatgccttaagcattcctcaggagcagtagtagtattctgaggctcaggacattaaacaacatttccaaggatatacagctagtgattggcaggaaaagagcttgagaccaggcttgtgtcacttcaaagcccaggcttaggccattgcaccacattgctactaaagaagagatgaggtgagctatgagaagcacctcctctgtctcctccagtcttccccttctcctcctaaactactcccccaaaccccctgtaagacagtgaccaggaatgtagatgcaactggaaactctgagagtacacaccctgt

SEQ ID NO: 889827 - DNA, 546 bp, Homo sapiens
ttgaagcaataacaaaaaacctaccaatcaaaaagtgcccctgaccagatggattcacagccaaattctacaagatgcacaaagaagagctggtaccaattctactaaaactattccaaaaaaacaaggaggagggtctctttcccaactcattctacaaagccaacatcagcctgataccaaaacacggcaaagacacaatgaaaaaagaaaactaaaggccaacatacctgatgaacataggcacaaaaatcctcaacaaaatactgcaaaccaaatccaacaagatatcaaacagttaatttgccatgataaagtaagcatcrttcctgggatacaaggttggttcaacaaacacaaaagaataaatgcaattcaccacataaacagaattgaaaacaaaaaccatattatcatctcaatggatgcagaaaaagcttccaataaaatccatcttcccttcatgataaaaacatcctaggaacaaggcatcagtggaaaatacctcaatatcataagagccatttatgacaaacccatagacaa

SEQ ID NO: 889828 - DNA, 641 bp, Homo sapiens
acttcctgggctactgtgtgcaggctccaaactcttcctggatgacctgctgattaggagtaatcacatggtccttccgagggattcctggcagatctaccaagtccccagtctccttacaatgaggaagggaaagagagaacacaaawgagggtgtaacacataggaatggccagatatgaatgtaaaggaggaaagattattagaatttatttcctccaacaaacttcaaattaggcgagggaatttgtcaataaaattgtattcacaagtcttaaacttctaatgtctatgtatgcagttgagaagagtcttttatgatactgtatctgaagtaattttataagattgctggtgagttgcaaaaaaactatagcactgagtaatgcttatcaattcgttacagccccaaacttttaataattttataccacgatcagggacaacaataaaatatatccctccctaccttgtacacaacaatgctttcacaggtaactgctggtgaatttcaactacgacatgtattctgatgatttttactttaatactgaaaagaatttcacttaaaatagataaataattacacattgaaaaaggagaaaaaaaaagagctaattctctcatcaaaagtccatgat

SEQ ID NO: 889829 - DNA, 666 bp, Homo sapiens
atactcttttttttcaattatacccttattttataatgtacaagtaaattattactgactgtagtcaccctgttgtgctatcaaagactagatcttattcatttattctaattattttgataattattaatcatccccactttttcccccaaactccactatccttcagacatttttgtaacatactttactctgtatcaccatgaattcaagtgttttattttcaacccctacaaataagtgcgacatgccaagtttgtattttggggctgttttatttcacttaacatgatggcatccagtttcattcatgttaatgaaaattacagsgtctcaatttttaatgacagagtagtactttattgtgtatatgtactacactttctttatccattcatctgttgatggaaacttaggttgcttctaaattttgaatattgtaagtagagctctaataaacagggaaatgcagatatcttttaatataccaatttattttgatggtttgtttgtttgttttgttggtatactcccagcagtggggttgctgaattatatggtagttctatttttagtttcctgaggaacttccctgctattctccatcatggctgtactaatttacattctcaccaacactgtaccagttttcccttttctccacac

SEQ ID NO: 889830 - DNA, 577 bp, Homo sapiens
aatataagttattataagtaggaattcatgaagtggttgacaactcactcctattcctactcaatagatggctctattatattttgccactccaaaaacattgttattgctaccttatatttgaacttcacttgcaatatccagagaagcaatggtaaatgcattcacaaagaataaggcctctacttcccattttctttccttaaattctcagggagatttataaattgagaatcaggatgcgtgactaatttacatcaagaccctgggcactatttggattagtgtcctatgtttcagaagcagtcatttattcaacaagtatttattgagcttctrtatttctggtaataacaataattcctttcattttcatagctcttaagaatttacaaagcaagttcacacccatgattgtattaaaaccttgtaacaatgagatgagttagattttattacctcattttaaacatgaggaaactagggcttagaatagaaaagccactttcccaaggtagcccaactagtaaaaaaaaaaaaaaaaaaacagtgacatcaatcatttcttcacagtgaa

SEQ ID NO: 889831 - DNA, 587 bp, Homo sapiens
cagtacactttactgaatattttaagtcagctgttgagacctatcacttagaaaaagagtcctttcaaaatattactgctcacttgttaaagcagactaaatatggcctgagtagggctacatacttctatatttgagtccttgtggatgaactgtaacctagcttaatagtcagacaaaattgaaaacctaacttaatagtatgcrcccataacaatagctgagcgttgggcaatcccagcagccatacttcaaccactcatagactgctgagtgttaaaactgcactcaaataaggctaacgcagagctgtagcaaatcttgctgtttctgtacataactttaccttttttctccataaattcattccgagcacaaggcatccctggaatatctgtgaatctgccgtgattctgagggcagcctaattcatgaatcattaattgctcaattaaactcctttacatttaatttggagtaagtttttcttttatcacattgaaaatgcacctggttacccaccagctctgatggagtcatacaagaagatggtcattgttttcatgcctgctaatacatcatccatt

SEQ ID NO: 889832 - DNA, 561 bp, Homo sapiens
aaccttgaacaagataaaactttgttttattccactgagctttggaggcttagcatgttagaatggttagaattggtagtattagagcataaattaatgtggcaaacttactgagtttttgtgaatactgctatgagtgaattgagcaagtgaataaatgtaatctatatttatgaacaaacaggaccaaataattaggtgtcttatttaaaacatctaggaagtaaattatggaattggcctagaactcagctattctgtgtccaagtccagttttctctggtgtctcatcctgcaaaagtacaagctaataagtcccaacttgattctaagtcttgaaaactcatactgacaaagatatatcagaaaayatgaattctgtttgaactaaagaaccaattaatgtgttgttactaattggtccctaaatgcaccactttcagctttatattaagccctattttaaatcagatttgcaataattaccatgtgattgatatccactgatgttttagtgaaaattaaccttctgtgggctaatctggaatattgctaacattt

SEQ ID NO: 889833 - DNA, 579 bp, Homo sapiens
cttttgtgaagtacctcttaatgttctctgctcattttaaaaatattattaatttgtaaaatttccttttatatcttcgatgtaagatgttttattctatgtgcattgaaaatatctcctttaattatatgggttatattttcatttttaaatggtatctcctggtgaacaaaattacaagtttttaatttaattcagtgtttaaaaatgttgctttatgattggcagtttttgcctcatgtttgctaaaactttgtattttccagaatcacagagatgtttttacgtatctcttagatacaaatatattagtgttttgacatttatatttaaatctgcaatccattgagtttgaattttgtatatggtttagggacyaatatatatttttttcaatgttacccggagttatttaccaaaaagactataggttcacccattgaactgttgtgtcatctttgttatgaatagatgacggtatatagtttctattctattgccttagtttatttaactatgctttcagtaatacagttaattagcacgatttttaacagactgtcttatctggcaatgcaa

SEQ ID NO: 889834 - DNA, 452 bp, Homo sapiens
ttttatacgtgtttggtagttcctcctgcattcattctacttcctgccaccttatggagaaggggtcttgtttctcctctgtcttcctccatgattgtaagttccctgaggcctccccatccatgctgaactgttagtcaattaaaccttttgmctttataaattatccagtctcaggcagttatttatagcagtgtgaaaatggattaatacagcaaattggtactgagttaggggggtgatactataaagatacatgaaaatgtgaaagcaactttggaactgggtaacagccagaggttgaaatagttaggagggttcagtacaagacaggaagatgcaggaaagtttggaacttcttcgagacttcttgaatggctttgaccaaaatgctgatagtgatatggaaaatgaagtccaggctgcggtattctcagagggagatgaggaac

SEQ ID NO: 889835 - DNA, 646 bp, Homo sapiens
gtgtgagaaacagatcctggaaagagagaattgagagaatgaccttcaggacagtcaaagaagaatatgggacattcaggggaaatttggaaagagggaaatatattcacagcaaaattgtatgtaatgttatacaattcaagccctccatctactatctcctattgatctattggatctattgattcatgagtaaacagtttttttagaatttaatggagtttgagatttttttaatgttctatgatgcataaaacagctttgattttctactgtttacatgtgttttcaaaagtctcctcttacagaattttataagcaaaagaaaaacactgatttgctgttaatttcgccattaattctgagtttaccaatgtttttctctgtgcctggctcattagtaattgccaattgttgcttayagaaattgggcttctatccaaccatagaaagctggagatagccttgctgattacatttcacagggatggttctcaggcccttgagaaagacattcctgggttttgaaattgaccagaagctagaagtagatttacatcacaaagcagaaaagaaaaaagttacagctcaaaattatctaaagttagtgctctaaggaaagggaggtagaggaccttattcagga

SEQ ID NO: 889836 - DNA, 633 bp, Homo sapiens
atactatgcatatttcacaaagaccttttggggagaaaaacaaaggtttaaatcctaactctaaaagaatgtatttccttctgcctaaaatagtatgctattcactatctctggagcatttgtcagccctccaggaaaagagtccttcaacttggtcatagacaaggacacatagtctcagaaaatcaagaccatttttaacctaaaattttatttgaaacattatggtttgtggagycctttattactaaacatttcttgaagacattttgaatagtattttttcattttattttccatattttaatttatttttccttctgccaaacaggcattgtgatttaataacacttactaaagatatttgtttgtgtattaatttctcagacttatatctgtagagattacctcaaatgtaggcaaaattaattccaataaagtgaacaataaaggtccaaaaagagttgggggtttctttaatgtgttgtatttacactgtgatgatacctaaactacttgaaaattcttcatattctaagatcatgccctgagagacagatagtaaaatgtgaaaataattttttctacatgttattatattatgaactatactgttttgctttttatgccatt

SEQ ID NO: 889837 - DNA, 637 bp, Homo sapiens; identical to SEQ ID NO: 888212

SEQ ID NO: 889838 - DNA, 595 bp, Homo sapiens
  misc_feature 488: n = A,T,C or G
tgttctgtctaaagaaaagttcaactgtgttagttgaggacacacatcagaaactagtttctgagaatgcttctgtctagttgttatgggaagatatttccttttccaacgtaggcctgaaagcgctccaaatgtccacttccatatactamaaaaagagtgtttcaaacctgctctaccaaagggaatgttctactctgtgacttgaatgcaaacatcccaaagaagtttctgagaatgcttctgtctagattttacctgaagagaatcccgtttcccaccccatcctcaaagctatgcaaatatacatacttgcagattctacaaaaagagtgtttcaaaactgctctatgaaaagaaaggttcaactctgtcagtagagggcacacatcacaaacaagtttctgagaatgcttctgtctagttgttatgggaagatatttccttttcaacataggcctgaaagcgctccaaatgtccacttccanatactacaaaaggagtgattcaaacctgctctatgatagggaatgttcaactctgtgtcctgaatacaaacatcacaaagatgtttctcagaacgctgcagtctgca

SEQ ID NO: 889839 - DNA, 585 bp, Homo sapiens
tgcagcgttctgagaaacatctttgtgatgtttgtattcaggacacagagatgaacattccctatcatagagcaggttggaatcactccttttgtagtatctggaagtggacatttggagcgctttcaggcctatgttgaaaaaggaaatatcttcccataacaactagacacaagcattctcagaaacttgtttgtgatgtgtgccctctrctgacagagttgaacctttcttttcatagagcagttttgaaacactctttttgtagaatccgcaagaggatatttgcatagctttgaggatttcgtgggaaacgggattgtcttcaggtaaaatctagacagaagcattctcagaaacttctttgggatgtttgcattcaagtcacagagtagaacattccctttggtagagcaggtttgaaacactctttttgtagtatctggaagtggacatttggagcgctttcaggcccatgttggaaagggaaatatcttcccgtaacaactaggcagaagcattctcagaaacttatttgagatgtgtggactcaactaagagaattgaaccaccgttttgaaggag

SEQ ID NO: 889840 - DNA, 587 bp, Homo sapiens
caattacaggaggcagctttgagctgagtaatagatgatatcatctccagtcagaatggtcctttttggggagggctttgtctgtgggtgagtgagctccccttcaccagaagcatgcaagtcagtactgataaccatgcataatgaggccataggtgggattacagttctggtggagacggtggccttgtggtcttggggttgagcactgcacagtaatatcttattccatttcatatcagaaaaccaaatattgactgcttctcttctctttaacaggcatttattgggcatgtctatcccaccagcctttctgctcttcactgggggtgttgcaatgagttggacatgttcctcaccattaaggggcttccactttagtgggaaagtcatatagaaacataagaaactctgatttgtaaatttagagacacacagtakgacaggagactgaaaaagcagagatttatttgactaggaaaacaaggcaaatcagctggagggggcaagatttgagtaggcatttgagaataggcagcctgctgagaggtaaagatgcagactccatcagtgagggtcctagcagg

SEQ ID NO: 889841 - DNA, 423 bp, Homo sapiens
ttaagcgattctggcgcctcagcctcccgagtagcagggattacagacgtgagcccctgtgcccacccaagtttttatgtttatctctaacttcagacttcaaactatgcaagaccacagtaaccaaaatagcatggtactcatacaaaaacaggcacatagaccaatggaakagaatagagaactcagaaattaatccgcacatctacaaccatctgatcttcaacaaacctgacaaagacaagcaatggggaaaggattctatatttaataaatggtgctgggaaaactggttacccacatgccgaaaactgaaattggatcccttctttacaccatatgcaaaaaattaagtcaagatggattaaagacttgactgcaaaacccaaaattataaaaaccctagaagaaaatctagacaat

SEQ ID NO: 889842 - DNA, 658 bp, Homo sapiens
ctggagagatatatatatataaaattgaagtaaaatggaactctgcaggagcctaattttaaaacatcaatttctcaatgatcatgttaatgcataaaatgttttcttttcttgagtgcaggatttgcaaatactttctctataatttgatgccattatcraacttaattcaatgacacactgatttgttattcattcatttattcaacaaacatttattgaatgctttctgcatgatgggcactgtcccacaccctaaaaaagagttacagaaaaattagacaacaatcgctggcctcatagagtttatgtcatggtaatattaaaggctctgaagttttatcattctggttttatctatcatctgagtattggtggagagtagaatgttatgaccttggttcttaggatctgggagctacatgaggaaaatttttgcctagaatcttaaagaagcttccctattccccactcttctttagaagtttcttaggccaataatctagaacagagaaaaaatatagagcaacttaatccgcagagtctagaatctctggctctgaaagaagacttgatgagaaaagcttacttttctgtttttctttccttcaatgtcattatggccagcataagtttcttagacaaaagtatgtatagt

SEQ ID NO: 889843 - DNA, 632 bp, Homo sapiens
ttaagatttattcacaagttgttcccacttgaatatgtagcctcttctttgaaattgtgctttaaagtgatcatttgtaagcataagagtaactgcaattcttgtgtctttcatttcaaaatgttagaagtcattggtgaatacatgggtaaagatgaaagaaattaatgattgctagatatatacttcaggttttaattaacttatttatgtcagtgatttataaatagttgttctgtggaacacaaagtctgaaaaatgtcttaacagaaaaattaaatgttctgttaaaagcaatgaattttggaaacactgcattactgtaatgaggaatattaaagagattttgacttggagatagccaagggatttggatttggggatatmatataaccaagtggggttcatcccaggtaagataatttaatatttaaaatctattagtaataatgattttctcaatggaaaaaagaaaatttaatataattaaacacatataataaatactctcaacatacttgaagcagaagaaaaccttctcagtctggtgaagagtttcaacacaaaggcatcagatagcataattcttcatggttaaataagtattgaatagtgtcctttgattttaggaa

SEQ ID NO: 889844 - DNA, 600 bp, Homo sapiens
tcttgtctctgctagctttggtatgtatttgctcttggttctgtaattattttagttttggtgttaattgttagcttgagatctttccaactttttcaggtggacatttagtactataaatttccctcttaacactgccttygctgtgttccagagatttggatatgttgtatcgttgttctcattaatttcaaataaattcctgatttctgtctttatttcattatttacccagatgttattcaggagcaggttattcagttttcatgtaactatatggttttgagtgaatgtcttagtcttgatttctaatttgattgtgctgtggtctgagagattgtttgttatgatttcagttcttttgcatttgctgaggagttttttacttcctataatgtgatcaattttagaatgtgtgccagatgacaatgagaagaatgtatagtctgttgtttttggtggacagttctgtagatatctatcagctccatttgatccagtgctgagtttaagttctgaatatctttgttaattttctgtctgtatcatctgcctaatgttatcagtggggtgttaaagatccccactattattgtgtca

SEQ ID NO: 889845 - DNA, 564 bp, Homo sapiens
actttattcttttgcatgtgaatatcctgttttcccagcatcatttgttgaaatgactgtcctttcatcaatgaatggtcttggcaccattgtcagaaatcatttgaccatatatgcaagagtatatttttgagctctctattctgtttcattggtctatatgtctgtctttatgccagtaccacactgttttgattactgtagctttgtaatatttttgaaataagaaagtgtgatatctcttttttttaaattaaaaattttttttatttcaatagctttaggggtacaagtggttttcagtcacatagttaaattgcayagtggtgaagtctgggcttttagtgtatccatcacccaaatagtgtgcactgtacccaacaggtgattttgtatccctttccaacctctctccctcccccattctgagtttctaatgtctgttataccactctgcatgcctttgggtacccatggcttagctgccactcataagtgacaacatgaggtatttggttttccattcctgagttacctcagttaggataatgacctccagtttca

SEQ ID NO: 889846 - DNA, 566 bp, Homo sapiens
acatgcttggcagaatgatgatgtgttcaggacaacgttgaacgatattcaagtgtggaacagagacaaactcaaacatgcactatacccttgcctatctcagtgggcccccctcaagtgtctactctagtatagaacacctactgggtgttcagagttaagcaatcttaactcctacttgcttatgctctgctccaggcctcaaaggcctcattttcaaccttgcctgctcatcatttcaccctctggcttgcttttctactttcatccggtgataggctaacttccagctcctggccatggcttagtttcctggatgctgcttttgtggtgttcctgcatcatggcaacccagatagatgactttgtgatgaccatgtcacccaatctagcccaggragcacccacccttgggcagagtgcctccatgcagccctcacccaatcttagttcagcttcagtgtcacagccaaaacaaacaccacatagcataaacaaacaacagtaaggaaggttcccagtccctctcaggaaagaataatagggaagagggttaaaaacaatgc

SEQ ID NO: 889847 - DNA, 643 bp, Homo sapiens
acacacggatacagggaggggaacatcacacactggtgcctgtcagggggcagggggcaaggggatgaatagcaataggagaaatacctaatgtagatgatgggttgatgggtgcagcaaaccaacatggcacatgtatacctatgtaacaaacctccaagttctgcacatgtatcccctaacttaaagtataataataaaaaatcatgctatgtggaatatcatacccttcaagtatgtgtatatgtaaattaaaccctaaacattaaacatttcctaagatttatatacatttatgcataaacaataattaaataagacttgtttatgtatacataacacacttgttatgtttatatataacatgcacacacacacatatatttatatatacagagagagaaagagagagagatctgggaggataaacattaaattatgaatgtatttactattagttggaaaatcaaaaattcatttcaaamgaaaacagaaattaaagaaacagacactgaagactaatggatactttaagatgattgtctctgataaaaattattgctaccagaaaagacttgcagatatgcaaaatactagaacacgcttgaatattcatcggatgagccattagcatgggacagct

SEQ ID NO: 889848 - DNA, 638 bp, Homo sapiens
atccaatgtatcagctgtattgaccaatgtaaacttcccatacaaggaagatcagttatctattactaaaataatgctgcatagaaaaccacccaaacataatgactttaaaaaagtaatttattatatttttggagacaataggagagaagagtagttgtgatgatttgggtcatttttgatagaactcagctgggcttgttcatgcattttaggttggttggcacttggatatggctggctgctctagaatggtctcagctgggacaactgggccctcttccatgtattcctcatattcctatagcactctygccatattctcatccttgtggcagggacccaagaggaagcaagccaagtcatgcagtagggatcaagagaacacatacacatacttcttaagcctctgctgtgtcatgcttgctgataatatgtggttggccaaaacaagtcatgttcatgagcccatagaataaaagggcactgcagagttacagtcagggaggccattaattggcatcattaatgccaaactgtaaaaaaaatcctgaaagttcattttgaattatatgaattttcagagttacatgtgctttgacaagcttaattattttaaattagtatccaatgcaaga

SEQ ID NO: 889849 - DNA, 619 bp, Homo sapiens
gacttgcatcccagggatgaatccgacttgatcgtggtggataagctttttgatgtgttgctgattcagtttgccagtattttatcaaggatttttgaattgatgttcatcagggatattggcctgaaattttctttttttgttatgtcttgtcaggttttggtatcaggatgatgctggcctcacaaaatgagttagggaggagtctctctttttctactgtttggaatagtttcagaagaaatggtaccagctcctctttgtacctctgatagaatttgtgaatctstctggtcctgggctttgtttggttggtaggatattagttattgcctcaatttcagaactttttatcggtctattcagggatttgacttcttcctggtttagatttggaagagtgtatgtgtcctgaaatttatccatttcttctagattttgtaatttagatgaatagaggtgtttatagtattctctgatggtagtttgtatctctgggggatcagtggtgatattccctttatcattttttattgtgtctatttgattcttctctcttttctcttttcttctttattagtcgggctagtggtctattttgttgattattttaaaaaac

SEQ ID NO: 889850 - DNA, 671 bp, Homo sapiens
ataataatgggagattttaacaccctgtcaatattataacaatgagacagaaaattaataaggatattcaggatttgaactaagctctggaccatgcagacctaatagacatctacagaactctccaccccaaatcaacagaatatacattcttctcagcatctcattgcacttattctaaaattgaccacataattggaagtaaaacactcctcagcaaatactaaagaatggaartcataacaaacagtctctcagaccacagtgcaatcaaattagaactcaggattaagaaactcactcaaacctgaacaactacatggaaactgaacaacctgctcctgaatgactactgcgtacataatgaaattaaggcagaaataaagatgttctctgaaaccaatcagaacaaagacacaatgtaccagaatctctaggacacatttatagcagtgtgtagagggaaatttatagcactaaatgcccacaagagaaagcaggaaagatctaaaattgacaccctaacatcacaagtaaaagaactaaagaagcatgagcaaacaaattcaaaagctagcagaagacaagaaataactaagatcagagcagaactgaaagtgatagagacatgaaaaacctttcaaaaaatcaatgaatcaaggagctggtgt

SEQ ID NO: 889851 - DNA, 484 bp, Homo sapiens
aggaaatatcttccaataaaagctacttagaagcaatgtcagaaactttttcatgatgtatctactcagctaacagagttgaacctttcctttgagagagcagttttgaaacactctttttgtggaatctgtaagtggatatttgtctagctttgaggatttcgttggaaacgggattacatataaaaagcagacagcagcattcccagtaacttctttgtgatgtttgcattcaagtcacagagttgaacattccctttcatagagcaggtttgaaacwctctttttgtagtatctggatgtggacatttggagcgctttcaggcctatggtgaaaaaggaaatatcttcccctgaaaactagacagaagcattctcagaaactaatttgtgatgtgcgccctcaactaacagtgttgaagctttcttttgatagagcagttttgaaacactctttttgtaatatctgcaagaggatatttgg

SEQ ID NO: 889852 - DNA, 534 bp, Homo sapiens
ttgagagagcagttttgaaacactctttttgtggaatctgtaagtggatatttgtctagctttgaggatttcgttggaaacgggattacatataaaaagcagacagcagcattcccagtaacttctttgtgatgtttgcattcaagtcacagagttgaacattccctttcatagagcaggtttgaaacactctttttgtagtatctggatgtggacatttggwgcgctttcaggcctatggtgaaaaaggaaatatcttcccctgaaaactagacagaagcattctcagaaactaatttgtgatgtgcgccctcaactaacagtgttgaagctttcttttgatagagcagttttgaaacactctttttgtaatatctgcaagaggatatttggatagctttgaggatttcgttggaaacgggattgtcttcatataaactctagacagaagcattctcagaagcttcattgggatgtttcaattgaagtcacagtgttgaacagtccctttcatagagcaggtttgaaacactc

SEQ ID NO: 889853 - DNA, 586 bp, Homo sapiens
tttcaattgaagtcacagtgttgaacagtccctttcatagagcaggtttgaaacactctttttgtagtatctggaagtggacatttggagagatctcaggaatacggtgataaaggaaatatcttccaataaaagctagatagaagcaatgtcagaaactttttcatgatgtatctactcagctaacagagttgaacctttcttttgagagagcagttttgaaacactctttttgtggaatctgcaagtggatatttgtctagctttgaggatttcgttggaaacgggattacatataaaaagcagacagcagcattcccagaaacttctttgtgatgtttgcattcaagtcacagakttgaacattccctttcatagagcaggtttgaaacactctttttgtagtatctggatgtggacatttggagcgctttcaggccaatggggaaaaaggaaatatcttcccctgaaaactagacagaagaattctcagaatcttatttgtgatgtgcgccctcaactaacagtgttgaagctttcttttgatagagcagttttgaaacactctttttgtaaaatctgcaag

SEQ ID NO: 889854 - DNA, 571 bp, Homo sapiens
tggaatctgcaagtggatatttgtctagctttgaggatttcgttggaaacgggattacatataaaaagcagacagcagcattcccagaaacttctttgtgatgtttgcattcaagtcacagagttgaacattccctttcatagagcaggtttgaaacactctttttgtagtatctggatgtggacatttggagcgctttcaggccaatggggaaaaaggaaatatcttcccctgaaaactagacagaagaattctcagaatcttatttgtgatgtgcgccctcaactaacagtgttgaagctttcttttgatagagcagttttgaaacactctttttgtaawatctgcaagaggatatttggatagctttgaggatttctttggaaacgggattgtcttcatataaactctagacagaagcattctcagaagcttcattgggatgtttcaattgaagtcacagtgttgaacagtccctttcatagagcaggtttgaaacactctttttgtagtatctggatgtggacatttggagcgctttcaggcctatggtgaaaaaggaaatatcttc

SEQ ID NO: 889855 - DNA, 514 bp, Homo sapiens
aaaaaggaaatatcttcccctgaaaactagacagaagaattctcagaatcttatttgtgatgtgcgccctcaactaacagtgttgaagctttcttttgatagagcagttttgaaacactctttttgtaaaatctgcaagaggatatttggatagctttgaggatttctttggaaacgggattgtcttcatataaactstagacagaagcattctcagaagcttcattgggatgtttcaattgaagtcacagtgttgaacagtccctttcatagagcaggtttgaaacactctttttgtagtatctggatgtggacatttggagcgctttcaggcctatggtgaaaaaggaaatatcttcccctgaaaactagacagaagcattctcagaaacttatttgtgatgtgcgccctcaactaacagtgttgaacctttcttttgatagagcagttttgaaacactctttttgtaatatctgcaagaggatatttggatagctttgaggatttcgttgg

SEQ ID NO: 889856 - DNA, 629 bp, Homo sapiens
gaagcattctcagaaacttatttgtgatgtgcgccctcaactaacagtgttgaacctttcttttgatagagcagttttgaaacactctttttgtaatatctgcaagaggatatttggatagctttgaggatttcgttggaaacgggattgtcttcatataaactctagacagaagcattctcagaagcttcattgggatgtttcaattgaagtcacagtgttgaacagttcctttcatagaacaggtttgaaacactctttttgtagtatctggaagtggacatttggagcgctctcaggactayggtgaaaaaggaaatatcttcctataaaagctacatagaagctatgtcagaaactttttcatgatgtatctactcagctaacagagttgaacctttcctttgagagagcagttttgaaacactctttttgtggaatctgcaagtggatatttgtctagctttgaggatttcgttggaaacgggattacatataaaaagcagacagcagcattcccagtaacttctttgtgatgtttgcattcaagtcacagagttgaacattccctttcatagagcaggtttgaaacactctttttgtagtatctctatgtggacatttggagc

SEQ ID NO: 889857 - DNA, 570 bp, Homo sapiens
ttgaaacactctttttgtagtatctggaagtggacatttggagcgctctcaggactatggtgaaaaaggaaatatcttcctataaaagctacatagaagctatgtcagaaactttttcatgatgtatctactcagctaacagagttgaacctttcctttgagagagcagttttgaaacactctttttgtggaatctgyaagtggatatttgtctagctttgaggatttcgttggaaacgggattacatataaaaagcagacagcagcattcccagtaacttctttgtgatgtttgcattcaagtcacagagttgaacattccctttcatagagcaggtttgaaacactctttttgtagtatctctatgtggacatttggagcgctttcaggcctatggtgaaaaaggaaatatcttcccctgaaaactagacagaagcattctcagaatcttatttgtgatgtgcgccctcaactaacagtgttgaagctttcttttgatagagcagttttgaaacactctttttgtaaaatctgcaagaggatatttggatggctttgaggatttcttt

SEQ ID NO: 889858 - DNA, 533 bp, Homo sapiens
aacactctttttgtagtatctggatgtggacatttgcagcgctttcaggcctatggtttaaaaggaaatatcttcccctgaaaactagacagaagcattctcagaaacttatttgtgatgtgcgccctcaactaacagtgttgaagcattcttttgakagagcagttttgaaacactctttttgtggaatctgcaagtggatatttgtctagctttgaggatttcgttggaaacgggattacatataaaaagcagacagcagcattcccagaaacttctttgtgatgtttgcattcaagtcacagagttgaacattccctttcatagagcaggtttgaaacactctttttgtagtatctggatgtggacatttggagcgctttcaggcctatggtgaaaaaggaaatatcttcccctgaaaactagacagaagcattctcagaaacttatttgtgatgtgcgccctcaactaacagtgttgaacctttcttttgatagagcagttttgaaacactctttttgtaatatctgca

SEQ ID NO: 889859 - DNA, 473 bp, Homo sapiens
aaaggaaatatcttcccctgaaaactagacagaagcattctcagaaacttatttgtgatgtgcgccctcaactaacagtgttgaagcattcttttgatagagcagttttgaaacactctttttgtggaatctgcaagtggatatttgtctagctttgaggatttcgttggaaacgggattacatataaaaagcagacagcagcattcccagaaasttctttgtgatgtttgcattcaagtcacagagttgaacattccctttcatagagcaggtttgaaacactctttttgtagtatctggatgtggacatttggagcgctttcaggcctatggtgaaaaaggaaatatcttcccctgaaaactagacagaagcattctcagaaacttatttgtgatgtgcgccctcaactaacagtgttgaacctttcttttgatagagcagttttgaaacactctttttgtaatatctgca

SEQ ID NO: 889860 - DNA, 626 bp, Homo sapiens
gtggaatctgcaagtggatatttgtctagctttgaggatttcgttggaaacgggattacatataaaaagcagacagcagcattcccagtaacttctttgtgatgtttgcattcaagtcacagagttgaacattccctttcatagagcaggtttgaaacactctttttgtagtatctggatgtggacatttgsagcgctttcaggcctatggtgaaaaaggaaatatcttcccctgaaaactagacagaagcattctcagaaacttatttgtgatgtgcgccctcaactaacagtgttgaacctttcttttgatagagcagttttgaaacactctttttgtaatatctgcaagaggatatttggatagctttgaggatttcgttggaaacgggattacatataaaaagcagacagcagcattcccagaatcttgtttgtgatgtttgcattcaagtcagagttgaacattccctttcagagagcaggtttgaaacactctttttatagtatctggatgtggacatttggagcgctttcaggcctatggtgaaaaaggaaatatcttctcctgaaaactagacagaagcattctcagaatcttatttgtgatgtgcgccctcaactaa

SEQ ID NO: 889861 - DNA, 599 bp, Homo sapiens
ttgggatgtttcaattgaagtcacagtgttgaacagtccctttcatagagcaggtttgaaacactctttttgtagtatctggatgtggacatttggagcgctttcaggcctatggtttaaaaggaaatatcttcccctgaaaactagacagaagcattctcagaaacttatttgtgatgtgcgccctcaactaacagtgttgaagcattcytttgatagagcagttttgaaaaactctttttgtggaatctgcaagtggatatttgtctagctttgaggatttcgttggtaacgggattacatataaaaagcagacagcagcattcccagaatcttgtttgtgatgtttgcattcaagtcacagagttgaacattccctttcatagagcaggtttgaaacactctttttgtagtatctggatgtggacatttggagcgctttcaggcctatggtgaaaaaggaaatatcttctcctgaaaactagacagaagcattctcagaaacttatttgtgatgtgcgccctcaactaacagtgttgaacctttcttttgatagagcagttttgaaacactctttttgtaatatctgcaagaggat

SEQ ID NO: 889862 - DNA, 615 bp, Homo sapiens
agcagacagaagcattctcagaagcttcattgggatgtttcaattgaagtcacagtgttgaacagtccctttcatagagcaggtttgaaacactctttttgtagtatctggatgtggacatttggagcgctttcaggcctatggtttaaaaggaaatatcttcccctgaaaactagacagaagcattctcagaaacttatttgtgatgtgcgccctcaactaacagtgttgaagcattcttttgatagagcagttttgaaaaactctttttgtggaatctgcaagtggatatttgtctagctttgaggatttcgttggtaacgggattacatataaaaagcagacagcagcattcccagaatcttgtttgtgatgyttgcattcaagtcacagagttgaacattccctttcatagagcaggtttgaaacactctttttgtagtatctggatgtggacatttggagcgctttcaggcctatggtgaaaaaggaaatatcttctcctgaaaactagacagaagcattctcagaaacttatttgtgatgtgcgccctcaactaacagtgttgaacctttcttttgatagagcagttttgaaacactctttttgtaata

SEQ ID NO: 889863 - DNA, 596 bp, Homo sapiens
tcaattgaagtcacagtgttgaacagtccctttcatagagcaggtttgaaacactctttttgtagtatctggatgtggacatttggagcgctttcaggcctatggtttaaaaggaaatatcttcccctgaaaactagacagaagcattctcagaaacttatttgtgatgtgcgccctcaactaacagtgttgaagcattcttttgatagagcagttttgaaaaactctttttgtggaatctgcaagtggatatttgtctagctttgaggatttcgttggtaacgggattacatataaaaagcagacagcagcattcccagaatcttgtttgtgatgtttgcattcaagtcacagarttgaacattccctttcatagagcaggtttgaaacactctttttgtagtatctggatgtggacatttggagcgctttcaggcctatggtgaaaaaggaaatatcttctcctgaaaactagacagaagcattctcagaaacttatttgtgatgtgcgccctcaactaacagtgttgaacctttcttttgatagagcagttttgaaacactctttttgtaatatctgcaagaggatatttgga

SEQ ID NO: 889864 - DNA, 609 bp, Homo sapiens
acagtgttgaacagtccctttcatagagcaggtttgaaacactctttttgtagtatctggatgtggacatttggagcgctttcaggcctatggtttaaaaggaaatatcttcccctgaaaactagacagaagcattctcagaaacttatttgtgatgtgcgccctcaactaacagtgttgaagcattcttttgatagagcagttttgaaaaactctttttgtggaatctgcaagtggatatttgtctagctttgaggatttcgttggtaacgggattacatataaaaagcagacagcagcattcccagaatcttgtttgtgatgtttgcattcaagtcacagagttgaacattccctttyatagagcaggtttgaaacactctttttgtagtatctggatgtggacatttggagcgctttcaggcctatggtgaaaaaggaaatatcttctcctgaaaactagacagaagcattctcagaaacttatttgtgatgtgcgccctcaactaacagtgttgaacctttcttttgatagagcagttttgaaacactctttttgtaatatctgcaagaggatatttggatagctttgaggatttcgttggaaac

SEQ ID NO: 889865 - DNA, 596 bp, Homo sapiens
tcaattgaagtcacagtgttgaacagtccctttcatagagcaggtttgaaacactctttttgtagtatctggatgtggacatttggagcgctttcaggcctatggtttaaaaggaaatatcttcccctgaaaactagacagaagcattctcagaaacttatttgtgatgtgcgccctcaactaacagtgttgaagcattcttttgatagagcagttttgaaaaactctttttgtggaatctgcaagtggatatttgtctagctttgaggatttcgttggtaacgggattacatataaaaagcagacagcagcattcccagaatcttgtttgtgatgtttgcattcaagtcacagagttgaacattccctttcatagagcaggtttgaaacactctttttgtagtatctggatgtggacatttgsagcgctttcaggcctatggtgaaaaaggaaatatcttctcctgaaaactagacagaagcattctcagaaacttatttgtgatgtgcgccctcaactaacagtgttgaacctttcttttgatagagcagttttgaaacactctttttgtaatatctgcaagaggatatttgga

SEQ ID NO: 889866 - DNA, 596 bp, Homo sapiens
tcaattgaagtcacagtgttgaacagtccctttcatagagcaggtttgaaacactctttttgtagtatctggatgtggacatttggagcgctttcaggcctatggtttaaaaggaaatatcttcccctgaaaactagacagaagcattctcagaaacttatttgtgatgtgcgccctcaactaacagtgttgaagcattcttttgatagagcagttttgaaaaactctttttgtggaatctgcaagtggatatttgtctagctttgaggatttcgttggtaacgggattacatataaaaagcagacagcagcattcccagaatcttgtttgtgatgtttgcattcaagtcacagagttgaacattccctttcatagagcaggtttgaaacactctttttgtagtatctggatgtggacatttggagcgctttcaggcmtatggtgaaaaaggaaatatcttctcctgaaaactagacagaagcattctcagaaacttatttgtgatgtgcgccctcaactaacagtgttgaacctttcttttgatagagcagttttgaaacactctttttgtaatatctgcaagaggatatttgga

SEQ ID NO: 889867 - DNA, 596 bp, Homo sapiens
tcaattgaagtcacagtgttgaacagtccctttcatagagcaggtttgaaacactctttttgtagtatctggatgtggacatttggagcgctttcaggcctatggtttaaaaggaaatatcttcccctgaaaactagacagaagcattctcagaaacttatttgtgatgtgcgccctcaactaacagtgttgaagcattcttttgatagagcagttttgaaaaactctttttgtggaatctgcaagtggatatttgtctagctttgaggatttcgttggtaacgggattacatataaaaagcagacagcagcattcccagaatcttgtttgtgatgtttgcattcaagtcacagagttgaacattccctttcatagagcaggtttgaaacactctttttgtagtatctggatgtggacatttggagcgctttcaggcctawggtgaaaaaggaaatatcttctcctgaaaactagacagaagcattctcagaaacttatttgtgatgtgcgccctcaactaacagtgttgaacctttcttttgatagagcagttttgaaacactctttttgtaatatctgcaagaggatatttgga

SEQ ID NO: 889868 - DNA, 613 bp, Homo sapiens
gcattcaagtcacagagttgaacattccctttcatagagcaggtttgaaacactctttttgtagtatctctatgtggacatttggagcgctttcaggcctatggtgaaaaaggaaatatcttcccctgaaaactagacagaagaattcttagaatcttatttgtgatgtgcgccctcaactaacagtgttgaagctttcttttgatagagcagttttgaaacactctttttgtaaaatctgcaagaggatatttggatagctttgaggatttcgttggaaacgggattgtcttcatataaactctagacagaagmattctcagaagcgtcattgggatgtttcaattgaagtcacagtgttgaacagtccctttcatagagcaggtttgaaacactctttttgtagtatctggatgtggacatttggagcgctttaagcctatggtttaaaaggaaatatcttcccctgaaaactagacagaagcattctcagaaacttatttgtgatgtgcgccctcaactaacagtgccccgcattctttgatagagcagttttgaaacactctttttgtggaatctgcaagtggatatttgtctagcttgaggatttcgt

SEQ ID NO: 889869 - DNA, 613 bp, Homo sapiens
gcattcaagtcacagagttgaacattccctttcatagagcaggtttgaaacactctttttgtagtatctctatgtggacatttggagcgctttcaggcctatggtgaaaaaggaaatatcttcccctgaaaactagacagaagaattcttagaatcttatttgtgatgtgcgccctcaactaacagtgttgaagctttcttttgatagagcagttttgaaacactctttttgtaaaatctgcaagaggatatttggatagctttgaggatttcgttggaaacgggattgtcttcatataaactctagacagaagcattctcagaagcktcattgggatgtttcaattgaagtcacagtgttgaacagtccctttcatagagcaggtttgaaacactctttttgtagtatctggatgtggacatttggagcgctttaagcctatggtttaaaaggaaatatcttcccctgaaaactagacagaagcattctcagaaacttatttgtgatgtgcgccctcaactaacagtgccccgcattctttgatagagcagttttgaaacactctttttgtggaatctgcaagtggatatttgtctagcttgaggatttcgt

SEQ ID NO: 889870 - DNA, 521 bp, Homo sapiens
ttgtgatgtttgcattcaagtcacagagttgaacattccttttcatagagcaggtttgaaacactctttttgtagtgtctggatgtggacatttgcagcgctttcaggctaaggtgaaaaaggaaatatcttcccctgaaaactagacagaagcattctcagaaacttatttgtgatgtgcgccctcaactaacagtgttgaagctttcttttgatagagcagttttgaaacactctttttgtggcatctgcaagtggatatttgtctagctttgagaatttcgttkgaaacgggattacatataaaaagcagacagcagcattcccagaaacttgtttgtgatgtttgcattcaagtcacagagttgaacattccctttcagagagcaggtttgaaacactctttttatagtatctggatgtgaacatttggagcgctttcaggcctatggtgaaaaaggaaatatcttctcctgaaaactagacagaagcattctcagaatcttatttgtgatgtgcgc

SEQ ID NO: 889871 - DNA, 579 bp, Homo sapiens
gcccccactgtagaagattgtgtccttgtcaaaatactcactgcctctttctcctgtgctcatccctttgagagtgttatccttcctgtggccacaagacttgctttggtcaacaagatgtcagttgaaatgacatgagccatttcttcacagatgctctgagagccattgtgtgtctctgccatctttcctttccttctgccactgaatggcatgccccagattagggattctccatcaggcttggttgtaggatgaagagggaatacaggcgcagtggctcacacctgtaatcccaatactttgggaggctgaggcgagaggatcacttgagcccaggagttctagaccagcctaagcaacatagtgaragaccctgtctccacaaaacaatcttaaaatgtagccaggcatggtggtacaggcctgtggtcccaactacttgggaggctgaggtggattgtttgagtatgggagctcaaggctgcagtgagctgtgatcatgtcactatgctccaggctataaaaaagaacaaaccctgtctccaaaaaaaaaaaaaaaaaaaggcagtggagtag

SEQ ID NO: 889872 - DNA, 633 bp, Homo sapiens
gccagagagaaaggtcaggttacctataaagtgaagtccatcatactaacagtggatctctctgcaaaaaccctacaaatcagaagacagtggggaccaatattcaacattcttaaagaattttcttttctttttttttttttttttgacagagtctcactctgtcacccaggctgcagtgcagcggcacartctcagcttactgcaaactccacctcccaggttcaagctattttcctgccttagtcatccgaatagctgggactacaggcatgtgccaccacacccggctaatttttgtatttttagaagagacggagtttcactatgttgaccaggctggtctcgaactcctgaccttgtgattcatctgcctcagcctcccagagtgctgggattacaggcatgagccaccgtacccggctaaagaaaagaattttcaacccagaatttcatatccagccaaactaagcttcataatcaaagaagaaataaaatcctttacagacaagcaaatgcagagggattttgtcaccaccaggccttccttatgagagctcctgaaggaagcgctaaatatggaaaggaaaaactggttctagccactgcaaaaacacaccaaaatataaagac

SEQ ID NO: 889873 - DNA, 633 bp, Homo sapiens
gccagagagaaaggtcaggttacctataaagtgaagtccatcatactaacagtggatctctctgcaaaaaccctacaaatcagaagacagtggggaccaatattcaacattcttaaagaattttcttttctttttttttttttttttgacagagtctcactctgtcacccaggctgcagtgcagcggcacagtctcagcttactgcaaactccacctcccrggttcaagctattttcctgccttagtcatccgaatagctgggactacaggcatgtgccaccacacccggctaatttttgtatttttagaagagacggagtttcactatgttgaccaggctggtctcgaactcctgaccttgtgattcatctgcctcagcctcccagagtgctgggattacaggcatgagccaccgtacccggctaaagaaaagaattttcaacccagaatttcatatccagccaaactaagcttcataatcaaagaagaaataaaatcctttacagacaagcaaatgcagagggattttgtcaccaccaggccttccttatgagagctcctgaaggaagcgctaaatatggaaaggaaaaactggttctagccactgcaaaaacacaccaaaatataaagac

SEQ ID NO: 889874 - DNA, 633 bp, Homo sapiens
gccagagagaaaggtcaggttacctataaagtgaagtccatcatactaacagtggatctctctgcaaaaaccctacaaatcagaagacagtggggaccaatattcaacattcttaaagaattttcttttctttttttttttttttttgacagagtctcactctgtcacccaggctgcagtgcagcggcacagtctcagcttactgcaaactccacctcccaggttcaagctattttcctgccttagtcatccgaatagctgggactacaggcatgtgccaccacacccggctaatttttgtatttttagaagagayggagtttcactatgttgaccaggctggtctcgaactcctgaccttgtgattcatctgcctcagcctcccagagtgctgggattacaggcatgagccaccgtacccggctaaagaaaagaattttcaacccagaatttcatatccagccaaactaagcttcataatcaaagaagaaataaaatcctttacagacaagcaaatgcagagggattttgtcaccaccaggccttccttatgagagctcctgaaggaagcgctaaatatggaaaggaaaaactggttctagccactgcaaaaacacaccaaaatataaagac

SEQ ID NO: 889875 - DNA, 633 bp, Homo sapiens
gccagagagaaaggtcaggttacctataaagtgaagtccatcatactaacagtggatctctctgcaaaaaccctacaaatcagaagacagtggggaccaatattcaacattcttaaagaattttcttttctttttttttttttttttgacagagtctcactctgtcacccaggctgcagtgcagcggcacagtctcagcttactgcaaactccacctcccaggttcaagctattttcctgccttagtcatccgaatagctgggactacaggcatgtgccaccacacccggctaatttttgtatttttagaagagacggagtttcactatgttgaccaggctggtctygaactcctgaccttgtgattcatctgcctcagcctcccagagtgctgggattacaggcatgagccaccgtacccggctaaagaaaagaattttcaacccagaatttcatatccagccaaactaagcttcataatcaaagaagaaataaaatcctttacagacaagcaaatgcagagggattttgtcaccaccaggccttccttatgagagctcctgaaggaagcgctaaatatggaaaggaaaaactggttctagccactgcaaaaacacaccaaaatataaagac

SEQ ID NO: 889876 - DNA, 634 bp, Homo sapiens
tcaccatcactggccatcagagaaatgcaaattaaaaagttacatgaaatggaggccctaggctttggcctctagaacttgctgcttttcctttctcttttctcttcaacctgtcttcacctcatttcctaatcacaatctcaactagtggcytagcctcataattcagtgggagtaggaaacctatctgagggaatttactctttttccccttaccaaatcaaaacagcctgcatcagtggccttttaactttactcctatctctgacatttatttatttcttcacatctgtatcttcaatctctctgtctctaaagggtcatttttactcacagaaaaacctattctaaaatctacttttatatagaaaaataaataaaatcataaaagaaatcaaagacacatcaacaaagcaactctacttgacttcgtatttgcttccatttaccctattcctttgtgtgtcctaaaggaaattatcagccttgtctcgaaattctcacctttcattcatcccttgaaataaattattaggcgtagtcaagttacaaaagtacacttactttttgaaatataatgtgaaagtatacttattttttgaaatacaatgtgacaccaaatgtctttcacatt

SEQ ID NO: 889877 - DNA, 551 bp, Homo sapiens
acctatattataatttttgaattttttagtttgaagacacaaatccactcttccccactctgcaccccccacccccaacacctccattggttctaagtttcaaactccaggctgagatttaaaaaaaggtaactctccctgctctcttgatacttacttgctatttattctctaaggtattcacactcttgactttatattccctccagggtgttaactttggaatcaactagyttcttttcagtaacctattttgaaacatcttcatgatgaacctgtgaaatataatgcctattatctttttccataagctagaactgagataagaagagttcactcttaatcttgagataaggtaaaggatagtaatagttttacatattatgatgcattaatgtaaaaatcattttcagagtttttatgttacttagcctagcaaacctatatcaagcttagttgtctgttaaagcatttagcaaaatagaaaatgtgtgctccaaataattgccagagtgtaatccaaaaatcacatctgattagtatttgcaaaa

SEQ ID NO: 889878 - DNA, 599 bp, Homo sapiens
accacagtgcaatcaaattagaactcaggattaagaaattcactcaaaaccacacaactgcatagaaactgaacaacctgctcctgaattactactcagtaaataatgaaattaaggcagaaataaataagttatttgaaaccaatgagaacaaggcacaacatacagaatctctgggacacagctaaagcagtgttaagggggaaattcattgtactaaatgcccacaagagaaagcaagaaagatctgagattgacaccckaacatcacaattaaaaagaactagagaagcaagaggaaacaaatttaaaatgtagcagaagacaagaaataactaagatcagagcagaattgaaggagacagagacaagaaaaagccttcaaaaatcaatgaatccaggagctggtttttaaaaaagattaacaaaacagaccactagccggactaataaagaaggaaagagagaagaatcaaataaacacaataaaaaatgataaaggggagatcaccactgattccacagaaatacaaactaccatcagagtatactacatacacatctatgcaaataaactagaaaatctagaagaaatggat

SEQ ID NO: 889879 - DNA, 616 bp, Homo sapiens
aacttgcagcccatatcatactgaatggacaaatcaggactcattccctttgaaaacccacacaagataaggatgtcctctcttctaactcctattcaaactagtgttggaagttatggccagagcaatcaggcaagagaaagaagtaaagggtattcaaataggaagagaggaaatcaaattttttgtttgcagattacatgattgtatatttagaaaaccccactgtctcatcccaaaaagtccttaagctgataagcaacttcagcaaagtctcaggataaaaaatcaacgtgcaaaaakcgcaagcattcctatacatcaataatagacaaacagagagccaaatcatgagcaaactcccattcacaattgctacaaagagaaaaaatacctaggaatacaacttacaagtgatgtgaaggacctcttcaaggagaactacacatcactgctcaaggaaataagagaagacacaaacaaatggaaaaacataccatgctcatggatgggaagaatcaatatcatggaaacagtcatactgcacaaagtaatttatagattcagtgatattcccatcaagttaccattgattttcttcatagaattagaaaaa

SEQ ID NO: 889880 - DNA, 564 bp, Homo sapiens
tgtgctcagttctgaaaatgtgacctctagatccagccaaacctgaaaagttaattcgacttgaatctatgactgcagtttcagattcctctggttttcttggtgtctctcacatttcacaagggactgcatttggggtctttccaaggagttccctatgaatctttcaaaagatgcagacttacacctctgggctttatagctttttttttttttttttttttttgctttatcatatcgtgttttacatttttgtagttcttgttcaraagttgtttagtgcctcctgttgacagtggaaacagaactaggctattgtttcaaaacacagacactaaatgaaaggaattattacagattataaatatatatttcctgggattttatttggtggtggtggtattttaaatttggattacatcatgtcgccattcaacctggactatcagattgttgcttaaaataatagctttaaattatgagaacccccaattcaggatttttggtaagcacttcagcttcacttgtagggggctggtaatatgcataccagtgagttagttt

SEQ ID NO: 889881 - DNA, 641 bp, Homo sapiens
agtgatatattgaaggaaaacatcgtcatcttttccatgtataataacatctgcctccttaacaagggttttgtgaggttcaaatgagataaaccatgtgaaagtgttttatagctattataaagtactataatagatgttattattattccaatgtccttatatataactttctttcaattcagttgctttcccagatgcagtaaaagaggctgcaaaccattctcraggacccctcattcattcattcattctcgttgttgacagatctttactgatctcctattagagacagagtaaatgtgctagtcacaagaggggcatatgaagatgtaatatctcagccgggtgcagtgggtcatgcctgtaatcccacactttgggaggctgaggcaggaggattgattgaacctaggagttgaaggctgcagtgagccatgatcgtgccactacactccagcctgagcaacagagtgacagcttatctcaaaaaaaaaaaaacagttataatacctgtaccctcaaaacacttcatattatcctttttttccttctcaccttttaccttaagccatcctgtttatcaactgaacattttatgtgtctgcacatgagacaggatggggtggggaaagaagctg

SEQ ID NO: 889882 - DNA, 563 bp, Homo sapiens
caaagttttaagtccactgttggggagggattggtgcagtagttcccaattatccatggttttctttcaagatttcagttaatcgaggtcaacttgagtacagtacaataaaatattctgagggagagacgacattcacataacatttattacagtatattgttataattcttctatttatttatttagagacagagtctcactctgtcacccaggctggagtgctgtggcatgatctcagctcactgcaacctctacctcccgggttcaagtgattctcctgcctcagcctccctagtagctcagactacaggcrtgagccaccacacctgactaatttttgtagttttggtagagacagggtttcaccatgttggccaagctggtcttgaactcttgacctcaggtgatccgcctacctctgcctcccaaaatgctgggattacaggcatgacctcccaaaatgctgggattacaggcatgagccactgcacccagccaataattgttctattttatttttagctattgttaatctcttactgtgtctgacttagaaatta

SEQ ID NO: 889883 - DNA, 605 bp, Homo sapiens
cctaattctgaaatggtatcgcctgctgtgattgctggcctgtggaggagagctaccactaagcttttcaataactactactccccactattagtacatttctcatttctctaataaaaagtatccatttttgtcagtttgtggatgttctggctttatataatattgtctagttttgcaaacccaactttttggtctgcttctttctttcttccccatctactataacaatttcagaatttataagtcacttaatgtggaccatctcttgctccaagtttcctatgggctatccttgcaaagtattagcactgtctcttgcagtctttgctgtaatatgcattacattccattcccttgatccagcaccytcagtatccagtttaattgtacatgtcttagttcatgacagtgaatttaagctagatcctgcagctccatataaggtataagcccttccccctttcccttagaaagccaacattttcttagctcagttttgttgtgaaatggttatagatctggtggccaggagggcaggtggggacaaatcatgagaacaggtattttgtcttacaagccagaggactttccattgacttcaa

SEQ ID NO: 889884 - DNA, 604 bp, Homo sapiens
tcaacagacatcttgcactatggctagctcttgaagttttccctctgagaaagaatttcaagagacaaagatggatgtttcaaggatttgtatgacatctaaagtcacatagtgtgcttcagtctactggtaaaacaagtgtagccccattcaacgtggaagacactacacaaaggtgtgaatttcagaaagaatagttcactggaggctacctatcacactatatctttagatattcgacamttatcagcacctcggcaaactttacattctttgaaacactctgtccccttactcccataacaagccagttttctttttacttaatattttacattgacatataatatttgtgcatatttatgagatacacagtgaagttgcattatcgacaatgtacagtgatcagatcaagataattagcacatttatcatctcaaacatttagcattgctttgtgttggaaaaattaaatgtcttccttctaactatttgaagctaaaatatattatcgctaactctagtcatcctacagtgctgtggaataccgccagtaagtcatatcataatcacgtatcatattgtttatgatatgtcttcgtgg

SEQ ID NO: 889885 - DNA, 590 bp, Homo sapiens
atagattttataaatttagatagggaagggactttgaaatcataggaaggtcatgttagaagaggaaggtgttttgttgttgttgttgttactgttgttgttttaattaaaacctttggcataagaagtggggaaaacagttttcattttgttacgtaggttaaaacacctgttatatcagaagtttgagatcaagatagcagcagcctgaaaatttagtatatattttaatatggtaatactttatctggtatctgatggacatctgataatttacagctgatcatctgggcagacacaaactaaaaagtagattttttaaaatttttactctctctctctctatatayatatacattgtgtgtgtgtgtgtgaagttttttttaaaccaaccctggtctacagaaattttttacaatctttaaatgtacctaatttggtttctaatttgttacctattccatttaaaggaaggaagctccccactctatattttaatttttatacagtaggctgattaccttccttgtgcagtatatgctatcaaaataatggcttcttagattgccagatttaaaatcctggcattc

SEQ ID NO: 889886 - DNA, 596 bp, Homo sapiens
tccatgctctgccacttactagtttgtgcccattggtgatttgtctcagttcttgtcatccactaaaaaaaaaaaaaaaaaaaaaaaaaatagggtgctatagagagggctgaatgagataatacatgcaatagaaactagcacattgcaggtactcaaaatataatagccaatattgttctttcctgtgtgaattaraaactgatgaaactccaaggcctctaaccaattattgagcccttgaattatgtcctgcctcttgtattcttctagaaatcatctaggggaatgtagtatgggaaagttattaaataagtactagaggcaggccctgtgcctgtgaaagccagcacactgttacatagagaaggacttggaatcagtcctagcaatttcatgagctctagagaccagcattcccattttatgtatttccagtgataactgcaggacacatcattaatacaccggtgaaagaattgtagtcacaaaagatttggtttctgcaaaagattttcaacataagtttcctttacctcatgtataaaagatgtaagccaaatttctcttttaaaaatcctctgcttggtttattt

SEQ ID NO: 889887 - DNA, 596 bp, Homo sapiens
tccatgctctgccacttactagtttgtgcccattggtgatttgtctcagttcttgtcatccactaaaaaaaaaaaaaaaaaaaaaaaaaatagggtgctatagagagggctgaatgagataatacatgcaatagaaactagcacattgcaggtactcaaaatataatagccaatattgttctttcctgtgtgaattagaaactgatgaaactccaaggcctctaaccaattattgagcccttgaattatgtcctgcctcttgtattcttctagaaatcrtctaggggaatgtagtatgggaaagttattaaataagtactagaggcaggccctgtgcctgtgaaagccagcacactgttacatagagaaggacttggaatcagtcctagcaatttcatgagctctagagaccagcattcccattttatgtatttccagtgataactgcaggacacatcattaatacaccggtgaaagaattgtagtcacaaaagatttggtttctgcaaaagattttcaacataagtttcctttacctcatgtataaaagatgtaagccaaatttctcttttaaaaatcctctgcttggtttattt

SEQ ID NO: 889888 - DNA, 649 bp, Homo sapiens
ttgctgggggcctattcagtcgtttagacttctatttttggttcatagggtccaaaccctctccacaggatatgtcaattagccaagaacacaaacacacatgttgagccctggttctctttgtccttgagctaatgtggtggaccccaggagagttatttacctgggggaacatcagaaccaccagcagaattggtggagtcaaaatgctcatgtccaggttttactgctggagaattctgactcagaaggtctggaatttcttagtgctttttcttcatcgtagaaagccagttgtgggtatctcttttctactctggttcagtaatgttccattcttagcttcaaatattctatagcaggagtatttacaccacagaaattggcaaatgctaggaataagggacttgggatttttagagccaattattaagtatttaccaacttktcaccacagcttaggtcttattatgtggcagagaaattaaaataatgaactttaagcagtacttttcaatagattaagtgctcagcaaaagctagatgctgttattatggttactattttgcagatgcataggtaattttgatgtataccaacatttgagaatcattattttggcagaaaaggatctgttagtttttgtca

SEQ ID NO: 889889 - DNA, 589 bp, Homo sapiens
cctacttgggggtgcctcccagttaggcaacttgggggtcaggggcccacttgaggaggcagtctgcccattctcagatctcaagctgcgtgctgggagaaccactactctcttcaaagctgtcagacagggacatttaagtttgcagaggttatttctgtcttttgtttgtctgtgccctgcccccagaggtggagcctacagaggcaggcaggcctccttgagctgtggtggactccacccagttcaagcttcctggccactctgtttagctactgaagcctgggcaatggtgggcgcyactcccccagcttcgctgccaccttgcagtttgacctcagactgctgtgctagcaatgagtgaggctttgtgggcgtaggaccctccgagccaggtgctggatataatctcctggtgtgccatttgtgaagcccattggaaaagcacagtattagggtgggagtgaccctattttccaggtgccatctatcacccctttctttgactaggaaagggaattccctgaccctttgcacttcccaggtaaggcaatgcctcgccctgcttcggctcacgcacggtgcgctg

SEQ ID NO: 889890 - DNA, 533 bp, Homo sapiens
acccagcagtcatgaggttatttccactgccagcatggtgttgaaggaggactgctaaaattgtatctgtaaataagatccagaatattatgacctaatgttcaaaatgtccaacatacatagaaaatcatgtatcatgccaaaaagcagaaaaatctcaaattaaattagagaagmcaatcaacagacaccaatgctgtgatgacacagatgaaggaattatctgactagttttctaaagcagcaattataaacataatccaatgaacagttacaatcatgtttgaagacccaccaaagaacagaaggtgtcaccaaataaaaacataaaggggaaacaaatgaatattttagaactgaaaaatacacaattgaaattaaaaattctaagaacgaatccaagaggagaataaaaaaggcataggaaataaaaaattaacttgaggacaaaagatagaaattacccagtctgaggatgggggcagggcttacgatagctatctagacacatttcatgtccacctcctccactt

SEQ ID NO: 889891 - DNA, 487 bp, Homo sapiens
atgaagtggatagggtagaagtccaaattagtttcagtttgctaaagtcaagatgtcagccaggctggttccttctagaggcttctaggggagaatcttgttcagctttttttttttgaggagtttcgctctcattgcccaggctggagtgcaatggatgttctcatctcagctcaccgcagcctccgcctccagggttcaagcaattctcctgcctcagcctcctgtgtagctgggattacaggcatgagccaccacacccagccaatttgtaattttagtagagatgggrtttctccatgttggtcaggctggtctcgaactcccaacctcaggtgatccgcccaccttggtctcccaaagtgctgggactacaggtgtgagccaccatgctcagcctgaatcttgctcagcttctaaatatggcttgcatttcttaactcttgactcctttcccatgtcaccttaatttctggcttccattatc

SEQ ID NO: 889892 - DNA, 663 bp, Homo sapiens
aaacatgccaacctctaggccagccttgtggcaaactggtagataaaagatgcagaagcaaaagaaactatcatgctagctgacttcaaactatactgcaaggctacagtaaccaaaacagcatggtactggtacaaaaacagatatataaactaatggaacagaacagaggcctcagaagtaacaccacacatctacaaccatctgatctttgacaaacctttcaaaaacaagcaatggggaaagattccctatttaataaatggtgctgtgraaactggctagccatatgcagaaaactgaaactggaccccttccttacacgttatataaaaattaactcaagatggattaaagacttaaacgtaagacctaaaaccacaaaaaccctagaagaaaacctaggcaataccattcagtgataaaatcttaaatttcagggggaaaggcaacaaaaaccagcctcaggtcactggaaatccgcagcaattcagggaagaagataagaacaacagaagaacaaccaccataggaccaggaatacgtactaggtccagtgttgcacctgcaggaggggaaggatcattagtgaaagctgggccactgccacccgggttcacaatgcctgcctgactgaggctaagtataaaggtcagggcatgt

SEQ ID NO: 889893 - DNA, 597 bp, Homo sapiens
aacaaactcttgggacaaaaaagccaaagagatcagggtgctcaaatgtaaaagacagcagagcttggacctgagagaaacagagaggcacagaaagagagagaaagttgctcatgacttccaggctctatgaggaagacagtagactttaaaggtatcagcagtctttcctttgggtccctttgtggttgccagaattgttaaaaataaagtttcaacaaatttaatttaaagatgtaattggcttttattagtgactcatgaaccaggcagcatcccacctacaaatacagggaaactccactgaacataacagaacagtggtttttttgtaaggtagattaagcaggaaaaagaaaagagagtaatmcaagaaccaagaaaccaaccaaaaaaaaaaaaaaaaaaaaaaaaaaaacaaacacacacacacacacaaacaaataaaaaacagaaagcagattggttaatatcaggttactttcatagtaagggataaagtagagaggacttccttatcatgctggctcaggttgattggtccctttctgattgtttgctgtgaatctcccacttttttagaaaaaaaactggcct

SEQ ID NO: 889894 - DNA, 684 bp, Homo sapiens
caactgtactcgaaaggatactaagttttctaccctgtaacaatttagtaaatagtctgagagaacttctttgaaattatgatgattagccaaacttggcgtctttttgtgcatcaaagaggctagtttcagtggaaggagaaattaagtagaactggaaagtctatgtttctttctgagacacacatagataaaatygagcaaagaaaaactaagggaaacctggggctaagatgagcaaattagacagcacaaaaatagaatgtaaaattagactccagtaattggggctgtgtctagttactcagaaggctgatcaaaagctttcttgtttccaccccctcttttcttatttgtggctcttatttttcttttttttttttctacacatatggtttacaaacaaagcacataaatattttctctgacctcttacttttctcttaactcttctagctcttagaacttgctttagataatcattcacctgttaacttttctcttgtattacttactgtttttccataagtatcagtttggtttgtctgatgttttaaccttcttggagacagaatgaagtcttaactttattctttctctccttaagatacaatatgttgatttgctcaacaaaagaatttcataaataaaacttcagaaaaaagcaactacagatgtgaaatc

SEQ ID NO: 889895 - DNA, 669 bp, Homo sapiens
ccagactcactacatgctgtagaatgactcaatgaatgaagtaccgcaaacatctgaattttaaataaggggcctagttccctacttcttctagcttctgtgtgcttgccatttttttccttttaacaataattttttaaaaatagtaaaaaataactgtgtcttttcttgcacctcttggaaatcacacaaaagctattagaagaatgagggataatgcaaatgtgtttgaaactgtgataacatgaaaagacaatctacaagaggaagggctgcctagtgtgtgaggtctaagggagtccgagaagattccaggaaaggacccctgtgacagcaaatcgtaggcgaggccagcagctttccaaagtagacagcgtgacttgaagggtgtgatccatggtcccttgtttggagaaacagaatgatgggtgcatgggctggaggtggaagctcccttccctggatgttgtatggctgaaggtgaagcagggaggrcaaggctgtaaaagaagatatgcaggaactttcagacagcagttactgagaggcgggtggaagagactagctccacaccatcagcccctgtagatcaggaataagtgagccaaaaaaatctaatcatatacaaccctgatcaaagaaagaatttctactagcccagaacatggc

SEQ ID NO: 889896 - DNA, 677 bp, Homo sapiens
aaaactagacagaagcatactcagaaacatccttgtgatgtttgcattcaattcatggagttgaacattccttttcatagggtagttttgaaacacactttttgtagtatctgcaagtggacttttggtacgctttgaggcctatagtgaaaaaggaaatatcttcacataaaaactagacagaagaactctcagaaacttctyggtgatgtgtgtactcaactcacagtgttgtacctttcttttgatagaggagatttgaaacactcttcttgtggaatctgcaagtggacatttggagtgctttgtggccttcgttggaaacgggtatatcttcatataaaaacgagacagaagcattctcagaaacatcttagtgaagtttgcattcacctcacagagttggaaattccctttcatagagcagttttgaaacactctttttgtagtatctggaattggacatttggagcgctttcaggaccatggtgaaaaaggaaatatattcacataaaaactagacagaagtattctcagaaacttctttgtgatgtgtgtacttaaatcacagtgttgaattttcttttgatagagcagttttgaaacactctttttgtagaatctgcaagtggatatttggataggatttaggctttcgttggaaacgggaatatctt

SEQ ID NO: 889897 - DNA, 677 bp, Homo sapiens
aaaactagacagaagcatactcagaaacatccttgtgatgtttgcattcaattcatggagttgaacattccttttcatagggtagttttgaaacacactttttgtagtatctgcaagtggacttttggtacgctttgaggcctatagtgaaaaaggaaatatcttcacataaaaactagacagaagaactctcagaaacttcttggtgatgtgtgtactcaactcacagtgttgtacctttcttttgatagaggagatttgaaacactcttcttgtggaatctgcaagtggacatttggagtgctttgtggccttcgttggaaacgggtatatcttcatataaaaacgagacagaagcattctcagaaacatcttagtgaagtttgcattcacctcacagagttggaaattccctttcatagagcagttttgaaacactctttttgtagtatctggaattggacatttggagcgctttcagraccatggtgaaaaaggaaatatattcacataaaaactagacagaagtattctcagaaacttctttgtgatgtgtgtacttaaatcacagtgttgaattttcttttgatagagcagttttgaaacactctttttgtagaatctgcaagtggatatttggataggatttaggctttcgttggaaacgggaatatctt

SEQ ID NO: 889898 - DNA, 677 bp, Homo sapiens
aaaactagacagaagcatactcagaaacatccttgtgatgtttgcattcaattcatggagttgaacattccttttcatagggtagttttgaaacacactttttgtagtatctgcaagtggacttttggtacgctttgaggcctatagtgaaaaaggaaatatcttcacataaaaactagacagaagaactctcagaaacttcttggtgatgtgtgtactcaactcacagtgttgtacctttcttttgatagaggagatttgaaacactcttcttgtggaatctgcaagtggacatttggagtgctttgtggccttcgttggaaacgggtatatcttcatataaaaacgagacagaagcattctcagaaacatcttagtgaagtttgcattcacctcacagagttggaaattccctttcatagagcagttttgaaacactctttttgtagtatctggaattggacatttggagcgctttcaggaccatggtgaaaaaggaaatatatycacataaaaactagacagaagtattctcagaaacttctttgtgatgtgtgtacttaaatcacagtgttgaattttcttttgatagagcagttttgaaacactctttttgtagaatctgcaagtggatatttggataggatttaggctttcgttggaaacgggaatatctt

SEQ ID NO: 889899 - DNA, 485 bp, Homo sapiens; identical to SEQ ID NO: 876001

SEQ ID NO: 889900 - DNA, 438 bp, Homo sapiens
cctaagacgtcattgtcctggacttgcaagggcctccaactccagttaaggtgataagaaaaaatgaaaatgagcaacctagcaattttcacaggcctcaggaaactggggccacatcgaacccagtcacaggttataccaatttgatttacaacaatgaaagaaccatctgcttatacttgagttacagcacatccctttgtagamatccatacaatagaaagccccagaagttgattcacagtagaacaaagtgtttgtgtcaagcaaaggaaattctgcacttagaaattttatcggcacatttgattaaaagatggtgtaggtaggcataagtaagaaaaccataagcagacatagtcaacatactaggtaagtaaaaccaaatccagaaggttgtatttagtaatattcatttcagatttccttggataattg

SEQ ID NO: 889901 - DNA, 522 bp, Homo sapiens
ctggaatcctatgtgagggccaatcattcagacactcgtgccagtgttctggaattctgcgtgagggacaaacattctgactcctgtagcagtgttctgtagtactgtgtgagggaaaaacattgagaccacagcaggagtgttctggaattccctgtgaggaacagacattcagaccctcttaggagggttctggaatccggtgtgatggacaaaaatctagaccctagcagcagtgttctgggatcctatgtgagggtcaaacattcagacccttgtagsagtgttctggaatcctatgtgagggagaaacactcagaacccagcagcagtgttctgaaaccctatgtgagagacaaacattctgacaacaggaggatagttctggaatcctaggtgagggacaaacactcagaaaacaacaggagtgttttggaatcctaaatgagggacagtcattcagatcgtcatagcagtgttctggaattttgtgtgagggacaaacattcacaccccagcaga

SEQ ID NO: 889902 - DNA, 669 bp, Homo sapiens
tcagaatgcttctgtttagtttttatttgaagatatttccttttccacaatagtcctgaaagcgctccaaacatccacttgcagattgtacaaaaagagtgttccaaaactgctcaatcaaagaaaggttcaactctctgagattaatgcacacataacaaagaagattctcagaatgtttctatctagttttaatgtgwagatatttcctattccacaataggccccacaataggcatcaaagccctccaaatatcctcctgcagattccacaaaaaggatgtttcaaaactgcccaatcaaaagtaagtttcaactgtgtgagatgaatacacatatcacaaagaaggttgtcagaatgctttggtctagtttttatctgaagatatctccttttccaccatagtcctaaaagtgctccaaatgtccacaagcacattgtacaaaaagagcatttccaaactgctcaatgaaaagaaaggctcagctctgtgagatgaatgcacagatcacaaagaaatttgacagaatgcttctgtttagtttttatgtgaagatgttttcttttccaccagaggcctcaaagcgctcccaatgtccacttgcagattttatgaaaggagtgtttcaaagctactccaacaacagaaaggttcaactctgtgagtt

SEQ ID NO: 889903 - DNA, 587 bp, Homo sapiens
acgtttccattctaatggtagagaatacttatacacaagaaaacactggcaatgccttcactatttgtatacttgacatgatgccataaaatttccattgcagaggaaagacttgaggactctaatttaaagtataaaacaagtgctgagcagaagaaataaaaatgaatccatatccagacacattgatgactctgaattttagtgtttacaaagcagttctttaaaattaattttcagtaagargatgtgtatatcaccttcactgttttcctttttgttttgatctattcctcttgcttattctagtttcaaatgatttcttcaaaaaaagtcttaaaagtcttatccatttatgaatcgatttatatctttcattttctagattataatttttacttttctgttattaatttccttccattaggtatgttttttgatcctgtatttacttactgacatgaatgattaactcatttatcttctctggcttagtaaaaaaaaaattgaaaatcttgaaattatatatgtttcttattatctttcttaattatattgtgtgtagagaggtttgttaacttttccaa

SEQ ID NO: 889904 - DNA, 635 bp, Homo sapiens
aataactggacaaaagcattctgagaaacttctttgtgatgtgtgtgttcatctctcagagttaaacatttcttttgattgagcagttttgaaactctctttttgaagaatcttcaagtggacatttggagggcttcactgcctgtggtagaaaaggaagtttcttcacataaaatctagacagcagctatctgagaaacttctttgtgatgcctgcattcatttcacagaattgaacatttcttttgactgagcagtttggaaacaccctttttttagaagctgcaattggacatttgaagagctttgcggcctatggtagaaaaggaaataccttcacataaaatctaggcagaatcagtctgagaaacatctttgttatgtctgcattcatctcagagagttaaacctttcttttgaatgagcwgttttgaaactctctttttgtagaaactgcaagtggatatttgaagtgctttgaggcctatagtggaaaaggaaatatcttcacataaaaactagacagaagaattccgagaaacttcttggtgatgtgtgcattcatctcacagagttgaaactttcttttgattgagcagttaggaaacactctttttccagaatctgcaagggga

SEQ ID NO: 889905 - DNA, 465 bp, Homo sapiens
aatctagacagaagcaatgtgagaaacttccttgggatgtgtgcattcatctcacagggttaactcttacttttgattgagcagttttgaaactctctttttgttgaatgtggaagtggacatttggagcgctttgaggcttatggtggaaaaggaaatatcttcacatagaaactagacagaagcaytcttagaaacttctttgtgatgtgtgcactgatctcacagagttaagcctttgttttgattgagcagttttgaatctttttgtagaatctgcaagttaacatttggagcgctttgaggcctgtggaggaaaaggaaatattttgacatcaaaactacacagaagaattcggagaagcttctttgtgatgcatgcgtttatctcacagagttgaacctttcttttgattgagcagtttggaaacactctttttgtggaatctgcaagtggacatttgg

SEQ ID NO: 889906 - DNA, 601 bp, Homo sapiens
cttgcggggtttcagacttgcatagggcctgtatcctttatgttttggctgatttctccctttcagaatgggagcatctacccaatgcctgtaccctccattgtatctaggaagtaactaacttgtttttgattttgcaggcttatatttggaagggacttaaccttgtctcagatgaatatttggacatggagttttgagttaatgacagaatgaattaagactttgggggactgttgggaaggcatgattgtgtttggaatgtaagaaggacatgagatttgggaggtgtcaggggcagaataaaatagtttggttctgtgtccccacccaaatctcatgtctaattataattcccagtgttggaggargggcctggtgggaagtgactgaatcatgggggttgactttccccttgctgttctcatgatagagttctcacaagatccggttgtttgaaagtgtgtagcacctccccctttgctctctctctttcctgccagccacacaaagatgtgtctgcttcttcaccttccaccacgattgtaagttttctaaagcctccccagccatgtttcctgtacagcctgcagaactgtga

SEQ ID NO: 889907 - DNA, 610 bp, Homo sapiens
tcttgtgctctggacatagccagaagtgctatcattaacaaaataataatgaaaagtagctctctagattccttctatctggtcagggcatctctgaaagaaaggcagcaggcccagttaggggcttatagataaaattcccatctccctgggacaaagcacctgggggaagtggcagctgtgggtgcagcttcagcagactcaaaytttcctgcctgctggctttgaagagagcagcaggtctcccagcacagtgcttgagctctgctaagggacagactgcctcctcaagtgggtctctgaaccctgtgcctcctgactgggaaacatttcccaaaaggggtcgacagacacctcatacaggagagctccagctggcatctggcaggtgcccctctgggacaaagcttccagaggaaggaacaggcagaaatctttgctgttctgcagcctccactggtgataccctggcaaacagggtctggagtggaccctagcaaactgcagcagacctgcagcagaggggcctgactactagaaggaaaactagcaaacagaaaggaatagcatcagcataaacaaaaagaatgttcacacaaaaaccccatct

SEQ ID NO: 889908 - DNA, 610 bp, Homo sapiens
tcttgtgctctggacatagccagaagtgctatcattaacaaaataataatgaaaagtagctctctagattccttctatctggtcagggcatctctgaaagaaaggcagcaggcccagttaggggcttatagataaaattcccatctccctgggacaaagcacctgggggaagtggcagctgtgggtgcagcttcagcagactcaaattttcctgcctgctggctttgaagagagcagcaggtctcccagcacagtgcttgagctctgctaaggracagactgcctcctcaagtgggtctctgaaccctgtgcctcctgactgggaaacatttcccaaaaggggtcgacagacacctcatacaggagagctccagctggcatctggcaggtgcccctctgggacaaagcttccagaggaaggaacaggcagaaatctttgctgttctgcagcctccactggtgataccctggcaaacagggtctggagtggaccctagcaaactgcagcagacctgcagcagaggggcctgactactagaaggaaaactagcaaacagaaaggaatagcatcagcataaacaaaaagaatgttcacacaaaaaccccatct

SEQ ID NO: 889909 - DNA, 571 bp, Homo sapiens
ctggcaagttggataaaaagtcaagacccatcagtgtgctgtgttcaggagacacatctcgcatgcaaagacacacacaggctcaaaataaagggatggaggaatatttagcaagcaaacagaaagcaaaaaaagcaggggttgcaatcccagttgctgataaaacagacattaaccaacaaacataaaaaaaaaaaaaagaagggcattatataatagtaaagggatcaatgcaacaagaagagctaactatcctaaatatatatgcacttaatacaagagcatccagattcacaaagcaagtccttagagacctacaaagagacttagactcccacacaataatagtgggagagtttaacaccccactgtcaatattagatcartgagacagattattaacaaggatattcaggacttgaactcagctctggaccaagtggacctaatagacatctacagaactctccaccccaaatcaacagaatacacattcttctcagcaccacattgcacttattctaaaattgaccacgtaattggaagtaaaacactcctcagcaaatgcaaa

SEQ ID NO: 889910 - DNA, 597 bp, Homo sapiens
agcctatttaactgtgcccaaaattcattgcacaaacatctgtctcctgggaaggtgccgtctgccttagataagaccagtgggtctcaactgcctaataaatggtcttaggtctagacctctcacacaggcctctaccaaaatgtaggggaaactaaacctctcctggggcttctgtgcttttagaaatacaagaaaacctttccacataatcgccttaaaatttyaggattaacagattcagttgggactgtctggttctaggagatctttggtctagtctaaagatttggaataaatgttattttattagcaagtgagggatctctgttttatttttgtttttgatttttgttgtggttgacattattttttaacaatcttcaccattctcattcaatttaaactgaataaacctccatgctttagtgagcttgccaaatttaggatatggtagactgagcaagggtcctatacacttgggcacatctgcattcatgctgcacaaactgaatcccttggaatccaatggcattctaactcttaaacattgctgatggaaaaagaagggcactagggttttaatctggtctgacc

SEQ ID NO: 889911 - DNA, 559 bp, Homo sapiens
atctcattgtggttttggcttgcatttctctgatgattggtgttactgggcttttttttcatatgcttgctggtggcaagtatatcttcttttgagaagtgtctgttcatgtcctttgcccactttttaatggggttgtttgtttttctcttgtaaatttgtttaagctttatatagatgctggatattagaccactgtcagatacatagtttgcagatattttctcccattctgtagcttgtctgtttactctgttgatagtttcttctgctgtgcagaagctcttaagtttaattagatcccacttgtcaatttttgcttttgatgcaattgcttttggtgtctttgtcatgaaatctttgcctattcctacgccakgatggtattgtctgggttgtcttcaggagtttttatagttttgggttttacaattaagtcttatcttgagttgatttttgcataaggtgcaagaaaggggtccagcttcaatcttctgtatatggctagccagttaacccaacaccatttattgaatagggagcctttaccccattgctt

SEQ ID NO: 889912 - DNA, 572 bp, Homo sapiens
tgcagccaacaaacataaaaaatgctcatcatcacaggtcaatagagaaatgcaaatcaaaaccacaatgagataacatctcacaccagttagaatgacaatcattaaaaagtcaggaaacaacagatgctggagaggatgtggaaaaatagaaatgcttttacactgttggtgggagtgtaaattagttcaaccattgtggaagacagtgtggcgattcttcaaggatctaaaactagaaataccatttgacccagtcatcccattactgggtataagaataataratcattctactataaagacacatttacacgtatgtttattgtggcactattcccaatagcaaagacttggaaccaacccaaatgtccatcaataatagactggataaagaaaatgtggcagatatacaccatggaatactatgcagccatcaaaagggatgagttcatgtgctttcagggaaatggatgaagctggaaaccatcattctcagcaaactcacaagaacagaaaaccaaacaccgcatgttctcactcataagtgggagttgaacaatgagaacaca

SEQ ID NO: 889913 - DNA, 598 bp, Homo sapiens
attgcaagattctgctaatttacattgaagagtatatgtgtgaataaacctgaatctgtccatttgaattcacttcccaatgactctggtttcaatgtactatctaaattgactaactgacttctggactcagctaaatgaagatgagaaaaaggaaattccctggtacatgtacaggaaaagatccaaakaatcaaggagatggaaatattgcagtgtatttccacatgtggccagcttacctctctttaactgtgtcccctgagggggcatccaccaagattttcaaagaatcattggcaaaggaaggactgccatctttgaaaagcaccaaagtggctgttctttgtagcaagagatggttgtgaaagacactgcagtcaaaaggagctccctgacttaaatgggaaggatgagagcctgggctggcagaagacaaatagtggtgcatgacttaaccctcagtgccagggagggcttggtacaatcataagcagtggtacccaagtagacttcagaatggtgtgactcatagggattttgctggtggccaagcatccaactaggactcaatttgatctataggacaaacaagatt

SEQ ID NO: 889914 - DNA, 628 bp, Homo sapiens
attcattgtcatgagaacagcacaggaaatactcacctccataattcaatcacctcccaccaagttcctcctgcagcacatgggaaacataggcattacaattcaagatgagatttgggtggggacacagctgaaccatattttcccaccactggctcctcccaaatcttatgtcctcacatttcaaaaccaatcatgccttcccaatagtcccccaaagtcttaactcatttcagcattaactcaaaagtccacagtccaacatctcatctgagacaatgtaggtcccttccacctataagcctgtaaaatcaaaagcaagttagttgcttcctagatacaatgggggtacaggcattgggtaaatacagccattccaaatgaaagaaattgaccaaaacaaatggctacatkccccatgcaagtccaaaatacagcagagcagtcaaatcttgaagctctaaaatgatctcccttgactccatgtttcacatcccagtcactgttatgagaggtgggttcctatggtcttgggcagctctgctcctgtggctttgcagggtacagccttcctcctggctaccttcatgggctggcattgagtgtctatggcttttccaggctcatg

SEQ ID NO: 889915 - DNA, 633 bp, Homo sapiens
ggctctgggacacatatgtaaagagtcatataagacccttttgcataactcccactttttgggtgaaacctctctctagtaacagtgtgaacttctaagacttagagaaggtctggcaaggcagcgaagctgcctgctccaggaagtatgtggggtrggtagatataacaataaaaataatagcaaaatgcaaagatactcacaacttaatgtaaagtaataacaacacaaaagtgtttcttttgacattcctgcaagcatatgaccggggactgtgcacctaagttgccattatggactaatggaggccaaattcctctgggaaggaactgtgggtccttaatggagaaagccctaaaacggtttctggggaatcctcacatttgggtcagggtcctgggcttccctggtcttttccatttggagacctctctgtgcccaccttgactccagactagcacgggccatggttgttggcatgatgcacctgccttttgttcaatgagatggagtagttggactcatcaaacagctcctcagggatctcctcaatagagttctgcaaagagagtgcctggaagcctggccaagaggcatcaatggcatcctggctttccccacaggggaaattcc

SEQ ID NO: 889916 - DNA, 560 bp, Homo sapiens
atagcggaatacttccaaaaactgtccaaatacctaaatatttatatccaaaaggtcaataaatacaaaacaaaatacaaataaaaccacagcaaggccatatcgtggtttatgaaacaggcaaggcagggcttttgcttgacttgctatgatatctaattgctactatttatggatactatggaaataaatactaaatagaatgggagataggttattctcagagttttttttttttttttgcaaagatgactgttattaaaggtagatgactttccagcatgtcgaaaggggcgtggcaggggaggggcgaggagaagggtcggggctgagggaggggccctgcaaaggtctgggcgcgcccagctccccsagagcaagcgttacggcaacactgggcaggctgttagaggctcccgggctctgtcttgtcagagagaaatcaaacttcaggcacaaatagtcgtacaactggcacgtggggagactgtgtcacaattacaagtgagaccacctgccctggccacgctgtctcctcgcacgcagaagtttgggaacag

SEQ ID NO: 889917 - DNA, 560 bp, Homo sapiens
atagcggaatacttccaaaaactgtccaaatacctaaatatttatatccaaaaggtcaataaatacaaaacaaaatacaaataaaaccacagcaaggccatatcgtggtttatgaaacaggcaaggcagggcttttgcttgacttgctatgatatctaattgctactatttatggatactatggaaataaatactaaatagaatgggagataggttattctcagagttttttttttttttttgcaaagatgactgttattaaaggtagatgactttccagcatgtcgaaaggggcgtggcaggggaggggcgaggagaagggtcggggctgagggaggggccctgcaaaggtctgggcgcgcccagctccccgagagcaagcgttacggcaacmctgggcaggctgttagaggctcccgggctctgtcttgtcagagagaaatcaaacttcaggcacaaatagtcgtacaactggcacgtggggagactgtgtcacaattacaagtgagaccacctgccctggccacgctgtctcctcgcacgcagaagtttgggaacag

SEQ ID NO: 889918 - DNA, 624 bp, Homo sapiens
aggggcggacgttcgtggcgaacgggaccgtccttctcgctccgccccgcgggggtcccctcgtctctcctctccccgcccgccggcggtgcgtgtgggaaggcgtggggtgcggaccccggcccgacctcgccgtcccgcccgccgccttctgcktcgcggggcgggccggcggggtcctccgacgcggcagacagccctcgctgtcgcctccagtggttgtcgacttgcgggcggcccccctccgcggcggtgggggtgccgtcccgccggcccgtcgtgctgccctctcgggggggtttgcgcgagcgtcggctccgcctgggcccttgcggtgctcctggagcgctccgggttgtccctcaggtgcccgaggccgaacggtggtgtgtcgttcccgcccccggcgccccctcctccggtcgccgccgcggtgtccgcgcgtgggtcctgagggagctcgtcggtgtggggttcgaggcggtttgagtgagacgagacgagacgcgcccctcccacgcggggaagggcgcccgcctgctctcggtgagcgcacgtcccgtgctcccctctggcgggtgcgcgcgggccgtgtgagcgatcgcggtgggttcgggccggtgt

SEQ ID NO: 889919 - DNA, 555 bp, Homo sapiens
gtgtgcaaaggcaatagcaactatgatatgacttccgtccggtagctattgtaagttaccattgattgtaaaaaatgtttgtgttaaccctgtcttttattttctgtattttgatgctttgatatctggagcctcgctgacccaggggggacttcctctcccaggattaggtaattcctagagatagtaaacaacttatttcattcacttactttgtttcagttacaagctcctttcaatggaagccattctcctgatctgctggtgttgccataactaagtaacaataaaacttatctttcaaaacagtatcttgaatctagagatgataaatgttaaaaaaaaattggtgccttagaataatctacagaactttaaaaggattttaaatttttacatcaattagcaaaacagttstacagttaatatcttcctagtattgttgatatctgatttgagtatcaaggtcaaactgccctcacagaaggaatttgggagtactgtcttccctccgcccccaccccatgtatctgggagagttaataaaagattgga

SEQ ID NO: 889920 - DNA, 535 bp, Homo sapiens
ccaggcacaaagaattaagtggcggctatcttgcagggagaactcgttgttgggtttactttgctccttacagaaaattaagaaagtattgattgcatatggagatcgagatcatcctggcgaacacagtgaaaccttgtctctactaaaaatacaaaaaaattagccgggcatggtggcaggcgcctgtagtcccagctactcaggaggctgaggcaggagaatggcatgaacctggggggcggagcttgcagtgagcgcagattgcgccacagcactccagcctgggcaacagagctagactccatctcaaaaaaaaaaaaaaaaaaaaagmaaaagaaaaaataaagaatgcccttccccacctgcaacccagcaacatcattgctttgagaatgcacaggatgcttgaagagaatctgttgcagttctattgcttcacacatagtgagactgaggcccaaaagctgaataatgttaactgcttggtcacagcaagctgagggcagagctggagtctcccatctcccacttc

SEQ ID NO: 889921 - DNA, 646 bp, Homo sapiens
tcatcttctgttcccacagccctagtctcagaaacccctaatctagctctggccctgcctatgtggcccacttttggctctagtggggtttctaccctctcattaccctctcacatttgtatttttcttctcttttatttcccacagccccaactaaacttcttcccaacaaaaagtagtttctatgtcacaggcagttcccaaaacaccctgtaggtgactccagtatgccaccagtaataagaggcttacttgatcttttgaccaagaagtcttcacctcaggaaatttcaaataaatatcaaggtttacttgcttttttgctttgctgtattttaagatcatggaacaaatctgaattctgagaccagcctcttacaaaagcaaactgtcatggaggggcaaaagaccttgaaaaacctgcaagggtctttagaaaggagaatgaagakgtgacaacttaaaatgatgatattattatttctgctttgagtcagcatactaccagtaagctcttaaagcatgtttattgcctagcggggtaatgctcttataacgtttcaatgtgcagcaccacattgtacccaaaggaataggattagctgtggataaacatgctgaaaattctttatcatttgcagaagaa

SEQ ID NO: 889922 - DNA, 679 bp, Homo sapiens
ttaaaatgctaatcccagaatgctcacagagattgatttgagtaacaataaaactctggtctctcacacatccagctctgcatggattactctttctctattgcaattcccctgtcttaataaattgtctctgtctaggcagcaggcaaggtgaacttgttaggcagttacaccattgttcagtgcaggactcccagtccttakcagcatggacagcagagcatagaaatcaatgcttattacactctctggcctggttctgggaggttgttccttgtggatctgggcagctccagaagacccagacaaacctacatcatccatagctccaagcattcccatgaggcaagttcagcccgagtgcctgcgggaaagtcaataatccttgaacccatctctgggctgtgctaaatggtaaagagacaaatccaggtattttctcaacccctcatctcttgtgataccgagctcagtgaagcccaattgctccattaaaacatcaaacccattttctcccctatgtctttaaaatggcaacttatactttcctcattgaaaagttcacgaatatacctttgttcctgaatggtaaaattaagagttaggtatcttttagtagacaagagtagcacaggaaatttcactgatggatttaacaaatattaattgagcatttaat

SEQ ID NO: 889923 - DNA, 642 bp, Homo sapiens
attataagaacacaggaagaggaaaaaaaattctcaaactactacacaagttttcctttttttttttttttgttttttgaaatggagtctcactgtcaaccaggctggagtgcagtggtgtgatctccactcactgcaacctctgtctcccgggttcaagtgattctcctgcctcagcttcctgagtagctggaagtacaggtgtgcgccaccataccgggctaatttttgtatttttagtagagatggggtttcaccatgttggccaagctcgtctcraactcctgacctcaaatgatctgcccacctcggccactcaaagtgctgggattacagacatgagccaccacacccagcctgagttttcttatagtaattttcttacagaaccagtaagagaaacaactctagaagataaagaaacaagggctttaaagaaaccacttagccaataagcatttactgaattcctaccccatgctaggtgctttagaggatcctagagatgatctactattaatctgaaaagttaaatttagtgaaagaatagagaattaaatacgagaaataacaggagatcatgtgataagcaagatggtagtgaccactcataattaaggaagtttagataaaggggaaatt

SEQ ID NO: 889924 - DNA, 609 bp, Homo sapiens
ccaaagtcatttccacatttttagatatctaatttataagaaaagaggtttaattggctcgtggttctgcaggctgtacaggaagcttggcactggcgtctgcttctggtgaggcctcagaagcttacaattatgatggtaggcaaagagagaacaggcacatcacatgatgagagtgggagcaagagagagaataggggttaagggaagatgccacatgcttttaaaccaccagatctcaaagaaacttattcactatcttgagtacagcaccaagccatgaggaatccactcccatgacccaaacatttccaccacrctcctcttccagcattgaggattacatttcaacatgagatttgggagataaatatccaaatcatatcatcgtctaagtgcttggtgttgtcattttttaaaaaacatcataataagtatgtactggtgtctcatgaagttttaatttgcagctctataatgactaagagtattgcatatcttttgtcttcaatttggtagtgttcagatctcatggacatttttaagtaattagattgatttcttatatttgatttttgagaattctttacacattctacatgcaagtct

SEQ ID NO: 889925 - DNA, 547 bp, Homo sapiens
tttttagtgttaggggaatgcgtacctcacagaatgaatgagaaactgttccctggttctattttttccatacatttctgcaaaatgtatggaaaaactggtattattttcttcacaaatgtttaataaaattcatcagttaaatcatataggcctgatgctttctatttaagaaggttttaaattattgattcaatatcctatattcagattatgtttctcttcagtgagttttggtattttgtatctttcaagaaattgaccatttcatctaagacttaaatttgtggatatagagttgtccataatatttatttattctatgagytttaaaagctcatagaattaatactgattttttttttaatttttgatatgtttcatttgtgtcttctctcttattgctttgctaacctggctagacatttatcaattttattgatctttttttaaaaatcagcttcttaaagaacttttcttccttatggattttctttttcaatttcatttgttaaagctctaatttttattacttctacttttctac

SEQ ID NO: 889926 - DNA, 577 bp, Homo sapiens
accagtgacatttttggaactggggctgcccttaaatctcaggttttattacttaagtaaatcttacaggttacttagcagataaatactattgattggtgactcaacatataataagtatttacaaaaatggattaataaatattaattttcatcatcaatttctctatgtaaactgtttattggtagcaaattaaaaaaattttaaaaagcaaatttaagagaagataatgttttttaatgcaatggattattatgcagataatcaaattctaatacctcyctgtagaagaatgggaatatgcaacatgttttctatgggtaacattttagtatcatatgtatcattttccttaagagtaatataaatagccatatttaattcagtctatacagttttacctttacttttcatacaggtaataccttcatatagtgcaacactataattagtatttaaacataaaaaatctaatatttgcttacagattgaactttaactttttggctggttaaaaggttgggtttccattaactgaaatgagtaggacttcaggtagagcagattagtagaaaa

SEQ ID NO: 889927 - DNA, 618 bp, Homo sapiens
tccacctggatccttcacacaacatgtgggaattctaggagatacaattcaagttgagatttgggtgtggacacaaccaaaccatgtcagaaaaggattccctactcaataaatcatgctgggaaaactggctagccatatgcagaaagccaaaactggatccccttatacaaaaattaaatcaagatggattaaagacttaaatgtaaaactcaaaaccataaaaaccctagaagaaaatcttggcaataccattcaggaaataagcatgggcaaagaatttataatgaaatcaccaaaagcaacagcaacaaaagctaaaattgacaaatgggatctaattaaagagcttctgtagagcaaaagaaactrtcatcgaagtgaacaggcatcctacagaatcggagaaaatttatgcaatttacacacctgacaaaggtctaatatccagaattcacaagaaacttaaacaaatttacaagaaaaaaaaaaacaatcccagcaaaaagtgggcaaaagacatgaacagacacttctcaaaagaagacatgtatgcggccaacaaccatatgaaaaaaagctcaacatcactgatcattagagaaatgcaaatcaaaa

SEQ ID NO: 889928 - DNA, 645 bp, Homo sapiens
agatattagttctttgccatggagtgcaaatatttttcccagtttgcctttcatgttttaagtttgaggatttttatttttgcatatagaaatatttattttttaacggggtcaattgtattaacattttctttagttttatctttcctgytgagcttgaagaaaagactttcttattctagaattagacaactgcaaccttgatttttttctaattacttttgatggtttcactttcaacctttaagttattaatctccatgaaagtgttttggtgaaacgtagggatttacattgaattctttccttccatatggtttgccagtcatcacaacacactctctttttcccctggttgtaacctttgaaggcagggagctggagggtgagaactaacatttactgggggactgtttctaagacatatgaaacttgccctatttattgcacttatccctcctaatgtagccctgcaaggtaaaggatcccagactagcagactgaggcttagagaggtaagaagtatgtccagagtcactgagtaacctgggatccagggatctcaagcccctgctccttccactgattcctcagtcccagcatccgggtacttagggctggcggactgccctgcccagtagtgca

SEQ ID NO: 889929 - DNA, 701 bp, Homo sapiens
agtggtagctacaccttctcaatgaaggaaaaaacatgttgatttagtctggctcaagctacttacctcgtcaaggtccgatacattgagtagagctggtctacatcttctacttgctccctttagtccataattctgtcttacctttggaatgccaacaatcttgtttctccagctctattttcttctccagtttcctaaatgtggatgttttcttgtttgtttgtgtttttaacttaaatttgtcactcctccactcccttaaatctttttctaactttccaatattgttctgcatatgtatgcccatggaagatactctggttctcccatagtttatactggaagaaagttgagccttttgctagatgtagttcttytctgttcttagagcatacagtagatcattgagtttctcttctctttcagcaatttaatttcacatttattccttcggcattgcctgaacttgctcgctgctttcactagaatggtaagtatattgtactatgctacaatatgccttttaataatgttttctcttttttaaaaagggtgacaaaatgaaagaatgctcagatatcagtatctccaatggaaaaaattagagttctttctgttttttcctgaatccttgttatggagttctttctagaattccatgtccaacatctatacatggatcagaaagtagcattaat

SEQ ID NO: 889930 - DNA, 553 bp, Homo sapiens
gcaagaaggtggagaaagtatctttattacttaaaaccccacctacacctccattaataagaacttaccacatgagggagggagcaggaagttttgcttgacagcaagccacctctgtcacatccagcctgcctatgtcttaactccttttttttctcttgtctttatttatctccttctcctactatctgacagttgatcactggaatggttgtaaacatcttcattcatctggttttgatayagaaggaggatgacacttctcaaatgcatcaacaacggagaaagaataattcacaaactacttatcacaaggtaaacccacgatcatttttcttctactgagcaaagaacacctaagagacaggagacctggcttcaaattctggctccatcaataacttacagcatgacttaagcaagacacttcacttctatggaccccaattttcccatcagtaacatggatggagtgtgctacaccaatatttctccaagtgtgttccaaagaacattaggttcatgaggtgctctttgaaaaactcttctatgg

SEQ ID NO: 889931 - DNA, 685 bp, Homo sapiens
aaaactattgccatggcaatgtcaaggtgcttctccctgtttttttttttttttctaggagttttatggcttaagatattacatttaagtctttgatctattttaatttatatatatagtgtaagaaaagggtttgatttttttttttttttgcatctggatatccagtctgcccaacaccatttattgaagaaactttccttacattgtrtgtttttggcgcactagaaaaatattagttgaccatatagattttcttgaataaatatgtcttcatttcctgtatgcccttaggaaatttacagagactttaaataggtgctagtttttaaaaataattttcaccagttaaagctgttttgtatgggagcagctttgagctcctcacactgtcattccagaagttgtatctctccaattatctgtagaagaaatttaactgattagggtaaaataaacaaattaatgtaaatgcaaagagaacaaacctgaagtctaactaatttggtcattaccagtaattattatttacagatagatttatttgtagttcattaactgcaaacttgcttcatttgtgtgctgtaactcattaatcagaaagctgcattgagtgatgggactctaatgtggtttgactttttaaataaatttcaagatttgaatatcaaatttcagtggagca

SEQ ID NO: 889932 - DNA, 599 bp, Homo sapiens
tccatgctctgccacttactagtttgtgcccattggtgatttgtctcagttcttgtcatccactaaaaaaaaaaaaaaaaaaaaaaaaaatagggtgctatagagagggctgaatgagataatacatgcaatagaaactagcacattgcaggtactcaaaatataatagccaatattgttctttcctgtgtgaattaraaactgatgaaactccaaggcctctaaccaattattgagcccttgaattatgtcctgcctcttgtattcttctagaaatcatctaggggaatgtagtatgggaaagttattaaataagtactagaggcaggccctgtgcctgtgaaagccagcacactgttacatagagaaggacttggaatcagtcctagcaatttcatgagctctagagaccagcattcccattttatgtatttccagtgataactgcaggacacatcattaatacaccggtgaaagaattgtagtcacaaaagatttggtttctgcaaaagattttcaacataagtttcctttacctcatgtataaaagatgtaagccaaatttctcttttaaaaatcctctgcttggtttatttccc

SEQ ID NO: 889933 - DNA, 599 bp, Homo sapiens
tccatgctctgccacttactagtttgtgcccattggtgatttgtctcagttcttgtcatccactaaaaaaaaaaaaaaaaaaaaaaaaaatagggtgctatagagagggctgaatgagataatacatgcaatagaaactagcacattgcaggtactcaaaatataatagccaatattgttctttcctgtgtgaattagaaactgatgaaactccaaggcctctaaccaattattgagcccttgaattatgtcctgcctcttgtattcttctagaaatcrtctaggggaatgtagtatgggaaagttattaaataagtactagaggcaggccctgtgcctgtgaaagccagcacactgttacatagagaaggacttggaatcagtcctagcaatttcatgagctctagagaccagcattcccattttatgtatttccagtgataactgcaggacacatcattaatacaccggtgaaagaattgtagtcacaaaagatttggtttctgcaaaagattttcaacataagtttcctttacctcatgtataaaagatgtaagccaaatttctcttttaaaaatcctctgcttggtttatttccc

SEQ ID NO: 889934 - DNA, 697 bp, Homo sapiens
attattactcataacaaatatgtcaaatctggagttttacttttaagacattaaacattttattccatgatacataaatgcataacccctataaagacttaaagaatactataaagtgtgtttcttctcttaaatataccttctgtattgtatgccatttaattattttaataatatcttgaaccatatgacattgccattttttaggtcaaaaactgtcaaacattgcaatatcacgtaattcaatctaatagcgccgtgtctttctctaattttgttccacgcatttacacacacttataggtacatatgctacatgactttcaaaaacatgaatggcastgtaactacttatcttttttgttttagagatagtgttttgctctgttgcctgggctgccctgcagtgtcctgatcctggctcattgcagccttgaaatcctgggttcaagtgatcctcctgcctcagacccctgaggagctaggactacaggaatgcaccaccatatccagctaaattttaattattttgttgaggtggggtctcactatgttacccagattggtctcaaaatcctggtttcaagtgatccttctaccttggcctcccaaagcgctgaaaataactactttctttactaataatgtgctgtggcggtctttccatgtctatcttgcttttttgaaggttggcaaa

SEQ ID NO: 889935 - DNA, 618 bp, Homo sapiens
ttgtatggacccaatgggctcccttcttcaaggattgtgtagctagtgccaccaataaaggccaatcaaccaccagcagtgatcaacacagagcccgcagtatgacaccgtccttggaaagaccaccaagatactttgtggcatattcattattttagatcttttccactctggagagggtaatgatttacctttgaagtgactattcctggtgtggatttatccacagtgccttcaaccatctgagggcttatagaatgtctagtctattggcatcagatcctatacaacactgcctcagaccaacatgcataatttatggcaaaggagatgacaaatggactcaatcataggcttcactgattttatcacgtacaccatcatcytgaaatttctagatctccccactacttcttaatttggatgaagaattaccctataggacaggggtcagcaaactgtgacctgtgccttgaatccagtctgctgcttgttttggtagataaagtttgattggaacacagtcatgcccatttatttatgtattgtatatatttgctttcacagtataatgtcagaattgagaagttatgaaagaaactgcatggactgcaaatt

SEQ ID NO: 889936 - DNA, 575 bp, Homo sapiens
tgagagagggcatccttgccttatgccgattttcaaagggaatgcttccagcttttgcccattcagtatgatattggctgtgggtttgtcataaatagctcttattattttgaggtatattccatcaatacctagtttattgagtgtttatagcatgaaagagtattaaattttatcaaaaactttttctgcatctactgagataatcgtggttttggtcactggttctgtttatgtgatagattacatttattgatttgcgtatgttgtaccagccttatatcccatggatgaagcagacttgatcgtggtggataagctttttaatgtactgctggattcagtttgccagtattttactgaggattttcgcatcaatgttcaycagggatattggcctgaaattttgttgttgttgttgtgtctctgccaggttttggtatcaggatgatgctggcctcataaactgaattagagaggattccctctttttctattgtttggaatagtttcagaagaaatggtaccatctcctctctgtacctctggtaaaattcggctgtgaatccatctgg

SEQ ID NO: 889937 - DNA, 602 bp, Homo sapiens
cttggtgtgtaagaatgctagtgattttcgtacgttggtttttttatcctaaatcttcactgaggttgtttattagctgatggaacttttgggctgagactatggggttatctagatatagaattatgttgactgctaacaatgatagtttgaatttcattctttctatttgaatacsctttatttatttctcttgtctgattaacctagctaggacttccaatactatgttgttaatagaagcggtaagagatggcatccttgtcttgtgctggttttcatggggaatgcttacagcttttgtccatttagtatgatgctggctgtgggtttgtcatagattattcattattttgaggtatgttccttcaatacctagtttgttgagagtttttaacatgaagagattttgaattttattgaaagccttttatgcatctattgagataatcacatggggtttgcttttatttttgtgtatatgattaatcacattcattgatttacatatgttgaaccaactttgcatcccagagatgaagcctacttgattatgatggattatctttttcatatgctgctggatttgatttgcaagtatt

SEQ ID NO: 889938 - DNA, 628 bp, Homo sapiens
actacgaaaagagagtttcaaaactgctctctcaaaagaaaggtttaactctgtgagatgaatgcacacatcacaaagaagcttctttgattgcttctgtctacatattatgtgaaaatatttcctttactaccacaggycccaaagcgctccaaatttccacttgcagattctataaaaagagtgtttccaaactgctcaatcaaaaaaaaaaaaaaaaggttcaactccatgacatgaacccacccatcacgacgaagtttctcacaattcttcagtccagtttttatgtgaagacattcccttttccaccataggcctcaaagcgctccaaatatccatttgcagattctacaaaaaaagagtttcaaaactcctcaatcaaaaaaaaaggtttaactctgtgagaagaatgcacacgtcacaaagaagtttctcagattgcttctgtctagattttatgtgaagatatttccttttctaccataggccacaaagcgctccaaatgtccacttgcagattctacaaaaagagtatttccaaactgctcaatcaaaagaaatgttaaactgtgtgagatgaatgcacacatcacaaagaagtctctcagaattcttctgtctagtt

SEQ ID NO: 889939 - DNA, 545 bp, Homo sapiens
ttctactgtgtctatgtagaaagaagtagacataagagactccattttgttctgtactaagaaaaattcttctgccttgagatgctgttaatctgtaaccctagccccaaccctgtgctcacagaaacatgtgctgtgtcgactcaaggtttaatggatttagggatatgcaggatgtgctttgttaaacaaatgcttgaaggcatcatgcttgttaaaagtcatcaccactccctactctcaaggacccagcgacacaaaacactgctgaaggccacagggacctctgcttargaaagtcaagtattgtccaaggtatctccccatgtgatagtctgaaatatggcctcatgggaggggaaggacctgaccatccaccagtccgacacctgtaaacggtctgtgctgaggaggattagtaaaagaggaaggcctctttgcagttgagataagacaaagccatctgtctcctgctcgtccctgggcaatggaatgtctccttgtaaaacccgattgtatattccacctactgagataggagaaaa

SEQ ID NO: 889940 - DNA, 596 bp, Homo sapiens
aaaagacagcccacttgccaggtgtcagctgattgattttgtgtggattgttttccttggagtgggggtcttgtcttggtgtccattcatggtgttgctgaaagatgttgctggaaaagagggtcctgatacagaccacaaagtaggattcttagattttctgcaggcaaaaatttgaggtgagtcagagagcacagtgaaagaagcaagtttattagaaattactccattacagagttggacatcctcagaaaacaagagcaggaatgcattgtcttttgttagtgtgtctacttataagtaactataaagagaaagtgttatarttaaacttggaaggtgcagatgtagtcactaaagtcggggctattggttttaacaataaccattaacccattgacctaagctagttcattaataatatccttacaaaaaaattctgcactcctaggacatttatacattttttcaggctttgtggaagatgtcttgtatgaccacaaatattctgcaattgtaatttgtggccatttaaaaaatgtgattattttcagaccatgaacattaaccttctagatgccttgtgagtacctagc

SEQ ID NO: 889941 - DNA, 649 bp, Homo sapiens
tcttcatataaaaactacacagaagcattctgagaaacttctttgtgatgtgtgcattcatctcacagagtttaagctttcttttgattgagcagtttggaaacactctttttgtagaatctgcaagtggatattaggagagatttgagtcttattstgcaaaagaaaatatcttcacataaatactacacagaagcattctgcgaaacttctttgttatgtgtgcattcaactcacagaattgaacctatcttttgactcagcagttttgaatctcccttttggtagaatctgcaagtggatatccggagccctatgtgccctagggtggaaaaggatatatcttcacataaaaactacacagaagcattctgggaaacttctttgtgatgagtgcattcgtcacacagaggtgaacctatcttttgattgagcagtttggaatctctctttttgcagaatctgcaaggggagattttgagccctttgaggcctactttggaaaagcaaatatcttcacataaaaactacacagaagaattctgagaaactactatgtgaggtgtgcattcaaatgacagggtcgaggctatcttttcattgagcagtcttgaatctctctttttgcagaatctgcaagtgcatgttt

SEQ ID NO: 889942 - DNA, 523 bp, Homo sapiens
ttgcagattctacgaaaagagtgtttcaaaactgctctatgaaaaggtgtgttcaactttgtgagttgaatgcaaacatcacaaagaagtttctgagaatctttgtgtctggtttttatgtgaagatatttccttttccaccrtaggcctcaaagctctccaaatgtccactggcagattctacaaaaacggtttttcaaaactgctctatcaatagaaagcttcaactctgtgagttgaattcacacatcacaaagaagtttctcagaataattccgtctagtttttatgtgaagatattcctctttccaacgaaggcctcaaagcagtccaaatatccatttgcagatcctacgaaaagagtgtttcaaaactgctctatgaaaaggtatgttcaactctgtgagttgaatgcaaacgtcacaaacaagtttctgagaatgcttctgtctagtttttatgtgaagatatttccttctccaccacaggcctcgaagctctgaaaatttccacatgcagattc

SEQ ID NO: 889943 - DNA, 542 bp, Homo sapiens
tcttgcaacataggccacaaagggctccaaatatccgcttgcatatactagaaaaagagtttttacaaactgctcaataaaaagaaagcttcatatctgtgagatgaatgcacacatcacaaagaagtttctcagaatgcttctgtgtagtttttatgtgaagatatttcctttccatgcaggcccaaagtgctccaaatatccatttgaagattctacaaaaagtgttycaaaactgctcaatcaaaataaatgttgaactctgtgagataaaagcaagcatcacaaagaagtttctaagaatgcttctgtgtagtttttatgtgaagatatttccttttccatcataggcctcaaagcgctgcaaatatccacttgccgattctacaaaaagagtgtttccaaactactcaatcaaaagaaaagttcaactctgtgagatgaatgcacacattgcaaaggtggttcccagaatgcttctgagtagtttttcttggaaaatatttcgttttccaccataggccacaaagggttccaaacat

SEQ ID NO: 889944 - DNA, 542 bp, Homo sapiens
tcttgcaacataggccacaaagggctccaaatatccgcttgcatatactagaaaaagagtttttacaaactgctcaataaaaagaaagcttcatatctgtgagatgaatgcacacatcacaaagaagtttctcagaatgcttctgtgtagtttttatgtgaagatatttcctttccatgcaggcccaaagtgctccaaatatccatttgaagattctacaaaaagtgttccaaaactgctcaatcaaaataaatgttsaactctgtgagataaaagcaagcatcacaaagaagtttctaagaatgcttctgtgtagtttttatgtgaagatatttccttttccatcataggcctcaaagcgctgcaaatatccacttgccgattctacaaaaagagtgtttccaaactactcaatcaaaagaaaagttcaactctgtgagatgaatgcacacattgcaaaggtggttcccagaatgcttctgagtagtttttcttggaaaatatttcgttttccaccataggccacaaagggttccaaacat

SEQ ID NO: 889945 - DNA, 510 bp, Homo sapiens
  misc_feature 143: n = A,T,C or G
tgggtggtaagataagagatcttcacatttccctttgttctttgcactcctgccattgccatgagaagaaggcaccctgtcaggccccgaccccaggaggatcagagacacttggagcagatgcagctcaaccaccacatttngagctggaacctcccaagcaacccatgctcatgagtgagaaatggtggcctatggtcgtaggcctctgrggtgtgggattacttgttacaaagctagagttaattaatagagatttctacctcacatccctacaaatcaaataacaaaggaaataaaatatgaaaagcagatttccaatttttagaagaaaacagaggacatattttatgacactaagcagagagaaaaattttatatgacacaaaacacagacaccgtaaaataaattactgataaattcattcagttgtattaaatgtagaagctttgatctgacaaaagaggcgatgaataaagttaaaagacaaagacagtgcatgatatgat

SEQ ID NO: 889946 - DNA, 660 bp, Homo sapiens
ttaatagagatttctacctcacatccctacaaatcaaataacaaaggaaataaaatatgaaaagcagatttccaatttttagaagaaaacagaggacatattttatgacactaagcagagagaaaaattttatatgacacaaaacacagacaccgtaaaataaattactgataaattcattcagttgtattaaatgtagaagctttgatctgacaaaagaggcgatgaataaagttaaaagacaaagacagtgcatgatatgatttggctgtgtgtccccacctaaatctcatcttgaattgtcttcccataattctcctgtgtcctgggagggacctagtgggagataattggaatcatgggggccgttcccccatactgttctcctggtagtgaataagtctcacgagatctgacggttttatcagggggttccactttygcatcatcctcatttttctctggccactgccatttaagaagtgcctttcacctcccaccatgattctgaggcctcttccgtcatgtggaactgtaagtccaattaaacctctttttcttcccagtctgggttacgcctttatcggcagtgtgaaaatggactaatacagtgcaccaatagggaaaacatatttgtaaggtatttggccaaaaaagcat

SEQ ID NO: 889947 - DNA, 383 bp, Homo sapiens
atttccttttccaccataggcatcaaagcgctccaaatatccaattgcagattctacaaaaatagtgtttcaaaactgctctatcaaagaaaggttcaactctgtgagttgaatgcatacatcacatagaagtttctgagaatgcttctgtctagcttttatgtgaagatatttccttttccaccataggcttcagtgtgttccaaatagccacttgcagattctacagaaagtttgtttcaaaactgctctatcaaaagaaatgttcaactatctgaatkgaatgaactcatcacaaagaagttgctgagaatacttctgtctagtttttatgtgaagatattttcttttccaccataggccacaaagcgctccaaatatcc

SEQ ID NO: 889948 - DNA, 613 bp, Homo sapiens
aatatggaagtaagggacaggaggattggcaccccaagagaaaccaaatcagggagctgggggggaggatggggaagacattgattagtgatatgatacatattcaaaattcaggtaaaaagaaaggtctaagcctgatgcagtggctcatgcctgtaatcccagcatttgggaggctgaggcaggaggattgcctgaggccaggagttcgagaccagcctgggcaacataacaagaccctgtctcaaaaaaatcaaaaaattagccagcatggtggcacgtggctgtagtctcagctgcttgggaggctgaggcaggaggatcagttgagcctaggagttggaractgcagtgaattatgatcatgtgactatattccagcctgggtgacagagcaagaccctatctcagaaaaaaaagagaagaaaaaaaaaaaagagagaaaggtctctgtattatgtggttgattccagggctgcctaagaagtgtaaaattattctgtttacaaattccaactttaaattgtatgtatacatacatagttatatctccaagtgccaatagatatttataacttgagaggcagatggctaggacatcgaatcctgagca

SEQ ID NO: 889949 - DNA, 620 bp, Homo sapiens
atttacaaatgttttgcatttgaaacccagagttgttttaggctcatttgctgacatatgtgaatttgctagaaagggccaggatcaaatgacatccaccatctgtgaagggtattatgtctagagctaagaactggaaacataaaaggggtttgcaaagtgaattgaacctacttaagtcccaaacaaaagcaaatacatattcttgcaaaatatgttcaaaatcattcaattttgaattacatatactcttggatatagaagattaattataatgcatacactaatgtaaactttwaaatcataaagaatattgagaacaaatttaggctttcaggatatgtttctgttagagaaattattagaaattatgaaataaaaaatcccaacataacttttgttctcaaagtaacccccccccatatatagagagagcatgttaagtccaagtctcatatttctatcaaaacctatcttcaaacatatttcctgtcatactccttcttgtaaatataagttatagttcattactttcccaagattaaatattttagaattaaagaacttgtctcctttattttaagaggagttggaaagggtgatggaggatgggagcagag

SEQ ID NO: 889950 - DNA, 630 bp, Homo sapiens
attgagtataataccagctgtgagtctttcatatatggctttaattatgttgaggtatgttccttctatatagttttttgagtttttatataaaggaatattgaattttattaagagcttttcagcatcaatggaaatgtttttttttttttctatgcttgttggctgcatgcataccttaaaataataagagccrtctatgacaaacccatagccaacatcatactgaaagggcaaaggttgaaagcattccccttgaaaactggcacaagacaaggatgccctctctcaccatgccaattcagcatagtattggaagtcctagccagagcaatcaagcaagagaaagaaataaaaggcatccacataggaagagagggagtcaaactattcctgtttgcagatgacatgattctatatctagaaaacgacacagtctcagccccagagctccttaagctgataaacaacttcagctaagtttcaggatacaaaataaatgtacagacatcactagcattcctatacaccaacaacagtcaaggcaagagccaaatcaggaatgcaatcccgttcacaactgccacaaaaagaataaaaatacctaggaatacagctaaccagggaggt

SEQ ID NO: 889951 - DNA, 546 bp, Homo sapiens
attgtgctgaagtgatgtttctgttattatataatggtcatctttgtttcttctttttttaattttattattattttactttaagttttagggtacatgtgcacaacgtgcagttttgttacatatgtatacatgtgctatgttggtgtgctgcacccattaactcatcatttagtattaggtatatctcctaatgctatccctcccccctccccccaccccacaacgggccccggtgtgtgatgttctctttyctgtgtccatgtgtcctcattgttcaatttccacctataagtgagaacatgcggtgtttggttttctgtccttgcgatagtttgctgagaatgatggtttccagtttcatccatgtccctacaaaggacatgaactcatcattttttatggctgcatagtattccatggtgtgtatgtgccacattttcttactccagtctatcattgttggacatttaggttggttccaagtctttgctattgtgaatagtgctgctataaacgtatgtgtgcatgtgtctttatagcagc

SEQ ID NO: 889952 - DNA, 572 bp, Homo sapiens
gcagcacagaaggcactatagaaatacacaggggaggagaggtcggaaggctggcacccaagcacaccagtcttgcccttattgtttgaaaatgaccctgacagcccccagcccagctttgagcttaggcagcatccttcatgatgctggacattaaggctctgtattaaacaaattcttccaatgaccagggctgagcagagctgcagggacttccagcctgttgctgctggaagtggyagtgatcggagaatgaccagaagggtgagtttgaccatcactttcagaagagaagttttccctgaacttgactcttatgcaggtcagtgtgttatgatagtgaaggaaactgaaatatttcaccccaaattacacgtctttgatatacgttgagatggctgttgagaaggcctgcagacagaagtagtcctgcaaagttgtctttgagagtggggtgacccgcatccacagggaatctgcactgatgaagcctggctttccaaggccttcccttgtctggatctaagaaagattaactacgatcggacttcataggtctaaaagaaaccttt

SEQ ID NO: 889953 - DNA, 596 bp, Homo sapiens
ctacagaaaacagaagaacatgttaaactgtaccacagaggtacaatcagcaaaacccagaatggcaaacactacaggcaaacaacctgttttgtttttttttccaacaaataaattacaaaaggaagaaaacaagttggagaagaaacatatacattaaaattacgatgtggggaacttactggatcctgattcaaatgaactatttaaaaaattatgacattctgagaccactataaatttttagatgtcctgcatccttgatgatattaaagaatcattgctaatgttagacataaaatggtattatgagtatatatttttacataccccttatcttttagtgtacrtattgaaatatttacctgtgtaattatattacagctgagatttattagtatgaagtggcagtaagtagatgggggtatagatagagaaagagtgcccaggagctggtaactattaaagccacatgatgaatatgtgggaattcattatacaattttagctgctttggtatgtttgaaattctccataataagtttttatttttcaaaaaagagtgaaataccaaactaatttttaggaactacaga

SEQ ID NO: 889954 - DNA, 596 bp, Homo sapiens
ctacagaaaacagaagaacatgttaaactgtaccacagaggtacaatcagcaaaacccagaatggcaaacactacaggcaaacaacctgttttgtttttttttccaacaaataaattacaaaaggaagaaaacaagttggagaagaaacatatacattaaaattacgatgtggggaacttactggatcctgattcaaatgaactatttaaaaaattatgacattctgagaccactataaatttttagatgtcctgcatccttgatgatattaaagaatcattgctaatgttagacataaaatggtattatgagtatatatttttacataccccttatcttttagtgtacgtattgaaatatttacctgtgtaattatattacagctgagatttattagtatgaagtggcagtaagtagatgggggtatagatagagaaagagtgcccaggagytggtaactattaaagccacatgatgaatatgtgggaattcattatacaattttagctgctttggtatgtttgaaattctccataataagtttttatttttcaaaaaagagtgaaataccaaactaatttttaggaactacaga

SEQ ID NO: 889955 - DNA, 547 bp, Homo sapiens
tgaaaagcaaattcacatacaggttgattttatataaggagaactcacaatcaggtgtgtcagtggggagggattgctgtattcaacttcatgactctgctctgaattaagaaatatagaaaaggcacggatactgttatgcttcataatcctattttcttctttctgggcaaataaaattaggctttgtggctggaaagaaggtatatgcagcttagggaaaattatgaagcagaaggaaatggagcgaacaaaagataaatattcaaaacataaacttgccctggaagtctcaaatgtactaaatactctatgaattgtgtttctttccataaaaaccaggaaatgataatggaaaaatatatgtgcatgtscttcattagcatacctttccagataactacatctaggcttaggcacagattcagagaaggcaaaagaaaatggacccagagagaaaggagggatggcattttggatttattagggaagctggtatatccttggaaactgtgtggaatttatttttaatgaaataacacaattc

SEQ ID NO: 889956 - DNA, 590 bp, Homo sapiens
atattaactttattacttaaaaactggtcttattttttaaatttctctttggccttaataaaatcatagttgtgtaactcaaaccctaaagctaccagattctttcaaaataactgtatttgagttgagccgccagtaaaataaactaaagaatattgaacaggtctcacagctttgtaaaaagtcatgtaaaagcgctaaatactacatcattttgttaatgaatktaaagacctaatgagaaaagaaaatggaacaaatgaatatattgccatttataaatgcaaagtttgtaaatgcaatggagatcagtagagcagagggacgggacctttttaaataactaaaacggctcacaccttagtttttaatctaagaaaatcttttaggtagaaaagccttaccatccacatttacatgaagcctttgcttgaaaaatagaatctattagtaaaaatgctaacattaaaatctgcccttttcaattttttttgaatcattaggaaatactaaaggaaaattgtcctgcatgaaagtaaagtgcacattaactcaataattcattttataattaacttattgaaggagtt

SEQ ID NO: 889957 - DNA, 622 bp, Homo sapiens
ccagctttgttctgaaaataataagagctattaatgacaaacccacacccaatatcatactgaatgggcaaaaactggaagcattccctttgaaaagtggcacaagacaagtagttgccctctctcaccactcctattcaacatagtactggaagttctggccagaccaatcaggctagagaagaaataaaggatatccaaatagaaagagaggaagtcaaattgtctttgtttgcagatgacatgattgtatatttagaaaactccatcgtcttagcccaaaatctccttaagctgataagcaactttagcaaagtctcaggatacaaaatcaatgtgcaaaaatcacaagcattcctatacaccaataatagataaagasagagctaaatcatgagtgaactcccattcacaattactacaaaaagaataaaatatctaggaatacaacttacaggggatgtgaaggacctcttcaaggagaactataaaccactgcttaaggaaataagagaggacacaaacaaatggaaaaacattccatgctcatggataggaagaatcaatatcgtgaaaatggccatactgcccaaagtaatttatacattcaatgctatccccc

SEQ ID NO: 889958 - DNA, 622 bp, Homo sapiens
atatccttgttaaatttctgtctgattaatctgtccaatattgagagtggggtgtaaaagtctcccactattattgtgtgggagtctaagtctctttgtagatctctaagaacttgttttatgaatctgtgtgctcctgtattgggtgcatatgtatttgggatagttggctcttcttgcattgatcactttaccattacgtaatgtctttctttgtcttttttggtctttgttggtttaaagtctgtttaatcagagactargattgcaacacttgcttttttttttctttccatttgcttggtaaatattcctttatccctttattttgagcctatgtgtgtcttggcacttgagatgggtctcctgcatccagcacattgatggagccaagatggctgaataggaacagctccagtctacagctcccagcgagaccaatgcagaaggtgggtgatttctgcatttccaactgaagtacccagttcatctaattgggactggttaggcagtgggtgcagcccatggagggtgagcagaagtagggtgggcgtttcacctgggaaatgcaaggagccggggacctccctccccaagccaagggaagctgtgagggactgtg

SEQ ID NO: 889959 - DNA, 635 bp, Homo sapiens
agtataggtgtccatttgtagataaatggataaagaaaatgtgaaagtgattatgtatacacagacacacatacatacacacccacatgtgtatatgtgtgtgaaaatatatgtatgcatgttgtgtgtaaacataatggaatattatttaaacttaataaagaagtatatcctgtcacttgtaacaacatggatgcatgttctaagccatgcatagaaagacaaatattgcatgatttcacttatatttgggatctaaaaacgttgaacacatagaagctgagagtagaatagtagtttccaggggtttrgggtgggaaatggggagatgttagtcaaagggtaaaaagctttggttatatgggatgaataagttctggagatttaatgtacagcatgtgactatagttaacaatattgtaccatatacttgaaatttactcagagagtacatcataaaggttctcacgaatcacaaaaatagtaactatttgaagtgatagatatgttaattagcttgattatggtaatcattttataattttacatatataaaaacatcatgttgtacaacttaaatttataaaattgtatttgtcagtgacacctcaataaatctggaaaaaatatggttc

SEQ ID NO: 889960 - DNA, 635 bp, Homo sapiens
agtataggtgtccatttgtagataaatggataaagaaaatgtgaaagtgattatgtatacacagacacacatacatacacacccacatgtgtatatgtgtgtgaaaatatatgtatgcatgttgtgtgtaaacataatggaatattatttaaacttaataaagaagtatatcctgtcacttgtaacaacatggatgcatgttctaagccatgcatagaaagacaaatattgcatgatttcacttatatttgggatctaaaaacgttgaacacatagaagctgagagtagaatagtagtttccaggggtttagggtgggaaatggggagatgttagtcaaagggtaaaaagctttggttataygggatgaataagttctggagatttaatgtacagcatgtgactatagttaacaatattgtaccatatacttgaaatttactcagagagtacatcataaaggttctcacgaatcacaaaaatagtaactatttgaagtgatagatatgttaattagcttgattatggtaatcattttataattttacatatataaaaacatcatgttgtacaacttaaatttataaaattgtatttgtcagtgacacctcaataaatctggaaaaaatatggttc

SEQ ID NO: 889961 - DNA, 667 bp, Homo sapiens
ctctcttccttcacctccgaaaggtaagctatccggggtcgtttgggtggcggactctcctcggctgcagaggcggctgggagaggagagccaaggctgacatctgctaccagatgccatggggaggcctggcttgtccccactctcaccctctgcccactccccttaccctcaagttgctgctgctcatagagggcctgctcgctctcctccgtggcctccagctcgccgtgggcactgcgcttgtgcatggccaaggtggaggtctgccggtaggtcttgccgcaggtgctgcaggtgtagggcttgcagtgtgtgtgcaccacgtggtgcttatacaagctcgagtactcggtgaagcgtttcccgcagcctggcaccgtgcaaacgtatggcttctcccctggggacamtgggctgtgaggggggtgggaactggggctggcaagggggaaactaaggggacaggggtgagggacagggttggtgaagggagagccagagggagggagagggactgagacctgagactctgaatggacagggttggggaagatggccagtggaacacagagaggacacaggtgttgaaccactgaatccagagacaaggcggaaaggaaacgggggacagggcaaggctggggctagtgaaggggctggtagg

SEQ ID NO: 889962 - DNA, 643 bp, Homo sapiens
ttacctaggagttgcagtcattgtggcttagcttgcccttcaagtttacttagagacccagagctctttaccccaaggtggtgaggcttgctggaactcaatctccaaccactaggatgggcaagcttgccagcactcaagctcccctctgactggggctggtttaaatgctccctctgtgtgggggcatcagctgagtttgttcgggttttgctttctgctgtgatagggcagcactgagtttaatgcaatgtatgccaattcttgtgctttcctttttctaagcacaaagattttctcttcacaccacatagctagtaccargagatggggaagggatgatgtcagcaattcaagactgtctttcctattctcttcagatcctttttcagcaatacgaagttaaatcaaggtactatgagtgcttacctgatttttggttcttatgaaaatgctttttttttgtgggggggtggtgcgcggggttggggtagggttcgatagtaattaaattggtgtccttgccatcagggatgatcagtggaggcttctatttgaccatcttgctccacccctctactggttgcactttaattgtggaatctgtataacttcttctatgaatctacatgagtcttttaat

SEQ ID NO: 889963 - DNA, 571 bp, Homo sapiens
acccaaaacactgagaacaatggaggattcccaaagatgtggcaaaaggaaagacttcacatcacattaccaatcacaaccacagcaaaattccatccagacacaacagctgtccccagtctggtttcttctcctccgcttttccctgattcctgtccagcatcactgattgtctccttcccagctctgcagatcccctaggtatttcctggcctgtgcattgtcttaggaacttcygttgcttcctcccttcatcattcagagctgcccaagcttctggctctaatttacatatcccatccagcagcaaagaaaaggtcttcagctacaagaaactctattcaaaggaagtaatttaaaatagcatgtttagttacatcatcgtcatcaatcattacatttagttcaaatctcactttgctaatcattcaacctcatagtgattcattctctgtcctttcctcagaattacttattagcaaaactttgctttccaaatcttattccaggcactgttcaattccggcctcttaaggaattcccatggtgcctgcctttcaccattaatcct

SEQ ID NO: 889964 - DNA, 626 bp, Homo sapiens
gccaggtaaaggattcttggttgacagcatttttccttctgcactctatcatcccactctcttatggcctgcaaggtttctgctaagaaatatttttttcattaattaattgatttgttaatatagccattcatcaaattattaacaagaaactcctatgaactgagattacagtgcctaacatgtagtagatgcttaatcaatggtggatattattattaataaatcttttgattgctgtattgagactccctcatttgtaaaatgtttcttggccgggcatggtggcttatgcctgtaatcccagcactttgggagtctgaggcaggcagatcacaaggtcaggagatcgagaccatcttggctaacacggtaaaaccctgtctctactaaaaatacaaaaaattagccgggcatggtggtgggtgcctgtagtctcagctactcgggaggctgaggcaggagaatggcgtgaayctgggaggtggagcttgcagtaagctgagatagcgccactgcactccgtcctgggcaacagtgagacgtgagactctgtctcaaaaaaaaaaaaaaaaaaaaaaaaaagtttcttagttctcgctgctcccagaattttctttttttgc

SEQ ID NO: 889965 - DNA, 666 bp, Homo sapiens
tgaggcttagcaaagacaaatcttgtttcagttaatacaaagccaagtgggaattcaaccttgaaacatgctgtgttttgtcaactgttctacagagtcagtagggagcaaataaattacagaaagagcacagaaagggaagaaagatgcagaagaatcttcctggcctgctgacaaacctaaatctgaccctgacccctggcagatcatctgggtgaagatacagtatctccgtctgtttccaacccaagtaggacagtgcagtgatcctgtcatttacataatcttctctgtccccawagcaacccctctgcctgtggaattcatttacagcctgctctctatgcaataaagtttcaggaacttacagacttcaatagctgtatttcagtttagacaagtaaggcgtgtgaaaggaagaggagctggaaggaaggatagaaaagcaaacctttgtgaatcatttataataagacctgagagcccttgtttgctttcacagttgagtggtcctttctggaataccaaggacactgcgatggagcatctccttggtggaaggggaggtatctcccacatcagggagtgtgctcctccttcttcctccccacctcacctgggctaggaatgggagagaagcgagtcagcctccatgcagtttcaagc

SEQ ID NO: 889966 - DNA, 584 bp, Homo sapiens
tccagacccacgaatggtagatccacaaacagcttgtaccatgtgcctggaaaaccacaggcactcaatgccaacccgttaaggagttgcccaaggccatgggagcccacctcttgcatcagcatgccccagatgtaagacatggagtsaaaggagatcattttgtagctttaagatttaatgactcccccactggatttcagacttgcatggggcctgtagccccttggtttgggccaattccttccatttggaatgagtgtatttacccaatgcctgtacccccattctatctagaaaataactaccttgcttttgattttactggctcaaaagtggaaggaacttgccttgtctcagatgagactttggactgtggacttttgagttaatgttgaaatgagttaagactttggaggactgttgggaaggcatgactggttttgaaatgtgaaaagacatgtgatttgggaggagccatcggtggaagaatatggtttggctgtgtccccacccaaaactcaccttgaattataatacttgttaataataatattgtcaataatatacttgtcaatgataac

SEQ ID NO: 889967 - DNA, 624 bp, Homo sapiens
tcaaagttccagaaatctctcaggcaggagcaaaatgccaccagtctctttgctaaaacataacaaaggtcacctttgctccagttcccaacaagttcctcatctccatctgagaccacctcagcctggatttcactgtccatatcattatcagtatttttgtcaaagccattcaacaagtctccaggaagttccaaaytgtcccgcatttttctgtcttcgtctgagccctcccaactgttccaacttctgcctgttacccagttccaaagtcacttacacattttcgagtatcttttcagcaacgccccactctgctggttccaatttactgtattagtctgttttcatgttgctgataaaaatataccctagactgggaagaaaaagaggtttaattggacttacagttccacatggctggggaggccacagaatcatgatgagaggtgaaaggcacttcttatgtggcggcggcaagagaaaatgaggaagatgcaaatgtagaaacccttcataaaaccatcagctcttgtgagacttgttcactaccagaagaacggtatgggggaaaccacccccatgatggaatatctcccactgggtccctcccacaacactgga

SEQ ID NO: 889968 - DNA, 624 bp, Homo sapiens
tcaaagttccagaaatctctcaggcaggagcaaaatgccaccagtctctttgctaaaacataacaaaggtcacctttgctccagttcccaacaagttcctcatctccatctgagaccacctcagcctggatttcactgtccatatcattatcagtatttttgtcaaagccattcaacaagtctccaggaagttccaaattgtcccgcatttttctgtcttcgtctgagccctcccaactgttccaacttctgcctgttacccagttccaaagtcacttacacattttcgagtatcttttcagcaacgccccactctgctggttccaatttactgtattagtctgttttcatgytgctgataaaaatataccctagactgggaagaaaaagaggtttaattggacttacagttccacatggctggggaggccacagaatcatgatgagaggtgaaaggcacttcttatgtggcggcggcaagagaaaatgaggaagatgcaaatgtagaaacccttcataaaaccatcagctcttgtgagacttgttcactaccagaagaacggtatgggggaaaccacccccatgatggaatatctcccactgggtccctcccacaacactgga

SEQ ID NO: 889969 - DNA, 624 bp, Homo sapiens
tgatttaagagatataatctacagtaacacaaaggttgaaaggagataaatggcattttaccattggaaggattttacattatacacaaagcgatagattagttcaagtaaattttattaaattagcgatgcatatttataaaccctatagtaatactaaaatataatgtaaagakttatagttatacaaacacgatagaggtgtaaattaaaaaatcctaaggccccaccaacgatctgaatggacttccttctcggccagggcactcttttttttgagacagagtcttgctttccccaccctggctggagtccagtggcacaatctcggctcactgcaacctccacctcctgggttcaagtgattatcctgcctcagtttcccaagtagctggaactacaggcacctgccaccattcccagctattttttgtatttttagtagagatggggtttcaccatgttggccaggctggtctcgaactcctgacctcaggtgatctgcccgcctcggccccccaaagtgctgggattacaggcatgagccactgtgctctcagccagggcattcttaaaatttaacctgaaaggctgattcagggaagtgggggtcagacagccctc

SEQ ID NO: 889970 - DNA, 624 bp, Homo sapiens
tgatttaagagatataatctacagtaacacaaaggttgaaaggagataaatggcattttaccattggaaggattttacattatacacaaagcgatagattagttcaagtaaattttattaaattagcgatgcatatttataaaccctatagtaatactaaaatataatgtaaagatttayagttatacaaacacgatagaggtgtaaattaaaaaatcctaaggccccaccaacgatctgaatggacttccttctcggccagggcactcttttttttgagacagagtcttgctttccccaccctggctggagtccagtggcacaatctcggctcactgcaacctccacctcctgggttcaagtgattatcctgcctcagtttcccaagtagctggaactacaggcacctgccaccattcccagctattttttgtatttttagtagagatggggtttcaccatgttggccaggctggtctcgaactcctgacctcaggtgatctgcccgcctcggccccccaaagtgctgggattacaggcatgagccactgtgctctcagccagggcattcttaaaatttaacctgaaaggctgattcagggaagtgggggtcagacagccctc

SEQ ID NO: 889971 - DNA, 624 bp, Homo sapiens
tgatttaagagatataatctacagtaacacaaaggttgaaaggagataaatggcattttaccattggaaggattttacattatacacaaagcgatagattagttcaagtaaattttattaaattagcgatgcatatttataaaccctatagtaatactaaaatataatgtaaagatttatagttatacaaacacgatagaggtgtaaattaaaaaatcctaaggccccaccaacgatctgaatggacttccttctcggccagggcactcttttttttgagacagagtcttgctttccccaccctggctggagtccagtggcacaatctcggctcactgcaacctccacctcctgggttcaagtgattatcctgcctcagtttcccaagtagctggaactacaggcacctgccaccattccyagctattttttgtatttttagtagagatggggtttcaccatgttggccaggctggtctcgaactcctgacctcaggtgatctgcccgcctcggccccccaaagtgctgggattacaggcatgagccactgtgctctcagccagggcattcttaaaatttaacctgaaaggctgattcagggaagtgggggtcagacagccctc

SEQ ID NO: 889972 - DNA, 624 bp, Homo sapiens
tgatttaagagatataatctacagtaacacaaaggttgaaaggagataaatggcattttaccattggaaggattttacattatacacaaagcgatagattagttcaagtaaattttattaaattagcgatgcatatttataaaccctatagtaatactaaaatataatgtaaagatttatagttatacaaacacgatagaggtgtaaattaaaaaatcctaaggccccaccaacgatctgaatggacttccttctcggccagggcactcttttttttgagacagagtcttgctttccccaccctggctggagtccagtggcacaatctcggctcactgcaacctccacctcctgggttcaagtgattatcctgcctcagtttcccaagtagctggaactacaggcacctgccaccattcccrgctattttttgtatttttagtagagatggggtttcaccatgttggccaggctggtctcgaactcctgacctcaggtgatctgcccgcctcggccccccaaagtgctgggattacaggcatgagccactgtgctctcagccagggcattcttaaaatttaacctgaaaggctgattcagggaagtgggggtcagacagccctc

SEQ ID NO: 889973 - DNA, 548 bp, Homo sapiens
tttgactacccacagcaagaagggaaaaaaatgctttctccatggtttgtgttttgtttgtttttgactactcacaacaagaagggaaaaagtgcttaccttacaaactttaatgggaaatacttccaccattaagagagatatttgtcacttcatgattcatgaaatagcaagtaaagggtgctcactgagaatctttcacagcatggaatcaatctccaaatctttctagattaatcctgtgctccagtgtatgggatccagcatctgagacttactttccacttccagatacattctccaaagtctctaccttgagcttctgttctgtttcaggaatgcttttccctttgacgtttytatgttaagatactaccttccttctcacaaaaatcccagtatggtctttgcaatgaaattactcctcgttactccagccagaatttgtcccttttggatacatatgctttccctatcctataagctccaagagggcagagacagtatatgttttttttttttttttgaccactgtattcccagtacac

SEQ ID NO: 889974 - DNA, 604 bp, Homo sapiens
ttccccatgctctgtgtccacaccaagctgaagcacaaagcataggctccttctgctgccttcaaggcatgttatccaagagaataccctgataaggaaaataccctaaaaagctttatcctcttattaggttttttgtttgtttgtttctgctgtctgcagcattcaaggggccccaaaatacatccacgcctcactcctttctgcctcaaaccctcactcgtccatttctactggtctctgaaccagtagaatgtttgcaaaktaaacaaagcatttcaccgggtgtgcaagaggaccccctagtggtaaagaggatcacagcctactttccatttctctccttcccatcatacctgggagtctccacctttctgagtctcattctgtgcacatttaaattgcagacagtcctcaaatatctgtggagttaatgagaaagcgtaaagtgaatttgaaaactgcaatttttaagtatgcatataagagaacttgtagaaaaagcacttttaagaagcaggtcaactgggaaattgccttgttactataaggtgcactaaatcatcactggctaaatagtgcactagatagaaaaatgtagatt

SEQ ID NO: 889975 - DNA, 657 bp, Homo sapiens
actgctcttggactcacaaaacttcctgctcttcaactttgtgagattttgaaacacagttttctctccttctcactgcagtatgcttagccagagtcctcagaaggagcatagattttgtgtgtgtattagatatgcttccaaatgtatagccactgtgatcgagtgtcactgccactggttcagagttttctgtttcagggaaagccagtaaaaacctgacttttggaaatttccgtttrttgaaaaaggcagacagcaccacttttgatagtgtgcttgttaaaaggctttaagaagaagatatttgactggctagcagacatttcacataagagatggtgtgtcaccagataaagagtagaggggactggggagaatgggataccatgcagttataacccactttccagagaacagaattctggtccctcgccttctaaaacactggcaaaataaggaagtaagaaatgtgttctttgcagaactaataactcagaaagcatacaaacaagggcctgttaggaatgcactcgcaaactatgctaattctggtttaactcatgattctgacacattgtcctggccccagagaaacttgggtagcaaatttgaaggagaagaagaaatattgaaactggggattctgaaggcaac

SEQ ID NO: 889976 - DNA, 639 bp, Homo sapiens
tcaacatttgaggcctagaaaaagtactgtaacttttccttaaagagacagaccagtgagaacagtcaataaggacaaaaacacatttgacatttcaagagagtggaggcttactatttttgtggcttctggcaaagaccccaaaatcagacaaagaaactgttagaggggagtcaatcactatcttctacatgccagtgctcaaaaagtgttgttgaatttgttatttgaactcaagtgggaagttagaagttcatatttctggcatattttaaaagaagctgagaatcaaaattagtaaatatctagttgaatatctgtgaaatgtaagaaatgcyagttagatgcctgcatttcgacacttacatactaaatatatttaatgtggactgttattcttgaatagatgatataagaggcttttttcctaaaaggcaggtgatctggggcccatgaagatattgagtagctgtgggtattttgtgtgttgatggacttgggaactctgtgtatttgaccattaacttgtactctgatgccccaaattattgctgtgttatgttatctggtctttagggagaacattagctgtgaggttccaaaaactaagggctccctatctacctgagtcagtttctg

SEQ ID NO: 889977 - DNA, 559 bp, Homo sapiens
agatgtaattacattaaagatcttgagataagatcatctggggatatttggctgagccctaaacccaatgataaatatctttgtaagagacagaagaggagaagacagagatgcaggagagacagccacgtgaagtttgaggcagcagtggctgaagggatgccaaggaacacctggggccaccaggagctggaggaggtcggagaccctcccctagagccygcagagggagcgtggccctgccaacaccttgatttcagacttccggcttccagagctaggaaaggatccatttttgttactttttttttttttaaacagagttttgcttttgttgcccaggctggagtgcagtggcatgatcttggctcactgcaacctctgcctcccaggttcaagtgattctcctgcctcagcctcccaagaagctgagatgacaggtgtgtgccaccacacccagctaatttttgtatctttggtagagacgggatttcaccatattggtcaggctggtgtcgaactcctgaccttgtgatccgcccgcctcagcctcccacag

SEQ ID NO: 889978 - DNA, 767 bp, Homo sapiens
ggtgtctgttgggccttttggacagaatatgctttgagaggatttgttggggctattccaaaaggcggagtcctctgtggaaaaccagatctgtttacaaggagtatgacaattaacatttgcagagagagttggtccggaacccatcagaatggaccactctcgctcactgcttccaagtctcaggttaccatgtggtagtggccagtctgtctctgtgtctctgtcatcagtaagagtttccctcaccattccacacaagccacatgagcctaaaaaatgtagggtaacaaagtgggatgacagtaaacctgagtggggtcacagagggatggagacaagagccaatccaaggagtgactttgggttgttcatatcaatgcttagtatataagtcttattacgcaatatctcttcagagtcccttcaccaaagaagtgcattctataagcattgtaaataaatgcaaaacagcttatttgcaaatctgagtgcagcctgttttctactgtatcatataggcttacctaatttttcccttttttccacttcccatttcatttgttattttatagagggtgaattggggtttgtttttactctttctttcgtcctttattattwtttttttttttcagagatgaggtctcactatgttgcccaggctagagtgcactgattatacacaggtgcaatcatagctcactgcaaacttctgtcctcaagcgatcctcccaccttaacctctaggatagttaggactgcag

SEQ ID NO: 889979 - DNA, 632 bp, Homo sapiens
tgaagataagatggttgtaggtgtgtggtgttatttctgggctctgtattctgttccattagtccaggtaactgtttttgtacagtaccatgctgttttggttactgtagccttgtagtagagtttgaagtcgggtacagtgattcctccagctttgttctttatgcttaggatttccttggctacytgagccatttttttgatccatatgaattttaaaatagtttttctttgttctgtgaagaatatcattggtagtttggtagcaatggcattgaatctataaattgcttttggcaatatggccattttaacaatattgattcttcctgcccatgatcatggaatgtttttccatttgggtcatctctgatttctttgaacaatgttttgtaattctcattgaaaagatctttcacctccctggattagttgtattcctaagtattttattctttttgtggctattgtgagtgggattgcatttgcttttttttttttttccttttttttttttttcttttttgagacatggtttcactctgtcacccaggctgcagtgcagtggtgtgatcatggtttactgcagcctcaacctcctgggctcaagcaattctcccatttcagcctct

SEQ ID NO: 889980 - DNA, 632 bp, Homo sapiens
tgaagataagatggttgtaggtgtgtggtgttatttctgggctctgtattctgttccattagtccaggtaactgtttttgtacagtaccatgctgttttggttactgtagccttgtagtagagtttgaagtcgggtacagtgattcctccagctttgttctttatgcttaggatttccttggctacttgagccatttttttgatccatatgaattttaaaatagtttttctttgttctgtgaagaatatcattggtagtttggtagcaatggcattgaatctataaattgcttttggcaatatggccattttaacaatattgattcttcctgcccatgatcatggaatgtttttccatttgggtcatctctgatttctttgaacaatgttttgtaattctcattgaaaagatctttcacctccctggattagttgtattcctargtattttattctttttgtggctattgtgagtgggattgcatttgcttttttttttttttccttttttttttttttcttttttgagacatggtttcactctgtcacccaggctgcagtgcagtggtgtgatcatggtttactgcagcctcaacctcctgggctcaagcaattctcccatttcagcctct

SEQ ID NO: 889981 - DNA, 603 bp, Homo sapiens
agaaattcttccacaagttcaaaacgttttcaaaagtgaaaaagcttacaccaagtttgtcaagtttgcaaatacgtttgaaaaggttatggtaacattgtccaagatacaatattcttctgtgagttcacgccacttgaaatatccacacatactgtaaatacaaattatatctgtgacaggttttggcccatggagtgtgagcagatgtaatgccagcaaaggctttaaatgggcttgcatgtttgggctcacctcttgtgtttaatgagtatggttcagctactgcatgccctgggagttgttgccccatagttagaccctggagtgakatgtgcgaacagaactaagacagacccaaagcatggagcaaaacccagctatctgggggtctcaagcagagtcactacagctaacccacagatttaagaaaaacaaattcttactgtttatatgtcattgcattttggggtggtttgttccacagcattattgcaacaaggactaactaatacatcttccaaatcattattacataggttgtcagcaccatgcctatatgtgaagcaactgtgtacttagaaattttgagaattcttaaac

SEQ ID NO: 889982 - DNA, 644 bp, Homo sapiens
gcctgcaaaggacgtgatctgcttccttttctggctgcagagtattccatatagtctatgtgtacacattttctttatccagtccatcattgataggcattggggttgattccctgtctttgctgttgtgaatagtgctgcaacaaatatatgtgtgcatttatctttataatagaatgatttatattcctttgggtatatatccastaatgggattgctgggtcaaatggtatttctggttctagatccttgaggaatcaccatactgtcttccacaatggttgagctaatttacattcccaccaacaatgtaaaagcattcttatttctccacagccttaccagcatctgttgtttcttgactttttaataatcgccattctaactggtatgagatgttatctcattgtggttttgatttgcatttccctaatgaccagtggtgttgagccttctttcatatgtctgttggccgcatgaatgtcttctttcaagaagtgtctgttcatgtcctttgctcactttttgatggggttgtttgttttcttttttcttgtaaatttgtttaagttccttgtagattctggatattaaacctttgtcagatgggtagattacaaaactttctcctattctgtaggtt

SEQ ID NO: 889983 - DNA, 580 bp, Homo sapiens
aacttacttgaggtaattgtcttaaatcacttgcccaaaacttgaagattgaatgaatctgtctttttctgcttatgtgtcacttcagatgatctgatgtctgttccttgctacatttcagggaaattagttaatgtcagtgagaagtttctatatgctctaaaaatatcagatttggggatcagcagtaaagctcctgttttattgtctgccttaatctggtaacatttgcaaaattgcagtataaaaagacaaatacagtagaaaacttggataagtacatccaggtgaccaaaccattttcttggatttttccctccagttcaaaaaaaaaaaaaaaacaaaaagcaaatgtgatggctcatgcctgtaatcctagcactttgggaggccgagtcaggtggaggattacttgargtcaggagttcaagaccagcctggccaacatggcgaaaccccgtctctacagaaatacaaaaaaattagccaggcatgatggcagggtgcctgtaatcccagctactcgggaggctgaggcaagagaatcgcatgaacctgggaggtggaggttgcagtgagc

SEQ ID NO: 889984 - DNA, 666 bp, Homo sapiens
tcttgcagtggaggcaactataaaaatgcccttttctggatgtggtaagccaggatggcttgggatggtctgggaaaacaccatctatacaccaaccacctagaatcttaaacataactagactttcacatggtttattagtatccttcttggatctcaaaatatttttaaataagattgaattccacatttactctagaagagaaaaacaaaatcttcccttcagggtagtttcattcacccacaattgcaatactactggtatactccactacctgaatgcttatttaaaagccaatgataaatcaccaagtgatacaggaagatataagcagaagtcccttaaatattgaacttccatcatgaatctgaaatgaattgaatttgcaaatctttggtttatgccctgctcttcagggacatactaactatataaagataggtatctgtgagcaaacagccatccgggggcaccctcagaaacatgctagaatacccaaagccagggytgcatgcacttcgttcttccaggactctctgcattgggtattcattctggaaagcatacaggcagtgcagttcaccagatcagtgttcaaatcccagcctgctcacttcctgggtagatgactttgggaacttatggaacctctctgagcatgcatt

SEQ ID NO: 889985 - DNA, 666 bp, Homo sapiens
tcttgcagtggaggcaactataaaaatgcccttttctggatgtggtaagccaggatggcttgggatggtctgggaaaacaccatctatacaccaaccacctagaatcttaaacataactagactttcacatggtttattagtatccttcttggatctcaaaatatttttaaataagattgaattccacatttactctagaagagaaaaacaaaatcttcccttcagggtagtttcattcacccacaattgcaatactactggtatactccactacctgaatgcttatttaaaagccaatgataaatcaccaagtgatacaggaagatataagcagaagtcccttaaatattgaacttccatcatgaatctgaaatgaattgaatttgcaaatctttggtttatgccctgctcttcagggacatactaactatataaagataggtatctgtgagcaaacagccatccgggggcaccctcagaaacatgctagaatacccaaagccagggttgcatgcacttcrttcttccaggactctctgcattgggtattcattctggaaagcatacaggcagtgcagttcaccagatcagtgttcaaatcccagcctgctcacttcctgggtagatgactttgggaacttatggaacctctctgagcatgcatt

SEQ ID NO: 889986 - DNA, 670 bp, Homo sapiens
taaaagacaactaatggtaaggctgaaggcattaatcctttctccataacggtctttcaatcagcaggtaatgccactgggatgccagtgtgtacttaaatggactttcccattttattcctggttaatctccctttcaccctctcagaaatgccagcaacatccaacttgggatttttaccaaagctttcataatttgmaggacttttttttctcctttacatttgaaaccacagctacctcataaataactccttttatcacaagtgtggatgttcctgtaatgctacctgcaatatgtcaaacgtttcaaaagttatctaatgtgctagacagaaactgcttttgacctctgggttaaccaaagttaaccaacaaatgtgactgctttaaaggctccttcctgctccagctgctgtttcaagctataaattactgccactcagggcagtgacaagacagggtagcaggactttttctgacactgtacagtttgtgattaaatatagtcttggtttcctttctcagtaatcaagtatgtggacattatatataatcctaagaggccttcttggtaaactacccacagaatttaaaaaccatgtggtaaatgattagagggaggttgtgttttaataactttttggggtttccgttagagaaatttgat

SEQ ID NO: 889987 - DNA, 633 bp, Homo sapiens
tctaaatacctaggaatatagataacaagggatgtgaaggaactcttcaaggagaactacaaaccactgctcaaggaaataagaggacacaaacaaatggaaaaaccttccatgctaatggataggaagaatcaatattgtggaaatggccatactgtccaaagtaatttatagattcaatgctattcccatcaaactaccattaacattcttcacagaattagaaaaaatattttaaattttatatgaaatcaaagaagaccctgtatagccaagacaatytgaagcaaaaaaaaaaaaaaaaaaaaaaaaaacgaaactggaggcatcacgctaccagacttcaaactatagtgcaaggttacagtaacaaaaacagcatagtactggtatcaaaacagacatagagaccaagggaacagaacagagatctcagagataacacctcacatctacaaccatctgatcttcaacaaacctgacaaaaacaagcaatggggaaaggatgtcctattcagtaaattgtgctgggaaaactggctagccatatgcagaaaactgaaaccggaccacttccttacaccttatacaaaaactaactcaagatgcattacagacttaaatgtaaagccc

SEQ ID NO: 889988 - DNA, 697 bp, Homo sapiens; identical to SEQ ID NO: 887088

SEQ ID NO: 889989 - DNA, 627 bp, Homo sapiens
aggagagagctagactctaagtccagagcctggactcttttttctttttacacttcatgaaaaattatttttcatgatacaaaacacaaaatcgataaatgtctttttgttgacaacacacacacacacacacacaaagttcacctttctgagactgtgttacacttagatatcatgccatgtggaactcattcaggtccctcttttaatatatgttcagttatattttttgctatacggtaggttttatctgtgaggaatatattccactttctctgtaggttgtaaacagaagtagttctcaataaataatattgaagtgagggtctaaagggaaaaaatatcaatttatttttaatgagaatatctaaggtcaaacagttttcayaagtgagaggttaattaagagttgtgaatatgaaagagggtgagaaagatgaagttcttcattcctcaatttgtgctttgtattgttactccagtttttctataaaacaaatgaattttaaaagtgccacattcaggctagatgtagtggctcatgcctataatcccagtgctttgggaggttgaggcaggaggattgtttgagaccagcctgggcaacacagcgagactccatttctt

SEQ ID NO: 889990 - DNA, 627 bp, Homo sapiens
aggagagagctagactctaagtccagagcctggactcttttttctttttacacttcatgaaaaattatttttcatgatacaaaacacaaaatcgataaatgtctttttgttgacaacacacacacacacacacacaaagttcacctttctgagactgtgttacacttagatatcatgccatgtggaactcattcaggtccctcttttaatatatgttcagttatattttttgctatacggtaggttttatctgtgaggaatatattccactttctctgtaggttgtaaacagaagtagttctcaataaataatattgaagtgagggtctaaagggaaaaaatatcaatttatttttaatgagaatatctaaggtcaaacagttttcacaagtgagaggttaattaagagttgygaatatgaaagagggtgagaaagatgaagttcttcattcctcaatttgtgctttgtattgttactccagtttttctataaaacaaatgaattttaaaagtgccacattcaggctagatgtagtggctcatgcctataatcccagtgctttgggaggttgaggcaggaggattgtttgagaccagcctgggcaacacagcgagactccatttctt

SEQ ID NO: 889991 - DNA, 593 bp, Homo sapiens
ctgcagacttctggagctttcgatctgttttcctcctgtctctctggtactgtcctacaaattctagctgcttcagtaaaacagaactgttggtctctgtcacttcaagtcagcaaggcctcaagccagaagccaggctctttctaaactcccaagtccatgcacagcttagtggtaaactggtgcaatatctgaaaaccactgwtttgtccttttttctcattgtttaaaatgggaagataaatccagtccctgttagtccgttttggccacaataagctgaattgtttcttgaagttctacttcacttctttaatcctattcagaccccatttcaagacccactaacaaattgagatcttttgttagaaaaatacctctctaggtaactgcaacctatggtccactttggctttctgaggtgggagctctatatcccagtatcagggaaatcacttcaaaatcacttcagaagttcaagaggaatttctgagatctccttcaccaggctgggggctataacctgctactctcacctcagaaagctaaagcagagacacattggacataaactgatccatctttctaaagac

SEQ ID NO: 889992 - DNA, 611 bp, Homo sapiens
ctcgtgcatgtaatcccagcactttgggaggccaaggcggacggatgacctgaggtcaggagtttgagaccagcctggccaacatggggaaaccccgtctctactaaaaatacaaaaaaaaataaccaggcgtggtggtgggcgcctgtaatcccagctactygggaggctgaggcaggaggcttgctggaactcgggaggcggaggttgcagtgagccaagattgcaccattgcactccagcctgggcaacaagagcaaaactccatcacacacacacaaaaaaggtacccatcctcatgtatattcaaaagggcatcaggaggaaggctcctgccatcagccactgcactgatgagaagggcatccccgctatgctacacccacctggacgaggagccaggcttcatgccacccactgggaacaaagatttctcctatctggtggaggaattctcattcaccaaggacttcctccgggggactgtgcttgtgttcttccaggttccttgttactttgcaggacagtttgagatttaatctatttgtatgatacaatggcggggagctggagggcttcccttcctctccatgtggtatggtggtctcatt

SEQ ID NO: 889993 - DNA, 694 bp, Homo sapiens
actcacatccctgtattcatttagaaccagaggagcattaatatgcacacctatgctgataaagggatacacattccaatccaaacacacatgcccacaggcacaagagcctgctaaaatggtagggcctgctggtactctggcatagcctgccatataatcatggattatcatagacaatcatggatttgaactcaagaagatgagatgacacagctcccttcccttgaccctcacatcaatatatagtagtccctatggactagtaaagccctctgcacagacacacgcaggcaaaaagatgggaagggaatgagatctccacatttgtgatatattttccctttccatcatggacagttggaagctgagatgagatcaagttctgtgtgcaacaggaaagatgggcagtggaggtggtggcagctgtggtatygttagagtagaagctctagagctgttggtggcatcaggtctaagagttacaagtttacgttggtgaagtgcttcagatttcaaagtgttttcacatgtatgactccatctaatgctcataacaacactgtcctcaatgtactagagaaagtaattgagacccaggggttaacttgtccatggccatgcagtttatgggcagcagagcaagatctttagtctgagtctagcagcttttccaactattcccttaataaag

SEQ ID NO: 889994 - DNA, 590 bp, Homo sapiens
atatccagatgccacctatcactggttatggagtccacattacatggtgatcagtggataatccactccaaaatttcattttagagttaactacctcaaaccactttgaaaactatttcaaatgtaagaagttccctgattaagaaagtcagaggtgaaatttattttggggagttctcagcatcaacacctgtgaaagaatgagcaaagcaggattagactgagggagaagcacagccatgatgcaccgcaattgtaacctctgccaccaccaaaggaattaataaagatagaacaaaccttccgaggtttctcttcttggarccattggggccagaccttttcaaccctgcattgagcattcactgtatgcaatctgtctctagggagtaagcataccttggaagaaacagctcccttaagccaagattaatagttggaaaggggattagctataaactatcaaccgacaataccccagtgactgagaaatgaatgtctgttctgagggaatgaatgaaggaatcaagccacagcattgactagaagctcctatccaaacactatcctcttgctattcctcatgttgc

SEQ ID NO: 889995 - DNA, 590 bp, Homo sapiens
atatccagatgccacctatcactggttatggagtccacattacatggtgatcagtggataatccactccaaaatttcattttagagttaactacctcaaaccactttgaaaactatttcaaatgtaagaagttccctgattaagaaagtcagaggtgaaatttattttggggagttctcagcatcaacacctgtgaaagaatgagcaaagcaggattagactgagggagaagcacagccatgatgcaccgcaattgtaacctctgccaccaccaaaggaattaataaagatagaacaaaccttccgaggtttctcttcttggaaccattggggccagaccttttcaaccctgcattgascattcactgtatgcaatctgtctctagggagtaagcataccttggaagaaacagctcccttaagccaagattaatagttggaaaggggattagctataaactatcaaccgacaataccccagtgactgagaaatgaatgtctgttctgagggaatgaatgaaggaatcaagccacagcattgactagaagctcctatccaaacactatcctcttgctattcctcatgttgc

SEQ ID NO: 889996 - DNA, 630 bp, Homo sapiens
tgggttttcttttcttcagcctagaatgtatacctcctaaggtatataagctcagctgtattcatatgcaactgtttacaggctaatttttttttactttttgggagcagacaaaaaggcatcttccatttttgcactctgtttttttgatatatatatgtaatttttaagatagtgtttaaggggccaggtgtggtggctcacacctgtaatcccagcactttgggagactgaggcgggtggatcacaaggtcaggaattcgagaccagcctgaccaacatgatgaaaccccgtctctactaaaamtacaaaaattagccaggcgtggtggtacatgcctgtaatcccagctactcaggaagctgaggcaggagaatcgtgtgaacctgggaggcggaggttgcagtgagccgagattgcgccactgcactccagcctgggcgacagagtgatactcatctcaaaagtgtttaaatacatgtgcacatgtacacacacaaagcaaaacagaaagaatacaataataccaaagtatctaaaaacaaatcttaatttatgatggatcatctttactgaattataaagtattttaggtgtctgcattctttaaagctacctcttggataaaa

SEQ ID NO: 889997 - DNA, 630 bp, Homo sapiens
tgggttttcttttcttcagcctagaatgtatacctcctaaggtatataagctcagctgtattcatatgcaactgtttacaggctaatttttttttactttttgggagcagacaaaaaggcatcttccatttttgcactctgtttttttgatatatatatgtaatttttaagatagtgtttaaggggccaggtgtggtggctcacacctgtaatcccagcactttgggagactgaggcgggtggatcacaaggtcaggaattcgagaccagcctgaccaacatgatgaaaccccgtctctactaaaactacaaaaattagccaggcgtggtggtacaygcctgtaatcccagctactcaggaagctgaggcaggagaatcgtgtgaacctgggaggcggaggttgcagtgagccgagattgcgccactgcactccagcctgggcgacagagtgatactcatctcaaaagtgtttaaatacatgtgcacatgtacacacacaaagcaaaacagaaagaatacaataataccaaagtatctaaaaacaaatcttaatttatgatggatcatctttactgaattataaagtattttaggtgtctgcattctttaaagctacctcttggataaaa

SEQ ID NO: 889998 - DNA, 595 bp, Homo sapiens
ggtagacaagctagaaatatgtctcctgctgaatgaggtaggtctaggaaattttttattaatgtggtggtagccattaaaaattaccatttcaacttctgtgatcatcattttagcaagatagtctagtagagaaaatgcaatttaattatttatggaggatgcttgtattttaaaagatctatttcacgggagctccaagtttcattccattttcaatactgactgtgcaaaatattgagaatgtgtaaatgaaatccacatttcagtttaattagggcagatactatartaaagtcttgttttttcagttgttttggaaagtctggtgttttcattctgagcataaagatagccagtgtttttcaccagtttcttattgttacaggcagattcccaacctttggagatcaaaatagaatactcaggatttgtcatagttatcagacttcctcaaaacttcctaattaatagggacatctcatttttcttttctattattttctaaagcttatactatagtctacacttggaaatagtgctttcataggtaccataatctcttgcagcagtattaaaaattcagtaagagaac

SEQ ID NO: 889999 - DNA, 646 bp, Homo sapiens
tcatgcctcagcctcctgagtagctgggattacaggagcccagcaccacgcccagctaattttttgtattttttatagaggcagggtttcaccatgttggtcaggctggtctcaaactcctgacctcaggcgatccacccacctcggcctcccaaagtgctgggattacaggcgtgagccacggtgcctggctgggtgcacatgtatttagaatagttagctcttcatgttgaattgatccctttaccattatgtaatgcccttctttgactttttaaatttttgttaaagtctgttttgtcagaaactaggattgcaactcctacttttttctgttttccatttgcttgataaattttcctccatccctttattttgagcctatttgtatctttgcatgtgagatggrtctcttgaagacagcacactgatgggtcattgttcttaatcctggttaccatactgtgtcttttaactggggcatttagtccatttacatttaaggttagtattattatgtttgaattagatcctgtcattataacactagctgcttattttgcagacttgtttatgtgctttcttcactgttttgctgatctgtctacttcagtgtgtttttgtattgtctggtaacaatttttcc

SEQ ID NO: 890000 - DNA, 650 bp, Homo sapiens
atgtgagatgggtctcttgaagacagcacactgatgggtcattgttcttaatcctggttaccatactgtgtcttttaactggggcatttagtccatttacatttaaggttagtattattatgtttgaattagatcctgtcattataacactagctgcttattttgcagacttgtttatgtgctttcttcactgttttgctgatctgtctacttcartgtgtttttgtattgtctggtaacaatttttcctgtccatatttagtacttccttcaggagttcttgcaaggcagttctggtggtaacaaattgtctcagcatttgcttgtacgaaaaggatcttttttctcttttgcttatgaagcttagtttggctggatatataattctgggctggaaaatcttttctttaagaatgttgaatcaatattcaacattcccccaatctcttctggcttctagggattctactgagaggtccatgattagtctgatgggcttctctttgtaggtaacctgacctttctttctggccacccttcacatttttcctttcattttgactttggagaatctgatgtttatgtgccttgtggatgatcttcttattgagtatctcactggggttctctgcattttctgaatttgaatg

SEQ ID NO: 890001 - DNA, 635 bp, Homo sapiens
tccccataatcctcatgtgtctagggagagaccaggtggaggtacttgaatcatgagggtggtttcttctatgctgttctcacaatagtgagtgagttctcacaagatctgatgattttgtaatgggctcttcctccttctctctgcacttctccttcctgctgccttgtgaagaaggtaccttgcttccctttcaccttctgccatgattgtaagtttcctgaggcctccccagccatgctgaacttgagtcaattaaacctcattcctttacaaattatccagtctcaggcagttcattatagcagtataaaaacagactaatacagtaaattggtaccaaggtagtggggcagtgctctaaagatgcctgaagatgtgaaagcaactttggaactgggtaatggacagcggttggaacagtgtggagggctcagaagaagataggaagatgtgggaatgtttggaaattcctagataatttttgaatggttttgaccacaacactgctagtgatacagacaatgaagtccaggctgaggttgtctcagatggagatgagcaacttcttggcacytggagcaaaggtgaaccttgctatgctttatagcaaagacattggcagcattttgccc

SEQ ID NO: 890002 - DNA, 605 bp, Homo sapiens
cattatccaattacttcccaccaggcccctcttccaaccttggagattacaatttgacatgagatttgggcaggaacacagacccaaattgtatcaacccttcacctcacatatatgagaccagaagagtgactttttccttttaagctgtcttctttctagatgtcttttttacttctttttcttttttttttttttttttttttttttttttgagatggagtcttgctctatcacccaggctggagtgcagtggcatgatctcagctcactgcaacctctgcctcccgggttcaagcaattcttctgsctcagccttccaagtagctggggctacaggcgcatgccaacacacctggctaatttttgtatttttagtacagatggggtttcaccatattgtccaggctggtctcgaacccctgaccttgtgatctgtccacatcagcctcccaaagtgctgtgattgcaggtgtgagccactgcacctggcctccttggtgttttaaaatcataatgtcttattgttttagtttcttctcaaaatgaagtttgtactgctttaaacactgctaaaacaatagtatgaatatttcatcattcta

SEQ ID NO: 890003 - DNA, 589 bp, Homo sapiens
aaattattcaaaattttagtatttcagaggcagagtttgaatatgacatacttgtggatggaaagaaagttgtaataggagattacttgctttacattttaaacttaatgatttgtcaagatgacataaagacgcaatcargctgaggtatggaaaataatttatgtcactgaatttgcaactcaataatattagggttaaaattagaactgaattaaattaagttttcttgttagttttcatataccatacaaactagaatgtaaagatcgatgaaagaagagaagactttttcttgaacaactcatgattaagtgtgtgaagagtgtgatctgtttgaaagggataacttaaacaaaaacaaaatccaactaagtctaaaacaatttaatttataaatattattagttcttaaaagtaagtaggattgctgggcgtggtggctcacgcctgtaatcccagaactttgggaggccgaggctgggggatcacctcaggtcaggagttcgagaccagcctgaccaacatggagaaaccccgtctctaccaaaaatacaaaattagccgggcgtggtggcccgtgcctgta

SEQ ID NO: 890004 - DNA, 589 bp, Homo sapiens
aaattattcaaaattttagtatttcagaggcagagtttgaatatgacatacttgtggatggaaagaaagttgtaataggagattacttgctttacattttaaacttaatgatttgtcaagatgacataaagacgcaatcaggctgargtatggaaaataatttatgtcactgaatttgcaactcaataatattagggttaaaattagaactgaattaaattaagttttcttgttagttttcatataccatacaaactagaatgtaaagatcgatgaaagaagagaagactttttcttgaacaactcatgattaagtgtgtgaagagtgtgatctgtttgaaagggataacttaaacaaaaacaaaatccaactaagtctaaaacaatttaatttataaatattattagttcttaaaagtaagtaggattgctgggcgtggtggctcacgcctgtaatcccagaactttgggaggccgaggctgggggatcacctcaggtcaggagttcgagaccagcctgaccaacatggagaaaccccgtctctaccaaaaatacaaaattagccgggcgtggtggcccgtgcctgta

SEQ ID NO: 890005 - DNA, 589 bp, Homo sapiens
aaattattcaaaattttagtatttcagaggcagagtttgaatatgacatacttgtggatggaaagaaagttgtaataggagattacttgctttacattttaaacttaatgatttgtcaagatgacataaagacgcaatcaggctgaggtatggaaaataatttatgtcactgaatttgcaactcaataatattagggttaaaattagaactgaattaaattaagttttcttgttagttttcatataccatacaaactagaatgtaaagatcgatgaaagaagagaagactttttcttgaacaactcatgattaagtgtgtgaagagtgtgatctgtttgaaagggataacttaaacaaaaacaaaatccaactaagtctaaaacaatttaatttataaatattattagttcttaaaagtaagtargattgctgggcgtggtggctcacgcctgtaatcccagaactttgggaggccgaggctgggggatcacctcaggtcaggagttcgagaccagcctgaccaacatggagaaaccccgtctctaccaaaaatacaaaattagccgggcgtggtggcccgtgcctgta

SEQ ID NO: 890006 - DNA, 594 bp, Homo sapiens
ttggccacattctaagcgataaagcaagtcctaccatagatcaaaggatcaacagcatacagaccaccttttctgccaaaatgtaacaatcaacaaaattagaaatcaataacaaaaagccaaaaagctatttggaaatttaaaaacatacttatgaatcattcatgggrcaaataaaaaagtcataataaaaattgcaaagcatttggaagagatcaacagtaaaacaccaaatatcagaatttgtgggatatagttaaaggtgtacttagaggtacatttataatcttaagcgcattaattagaaataaaaaggattaaaagcagaacttttgagaagatggaatagatgtacttttctctattcctcccactgagtacaactacaaaccctggacattatatataaaacaaacataagagactctgaaaggtggagagaaggaaacttgggacctggggaatgacacagtggtgagttctttgggttttctttttgccttatatatcccatacttcttgctgaagaaggtggcaacctggagacaccaatgggcacagaccaaaaaaaagaaaaaagaaagaaagcctgat

SEQ ID NO: 890007 - DNA, 633 bp, Homo sapiens
cctctctgatatcctttagcagtggtttgtagttctccttgaagaggtccttcacttcccttgttagctgtattcctaggtattttattctctttgtaacaattgtgaatggcagttcattcatgattgcagtctcttcttgtctgttattggtgtaaagaaatgcttgtgatttctgcacattgattttgtatcctgagactttgctgaggttgcttaccagcttaagaagcttttgggctgagatgatgtggttttctagatataggatcatgtcgtctgcaaacaaagacaatttgagttcctctctttctattttaatacacttcattttttttttattgcctgcttgccctggctagaacatccartactatgttgaataagagcggtgagagagggcatccttgtcttgtgttggttttcaaggggaatgctatcagcttttgccaattcagtatgatagtggctgtgggtttatcatatctggctcttattattttgagatatgttccttcaattcctagtttattgagagtttttaacatgaagtgatgttgaattttatcaaagtccttttctgcgtctattgagaaaatcatgtggtttttgtctttagttctgtttatgtga

SEQ ID NO: 890008 - DNA, 582 bp, Homo sapiens
aaatgaaggtttcaaatggagagcacttggatatataattttttaacatgggaatgacttccaggctaaacatatgcatttggataaaatcagcatgggggaaagtttaggaaagagacctatgctaggagatgggctgtaccttttgctccacctagggcatagatcagcacaagatgatgcctctgctttcctggactcattcttcctccccctatgtcctttcctggacccattcttcctgcctccttttcactgtgaaaaactctattgactttaaattctttccagttattttcttttcaatgccatacatcatcatggccaagaatcaatcaggaaagctcactatattcyttagagaaagctcctgtaatcagaaagcctgtgaatacaactttattgatcatttctgttcctattgctcattaataaattttgtcccttttgtcttttcattgtacatatattcgtacaatacttgcgtataagttaataaatgaaaggaatgaataaaaatttttcaaaagttacgattcagtcatgttttattcaattatgtgtattatattgttttagtca

SEQ ID NO: 890009 - DNA, 682 bp, Homo sapiens
tgtgaaataaagagaaagaccaggcatgcttcccctgggcctcaaacagaaatgaggacactggatgtggtccgtggaaatgtagggcattgcatgcaaggcaatgtggatgtcgttggctgtcttttcaaaggatgacgttctagtgagtgatacacaattaacttcgagacttttcgggaagtcagtgctgtcattagttgtgccttatgtgtctccaaaaagaaacttgatttttacctacttgctttgcctttgaaacytagattgtaagggtttgaaatgatcataaattctattcacttaataaaaattctgtcagtcattttaacaaatatttactgagtgcctaccaatgatagcactgaaacctagatattccacatttgattccttagagattggttttaatgtttcattatatcgtttttcttggctttcctgagaagaacaagaagttgctagtttttagactcaactgtaattttgccatgtcctaacagctgcagaaaaaaacacacataccaaaacatattaacaaagaattacaaatattagctaaaggcaagagaaatgccatggaagactttgcattatcagcatgctgcttgattactacttttaaaaacagtccattaatgtttaaaaaattaaagaagactaggataaaggaatgctaaac

SEQ ID NO: 890010 - DNA, 588 bp, Homo sapiens
agcaggctgcatttaagaccacgaccaagttctatactgggaattgtataagacttaggacagtatatatatacacacacacacatatatatattctagagaatatgtatacatatatatatacatattcttgagatggagtctcgctctgtcacccacgctagagtacagtggcgtgatctcagctcaccgcaacctccacctcactggctcaagcaattctcctgcctcagcctcccaagtagctgggattacaggcgygtgccattgcacctggctaatttttctatttttagtagagacggggtttcactgtgttggcctggctggtctcgaactcctgacctcaggtgatccacctgcctcagcctcccaaagtgctgggattacaggcgtgagccaccacacccggcctcaaagcacagttgtcaagctggatcagaatcaataggaggatgcttattaaaaatgaagatttgaagtctcagtcaagatgcattaaatagaatgtctagggaatggtttgggaatctgcatttttaaacaagctctctaggtgataatacaacaatgaagtttaaaaaccac

SEQ ID NO: 890011 - DNA, 606 bp, Homo sapiens
catggatgacagagcgaggtttttctcaaaaaaaaattcagattcattttgtaaagaaaattgaataacagcaactatctgatttaccagtcagatgtagcagatacctgaatatttaaaaggaggaagaaaacttactttttaggttatcaaataatttctcaatgtgtaattgaaaagtctagaaaaaaactgtactcttttgaagaagctgttgctgttgaaactgaggtgctttctttaatttctctaatatatcctgagaatcatggctttcaccaggttactggtaaaacccacaccctcaccacatataccttaaacaaatttcttgcaaaamtctaacctaaccaggaattgttacaatgggaaaacaaatcaggtatatatatatatacctgattataggccttagcagttaaggttaaaccttgaaaaatgctgacaaaaaaatgccctggagagaatgcagggcccatttataatttttttcctaaaagaaaaaattttcttttacatttcaaacttttagtattgtaactaacaaaataaagttcaaagtctaggattcttcaaattattctaactttaaattcatttaaaatt

SEQ ID NO: 890012 - DNA, 626 bp, Homo sapiens
ccaatagtatgttgaataggagtggtgggagagggtccttgtctcgtgccagttttcaaaggcaacatttccagcatttgcccatttagtatgatattagctatgggtttgtcataaatagctcttattattttgagatatgttccatcaatctctagtttttcgagagtttttatcatgaagggatgttgaattttattgaaggccttttctacgtctattgagatcatcatgtggtttttgtcaatggttctgtttatgtaatggattacatttattgatcttcatatgttgaaccagtcttgcatcccarggatgaagccaacttgatcatggtggataagctttttgatgtgctgctggattcagttttccagtagtttattgtggatttttgcatcgatgttcatcatggatactggcctgaaatttttcttcttttgttttgtctctgccaggttttggtaacaggatgatgaaggtcacacaaaatgaattagggaaaagtctctatatttctattgtttggaatactttcagaaggaatggtaccagcttcactgtacctctggtagaatttggctatgaatctgtctgatcctgggctttttttggttggtaggcta

SEQ ID NO: 890013 - DNA, 626 bp, Homo sapiens
ccaatagtatgttgaataggagtggtgggagagggtccttgtctcgtgccagttttcaaaggcaacatttccagcatttgcccatttagtatgatattagctatgggtttgtcataaatagctcttattattttgagatatgttccatcaatctctagtttttcgagagtttttatcatgaagggatgttgaattttattgaaggccttttctacgtctattgagatcatcatgtggtttttgtcaatggttctgtttatgtaatggattacatttattgatcttcatatgttgaaccagtcttgcatcccagggatgaagccaacttgatcrtggtggataagctttttgatgtgctgctggattcagttttccagtagtttattgtggatttttgcatcgatgttcatcatggatactggcctgaaatttttcttcttttgttttgtctctgccaggttttggtaacaggatgatgaaggtcacacaaaatgaattagggaaaagtctctatatttctattgtttggaatactttcagaaggaatggtaccagcttcactgtacctctggtagaatttggctatgaatctgtctgatcctgggctttttttggttggtaggcta

SEQ ID NO: 890014 - DNA, 624 bp, Homo sapiens
taagtctccaggaacttgttttatggatctgggtgctgctgtattgggcgcatatgtatttaggatagttagctcttcttgtaccattgatccctttatcattatgtaatgcccttctttgtcttttttttttttatctttgtgggtttaaaatctgttttatgagagactaggattgcaacccctgctctttttattttttttcttytttgctttctatttgctttgtaaatattcctccatccctttatttttaacctatgcgtgtctttgcatgtgagatgggtcccctgaatacagcacaccaatgggtcttgactctttatccaatatgccagtctgtgtcttttaattggggcatttagtacattttcatttaaggttattacattgttaggtgtgaatttgatcttgtcatcttgatgctagctggttattttgtacattagttgacgcagtttcttcatagtgtcattagtctttatattttgatgtgtttttacagtggctggtagcagtttttcccttccatgtttagtgcttctttcagcagctcttgtaaggcaggcctggtggtgacaaaatccctcattatttgcttgtctggaaatgatttgatttctc

SEQ ID NO: 890015 - DNA, 603 bp, Homo sapiens
ttacatatggatgcctttctcaatattaattatggaaaacaggtttgtttcaccaatctgaaattcaaaaactaaggcaaatgaaatatgctcaaacactttggtttgttttaggctttccatatgaaactgtctaaaacctaagaacaaatgaacatctaaaaaataataagatcggtagaaattggcagtgtctggtgatggagcatggtaggctagtccatagatgacatcagccactgatggatctgagggtacataccaaggctgtcacctaacccagagatgatgaatatttgttactccagcattactgccagtgtttgaaccaagacttctctgtgagcctgtcttgtagtcctgtccrgatcataatttccttacagagtgaggaaagagaggagcaagagaaaatcctagcagatcctgagaaagaaaataggcagttgtcactgttctgtgttatatgctattggagatgtcttgatattaatgttttgaatttaatttgactagatgcactgccattggcatgaatgcatacatggacgctaccactctgctccctccaatgccttaccccagtcaacacatgtgcatgct

SEQ ID NO: 890016 - DNA, 627 bp, Homo sapiens
gaccctcctttattcaaaggcttgccttgctattagaataaaatgcaaactgctgggcctatttggccctccataatctagaccctgctgttttttcagcttcattccttattatcacctcactatcctgttctccttcccctcatcttggaccctacactcctagtcactctgaatgacatacattttttttttgmaagtgccaggctttgcttgtgaatctccctctgggtggaatactatgtctctattctacctgaagaatatactgccatcttgcaaggtagttcaaatatcacctctcctatgaaacctttttctgacagagacacacacccacataagaattgtcttctcattcctcacagtatcccaacacatttccaccattgagcctcaatactgtgcaccactctgaggtgtatgttgttctgcttcttgtttcaggactgaggtaccaagtctcagccaaatccctcagggaaattgccctcatccagaaagaacctcttttccccagggcagctcaaattccctaattagtcagtgaagaggatagggtacaaaggatcccttgctccaaagtgagacaacaaccactttcctatcccagacccagagctccca

SEQ ID NO: 890017 - DNA, 584 bp, Homo sapiens
gttgtctttaggcctgctaacacatccattgtacagctcattaagaaataattttgactttcaagtcatattatttttaaaaagtatatttcatttcttttcttttttcctttttatttgtacagatttttgcatacacgtgcaattttgttacatgtatagattgtgtaatggtcaatacagggtttttagggtatccatcatctaaataatgtacattgtacccattaatcattttttcaccttccttctccttcccacctcctcactcttctggatctccattatctattattcaactctctatgtccatrtaatcacagcttttagcaactacttatgagtgaagacatatgacatttgtctttctgtgcctggcttgtttcacttaagaaaatgacctctaagtccatccatgtgaccatgaatgacatgatttcatttttttaatggctgaatagtattccatgtgtatctatatcatattttatttatccactcatcaattgatgaacaattaggttgattccatatatctgatattgtgaatagtggtgcaataaatatacaagcacaggtttttt

SEQ ID NO: 890018 - DNA, 637 bp, Homo sapiens
taatacatataaaggtaatacattgctcagatgttttagaacaatataaaccaagaagaattttgatttctcatccaataggaatattgtaaacaatttgcataactaaataatttagaaaataactaatgtatataaacagtaataaagaaaacaatgtagaatattatgaatatagaataattgctcaacagattggttaaaaatgtttcaaatgaamaagaaaatgttgaattaagatgaataaaagactacaagattgaagaaattataggaaacacccatctttttaaaaaattaatgagcatttgatgtgttaatatatttttgagttggttgacacctcctgtcttcttaaaaatacatacaatattatttaatttataagttaaatgaagtcaatttaattacactctcaagaatagctcttacgctgaagaatataattgaattattaactagatgctatttagatgctagctcaggataatttgtggttttgccacacatattatgacattgaataattctctcaataataatgactgtgaattctcttgcaaatggtaactcaattttgtagttatatttgaaaaataaaatcaataatataaaaatgctttcaatagttagctga

SEQ ID NO: 890019 - DNA, 590 bp, Homo sapiens
tactgtacctatgtgcaggtatctttcggttcccaacaatcaggataacatcacaaagttgctgctgcttcaaataactttccatctttctgaaggtttgctcagcatgatgaacagcttgatagaattcttcagagctactggagtccaaatcactttgaggtgtcattgaatggccggttgatgacagcctataaaccacacacacacacacacacacacaaaataataaagggatttataaagagccaattatctagaataacatacaggtttttatcattttcttaagaaaactaatatatctgtgtttatttttatattttaatacaasttcaataaataaaagtcgaataatctattgtgggataagtgatttgctctagggaataataaataaatggaaaagttctttaaaagaggtttaaaaatatgttgtctgtattgattaggaccttaagttagtaaacctgaaatctcacagaaatagtaaattatttacatgcctattctaaaattaattagcaatgaaatgttaatttcgttcatttgatattgaggaagatagcttaattatactattctaaata

SEQ ID NO: 890020 - DNA, 590 bp, Homo sapiens
tactgtacctatgtgcaggtatctttcggttcccaacaatcaggataacatcacaaagttgctgctgcttcaaataactttccatctttctgaaggtttgctcagcatgatgaacagcttgatagaattcttcagagctactggagtccaaatcactttgaggtgtcattgaatggccggttgatgacagcctataaaccacacacacacacacacacacacaaaataataaagggatttataaagagccaattatctagaataacatacaggtttttatcattttcttaagaaaactaatatatctgtgtttatttttatattttaatacaacttcaataaataaargtcgaataatctattgtgggataagtgatttgctctagggaataataaataaatggaaaagttctttaaaagaggtttaaaaatatgttgtctgtattgattaggaccttaagttagtaaacctgaaatctcacagaaatagtaaattatttacatgcctattctaaaattaattagcaatgaaatgttaatttcgttcatttgatattgaggaagatagcttaattatactattctaaata

SEQ ID NO: 890021 - DNA, 656 bp, Homo sapiens
aatgattacttttcatatattttggaaaatatgattcccagggaaaaggtgcaaaagttcatatgtgcaaaactttaacagacaacacatttgacactaggagggaatggattgcttgttcaatgaaattcaattacaaaactgcaatattgtagttactatttacactactctttttatgtgtaaatcaatgtgcaagtggctacacatacaaattcacttattccagagtgtaatggttaatcctgagtgtcagcttgattagattgaaggatgcaaagtacttttcctgggtgtgtctgtgagggtgctgccaaaggagattaacatttgagtcagtggactgggaaaggcagacccaccctcaatctgggtgagcacaatctaatcaactgccagtacagctagaatataaagcaggaagaagaacgtggaaagactagactagtttagtcttctggcctacattctttccccaatgctggatgcttcctaccctcgaacatggsactccaacttcttcagctttgggactcggactggctctctgctcctcagcttgcagacggcctattgtgggacctcaccttgtgatcctgtgagtcaacagtgcttaataaactcccctttatatatacatctatcctattagttct

SEQ ID NO: 890022 - DNA, 618 bp, Homo sapiens
gctgagtgggtccagcaggttcaatcaaaactcaggcaaaggcaccaccggacacagaggttttcagctggtgaagcaacatcccaagtatcccataacagtattatggttaaaacttcagatttttttgtctagttttcataatttgaattctagctccaacactcattgagcacagttcrgtgagctaatgaccttgtctgtgcttcaaaattttagctgtaaagatgctacttacagcactattaggatgaaaacagttaatataatatatgtaaaacacttagaacacagtctggcatataataatccactactataattattaatattttagtgcaatcatgaagaaattgtaattctttgctttttcttgcccctctttgtattgttaagaaatattatgcagctcttataaataagacacatatatgacagtatcactaatatcacatgtgaacattgacactgttgaaggattatttaatttactagaagaatatgactttgtatgattcaccatatctatctgaaattatatattaatttgcagaagactgatagttgtaaatgatttttgccctctgaaaaaaataaactctaacatttgaagtttta

SEQ ID NO: 890023 - DNA, 706 bp, Homo sapiens
ctcatatagcagcatatcaacaataatcaaatacaatacatatgcattcactaattaatgttggacctcctttcaagtcagtctatatagcaagttcattctcttttaaccttgcacaatattctatagttgtaaatattatcccaataaacgtttctagttttttattattaaagtaactttaatcatcacagctgttcggtttgatttaggggagatgctctcaaacatcctgcaacatgtgttttcgtgatgtggattgatctgcagagtcaaagggtggcatattgcccacacctaaccagtcagaagtgcaactgatgggaaattcaaggattattatatagcttaagttatttaaaaagcatatattaaatgccatgactttwaaaaaaataaacattatgggaagactaattgcaagtatgctaatagttcaagttagaataaaataattacatcaatataccaacaaagcacctgagtatctataaaataagaacctcgatttcctcataaaacatctcatgtccatagatcagtaaacttaacatttttaagatagtaatactctctgaattatctgtagactaaatgtaatgcctatcaaaatcctagctggctatttgcagaaattggcaagataataccaatttcatatgaaaatatagggaaccaaaaatagtcaaaatattggaataagaat

SEQ ID NO: 890024 - DNA, 706 bp, Homo sapiens
ctcatatagcagcatatcaacaataatcaaatacaatacatatgcattcactaattaatgttggacctcctttcaagtcagtctatatagcaagttcattctcttttaaccttgcacaatattctatagttgtaaatattatcccaataaacgtttctagttttttattattaaagtaactttaatcatcacagctgttcggtttgatttaggggagatgctctcaaacatcctgcaacatgtgttttcgtgatgtggattgatctgcagagtcaaagggtggcatattgcccacacctaaccagtcagaagtgcaactgatgggaaattcaaggattattatatagcttaagttatttaaaaagcatatattaaatgccatgactttaaaaaaaataaacattatgggaagactaattgcaagtatgctaatagttcaagttagaataaaataattacatcaatatascaacaaagcacctgagtatctataaaataagaacctcgatttcctcataaaacatctcatgtccatagatcagtaaacttaacatttttaagatagtaatactctctgaattatctgtagactaaatgtaatgcctatcaaaatcctagctggctatttgcagaaattggcaagataataccaatttcatatgaaaatatagggaaccaaaaatagtcaaaatattggaataagaat

SEQ ID NO: 890025 - DNA, 684 bp, Homo sapiens
caagaatgctggacagaaatataattaagcattaattaggctacagtttgggccatgtccttgtggtttcatagaaagtcacatagcactacatactaaccattggcacccccattgttcctatagatagaatttcagacattagaatcattaggcttttgtttaagaattgcttaagatgtttttcagaacctgaattccagtggaacagctgatgccaacctgtttgaagactctcatagaggaaaatcatcagctacagaatagtttcttcatctccttgttccataacttcaccttgcagtttcccgccaattgacaatctccacacttyagcccactcaaaaacttaaacatccgattccctaacttttcagggagacagatttgaggtttcctcatatcttctcatatgtcagccgtatgaataaacctctttgtctgctgcaaccaggtatctcagcatattaacttgccatgggcattgggctacaaacctattaaaattacagcagcattattcataaggggcccaaagtgtaaacaactcaaatgtccatcaaccgatgaatggataaataaaatgaggcatatctatacaatgctatagtatttcacaatacaaataaataaattactgatacatggtaaaacataaatgagtcttgagtatattatgctaag

SEQ ID NO: 890026 - DNA, 646 bp, Homo sapiens
tcttagcatagatcttgagagaaaatcagacggaagacctacatgctgatggcatggtttctattgacttcattttactgtgattttagaatattgggaaggtgacttcctgtaatctaattaactatttctctcaatataatttatgcagaaaagaatgagcacagcagacctgaactactaccatcctctgaaaggcctgctttcaaggtttgttccagctggtatttgagaacttagatttcaagaggattctcatcattaactgataaaatcgactcactgtgcctaaactgtacaaacaatatggtatatgagcaacaccttttttcccttctgggagtctgaaattttgttctgtgttagatgsaggcctatgcgatcaacacctaataaaactccaggcactgaatctctagtgagcttccttggttgacatttcacacactttgtcacaacttattgaaggtaaaattaagtatcttcagtgggactccactggaagggaacccttggaagtctgtacctggtttcatttggccttcgccccataggtagtttaccttttctgattgtgttatgtattattttgccgtaacaattcatagccatttgtaaaactacatgctgagtcttgtgaagtatc

SEQ ID NO: 890027 - DNA, 564 bp, Homo sapiens
ataatttctcaaagaacaaatggagaaactagacttcatataattccctgcaagactgagctaagatcatgccactgcactccagcctgagtgacagaatgagaccctgcctctagttaaaagaaagaaaaaaaaaaagccactgtaagatatattattaaaggaataaaaagatgaaccataaaccaggaaaaaagtttgcaaatcatatctgataaaatattatatacggaatatataaagaattttcraactaaatttttaaaaaactgggcaaatgatttatacagacatcccacaaaagaaaatatatgaacaaaaaatgctcaatattatcagtgcttcagaaaatgcacattacaaacacaatgacatgccacaacacctctattagaactgcttgtggaaatgtgaaatggtacaactactttagaaaacaattctgcagttttatctctcctatgattcagccattctgctcctagatgtttgctcaagagtaaaggaagaatatgctgatacaaagtctgtacatgaatgtttgcagaaaatttattttgcaat

SEQ ID NO: 890028 - DNA, 521 bp, Homo sapiens
ggtgttcaggcaaatggtgtataattgaccatttatattggaaaagtatattactatatttctttatatgtgtgtgtatttttacttcccagatcaacacttgaaaaaagatccagaggcagtatgtcaatgtaataacttacagggtttttacgacattttcttgaaacatatttattcagtctaaattcaaacccttgataataatacacttcataataatttagacagatkttttttcagatcatctctcaattatttccccaaaaaagaaaaaaaaagaattttcacaagatatatgtagaataatatttttatttattgctagctttggaggttaagtattataaccattgtttttctcaaagagttttaatattttattttctaaaacttggactatatccaatgaaagaatccatttgttaaagccagaagtcacaaatggaatattagccagtgtcaagcttcaatgcacacaaattaagctacctcatgcatgctgtatttctcggccagac

SEQ ID NO: 890029 - DNA, 521 bp, Homo sapiens
ggtgttcaggcaaatggtgtataattgaccatttatattggaaaagtatattactatatttctttatatgtgtgtgtatttttacttcccagatcaacacttgaaaaaagatccagaggcagtatgtcaatgtaataacttacagggtttttacgacattttcttgaaacatatttattcagtctaaattcaaacccttgataataatacacttcataataatttagacagattttttttcagatcatctctcaattatttccccaaaaaagaaaaaaaaagaattttcacaagatatatgtagaataatatttttatttattgctagctttggaggttaagtattataaccattgtttttytcaaagagttttaatattttattttctaaaacttggactatatccaatgaaagaatccatttgttaaagccagaagtcacaaatggaatattagccagtgtcaagcttcaatgcacacaaattaagctacctcatgcatgctgtatttctcggccagac

SEQ ID NO: 890030 - DNA, 685 bp, Homo sapiens
ccctgatatgaagaaagatttggaaagataaaacacttaggtatattttgttccatctctgaggccgagttactcaaaatgcgcttaaatattttattatataaggtgaagatatacagcttgtctctgatagttacataactgagcagctgcttctagcgttgctattctgcctttacctatgtacctagaactaattagaaagaacagtttaaagtgtctccttagtgtcctcgattggatcttcacatacttggtctttgttttkctcccctagccaggggtcagaagtgtcaacttcatcacactggtctttaaaataaaaagaaaaatatcgaccattttctgaatatatcaatgcaattatgagccaaattcctatctgctactaaacccatgctatagttaataaaaggaagaagccaaaattcttcaatgagagtgtttttcccagagatgaagaataatacccgtctgcctacaggacaatgattatatgttcatcatttagcatagcaggtctaagtaaacatttccatcagatttcattgttatgaaaaacaatctactccactacacagtatattaagcaccaatcaatgaaaaccaagggaacagattattaacactttttcagtacaaaaagcaatccaggctgcttgccactatcacatactgcttttaa

SEQ ID NO: 890031 - DNA, 685 bp, Homo sapiens
ccctgatatgaagaaagatttggaaagataaaacacttaggtatattttgttccatctctgaggccgagttactcaaaatgcgcttaaatattttattatataaggtgaagatatacagcttgtctctgatagttacataactgagcagctgcttctagcgttgctattctgcctttacctatgtacctagaactaattagaaagaacagtttaaagtgtctccttagtgtcctcgattggatcttcacatacttggtctttgtttttctcccctagccaggggtcagaagtgtcaacttcatcacactggtctttaaaataaaaagaaaaatatcgaccattttctgaatatatcaatgcaattatgagccaaattcctatctgctactaaacccatgctatagytaataaaaggaagaagccaaaattcttcaatgagagtgtttttcccagagatgaagaataatacccgtctgcctacaggacaatgattatatgttcatcatttagcatagcaggtctaagtaaacatttccatcagatttcattgttatgaaaaacaatctactccactacacagtatattaagcaccaatcaatgaaaaccaagggaacagattattaacactttttcagtacaaaaagcaatccaggctgcttgccactatcacatactgcttttaa

SEQ ID NO: 890032 - DNA, 685 bp, Homo sapiens
ccctgatatgaagaaagatttggaaagataaaacacttaggtatattttgttccatctctgaggccgagttactcaaaatgcgcttaaatattttattatataaggtgaagatatacagcttgtctctgatagttacataactgagcagctgcttctagcgttgctattctgcctttacctatgtacctagaactaattagaaagaacagtttaaagtgtctccttagtgtcctcgattggatcttcacatacttggtctttgtttttctcccctagccaggggtcagaagtgtcaacttcatcacactggtctttaaaataaaaagaaaaatatcgaccattttctgaatatatcaatgcaattatgagccaaattcctatctgctactaaacccatgctatagttaataaaaggaagaagccaaaattcttcaatgagagtgtttttcccagagatgaagaataatacccgtctgcctacaggayaatgattatatgttcatcatttagcatagcaggtctaagtaaacatttccatcagatttcattgttatgaaaaacaatctactccactacacagtatattaagcaccaatcaatgaaaaccaagggaacagattattaacactttttcagtacaaaaagcaatccaggctgcttgccactatcacatactgcttttaa

SEQ ID NO: 890033 - DNA, 659 bp, Homo sapiens
caggctccactccttcctccagcttgatgacttcctattagctttataaaagcaaggtctattatcatttacactacagcctaagtgccttccaaatttagcttggcccaatagcccagaaataattaagggaaggcaagactggggttgggttatctcagcttacagttataattttctcactgatataacttttgcaaagatggtttcaaccccttttatcataggaggayacagtgagaagacaacctctatgaaccagaaggtgaaccttcagctgacactgaatctgttgataccttgatctcggacttctcagtctctagacctgtgagaaataaatttctgttgtttataagccacctagactatggtattttgctgtaacacccacacagactaagatgcagcacctcccatcaggaagaggtggagtctatttctctaccctttgaatttggtcccggccatgtgactagtttgaaccaacatagtataaggaagggatggtgtgccaggtctgagcccaggcctccagagaacttgcatattttttctctcttttgaaaccctgcctttgccatgagaacaagtctaggctagcttgctggaagatgagaggccatgagaagcagcaataaagtcatcccagccaagat

SEQ ID NO: 890034 - DNA, 642 bp, Homo sapiens
ataggcatgggcaaagacctcatgaataaaacaccaaaagcaattgcaacaaaagccaaaattgataaatgggatccaattaaaattatgagcttgctcaccaaaagaaactatcaacagagcgaacaggcaacctacagaatgggagaaaatttttgcaatctatccatctgacaaagggctaaaatccagaatctacaaggaacttaaacaaatttatgagaaagaaacaaacaacttcatcacaaagcaggcaaatgatatgaacagacacttctcaaaagaaaacatttatgyggccaacaaacatatgaaaaacagcttatcatctttggtcattagagaaatgaaaatccaaaccataatgagataccatctcactccagctagcatggcaatcattagagtgtggaaacaagagatgctggcaaggatgcagagaaatagggacacttttacacggttggtgggagtgtaaatgagttcaaccattgtggaagacagtgtggtgattccccaaggatctagaaccagaaataccatttgacccagcaatcccattactgggtatatacccaaaggattataactcattctactacaaagactcatccacccatgtctttattgaggcactattca

SEQ ID NO: 890035 - DNA, 542 bp, Homo sapiens
gggccgaggcgggtgggtcacttcaggtcagaagttcgagaccagccctgaccaacatggtgaaaccaggtctctactaaaaaatacaaaaattagctgggtgtggtggcacatgtctgtaatcccagctactcgggaggctgaggcaggataattgcatgaacccaggaggcrgaggctgcagcagtgagctgagaatgcaccactgcgttccagcctgggcaacagagtgagactctgtctcaaaaaataataataataaataaataaaatttttaaaaaaagtgagagagaaaataaatgtaaatgtaaactgggcaaattattgattgataggtaacctgcaagttattttcttaagggaatattattatatttatgttgttatgtatccagtaaatgacacagttttctttctttattccacgtataaagagaaagcaagcagagatttgcttggcatcccatcttaagtgaaagtagactttgctatgaagctctgatttctcacagctgtaccatattctactaaaattgaagta

SEQ ID NO: 890036 - DNA, 542 bp, Homo sapiens
gggccgaggcgggtgggtcacttcaggtcagaagttcgagaccagccctgaccaacatggtgaaaccaggtctctactaaaaaatacaaaaattagctgggtgtggtggcacatgtctgtaatcccagctactcgggaggctgaggcaggataattgcatgaacccaggaggcggaggctgcagcagtgagctgagaatgcaccactgcgttccagcctgggcaacagagtgagactctgtctcaaaaaataataataataaataaataaaatttttaaaaaaagtgagagagaaaataaatgtaaatgtaaactgggcaaattattgmttgataggtaacctgcaagttattttcttaagggaatattattatatttatgttgttatgtatccagtaaatgacacagttttctttctttattccacgtataaagagaaagcaagcagagatttgcttggcatcccatcttaagtgaaagtagactttgctatgaagctctgatttctcacagctgtaccatattctactaaaattgaagta

SEQ ID NO: 890037 - DNA, 629 bp, Homo sapiens
ttatgtataaatatttaaagaaataaagcatacttcacaaaagatgagtatgtagactataataaatgactatttttaatacaaacaatgaaaacttctagaaatgaaagtataattgtagaaatttcttaaattaatggacaagttaacagtggtttaggtgattagagaactgattaactggaagcagaacaggataaaatgcctagaattcaggaaagggcaagtggaggaaaagagaggagaggagaagagaagagataaaaatatgaaaaagaagtttataatttagaagatagtatgagaagagctaatatatgtataattggagccctagaagaaaggactaaagaaaatgaaggagggacaaatttaatgagataatggctgagaacttttagaattgatgaaatacatgagtccacatgctgaggaarcatattgtataccatttagggtttttttttttaaaaagcaactcatgattagatacatcagaataaagcgattcatgactagacactgcataataccaaagataaagatatatttaaagcattgataatgaaaagagagattacatagaaataaatgaaataaggcagattatgtattttttccagtttttt

SEQ ID NO: 890038 - DNA, 586 bp, Homo sapiens
attttcttttattctcaatgtatgacttttgctactgaacgtaaatgacatttattaaagcctattggagtacatgtgtaatagcacaataaagagaggtacaaagatcacagaatttggggagatgttggccaaataatacatatttgcagttagatgggaggaatgaatttaagacatctattggccaggcacggtggctcacaccttaatcccagcactttgggaggccaaggcgggtggattacaaggtcaggagatcaagaccatcctggccaacatagtgaaaccccgtctctactaaaaatacaaaaaattagctgggcrtggtggcgggcacctgtagtcccagctactcgggaggctgaggcaggagaatggtgtgaacccgggaggtggagcttgcagtgagctgagatcgcaccactgcactccaccctgggcgacagactgagactccgtctcaaaaaaaaaaaaaaaaaaaaaagacatctattgtacagcatggtattgatagttaacaataaaatgtcttcttgtaaaatccaaaatgtggctgttaaatattctcaccataaaaatgata

SEQ ID NO: 890039 - DNA, 643 bp, Homo sapiens
gcctagctctcctgtattttttacaattagcccttatatagtgtttactatgtgccaagaactgtactaagtgcttcacatatttaacttattcaattattacagcaatcttgttagggtagcattattattatccctcttttatatatgaggaaactgaggtacagagggatcaagtaaatgcccaaggcctcatagctgaaaccctaagcgaacattttcagagttcatgaggtacttcaggaaaggggtggaggaatccaaatccgttgcattccagatcttcctccctagcccctgcatccagagcagaaaacccctacctagaaagttttctaggtagaagaggttttactggtaagaaaacaaaattaaaagtttgaaaatatgtcattaggcccattccacctgaattatttgaccytgtaaggagggtgatagactgaggctcagttcatataccatcagtggtagtcaagctagagaagatttagtagcattataaggagaaagcattacacttaatggttggaagaagttttcaaaactttgtaaagagtagaatccttttctgaaaaaagaatattgcatggaagcctaatagataacagaagacaaaatcattaacttattaatataaata

SEQ ID NO: 890040 - DNA, 705 bp, Homo sapiens
gaaggactttagtctctaaaatttaggaccaagagaaggggttggcctaggacttctgggaacatttttctccttgaaataaggggcatgtgaggagtaagcgcttcttggcttctactcctttggctcctctgagtatctgatgctcagagctgggttaaccattttttcccatgaagagagatcatagatgcwctgaggatggtagagtagaagggtgggaagaccctgagtccttgatgatatccttgatttttgacaccaactctgaaactgcccgacgaaacttctgattaagcgagcaaaaagtgtccttaagttttaagccttgttcagttctgtgttccccagttgcagctaaaagtatatcaagtgatataaattatctttatttttcatgtaagtataatctgcattgactttttctaaatcctttaaagaaatggcaaacaactaatgtattctggacattgccttaataatatctttatggttgaattgtttaaaacattttaatgtttaaataatgttatgttttaaagaaaattttagtataacatggatatgtaaattcctgtgctaaaaatcaagaaaataatattatatatgatagaaaaacatgatatatcaaaaaatagaaaaaataaactgaaaatcttttgtatcagaacaagattttaaaaacttataagtaactctttgagg

SEQ ID NO: 890041 - DNA, 614 bp, Homo sapiens
ttctattgacttgtaagtccattgtttctttcctccatcattccatttggttcttaagcttacccagttaattttatatttcagctgttttgtttttcagttctagaatttctatttgggctttaaaaaaataatctcttttcttctgctgaaatttcccactttttattagctgtgagcatattttcctttttactactgagcatcattttaatatacagttttaaataattgttggccaacatctgggtcatcctagcttgttttctattaatctttctcctatgaattggtcatgttttcctgcttctttgaatgttgtataattttttttttgagatggagtctcgctgtgttgcccaggctggagtgcaataatgcaatctcagctcactgcaacctccgcctcccaggttcaaatgattctcccgcctcagcctcctgartagctgggattacaggaacccaccatcatgcccagctaatttttgtatttttgtagagatgaggtttcactgtgttgggcaggttggtcttgaagtcctgacctcaggtgatctgcctgccttagccctctaaagtgctgggattacaggtgtgaggcactgcatccg

SEQ ID NO: 890042 - DNA, 642 bp, Homo sapiens
gctaccaccctagttcacatcataattatctcttgcttgaatgactgcaatagcctctcagtcttcttcctctaccactgctcaccaacctgagccttctatttcccataaagccatcagagcagtcagttcgcccagctttgttgatagttttgaaacttgtccaaatcttctccaccttgggaaatttgcaatccttctttctccctggaaagctctaacccaggtctttgcatggcttgttctttcactaagttcagcattcccatcaagggtctgctcatcatcctctgctagtcttctgatttattattattcaaagcctctgtcactacctggaattttactgtatgytgatttgttcatttttgattgcctagtttcccaacaaaatataagatacattcagatggggattttatcctacctattgcttcatcttcaaagcatatagtttgtgatcaagaagtacttatttaatgaataacagagtgaatgctctctgtgtgtgtgtgtgtgtgtgtgtgtgtgtgtgtatgtgtgcaggaatacagaaaatatcgaactatagaaagaactatatcatgagtggaaagttctggcaggcactaggggatgaaatgctcaggcagacattaggcc

SEQ ID NO: 890043 - DNA, 642 bp, Homo sapiens
gctaccaccctagttcacatcataattatctcttgcttgaatgactgcaatagcctctcagtcttcttcctctaccactgctcaccaacctgagccttctatttcccataaagccatcagagcagtcagttcgcccagctttgttgatagttttgaaacttgtccaaatcttctccaccttgggaaatttgcaatccttctttctccctggaaagctctaacccaggtctttgcatggcttgttctttcactaagttcagcattcccatcaagggtctgctcatcatcctctgctagtcttctgatttattattattcaaagcctctgtcactacctggaattttactgtatgctgatttgttcatttttgattgcctagtttcccaacaaaatataagatacattcagatggggattttatcctacctattgcttcatcttcaaagcatatagtttgtgatcaagaagtacttatttaatgaataacagagtgaatgctctctstgtgtgtgtgtgtgtgtgtgtgtgtgtgtgtatgtgtgcaggaatacagaaaatatcgaactatagaaagaactatatcatgagtggaaagttctggcaggcactaggggatgaaatgctcaggcagacattaggcc

SEQ ID NO: 890044 - DNA, 624 bp, Homo sapiens
tcttgggtttacccacaatggagatctttgcaaaaatgtatctttttgccttgtctgtgaactactgataatccagtgatttgttctctttaagactaaatgggtcgaaagcaagttcaatgctaatttaatgcacttattttccagccaccaagcaaattattccttcccaagtcatgttcaktggagcaggtgttatccgtttcaaaatgtaggcctaactggtgcatcttttaaatgggtttcaggaaggggattcacatgagcctttttttggggtgggagggggggaggtggacaccagtctgaattagttgctattttgaaaattataatattttagtttaatataatgagcttgatacccactgaggtagcttgtctccaagataacggccatcaattcctttcttctctgtatgcacaggcccttgaaaggtaaggtctgtttctcttgctacttgaatctgagctagcctatgtctacattgaccaacagaatgtagagaaatggagaatatggagaaagtggtgctgtgtgactctgaggctaggtcatatgaaacctttcagcctccacctgactcttttggaatgctcactttcggtgaagccagctgccat

SEQ ID NO: 890045 - DNA, 641 bp, Homo sapiens
actatttttaaaatgggcaaaagttatgaacagacacttctcaaaagaaaacatacaagtagccaacaaacatatgaaaaaatgctcaagatcactaattattatagaaatgcaaatcaaggctgggcgtggtggctcacgcctgtaatcccagctctttgggaagccgaggtgggcggatcacgagatcaggaaattgagaccatcctggctaacacggtgaaaccccatctctgctaaaaatacaaaagttagccagttgtggtggcgggcgcctgtggtcccagctactcaggaggctgaagcagaagaatggcgtgaacccgggaggcggagcttgcagtgagccaaaattgcaccattgtactccagcctgggcaacagagcgagactccrtctcaaaaaaacaaacaaacaaaaaaggaaatggcaatcaaaaccacaatgagacaccatctcataccagtcagaatggctattatcaaaaagtcaaaaaataacagatgctgatgagattgctgagaaaaaaaaatgcttctatattgttggtgggaatgtaaattagttcagccattgtggaaagcagtctggtaatttctcaaaaaacttaaaagagagctatcatttgacccagcaattcc

SEQ ID NO: 890046 - DNA, 575 bp, Homo sapiens
actcatcaggatattatccaggagaacttcccccaacctagcaagataggccaacattcaaattcaggaaatacagaaaacaccacaaagatactcctcgagaagaggaaccccaagtttcaccaaggttgaaatgaaggaaaaaatgttaagggcagccagagagaaaggtcaagttacccacaaagggaagcccatcagactaacagtggatctctctgcagaaaccctacaagtcagaagagagtgaaggcyaatattcaacattcttaaagaaaagaattttcaacacagaatttcatatccagtggaactaagcttcataagtgaaggagaaataaaatcattacagagaagaaaataccgagagattatgccaccaccaggcctgccttacaagagctcctaaaggaagcactaaatatggaaaggaaaaagcagccactgcaaaaacacaccaaaatataaagaccaatggcactaagaagaaactgcatcaactaatgtacaaaataaccagctagcatcatgatgacagcattaaattcacacatcacaatattaactttaaatgt

SEQ ID NO: 890047 - DNA, 603 bp, Homo sapiens
aagagctgcccaagaccatgggaacccacctcttgcatcagtgtgacctggatgtgagacatggagtcaaaggagattattttggagctttaagatttgactgccctgctggatttcagacttgcatggtgcctgtagcccctttgtgttggccaatgtctcccatttggaatggctgtatttacctaatgcctgtgtccccattgtttctaggaagtaactaacttgcttttgattttacaggctcataagcagaagggacttgccttgtctcagataagactatgtggacttctgagttagtgctgaaatgagytaagactttgggggactgttggggaggcatagttggttttgaaatatcaggacatgagatttgggaggggccagaggttgaatgatatggtttggctgtgttaccacccaaatctcatcttgaattcccacatatcatgggagggacccagtgggaggtaattgaatcatggggtcaggttttttccatgctgttctcatgatagtgaataagtctcatgaggtctgatggccttatacagtggaatttccctgcacaagctctctctctctctgcctgctgccatc

SEQ ID NO: 890048 - DNA, 612 bp, Homo sapiens
gcatgactttgggtaagcaaagctctgctaataaggctctcaggctttcatttctaaaatagggatcatatctgctactcctcagaaggatgtagattggatgaagcaacataagggagagcattttgtaagacactatttctctaccttttttcccttgggctcccttctctcaaaacacatagaaattcattattctcttctgtgatataattctcccacagatgggtcccatttgatatcccaaacatcaagatgctgtaatctaacacacacgaaggatgcaagccgtgtggagatgctacccattaacacargacttaggagaaggcaataaggcaattacgaaaaaaatccccaatctcaattctgtatgagtgttaggtgttctcacaaaggaaagggaaattatttcattaggcagaatccaaatactatacaaaacagaaaggacatggtttgttgacaaaagtgaaactattctgtgaaacaaaggcagcaacagggagatagaacaggattttccagtgagaaataaaagttgttatcaaggtaacaaggataggcgtggtgctttgcctcctttttgctccagttcttccaaaccaggga

SEQ ID NO: 890049 - DNA, 612 bp, Homo sapiens
gcatgactttgggtaagcaaagctctgctaataaggctctcaggctttcatttctaaaatagggatcatatctgctactcctcagaaggatgtagattggatgaagcaacataagggagagcattttgtaagacactatttctctaccttttttcccttgggctcccttctctcaaaacacatagaaattcattattctcttctgtgatataattctcccacagatgggtcccatttgatatcccaaacatcaagatgctgtaatctaacacacacgaaggatgcaagccgtgtggagatgctacccattaacacaggacttaggagaaggcaataaggcaattacgaaaaaaatccccaatctcaattctgtatgagtgttaggtgttctcacaaaggaaagggaaattatttcattargcagaatccaaatactatacaaaacagaaaggacatggtttgttgacaaaagtgaaactattctgtgaaacaaaggcagcaacagggagatagaacaggattttccagtgagaaataaaagttgttatcaaggtaacaaggataggcgtggtgctttgcctcctttttgctccagttcttccaaaccaggga

SEQ ID NO: 890050 - DNA, 604 bp, Homo sapiens
tagatctttatagcagtgcaagaatggactaatacaaaaaaacttttattaaggagtggagcattgctataaagatacctgaaaatgtggaagcagctttgcaactgggtaatagccagaggttgaaagtgtgtagagggctcagaagaagacaggaggatgagggaaaatttggaactttctagagacttgttaaatagttgtgaccaaaatgttgatagtgatatggacaacgaaatccaggctgaggaggtctcagatgaaaatgaggaacttactaggaactggagtaaaggtcactcttgctatgttttagcaaagagcttggttggactgtgcccctgccctggggagctgtrgaactttgaacttgagagagatgatttagggtatctggtggaaacaatttctaagcagcaaagtattcaagatgtgacctggctgcttctaaaaacctatgcccataagtatgagcaaagaaatgacctgaagctggaacttatatttaaaagagaaacagagcataaaagtttggaaaatttgcaggctggccatgtgattgaaaaaaaaaagcccattttcagggtaggaattcaagcaggtt

SEQ ID NO: 890051 - DNA, 616 bp, Homo sapiens
acctggctacacatatgcagaaaacagaaactggaccccttccttacaccttatacaaaaattaactcaagatggatcaaaggcttacatgtaaaacccaaaccataaaaaccctagaagaaacctatgcaataccattcaggacataggcatgggcaaagacttcatgactaaaacaccaaaagcaatkgcaacaaaagccaaaattgacaaatgggatctaattagactaaaaagcttctgcacagcaaaagaaactatcatcagagtgaacaggcaacctacagaatgggagaaaatttttgcaatctacccatctgacaaagggctaacatccagaatctacaaggaatttaaatttataggaaaaaaacaacctcatcaaaaagtgggcaaaggatatgaacaaacacttctcaaaagaagacatttatgtggccaggaaacatatgaaaaaaaagctcatcatcactggtcattagagaaatgcaaatcaaaacaacaagataccatctcacaccagttagaatgacgatcattaaaaggtcaggaaacaacagatgctggaaaggatgtggaaaaataggaacacttttaccctgttggtgggagtgta

SEQ ID NO: 890052 - DNA, 543 bp, Homo sapiens
gggctaaatgccccaattaaaaaacaaagactagcaaattggataaggagccaatacccatcagtgtactgtattcaggagctccatctcatgtgcaaagacacacataggttataaataaagaaatgggggactatttaccaagcaaaaawaaaaaaaaataataagcagggattgcattcctagtatctgataaaacagacttcaaaccaacaaagatcaaaagagacaaagaagggcattacataatggtaaaaagatcaatgcaacaaggagcgctaactatcctaagtatatatgcacccaatacaggagaacccagattcataaagcaagttcttagagacctacaaagagacttagactcccacacaataataatagaagactttaacaccccactgtcaatattagacagatcaatgagacagaaaattaacaaggatatttaggacttgaactcagctctggaccaagcggaactaatagacatctacagaactctccaccccaaatcaacagaatatatattcttctcagaac

SEQ ID NO: 890053 - DNA, 564 bp, Homo sapiens
ctgcccaaagtaatttatagattcaatgctattcacatcaagctaccactgatgttcttcacagaacaagaaaaaactattttaaattacatatggaaacaaaaaagagcccatatagccaagacaacctaaaaaaaaagaacaaagctgtagacatcacactacctgactttaaactatactacaaggctacagtaaccaaaacagcatggcactaataccaaaacacatatatagaccaatggaacagaacagagagctcaraaataatgccacacatctacaactatctgatcttcaataaatgtgacaaaaacaaacaatgggaagagtatttcctatttaataaatggtgtttggaaaactggttagccatacacagaaaactgaaaccggactccttccttacaccttacacaaaaattaactcaagttatattaaagacttaaatataagacctaaaaccataaaatccctagaagaaaacctaggccataccattcaggacatagacatgggcaaagacttcatgactaaaacatcaaaaacaattttgacaaaag

SEQ ID NO: 890054 - DNA, 564 bp, Homo sapiens
ctgcccaaagtaatttatagattcaatgctattcacatcaagctaccactgatgttcttcacagaacaagaaaaaactattttaaattacatatggaaacaaaaaagagcccatatagccaagacaacctaaaaaaaaagaacaaagctgtagacatcacactacctgactttaaactatactacaaggctacagtaaccaaaacagcatggcactaataccaaaacacatatatagaccaatggaacagaacagagagctcaaaaataatgccacacatctacaactatctgatcttcrataaatgtgacaaaaacaaacaatgggaagagtatttcctatttaataaatggtgtttggaaaactggttagccatacacagaaaactgaaaccggactccttccttacaccttacacaaaaattaactcaagttatattaaagacttaaatataagacctaaaaccataaaatccctagaagaaaacctaggccataccattcaggacatagacatgggcaaagacttcatgactaaaacatcaaaaacaattttgacaaaag

SEQ ID NO: 890055 - DNA, 551 bp, Homo sapiens
ccaaatgtccatcaataatagactggattaagaaaatgtggcacatatacaccatggaatactatgcagccataacaaaggatgagaatgagttcatgtcctttgtagggatatggatgaagctggaaaccaccattctcagcaaactatcgcaaggacagaaaaccaaacaccatatgttctcactcataggtgggaattgaacaatgagaacacttggacacagggtggggaacatcacacaccggggcctgtcatgaggttsggggaggggggagagatagcattaggagatatatctaatgtaaatgatgagttaatgggtacaggaaaccaacatggcacatgtatacatatgtaacaaatctgcacattgtgcacatgtaccctataacttaaagtataataaaaataaataaataaacaaataaataaaaataaaaaggtaaaaagaaaaaaaaaaaaggggagtttccttgcacaagctctcttctcttgtcctctgccatgtgagacatgcctttcaccttccactgtgattgtgaggcctc

SEQ ID NO: 890056 - DNA, 679 bp, Homo sapiens
atgcctttgagtggccttagagattctgaacattgacacactgatacctacaccagacaaactgagtgagcatggtctgagagtgggctctggaatccttatatatatatatgagtgtgtatatatatatgtgtgtatatatttttttatacattaagttgtagggtacatgtgcacaacgtgcaggtttgttacacaggtatacatgtgccatgktggtttgctgcacccatcaacttatcatttacattaggtatttctcctaatgctatccctccaccaggccccaaccccgtgataagccccagtgtgtgatgttccccgccctgtgtccaagtgttctcattgttcaatccccacctatgagggagaacatgcgctatttggttttctgaccttgtgatagtttgctcagaatgatggtttacagcttcatccatgtccctgcaaaggacatgaactcatccttttttatggacgcatagtgtttcatggtgtatatgtgccacattttcttaatccaggctatcactgatggacatgtgggttggttccaagtctttgctattgtgaatagtgctgcaataaacatatatgtgcaagtgtctttatagtagcatgatttataatactttgggtatatacccagtaatgggattgctgagtcaaatactatctc

SEQ ID NO: 890057 - DNA, 652 bp, Homo sapiens
tattttttcccattctgtgggttgtctcttcactgttgactgtttcctttgctgtgcagaagcgttttaacttgttgtaatcctatttgcccatttttgtttgggttgcctgtgcttgtgcaatattgctcaagaaagttttgcccagaycaatatcttggagattttccccgatgttttcttgtaatactttcgtagcttgaggtcttagatttaagtctttaattgatttttatttgatttgtatatatggtgagagataggaatctagtttcattcttttgcacatgaacatccagttttcccagcattgtttattaaagagattgtcctttctccaatatatatttttggcaccttggtcaaaaataagttccctctggatgtatggatttatctctgggttcgctattctgttccactgattatgtgtctgtttttattccagtaccatgctgttttggttactgtagctctatagtatagtttgaagtcagataatgtgattcctccatttttgttttttggcttaggatagctttagccattctgggtcttttgtggttccatgtaaattttaggattctttttctatttctgtgaaggatgtcattggtattttgatagggattgcattaaatctaatagcttt

SEQ ID NO: 890058 - DNA, 655 bp, Homo sapiens
gccagtcagcaacttgttgttgtcaagagattttgatcacttgcagccttctcttttattttactggttaaaaaaaaaaaatcacttggtctatggagcccctggtcccacctcttgcctttcagaatccagtttacctcaactgttgtccctggttattttctggcagtgttagaagagaataagcttttgaactccaagcagtaactggccccttttctcccaccaaaattgcctttctatcctagttgataatggtttaagtagtgctgtttcctcatggttgttgatcagttctttgttaccaactggaaaaaattaagatctctccagtttggaattgtttacgrtaaaaaagtcaattgccagtcacaaaagttgcgcatagggcacatttcctgaggaggggacccaagtccagtgctcttttattgcatttggagttgcatccattaagttgatttggcaggtggcagaggggctcgcagggcttctcagggccccagtgccagcctcagcagcaatgatgggatacacagaacaccaagaggaacctcaaccaggctgccttgttgggttccagggtaccagggtaccagggaaaaggggaggaccataaggccctcttttcctctatcactacaacatgtcctgt

SEQ ID NO: 890059 - DNA, 607 bp, Homo sapiens
ggcaatcatagatttacagctcagcaagattaaacaatttattgttatttatgacatccaagctggatcttctgtattatattccacattagcatctatcactttacatttgggagatcctgtccaaaaaaagattatgcctcctaaccaaacattcagcagggatgcaggaacaggccccctgaacaaacatcctgccaaagtactttaaagcaccgtgagctcccacagctgtgcattttcagacgactcagcagattagcgtggagtctcttagcccctgcttggtctgttcctttcagtaatctctcacatggcccagtccattcgatttgaaaatcctcatgaaatgagcagattaagatctggcttcagtagagggccatggggtgggcatgraggggagagggtttgctcttaacacagcctgagcctcagaaaggtttcagatggaaaagcagggcactgactcagctcacgcttaacaggaaataatgcacagaccacaccaaaaaagtcctttatgttgtgtgaaagtctatgccggagcagctgctgccacctcatgtactgtgatagagtgtgcatgtgtgtgtttgtgtgtgca

SEQ ID NO: 890060 - DNA, 607 bp, Homo sapiens
atctggtcctttatagcaaaagtgaacccagttttagaacattcactttacaaattaagatacagtggatgctgccttaactgacctccacttaactgatttacaatcagcactttcttgtacccctgtacaacttattgactgatgtccactgcaaatggaaagcctttgagctrcttttaatgcctgtacatttctccttccatcacagaaactgtacagtttctaagaggaagctgtgttcattcctaaatatgtttacgccatttgttcttgttcttgtagttatgcaatttaattaaatatgatgttgagaggctgagatgggcggatcactaggtcaggagatcgaaaccatcctggctaactcggtgaaaccccgtctctactgaaaatacaaaaaaaatagctgtgcgtggtggcgggtgcctgtactcccagctactggggaggctgaggcaggagaatggcaagaacccgggaggcggagcttgcagtgagcagacatcgcactactgcactccagcctgggtgacagagcgagactccgtctcaaaataaataaataaataaataaatattacgtaaactgagaaaatgagtataa

SEQ ID NO: 890061 - DNA, 607 bp, Homo sapiens
atctggtcctttatagcaaaagtgaacccagttttagaacattcactttacaaattaagatacagtggatgctgccttaactgacctccacttaactgatttacaatcagcactttcttgtacccctgtacaacttattgactgatgtccactgcaaatggaaagcctttgagctacttttaatgcctgtacatttctccttccatcacagaaaytgtacagtttctaagaggaagctgtgttcattcctaaatatgtttacgccatttgttcttgttcttgtagttatgcaatttaattaaatatgatgttgagaggctgagatgggcggatcactaggtcaggagatcgaaaccatcctggctaactcggtgaaaccccgtctctactgaaaatacaaaaaaaatagctgtgcgtggtggcgggtgcctgtactcccagctactggggaggctgaggcaggagaatggcaagaacccgggaggcggagcttgcagtgagcagacatcgcactactgcactccagcctgggtgacagagcgagactccgtctcaaaataaataaataaataaataaatattacgtaaactgagaaaatgagtataa

SEQ ID NO: 890062 - DNA, 607 bp, Homo sapiens
atctggtcctttatagcaaaagtgaacccagttttagaacattcactttacaaattaagatacagtggatgctgccttaactgacctccacttaactgatttacaatcagcactttcttgtacccctgtacaacttattgactgatgtccactgcaaatggaaagcctttgagctacttttaatgcctgtacatttctccttccatcacagaaactgtacagtttctaagaggaagctgtgttcattcctaaatatgtttacgccatttgttcttgttcttgtagttatgcaatttaattaaatatgatgttgagaggctgagatgggcggatcactaggtcaggagatcgaaaccatcctggctaactyggtgaaaccccgtctctactgaaaatacaaaaaaaatagctgtgcgtggtggcgggtgcctgtactcccagctactggggaggctgaggcaggagaatggcaagaacccgggaggcggagcttgcagtgagcagacatcgcactactgcactccagcctgggtgacagagcgagactccgtctcaaaataaataaataaataaataaatattacgtaaactgagaaaatgagtataa

SEQ ID NO: 890063 - DNA, 691 bp, Homo sapiens
catgcattccaggaataaatctcatttgatcatcatgtataatcttttgatatattgttaaattcaatttgtgagtatttgttgaacgtctttgcatcaatattcataaaggatataaatctatattcttctctttttctgtaacatctttgcctttggtgccagtgttatgctgtatttttagctctaaaatttctgttggtttttaaaataatttctatctctttattgatattctyattttgtttatatatcattttcctgagttcttttagttctttatccatactttcatttagctttatggccatatttaagacagatgttttaaagtctttgtctagtaaatccaatatgtgtttcatcagggatcattcttggagatttattttggttctttgaataagttatggttttcttttttttttgtatgccttgtgatctttttttgagaattgaaaacccaaccacttctcccaatatttgcaaactggcagagaagaccttcattcattagcagggcacattctgagccttggtatctgcctggagtaaaggcttaaattcttttctgggcatgtgtcctatctgggctggtgtgtgtgtgtgcctttttttcaatgtccgttagatattccattgtattcttctgcttctaatttcttagaaattaggcatccataggtctgca

SEQ ID NO: 890064 - DNA, 691 bp, Homo sapiens
catgcattccaggaataaatctcatttgatcatcatgtataatcttttgatatattgttaaattcaatttgtgagtatttgttgaacgtctttgcatcaatattcataaaggatataaatctatattcttctctttttctgtaacatctttgcctttggtgccagtgttatgctgtatttttagctctaaaatttctgttggtttttaaaataatttctatctctttattgatattcttattttrtttatatatcattttcctgagttcttttagttctttatccatactttcatttagctttatggccatatttaagacagatgttttaaagtctttgtctagtaaatccaatatgtgtttcatcagggatcattcttggagatttattttggttctttgaataagttatggttttcttttttttttgtatgccttgtgatctttttttgagaattgaaaacccaaccacttctcccaatatttgcaaactggcagagaagaccttcattcattagcagggcacattctgagccttggtatctgcctggagtaaaggcttaaattcttttctgggcatgtgtcctatctgggctggtgtgtgtgtgtgcctttttttcaatgtccgttagatattccattgtattcttctgcttctaatttcttagaaattaggcatccataggtctgca

SEQ ID NO: 890065 - DNA, 691 bp, Homo sapiens
catgcattccaggaataaatctcatttgatcatcatgtataatcttttgatatattgttaaattcaatttgtgagtatttgttgaacgtctttgcatcaatattcataaaggatataaatctatattcttctctttttctgtaacatctttgcctttggtgccagtgttatgctgtatttttagctctaaaatttctgttggtttttaaaataatttctatctctttattgatattcttattttgtttatatatcattttcctgagttcttttagttctttatccatactttcatttagctttatggccatatttaagacagatgttttaaagtctttgtctagtaaatccaatatgtgtttcatcagggatcattcttggaratttattttggttctttgaataagttatggttttcttttttttttgtatgccttgtgatctttttttgagaattgaaaacccaaccacttctcccaatatttgcaaactggcagagaagaccttcattcattagcagggcacattctgagccttggtatctgcctggagtaaaggcttaaattcttttctgggcatgtgtcctatctgggctggtgtgtgtgtgtgcctttttttcaatgtccgttagatattccattgtattcttctgcttctaatttcttagaaattaggcatccataggtctgca

SEQ ID NO: 890066 - DNA, 680 bp, Homo sapiens
  misc_feature 1, 2, 3, 4, 5, 6, 7, 8, 9, 10, 11, 12, 13, 14, 15: n = A,T,C or G
nnnnnnnnnnnnnnnagtcagaagtagcttcacttgatttcagcttgtaaagccataggagggaggctgctgaggatcacagtggcaaaaagctaacatcaaaaatctcattaaaatgctgaagtgttgtggatcacaaacctagctttattggatcaagcattcgtgagagttcttctacttgctttgttatgctttctatcagacagggctcattctctgtcttttttttaacatattcatttctttcctttggtstgtttagattattatcacatcttatgttttaaaactagcaaaatatgtgtaagtcatgaagacagcgtaagaaataataaaatgaacactgatgtacacattacctgcctaagaatcaaaaactacccatatttttagagtccttaacactgtcctgttaattagtcccatttcttgtctttataattttgccaaaataaatgcattagtaaaggacattgaacattattgttttacatgtttttcagtttaaacaaatgggattacactgaatatatttttctgaaattgctttttggttcaatattaaatttgtaagattcattcttatgatattcttatctgtactttctgtgcattgatttagagtattccttcacaggataatactataatgagcattccattttattagattgggg

SEQ ID NO: 890067 - DNA, 542 bp, Homo sapiens
atcaataatacaagaaaaattaaaaacagtaatcttaagagtttacaaaagatttttcccacctcaaaaaatatttaagaatataaaatgtcataatttattttcaggactaaaataaatgactcaatttgtgttcattagtaataggcggttggtcatttaatgttatattctaaaatgctgatgcaatgtaaatgctcacattaaacataaattgcctttatcagaggcaaaccattcatttagcagataaccccaragtactgactattttacaatcccttggtaaaatatgttataaatattgaatctatttagaaaaaatacagtttcccatatcaattcaatctgaaaaaaagatgcttccttaatgaatcttaaagtataaaccatattaataagtagtgctaggtagctatttttacaacaaatagttatggaatgatattcactgcagctataattccattttcatccatttgagaggactacctaaaatgctggataaaaaatagtaaaaacattcttgtaatatatggctg

SEQ ID NO: 890068 - DNA, 654 bp, Homo sapiens
tttcattttaactgtggaccaaaaaccctgaccaaaaagagtgctgggatatgtgtgctgtcattttattcaccacaatgttaaatagaactgtgacatgctagactgattctggataaattgtcttttactggcttgataaaaggatgctctgaaggaaaaattgtgagacaaggaataactttcagaaaagtctgaataaagaagtttctctaattcttaatagagtcagtataattccaagggctaaacaaatgctacttttatgcaaatttattgcttcaaatgttattgtaataatgtggcacatcaattgatattttgaggatctggaaactttttttaatttgaaaaatgtatagctatatccttggtcatcccttatgcctcaaaatggtaaacattcatgggttccctggtaagtctctagtagtctgcattttattttctcygataatcataaccatggacttggtaagtgtcaggtgctatgcaaagctttttacctctattattgaaagacacattttattttcttagttgtatgttgagaaatttgagattcaggaagtctagggagcttgtcaaaagtcacaattagtactaaagctgggattcagttatgcctgaccaaaagtgttctgtcctttttaa

SEQ ID NO: 890069 - DNA, 620 bp, Homo sapiens; identical to SEQ ID NO: 888684

SEQ ID NO: 890070 - DNA, 606 bp, Homo sapiens
cattttgctgtgaacctaaaactgttctaaaaataaagtttattttatgctttaaaaaggcagtgcaaagtatcaatgcaggaaactggctcatgaagttctttgttctgggagctgcttctgcctatctttcatcaatctcattgacactttctatttttgtttctggcaataaacacctagttcttcagagtctgcatccatctgtgccatcttttggacaaggaagtctagaagcacagagtctctaaagttctggtggtcagatgtctcatgggtccctagtggtttgtggagatgggtcttcaaagcagtggtaaacatactctgttagcttctcttaccccagccaaatcattttcccatcaaaaccaatactcacactatgatctctgaaactaaattgcaaggggatacagcagcagaatgtrtactccatatttctaacaaaattacaattctgaatctctgttaggtcttctagccttctttcttcaaagtctagaactacatttagccccttagcatcccttatatttctgttttccctaggtcatgtccgttttttggtatttagagaacaatagcacttagaagccaacattt

SEQ ID NO: 890071 - DNA, 606 bp, Homo sapiens
cattttgctgtgaacctaaaactgttctaaaaataaagtttattttatgctttaaaaaggcagtgcaaagtatcaatgcaggaaactggctcatgaagttctttgttctgggagctgcttctgcctatctttcatcaatctcattgacactttctatttttgtttctggcaataaacacctagttcttcagagtctgcatccatctgtgccatcttttggacaaggaagtctagaagcacagagtctctaaagttctggtggtcagatgtctcatgggtccctagtggtttgtggagatgggtcttcaaagcagtggtaaacatactctgttagcttctcttaccccagccaaatcattttcccatcaaaaccaatactcacactatgatctctgaaactaaattgcaaggggatacagcagcagaatgtgtactccatatttctaacaaarttacaattctgaatctctgttaggtcttctagccttctttcttcaaagtctagaactacatttagccccttagcatcccttatatttctgttttccctaggtcatgtccgttttttggtatttagagaacaatagcacttagaagccaacattt

SEQ ID NO: 890072 - DNA, 620 bp, Homo sapiens
actatcagagtctgatgatacaaatttcaagcctgtccctaaatctagcatatatgctcgcttaaatactgtagttccatattcaacattaagatcttcaaccagacaatggtcattttggcagaatcacaaaaaagatggaaagcatttaagtaatgtctagaaactttttttgtatatactatgcatgcaattaaaatattgctaataattcatttgcttgaatagtcataaatgttaaatatgagatgtagctttttttatttaactccattctttaattggaaaaaatgaaatcattttcagcattaaaaatctttaataatggtataaatgaaagatcatgccagtggttgtaaagaattaattctaatttctagaataaatcagcaaaacacatttttgytatttagaaaatgtttcctaaaagaaaaaaaaagagcatttgtatgcaagcacatgcattcccttcttatgcaaatctcaaaaatgctttaattttcctgaacactcaattgacattatacattgcagcaaaagactcatacagcatcacgtttatatgaaagtaaagatatctgactggcagtacacacatgaaagccaaataaagaaattat

SEQ ID NO: 890073 - DNA, 671 bp, Homo sapiens
agacaaataatttctaccaagtatatagtgaagcagaagaactagtagtaagcatacataattaagaataacacagacagaaacaaagataaaagaccatgttaccttgagagctacaaaaaagtaccttcctttgtaacttactttttctcataggtccatgtgaggccaaactacacttttattaccaatagattcatcactgacatttaacgcagcttctccatgcctatgttacttgcaaaaccaagcaaaccccatatctttactatatatatatatttcatgtatatatatatacataaaatatatgtttcaatcatatatgtttggaaatttgatctatatatacaaatatattttaaaaatttatattttgtttaagtttttcttctgaatttmaaaaaagtagcaccataatttcttgcctttctcacattaaccacagaataaaattttgtttatcagatggcgggtttcttgaaagcaaggaactattccactggatcttttaaccccagcatttagtactaactgacataaagaaagtctccaataaatgttgacttggtaaatgaatgatcctgacatgcagagattctgtctgacagactctggacagcatgagagttctttataagtcctgatggtgacaatgggtattacaggga

SEQ ID NO: 890074 - DNA, 606 bp, Homo sapiens
ctttatcaaatatatgattttcaaatgttttctcatattctgtggattggctttttactctgctgataatgtcttttgatgcacaacatttgttaattttcatgaagtccaatttgtttatttttttcttttgttgtaccattggtgtcttatccgaaaaatcactgtcaagttcaatgctgtgaatctttgccacatgttttcttcttagagtgtattagtctgttttgcattgctatgaaggaatacctgacattggggtaatttataaagaaaggaattttatttagctcatggttctgcaggctatacaagcatggcatctgtatctgcttggcttctagtgaggcctcaggaggcttttattcatggcacaaggcagaggggagcaggkgtgtcacatggcaagagaggaagcgagagtgccaacaccattcaatggggaaaagatagtgttttaaacaaatatttccaggaaaactagatagccacatgcaaattaataaagttggaccccaacctaagaccactcaaaatggatcaaagatttaaaagtgagacataaaactgtaaacctatttaatgtaggctggatgtttgtcccct

SEQ ID NO: 890075 - DNA, 644 bp, Homo sapiens
gacctataatgagcttcaaaattgaatcagtaataaatagcctaccaataaaaaaaaaagcctaggaccagatggattcacagccaaattctaccagatgtacaaagaagagctggtaccattcctactgaaacttttccaaaaattgagggggaatggctcctccctaactcattgtatgargctgacatcatcctgatatcaaaacctggcagagacataacaaaagaggaaaattaaggccaatatccttgatgaacactgatacaaaaaccatcaacaaaatactagcaaaacaaatccagcagcacatcaaaaagctaattcaccatgatcaataaagctttttctctgggatgcaaggttagttcaacatatacaaatcaataaatgtgattcatcatataaacagtattaaggacaaaaaacacatgattatctcaatagatacagaaaatgctttcaataaaagtcaacatagcttatgttaaaaaaaaaaaccctcagtaagctggcattgaaggaatatacttcaaaataagaagagccaggtatgacaaatccacagccaacatcaactgaatgggcaaaagctggaagcattccccttgaaaactggcacaagccaaggatgccttctctca

SEQ ID NO: 890076 - DNA, 580 bp, Homo sapiens
gtggaattaatgcaatcagccctctcggttacaaagaagaccccttatagtcaacagctggcatttgaacacgttcgctgtttaacaataaggagtcatggcagtgttgtggatttaagaacaagatgtggaatagtgtgcagtcctacgtggaatttcttaaaaccccactgccaagagtaactcctttgaaatagaagagagacagtaaaataaagaacgagagatactgtttttagctcacttcccatctttgtgtgtgtgtgtgtgtgtgtgtgtgtgtgtgtgtgtgacattttgaggaaagtaattccagaattaaacctcacagtgaaagtgctttagttgacacycagcttcaggaaattagaaaaggacagaattcattttgccagcaagctcatcacattaattcataaaatccccatatcgaataaccccgtatcaggcactgtccctttggggaacatcacacaggaggtagtttataggaaaaaattctaagtttccagttcccatatatcagacatagccagaaagctgaggaagcaggggcttcttatgttgttatttttccgga

SEQ ID NO: 890077 - DNA, 631 bp, Homo sapiens
ctacaaaaaataaaaaagattagctgggtgtggtggcgtgtgcttgtggctccagctactcagaaggctgaggcaggaagatcacttgagctcaggattttaaagctgcagtgagtgatgatttcagtactgtactccagtggatggcagagtgagaccctgtctctgaaattaaataaaaatgaaaataaattttaaaaagcagatcaatatgagatgatcaaggtcctctgaatggcagaaggcagggccatgcttaccttggagctcctaggatattgactggtgcaaggtgggtgctcaaataatacctgataaatacgagaagagtggaggggaaagagggagggaagcagagaragagagagagagagacagtacaagacagaagggggagggaggtccctcaagtgtgtactctgaaacctacctgacttaatgacttgattgtactgaattatcgccttgaggaatcaaagaaatgaacaggaacttaaaaatattttttaaccctaattcagcctccatttacattttggacttacccaatacaaggatctttaaagttcaatttgtgaaaacacctggtttttagtatctactatcttccttcatttattctctggcatac

SEQ ID NO: 890078 - DNA, 633 bp, Homo sapiens
gagctcttgtctatttcctttctgtttctcattcgttccagataagggtcttctgggtgagttgggggtctcacgactagtactaacgtggcttgtgatccctgtgagccacaactattaccacgggacattcatgaggtcacatgttgcccccaagccagggcttttttccttctgcattacttgaacaaagtgctctgcacacactgccctagggaggaagcctactcctgaaggatactggcagtggttccttggaagaacccgcttttaagatgccacattgaataaggactggtctttgtgtgagagtgctggttccgcctctggagggttgacagagcggtggatgsgagcaggcatttgtcttcatgtggagactgatatagggcatgtccaggtgacatcatctagtgggaaaagctagtcggttacttgagttagccaggtcacaccagcatacattcattcattcattcattcattcattcattcattcaacacagtggctctccactgaagctgtacccatggagcacctggggagctttataaataaatagggatgcccagactctgccccagtcagaatcttctggaggtggggcccaggcttgtgtatttctaaatacc

SEQ ID NO: 890079 - DNA, 618 bp, Homo sapiens
tttaatacacaaaccagtgacactgtttgtgtcacacaaacaagccagcataataaccagctaaaaacagagtaacaggatcaaatccacacatatgaataataacttttttttttaattattatactttaagttttaggatacatgtgcacaatgtgcaggtttgttacatatgtatacatgtgccatgttggtgtgctgcacccattaactcrtcatttaacattaggtatatctcctaatgctatccctccccactccccccaccccacaacagtccccagtgtgtgatgttccccttcctgtgtccatgtgttctcattgttcaattcccacctatgagtgagaacatgcggtgtttggttttttgtccttgcgatagtttgatgagaatgatggtttccagcttcatccatgtccccacaaaggacatgaactcatcattttttatggctgcatagtattccatggtgtatatatgccacattttcttaatccagtctatcattgttggacatttgggttggttccaagtctttgctattgtgaatagtgccacaatacacatacgtgtgcatgtgtctttgtagcagcatgatttatagtcctttgggtata

SEQ ID NO: 890080 - DNA, 618 bp, Homo sapiens
tttaatacacaaaccagtgacactgtttgtgtcacacaaacaagccagcataataaccagctaaaaacagagtaacaggatcaaatccacacatatgaataataacttttttttttaattattatactttaagttttaggatacatgtgcacaatgtgcaggtttgttacatatgtatacatgtgccatgttggtgtgctgcacccattaactcatcatttarcattaggtatatctcctaatgctatccctccccactccccccaccccacaacagtccccagtgtgtgatgttccccttcctgtgtccatgtgttctcattgttcaattcccacctatgagtgagaacatgcggtgtttggttttttgtccttgcgatagtttgatgagaatgatggtttccagcttcatccatgtccccacaaaggacatgaactcatcattttttatggctgcatagtattccatggtgtatatatgccacattttcttaatccagtctatcattgttggacatttgggttggttccaagtctttgctattgtgaatagtgccacaatacacatacgtgtgcatgtgtctttgtagcagcatgatttatagtcctttgggtata

SEQ ID NO: 890081 - DNA, 600 bp, Homo sapiens
gcaggtttgttacatatgtatacatgtgccatgttggtgtgctgcacccattaactcgtcatttacattaggtctatctcctaatgctatacctcccccctccccccaccccaagacaggccccagtgtgtgatgttccccaccctttgtccaagtgttctcattgttcaattctcacctatgagtgagaacatgcggtgtttgattttctgtccttgtgatagtttgctctgaatgatggtttccaacttcattcatgtccccacaaaggacttgaacttatccttttttatggctgcatagtattccatggtgtatatgtgccacatcttaatcagtctatcattcatggacatttgggttggttctaagwctttgctattgtgaatagtgccacaataaacatacatgtgcatgtgcctttgtagcagcatgatctataattctttgggtatatattcagtaatgggatggctgggtcaaatggtatttctagttctagatccttgatgaatcaccgcactgtcttccacagtggttgaactagtttacagtcccaccaagtgtgtaaaagtgttcctatttctccacatcctctcc

SEQ ID NO: 890082 - DNA, 647 bp, Homo sapiens
cctagactaatagaaacctccactgctggaaattttacatgatgaatttcctaaaataaggcttgttggttcccagtttgaagaccagattgaagagttttgttttgttttaatagcattggcttttaaaagataaacatgaactagaccctcctgtctggagaattccctatcattttgactaaagcaagggtttttttttgttctttttttttcacacttttggataaaaggggaagaaatgacaggtatttaaatatcaaggtctctttcctcctgggctttgaagaggaagaaaagcagcttaattggctctggaccgtctgggggtggtgggtgggtgatctgatrttctttttaaaaagatggatgaaacaaggaaatttttctcatcttgaaatgcaactccctgggtctctagttttaaaggagccttcccaggtatctctcatgcttcctgagagctccacaaggctttctcatctgccttctgtggccagctggcaggactcatgtgatcttctttagccgagagcagggactcaaggaggacagctctctcttgcttccctgagctcactttctgcagttccatctcctccacctttttaggattttcacctttcaagagatatcagaatctcaag

SEQ ID NO: 890083 - DNA, 616 bp, Homo sapiens
actataaggaaggtttctttgtgtactgcatacaaacatactctccaaacagttcattatgtgttaaagaattaggtaattgatatttcaaacaacttaatttatataaatcagaaatccttgctggatttggatggctaygcaggtgtttacagtgattttattcatatttgaggacattggacaggtatttggatgagttgggaacatattaattttcccaattaaaattatatatgataagctcctaccacctgaaaactgctattcaaagtattttttaaatttaattcagatgaggaatgcctgttatttctattctaagcaagcacatatacaatttatatagtagcctgtgctagtcaagttatctcaaaatcttgtgcatgacaaattttcacatctgccatctagtgtaattgatgtggccaccttttctgtcacccagtaggtttatagcctttcatggatttcttgacagttctctccattgctggtgccatttcctcctcctgtcttctgaaaggtcattgtcctctggtcttctctttcctctcttccctgaagacgatttttattctcattcatctaataaaagcctttggggagacaaagc

SEQ ID NO: 890084 - DNA, 597 bp, Homo sapiens
ggggtacttactctttcctctacaagaatggaccctgcttcttttgaagaagtgctatcctgcttttcatgaaaaatatgataaatttttgaattgacaatcacaattacaaataaattaaacattttgagattacttgtgactaaattcaatgttcagtatctactctcatgctacgtcaaattttctccatattaaacttatacatattcaggattcaagtccacttataagctactggatcacagtgagatatttcaaggacaacaccaagggaaaaactgagaaaaaaaaaaaggaaataacatgaattccaacattaaacaagataaaatctgatacacttttgggaggattaaatcttattacaaatctaggggcacaataaattttaataattataacaaatttattttacttttgtaaaagaaagtattttcttcyttttacgaagcaaatatcatttctccttcaaaggctgtcccaagaatcacatttggtgttagtgttaaaacacacatggtctcagtgttaaaaaaaagtttggggggcctggtgtggtggctcactcctgtaatctcagcagtttgggaggca

SEQ ID NO: 890085 - DNA, 575 bp, Homo sapiens
tgtgtgttgttcccctctttgtgtccatgtgttctcatcatttagctcccaattatgtggtatttggttttgaacatgtggtatttggttttctgttcctgcattagtttaagcatcatggcctccagctccatccatgttcctgcaaaagacatgatctcattcttttttatgactacatagtattccatggtgtatatgtaccacattttctctatccagtctaacattgatggycacttagattgactccaaatctttgcgattgtgaattgtgttgctctgaatatatgcatgcatgtgtctttatgatagaatgacatatattcttttgggtatatacccaataatgagattgttgggtgaaatggtagttctatttttagttctgtggggaatcatcacactgcttcccacaatggttgaactaatttgaactcccaccaacagtgcataagcgtttttttttcccactgcaacctcactagcatctgtaattttttgacatttaattatagccattctgactggtgtgagatggtatctcattgtggtttttatttgcatttctctaa

SEQ ID NO: 890086 - DNA, 653 bp, Homo sapiens
ttaaggggtacatgtgaaggtttgttatgtaggaaaatagattgtttcatcacccggatactgagcctagtacccaatagttatttttcctgatcctgtctctcctcccaccgttcatcctcaagtaggcctcagtgtgtgttgttcccctctttgtgtccatgtgttctcatcatttagctcccaattatgtggtatttggttttgaacatgtggtatttggttttctgttcctgcattagtttaagcatcatggcctccagctccatccatgttcctgcaaaagacatgatctcattcttttttatgactacatagtattccatggtgtatatgtaccacattttctctatccagtctaacattgatggccacttagattgactccaaatctttgcgattgtgaattgtgttgctctgaatatatgcatgcatgtgtctttatgatagaatgacatatattcytttgggtatatacccaataatgagattgttgggtgaaatggtagttctatttttagttctgtggggaatcatcacactgcttcccacaatggttgaactaatttgaactcccaccaacagtgcataagcgtttttttttcccactgcaacctcactagcatctgtaattttttgacatttaattatag

SEQ ID NO: 890087 - DNA, 575 bp, Homo sapiens
tgtgtgttgttcccctctttgtgtccatgtgttctcatcatttagctcccaattatgtggtatttggttttgaacatgtggtatttggttttctgttcctgcattagtttaagcatcatggcctccagctccatccatgttcctgcaaaagacatgatctcattcttttttatgactacatagtattccatggtgtatatgtaccacattttctctatccagtctaacattgatggccacttagattgactccaaatctttgcgattgtgaattgtgttgctctgaatatatgcatgcatgtgtctttatgatagaatgacatatattcttttgggtatrtacccaataatgagattgttgggtgaaatggtagttctatttttagttctgtggggaatcatcacactgcttcccacaatggttgaactaatttgaactcccaccaacagtgcataagcgtttttttttcccactgcaacctcactagcatctgtaattttttgacatttaattatagccattctgactggtgtgagatggtatctcattgtggtttttatttgcatttctctaa

SEQ ID NO: 890088 - DNA, 579 bp, Homo sapiens
tagtttcaaaaaacttcttgatttctgccttaatttcattatttacctgaaactcattctggagcaggttgtttaagttccatgtaattgtatggtgttgagcaattttcttagacttgaattctgtttttactgcactgtggtgtgagagtgtggttggtataatttcagttctttttgcatttgctgagtattgttttatgtccaatgtgtggttgatttcagagtatgtgccatgtggcaatgagaagaatgtatattttattgttttggggtggagtgttctgtagatgtctatcaggtccattggtccagtgttgagttcaggtcctgaatatctttgttaattttctgcctcaatgatctgtctaatatrgtcagtagggtgttgaagtctcccactaatattgtatgacagtctaagtctctgaaggtctccaagaacttgctttatggatctgggtgctcctgtgttgggagcatatatatttaggatagtaatgtcttgttgaattgagccttttaccattacgtaatgcccttctttgtctttcttaatctttgttggtttaaagttgc

SEQ ID NO: 890089 - DNA, 688 bp, Homo sapiens
accataacaatattatcagacactttgggaacatttgtggtgcatgtttttgttgttgttgttgttgtttgtttttgtttttcgttttttgagacggagtctggcgtctcctctgttacccaggcttgagtgcagtggcgcgatctcgactcactgcaagctccgcctcctgggttcatgccattctcctgcctcagcctcccgagtagctgggactacagacgcccgccaccccacccggctaattgttygtatttttagtagagacggggtttcactgtgttagccaggatggtctcgatctcctgacctcgtaatctgcccgcctcagcctcccaaagtgctgggattagtgagcaaccgcacctggccttgtggtgtgtttttattcaacccagaaagaattttgttgccagcattatttgtatgtattaataatttactgagaaactgtgtcagatataggtatatgcaaagttcctaatgacagtagaaaactagaaatatgggaaaagtttgagcttgaaatatgaaaattagaatgatgtacttaattaaataaaagaaatatttgcagatacgcttggaccaagactgataattaaaacacagtacaatttatttcaaaattaaaatgttgattatttattttcttagggggcaggtatacatgttcttaaatagtcag

SEQ ID NO: 890090 - DNA, 588 bp, Homo sapiens
aaatggataaaatagtaatatctaaacctcttcattggtttctataaaggtgaattaatattctaaagtgcacagatcaatgtctagcacatagtagccaagacaggtttgttaaatacataaaaccaagcaggaggaagcctgtccctaccatcctcctagtgctggtacatttttctcacctttcttaatcttgggggagaattgattttctcattctgtcttatttaacatttgagctcaatgtctaacctataactttatatatgatttatttcygtatacttctcattttatttttaaaaaaccctatgatttgatttcaaaagaagtaaaaacaaattaaatcttgttgacctaaaacttgcttctgcaacatccccactgggaatgataatataaatgcttgtgccttgagatgagaatgtcattgtttgttccttactgttgtatagcctgaagattaaataagtaaaataaaagtggaattaagaaatatatcttgtctactagtcaaagcagttcagaaactgtatttcactgttacatctagatagttgaattgtgtgcctttaagctatgaaattt

SEQ ID NO: 890091 - DNA, 612 bp, Homo sapiens
tcacaatcctgcgacgccacttgcagagaaaaatgctgatcagggtttcctggatgagatgttgcttctcagggtagccatatcatcacactattagagactacagacccctagaacttggccttttgatatataggaccaggagaaggggttgaagtacatgaaggttttctaagagcataggatcaattggtcaatwttcatttgaaaagggctgagagttcagcttgtagaaaataaagaccaagagggagaagcagcaaagagctacatattagtaggaggtcagcttaagagctaagagggagcaacctcagggccttatggcaattaaagatattgaatatcaaggaattagaaggatttaaagaattatgactgagagtcttctattgtattcactttgacagagttcataagtcttatggactttttacttgcctttgttggctgggtttcattttttaaaattgcagttctacagagatacttagccatgaggcaagacaattatatttgtgctactcaattaaattgtgttacatcttaatgtcagagtctattctctataaattctaccagtaattttagattttatggtctgcttcctag

SEQ ID NO: 890092 - DNA, 638 bp, Homo sapiens
tgtttatgtgattaattatgtttactgatttacatatgttgaaccagccttgcatcccagggataaaaccaacttgatcatggtggataagctttttgatgtgctgctggatttggtttgccagtaacttattgaggatttttgtatcaatgttcatcagggatattggcctaaagttttctttttttgttctatcacwgccaggttttggtaacaggataatgctggcctcgtaaacaaagttaggaagaagtccctccttttcaattgtttgtagtagtttcagaagaaatggtaccagctcctctttgtaccaccagtagaattcagctgtaaatctgtcttgtcctagactttgtttggttggtaggctatttattactgcctcagtttcagaacttgttattggtttattcagagattcaacttcttcctggttcagggtgtatatggtggatgtgggagggtgtacgtgtccaggaatttattcatttcttctagattttctagtttaaagtatttagtcttcacaaatataaagtaactttccaaatgccacctaagcagtaggtgatgagtcatctgtaagtctgttgcctaactataaacctacctccctgagtaaattcactttaagg

SEQ ID NO: 890093 - DNA, 750 bp, Homo sapiens
tgatggtgggatacaaaatgttacaacccatactgaggagggatttggcaatatctagcagaagtatatatgcatttactctctgatccagaaattatatttccagagtttgtttccaaagatacagtaccaacaatatgaaacaaygtatacacatggctgcacatttttatagaaaaaactcatttcccactaaggcatctggctccaatgtagtgtcatgtatttgttcaataataggctttttatgatgctctcatgacctttgcttgtgctgtagtaccatacgtcattttcagaagtcagcttgcgtcgctttgtgcaggacccagagtgtagtttagtaagtgctcttgaggagattaagtgtcactgctgatgcaaaccagcaaattaaattcccaggctcagttggaaatacttcagtccagtgagggcgctgcataagtagaggaaatagccacatcaaaacttcattgttagaagacactttttctatttgacgttacacaaaactgtcactagatggcagcaaaggagagatcatggaaaacagcgtgtcctgtagtttctccacattcaacttgcacaggttgagtgtcccttatctgaaatgctggagaccggatgtgtgtcagaattcagatttttaattattttttggaatatttgtatgtacatgatgaggtatcttggggatgggactcaagtctaaacatgaagttcatgtgtttattatatcccttgtat

SEQ ID NO: 890094 - DNA, 491 bp, Homo sapiens
ctttccaggattatgaatttaagaaaccaaacattggtcataaacaattttagcaatttagaatagtcaccatgccaatgtgtattcttttctttctttctttttttttttttttttgagacagagtcccactatgttgcccaggctggagtgcagtggcacgatcttcgcttactgcaacctcacctcccaggttcaagcaattctcytgcctcagcctcctgagtagctgggattgcaggtgtgtgccaccacacccagctaatttttgtattttaggtagagacgaggtttcaccatgttggtcaggctggtcttgaactcctgacctcgtgatccgcctgcatcagcctcccaaagtgttgggattacaggcttgagccaccgggcccggctgtcaatatatattctatttgcatatttgcatcatcttatttcttccttaagagtcatggaatgcacagcttttaataatgaaagctttaaatact

SEQ ID NO: 890095 - DNA, 653 bp, Homo sapiens
aaaccaggagaatgagtcccagaagtgaggtaatttttgtttttgttttcgtgaaataagtgactgaatatgttagatggggcttggatgtcatagaagattagagaaatacctatctaacaactggaaggtcattgatggttcccacaaaacagattcgatggtctgattagagaaaatgggagtataaatggttctttcaaggagttaaaggtggtatgaataaaattattattttgtgaattttaaattattaatttgtaagtttgagcaatgctctcctaagtaatattgaacatgtctcttttgaataagcctaaaccggcctaatatgcaaatgtttggtgcttccctggaccatatagtatgctgttctagccaatcttaaaggaaaagacattttattttaaaaaatgcttgtagaattagtgttttatscatttttaaaatttaggcttgtggacactcctgcctctggatttcaagagaataattttaaaaggattggtagagtaagaccagtttatatgcttaatgttttctaattattttcatgggttatacttacatattcttaagatagcttgacaagttttatttagttcatgaaatgctgtgggtttaatttctctaaataaattacattcttgttc

SEQ ID NO: 890096 - DNA, 689 bp, Homo sapiens
gttatattgttgaagaccattagaaaaatatggtatagttgttaaggattgttcaagaagtgtatgtgtgtgtgcctgtgtgcatctgagaacaatgatccacactcagtagactttgatctgtctccaaccattgagaaggccccaagagaargaaactgcactgtgtataccaaagccccagatagactctgctgcttattatcaacatgtcagacttagaggaatgtattgatgtagggagatggagaaatcctgaaaaattctttaggtggagattcccaaaaaggtgaatagaaaatcccattatgtatgtctaaagaaggtgcgcaagaaggggaagaggtagatctcaggttaagtaaggaagtttaggaactattatgttatagaagtatgcttttggtaaaagggacagagccctgcttatgaatattccactcctatttctctcttatctcctgtattcgctcatgtcttaaaagttgttcatgttcagtgtgaaaaaaaatatttttcaaaccttagaaaatgatatcaaaagcatatttttggtttatgatgttattaccagactcttctgaaaagtatctagcatttctgatagattttgatgagtttgagtttttttttttttttttccaaaagggtgggggttgttaggaagctagattttacctatcctgcta

SEQ ID NO: 890097 - DNA, 499 bp, Homo sapiens
ctagtcctaacttagcaaaatggtggtgacagaattccagcagagtatggaagcagaatatgcttcttgaaatttagactcagagctgacacatcattacttcagccacattctattggtcaaagcaaatcataaggccagctcagttgccatggatagagaaagaaactccagttcttaaaggaggggtgcaaagtcatgttttggttttggtttcggttttgagacagagtctyactctgtcatccaggctgcagtggagtggtgcaatctcagctcactgtaacctccgcctcctgagttcaagcaattcttctgcctcagcctcctgagtagctgggaatacaagcgcatgccaccatgcccagctagcaaagtcatgttataagtgacgtaggtacagggagaggactaactggggcaatcgttacactcaatctgcctgctgcagttgacttccgttaactttatattcagaaaatgacagtaaatttaaaat

SEQ ID NO: 890098 - DNA, 473 bp, Homo sapiens; identical to SEQ ID NO: 887984

SEQ ID NO: 890099 - DNA, 622 bp, Homo sapiens
gatgaataggaagatttaatattattaaaatgatcctattactccatgtaatgtacagattccatacaatctttatcaaaattccaatgacattttttaaagaaataaaaaaatctaaaattcaaatggaagcacaaaggacctgaacagccaaaatgatcttcaagaaaaagatgaaagctgggagtctcatacgtcttcatttcaaaacatattacaaagctacagtaatcaaaccastatggtactaacataaagtcagacatataaaccaacagaaaagaatagagggcccataaatctgtgcatatatggtcaactaatatttgaaaggggatcaagaacacacaatgggtaaagaatagtctcttcaaccagtggtcttggggaaactgtatatccacatgcaaatgaataaaattggaacctagtctttcaccatctacaaaaatcaattcaaaatggattcaagatttaagcctgaggtctggaaatataaaactcctagaagacaacatatggggggaaaagcttcatgatattggtcttggcaattatttcttggatatgaacccaaatgcacaggcagcaaaagtaaaaacagacaagtgagaaaacataa

SEQ ID NO: 890100 - DNA, 643 bp, Homo sapiens
tccatcacgatcaagtcagtttcatccctgggatgcaaggctggttcaacatatgaaaatcaataaacataatccatcacataaacagaaccaatgacaaaacaaccaaccacatgattatctcaatagatgtagaaaaggcctttgataaaattcaacacctcaaaaactctcaataaagtaggtactgatggaacatatcgcaaaataataagaggtatttatgacaaacccacagccaatatcatactgaatgggcaaaacctggaagcattccctttgaaaatcagcacaagacaaggatgccctctctcaccactcctattcaamgcaatattggaagtcctggacagggcaatcaggaaagataaagaaataaagggcattcaaataggaagagaggaagtcaaattgtctctgtttgcagatgatatgatcgtatatttagaaaattccatcgtctcagtccaaaatctccttaaggtgataagcaactttaacaaagtctcaggatacaaaatcaatgtgcaaaaatcataaacattcctatacaccaatcagacaaacagagagacaaatcataagtgaacttccattcacaattgctacaaagagaataaaatacctaggaatccaacttaca

SEQ ID NO: 890101 - DNA, 626 bp, Homo sapiens
ggctttctatgggtgctgtttttccagtagctaattggtttaatttcttccatcactactaagtactgaatactgccaaccttgtggtcacctggtgccaattttcattattccatttggaagcaggccccttaccatagctcttccatctccatttttgcctccatctttactccttattcacaagccagagaacaatggtrcatacatgccatgtcaaaagcacttttcttttcattaatctgttgaaactcatatgaaaatttatagttgttgcagcaatgcaagcttattttatcataaaattctcatggcagtaatgctgtgacataggcattgctattatgtctgtttttcagagatttcccaagacttagtgacttgcacaaggtcacataaccagaaaattatttagccacgattcagattcaatcctgagttccacaggacattacttgctatttcttagttactccggctcacgtggataacccatggacataatgaccaataatgaccttcaagtcatcttctttcttattctttttggtctgttaatggcatagtgggatggtttaatagattaacaacagtgctcagcttgtcttgaacttggatttgtcctt

SEQ ID NO: 890102 - DNA, 579 bp, Homo sapiens
ggagctccattgtatgttatttcttacttttcacttgatgcttttaggatcctttctttgtccctagcctttggaagtttgattattaaatgtcttgaggtagtctacttcgggttaaatttgcttagtgttccacaacccttttgtacttgaatattgatatctctctatagatttgagaagccctttaaaaaaacttctgctgggtgcagtggctcacacctgtaatctcagcactttgggatgttgaggcgggtggatcacctgaggtcaggagtttgagaccagcctggccaacatggtgaaaccttgtgtctactaaaaatacaaacattagctgggcatggtcgtgggygcctgtaatcccagctactcagaaggctgaggcaggagaatcgaacccaggaggcacaggttgcagtgagccaagattgtgccaacacactctagcctgtgcgacagagcaagactcaaacaaaataaaaagatctacccctacctcattatctacctcctcttagtttgctcttttgaggttttttcttataagtgtattcattgtattttttttcttttatc

SEQ ID NO: 890103 - DNA, 616 bp, Homo sapiens
attagatattgttacctctgtttgtacagatgaaaaaattgaagctaaaagaacctagtaaattagtccatgatcacacagatagtaagatcagaagctggacttcaaatttgtatctgattggatacaaaattaaagcccacaccacgtactgctgattatagttatttttgtttgaatctcatcactacacaattataagcttcttaaagacatgatggtataacacttacgttcatgtccccattgaacctaattcagacccacacggcagaacttttttaaaaattgattgaacccacttaggcttcagatatcttaaatgtaaatggaaayattaaactacaaaatttcaaattccctttcagtttcaaaactgtcttctgtggggatgatgtcaccaagatagcagaataggaggtaacctgctcatattcccccacaacaacaattctgcacctatccacagtaaaaagtctctctgtttgagccttggaattcagataggagtctgtgaaagcctagcagagcccatgacctatgagggtcattttgagagtgcagaccaatacccagctgacagatctgctctgccaaacttgcttctgggttcaag

SEQ ID NO: 890104 - DNA, 644 bp, Homo sapiens
gtgagtaagttctcatgagagctgattgtttaaaagtgtgtagcactttgtccttctctctcttccttcttctctggccatgtaagacatgcctacttcccatttgtgttctgccgtgactgtaagtttccttaggcctcctcagccatgtttcctgtacagcctgtggaaytgtgagtcaattaaatctcttttctttataaattatccagtctgaggtagttctttatatcaatgtgagaacagactaatacaatattattactctttcagtgcataatgttaacatgtgttctatattacaatactaactactcataccaaagacaagctgtgctaaaattatgccacaaagctaaaagactaaccctttcacataccatgtgatctgtgaaaaggtaaaaagtcttctgtggtcatgaagagtaatccatctgattcttctttttaacgtttagttttgtagaatcatactctttgtcttctctcatgtggctagcatagtaagaagggtctaggggtctcctacttggaggtatccaccattccatccaccttagaattctatcttggaaactagagaggggcccagaggaaagaggtctgagtcaatctgcttgtctattttataaaaaaatattcct

SEQ ID NO: 890105 - DNA, 624 bp, Homo sapiens
accatacactcagtgccatactgtaaaatataacctactcacaagtataaaatccatcaaattcatttcacaattcatgcccttatgcaggataggtatgctagcaggtgcaaaatcttggagaatatattagaattctgcctactgtattgtgtttgtgaagcacttagaaaatttaccactcacttaagtacttaatggctgttggatattgttattttataccttaggaactaatatatagcattcttcaaaawgtagaatcattaatatttagaattgatagtatatggtaaaattaaaacctgcacacatattttaattttctaaggaaaaagtttgaatgaagactaaaacaattaagcttcagcaaagcataagtaagatattgtctgaaaggctactttatataacagaatctagagctgtttgggttctctcaaccatgtgcatcttctgccgtcttctggtcctttggagcatggcaggcgaattattttctttaacaagggagaaaactaaaaacaggccatttttctgtatggatatcacagactctttgttgatcttaatttttgagtattcagttcaaaattttcagcattaattgccacatgcatttta

SEQ ID NO: 890106 - DNA, 665 bp, Homo sapiens
gtactgaggagtggggcattgtaaagatacctgaaaacgtggaagtggctttggaactgagtaccaggtagaggttgcaagagtttggagggctcagaagacagaaaaatagaggaaagtttggaatttcttaggaactggttaattggttgtgatcaaaattctcatagtgatatggacagcaaagtccagactgccaaggtctcagatgcaaatgaagaacttactgtgaactggagcaaaagtcatgagtgtcaagccttagtaaacagcttggctgcattctggccataccctggggatgtgtggatgtttgaacttcmaagtgatggtttagactgtctgacagaataaatttctaatcagcaatgcattgaattggctacttctaacaacctaagctcagatatgggagcagagaaatgatttaaagtttgaatttatatttatacagcatgcacagcataatagtttggaaaatttgcagactggttctgtggcagagaaagtaaaagtttttttagcagcagaaattggcaggttgtgaagcattgaggccttgaaggcatttcagagacattcatggtagcccttcccattatgggcctggaggcctaggaaggaagaatggtttcatgggcctagcccagggccccactgccctg

SEQ ID NO: 890107 - DNA, 620 bp, Homo sapiens
catctgttcatgaggggggatccactcccatgtcccaaaaacctctgattagaccccacatccaacactaggatcaaattgcaacatgagattttgagggaacaaatatgcacgctatagcggagagttttaaaccacagagtagtattggyatttttttttttttttttttttttttttttgagacagaatctctctgtcgcccaggctggagtgcagtggcacaatctcggctcactgcaggctccgccccgcggggttcacgccattctcttgcctcagcctccagagtagctgggactacaggcacccgccacctcgcctggctaattctttgtatttttttttagtagagacggggtttcaccgtgttagccaggatggtcttgatctcctgacctcgtgatccgcccgcctcggcctcccaaagtgctgggattacaggagtgagccaccgcacccggccgtattggtattatttatattatattcgaaacaatcactctagttaaaatgcagaacatagattgtagaggcgcaaaaagagaaataggaagtccaattagtgggttttgagttcattccagcaagagaaagcgatggtagcagtgaagacagac

SEQ ID NO: 890108 - DNA, 620 bp, Homo sapiens
catctgttcatgaggggggatccactcccatgtcccaaaaacctctgattagaccccacatccaacactaggatcaaattgcaacatgagattttgagggaacaaatatgcacgctatagcggagagttttaaaccacagagtagtattggtatttttttttttttttttttttttttttttgagacagaatctctctgtcgcccaggctggagtgcagtggcacaatctcggctcactgcaggctccgccccgcggggttcacgccattctcttgcctcagcctccagagtagctgggactacaggcacccgccacctcgcctggctaattctttgtatttttttttagtaragacggggtttcaccgtgttagccaggatggtcttgatctcctgacctcgtgatccgcccgcctcggcctcccaaagtgctgggattacaggagtgagccaccgcacccggccgtattggtattatttatattatattcgaaacaatcactctagttaaaatgcagaacatagattgtagaggcgcaaaaagagaaataggaagtccaattagtgggttttgagttcattccagcaagagaaagcgatggtagcagtgaagacagac

SEQ ID NO: 890109 - DNA, 619 bp, Homo sapiens
ctgcagacttctggagctttcgatctgttttcctcctgtctctctggtactgtcctacaaattctagctgcttcagtaaaacagaactgttggtctctgtcacttcaagtcagcaaggcctcaagccagaagccaggctctttctaaactcccaagtccatgcacagcttagtggtaaactggtgcaatatctgaaaaccactgwtttgtccttttttctcattgtttaaaatgggaagataaatccagtccctgttagtccgttttggccacaataagctgaattgtttcttgaagttctacttcacttctttaatcctattcagaccccatttcaagacccactaacaaattgagatcttttgttagaaaaatacctctctaggtaactgcaacctatggtccactttggctttctgaggtgggagctctatatcccagtatcagggaaatcacttcaaaatcacttcagaagttcaagaggaatttctgagatctccttcaccaggctgggggctataacctgctactctcacctcagaaagctaaagcagagacacattggacataaactgatccatctttctaaagacatcgcttcaaccaatcttcttatttt

SEQ ID NO: 890110 - DNA, 642 bp, Homo sapiens
ctgcatcccagccactccagccatggctgaaagggaccaatgtaaagcttgggcagtggcttcagagggtgcaagcttcaagccttggcagcttccatgtggtgttgagcctgccagtacacagaagtcaggaactgatgtttgggaacctccacctagatttcagaggatgtatggaaatgcctaaatgtccaggcagaattttgctgcaggggtgagtctctcatggagaaccacttctagggcagtgcaaaagggaawtgtagggtcagagcccccacaaagagttcctactggggcactgcctagtggagctatgagaagagggccaccatcatccagaccacacaatggtagatccaccaacagcttgcactgtgtgcctggaaaagccacagacactcaatgccagcccatgaaagcagccaagacagagcctgtaccctacaaagccacaggggcagagctgccccagaccatgggaacccacatcttgcaatagcatgacctggatatgagacatggagtcaaaggagatcattttagagctttaagatttgactgccccactggatttcaggcttgcatggggcctgtagccccctttttttggtgaatttctcccattgggaatggctgtat

SEQ ID NO: 890111 - DNA, 642 bp, Homo sapiens
ctgcatcccagccactccagccatggctgaaagggaccaatgtaaagcttgggcagtggcttcagagggtgcaagcttcaagccttggcagcttccatgtggtgttgagcctgccagtacacagaagtcaggaactgatgtttgggaacctccacctagatttcagaggatgtatggaaatgcctaaatgtccaggcagaattttgctgcaggggtgagtctctcatggagaaccacttctagggcagtgcaaaagggaaatgtagggtcagagcccccacaaagagttcctactggggcactgcctagtggagctatgagaagagggccaccatcatccagaccacacaatggtagatccaccaacagcttgcactgtgtgcctggaaaagccacagacactcaatgccagcccatgaaagcagccaagacagagcctgtaccctacaaagccacaggggcagagctgccccagaccatgggaacccacatmttgcaatagcatgacctggatatgagacatggagtcaaaggagatcattttagagctttaagatttgactgccccactggatttcaggcttgcatggggcctgtagccccctttttttggtgaatttctcccattgggaatggctgtat

SEQ ID NO: 890112 - DNA, 579 bp, Homo sapiens
tcctaggaatctaatgcaggaactcaggaaaggtggtaatatagtttaactctttgtcccctctaaatcacatgttgaaattagatccccagtgttggaggtgggccctggtggccttccttgtgtcttggtgccatccttgtggtagtgagtgagttcttgctctgytagttcctgtgagaactgaatgtgaaaaacaagctgacagctccctcacttctctcttgctccctctcttgccatgtgatgtctgctgcatttcaccttctgccataagtgaaagctttctgaggccctcaccagaagcacatgctgatgccatgcttcttgcacagcctgaagaagcatgaatcaaataaacctcttctcttcataaactacccagcctcaggtattcatttatagccacacagatggacaaagacggtggcaccaaaggattacaggttaactctttcaggggttcctggagagtcagggctgggcccttggccagcaagtcacatgaggcacaagctctggagtgggacaatttgggttcaatcccagatccaccatatttactggctgagtgatctt

SEQ ID NO: 890113 - DNA, 682 bp, Homo sapiens
agcttttctagtccatctatattgatttcgttttcccaatgagcagccctcttctcacagcctaaaagaggcccccaacctaatagtgctcaataaataattgtggaatgaatgaatgggaaaacaaatgattggatcatgttccaatgttgatgtgcacttgaggaagttctgacaaccaggaaggaaccctaaacatgtaagagtttatcttactggctgatattttttctttaaaaatagcaggaagagaatgttagctcccacacatctgtagcctaaataggagcacaacaaaaatgcaataatgaaaatgttaattgagctcctgacatttaatgcttcaagatgagaaattaaagccaggctacagcttgtcaagcttccatcagcatcaggragcacacagatagccaacttgttttgagactcaagatttcaaaaataacccctgggctcagggctcagggttcaggcagtaggtgtgggaggagtagggagaggcttggtgagtagatccatggagttctgtctggaatttggaattcaactccccagatacaggttttagaagacacaggtaaggaaagtaaagggaaatggggaggagaatatcaactcgagtcgcttagtggttgtgctaacctggagcattgtgttaagaaggattctttggttttga

SEQ ID NO: 890114 - DNA, 654 bp, Homo sapiens
gggagctgtttttttgaaaagattaacaaaatagatagattgctagccagactaaaaaaagaagaaaagagagagaacaatcaaatagacacaataaaaaatgataaagggtatattaccactgatcccacagaaacacaaactaccaccagagaatatgataaacacctctacgcaaataaattagaaaatgtaaaagaaatgggtaaactcctggacacatacactctcccaagactaaaccaggatgaaatcgaatccctgaatagcacaatcacaagttctgaaattgagccagtaattaatagcctaccaaccaaaaaaggcccaggaccagatagattcacagctgaattctaccagaggtacaaagaggagctgataccgttctttctgaaagtactccaaaaaatagcaaaagaggaactcctytctaactcatttcatgaggccagcatcatctagaaatcaaaactggcagagacacaacaacaacaaaaatttcaagccaatatccctgatgaaaatcattgcaaaaatcctcaataaaatacttggaaattgaatacaacagcacatcaaaaagtttatccaccacgaacaagtcggcttcatccctgggatgcaaggctggttgaacatatacaaataaat

SEQ ID NO: 890115 - DNA, 633 bp, Homo sapiens
accaacagcttgcacggtgagcctggaaaagccacagacactcaatgccagcccatgaaagcacccaggagaggggctatatcctgcaaagccacaggggcagagctgcccaagaccatgggaacctacctcttgcatcagcgtgacctggatgtgagacatggagtcaaaggagctattctctagctcttgtaggtgtgcttcattctttcttattctctttcttttgtctcctctgactgtatcttcaaatagcctgtctgcaagctcagtaaatctttcttctgtttagtcagttctgatgttaagagactttgatgcattcttcagtttgtcaatttaatttttcagctccagaatttctatttaatttttagaaattatttcaattcttttattaaattcattggatagacttgttgtttgtcagtgtttgatgatgtctgagcattgaaraatcagatatttattctcatttttgcagtctgctcttctttgtacttatgattcttgagaaagctttacaagtattctaagggtgctatgatgtaagtctttggtcactttagccatatttgcattatggagcaccccaagcctggtatcacagtgactcttgaagactcacagagg

SEQ ID NO: 890116 - DNA, 666 bp, Homo sapiens
gcccaaggctgtggcaactactaactggctaccactgatgtttattcaaggcctaagggctctttaatcaccaggagatgaatcctgttaggattatgtctttcctttcagggcagcaagtttctttcaggcataggtcctttctagaaatactgtccaagatctggagcctggaatcgtagactttaggaattagctttattttttaaaaacttttactgtgacttggttcccaatttcaaagaaagccttttctattcccccctgaccctccgcccgcccttttctcaagcaggtgtctctctggagtttcaagctgacctgcctgaagttggggcttgagtaatgcaagtacacccttggctctcctagccagtatctcactgggttccatgcaccccaattaygctggctctgaggccaacacagcaccagaattttcacagagtttcagtccttgtggtctagacttcctttcacgtttatttagaaccccacagctctttagcccatggtgatgggactagccagaactcagattcccactgttgggatggataattcccctctggttcatctaaatgctccatcgatgagtgatagctgaattctgctctgtgttgctttctgctctgacagggctgcactgagctccaatgcaaaagt

SEQ ID NO: 890117 - DNA, 629 bp, Homo sapiens
tttttgttgttgttagagacagggtctttctgtgttggtcttgaactcctgacctcaaataatcctgctgtctcagccttccaaagtgctgggattactggcatgaatcgctgcacctggctatttaacatctttaataattctgttgaaattatttattttattttattttttttgagacrgagactcgctctgttgcccaggctggagtgcagtggctggatctctgcaagacacagctaacttcagatggtgtggcttcaggggaagatcaccttcttcccgcaccatcccctttccaattcccatccctctgagagccacttccatcacccagtaagataccccacatatgctacccttcaatccgttcatgcaacctgatccttcctggatgccggacaagaacctgggtgcgaaaagggcaggggcttggatgctgctgtgaggcccatacagagcctgctcccgccagaacttggttctagcgtttgttccctctggttcccacactcgcttgctcacacgctccctcttgcaaggagtggccagcggcaggctgagcgaaatgagccactccagttctcgcccatgaagggggtgaaggtcaagggaacaaatcccatctc

SEQ ID NO: 890118 - DNA, 608 bp, Homo sapiens
ttctttctattgactggaatgcccatgtccactaccaagggaatatttttgtaataaaaaatatgtaagaaaccaaactagtgcacagaaggggcttgttaagtatgaaatcagagcacaggatgtcagctgtccttgaggggtgttttattgcagctaaggttttaactccagtgaattatccaattgacccaaacacttgggcccctagaaacagcctctcattctgakaatagctgcctttctctgccctgaagagtcatttgagaattactgtgaactcacactctcccactgtcattttgtgactctacattagatccacatttcctatttgcacaaagcactgtaccatgcccattctcttctttaacagattctatcagaccatcttctatcttttctggtgtttttagtttcctagcagtgtacagaaaatcaattgcgccccctgagtaggcaccagtatacatagactagtagggtaacctcgaaggcattttctgctaaacaactaagtccattcatggttgggctttttcttaagccttcctaactttgtgcctaaatctatgatgttcaacttactttggggaactgaattccta

SEQ ID NO: 890119 - DNA, 646 bp, Homo sapiens
tccttctgctattgatttccagcttcattccattgtggccagaaaacactttgtatgacatcattcttcttaaacttgttaagacttgttttgtgacctaacatgtgatctacaatggaggaagattggtatgcacttgagaagaatgtgtattctgctgctgttgggtgaaatgttctgtatatgtctgttaggtccatttggcttatggtgttattcaacttctctttttccctrttgatttggatgttctgtccactgttgaaaatatggtgttaatgtcccctactattattttattgctttctatttttcccttcagatgtgtccatttttaagtatatatttaggtgctttgatgttgggtacataatacgtttgtaattgtgttttcctgatggactgacctttaatcattataaaattccttgtctctgtgacactttttgacaaagtctattctctccaatataatgtagatgcttcggctctcattttgttaccatttgtataaaatatctttttctatcccttcacttgcagtctatatgtgttcttaaatctaaagtgaatttcttatagacagtagttgagtcttattttctttcaaccacttgatatctttttattggggagtttaatccat

SEQ ID NO: 890120 - DNA, 600 bp, Homo sapiens
gctcctgattgactactgggtaaataacaaaattaaggcaaaaataaataagttctaggaaacgaatgagaacaaagatacaacataccagaatctctgggacacatttaaagcagtgtgtagagggaaatttatagcactaaatgcccacaagagaaagcagaaaagatctaaaattgacaccctaacatcacaattaaaagaactagagaagcaagagcaaacaaattcaaaagctagcagaagacaagaaataactaagatcagagcagaactgaaggagatagagacacgaaaaacccttcaaaaaatcaataaatccaggagctggtttttcgaaaagaaaaacaaaatagatagaccattagccagactaagaaagagatargaattaaatagacacaataaaaaatgataaaggggatatcactactgatcccacagaaatacaaactaccatcagagaatactataaacaccttgatgcaaataaactagaaaatctagaagaaatagataaatttctgaacatatacaccctcccaagactaaaccaggaagaagtcaaatccctgaatagaccaataacaagttctgaaa

SEQ ID NO: 890121 - DNA, 614 bp, Homo sapiens
acatagagaagaaatgatcacacttatctctggttttgttttccaggactttgttggcattaggatgtcatgtgggtatatcagatgaacatgctgaagacaaggtgaaaaaaatgaagctacccaagaagtaagttgaatgactaagcaatattaaataatctgtgtagagatttagtgcaaccaaataactcttgatggacacacagatgccttgcttttactgaagctttaaaattcggattcaaggctgggtgcggtggctcacaccttaatcccagcactttgggaggccaaggcaggtggatcacctgargtcaggagttcaagaccagcctggccaacatggtgaaaccctgtctccattaaaaatacaaaaattagctgggcgtggtggcaagtgcctgtaatcccagctactcgggaggctgagacaggagaatcgcttgaacttgggaggcagaggctgcagtgagtcaagatcgtgccactgcactccagcctgggcaacagagtgagactccatctcaaaaaaaaaaaaaattcagattcaaaaatttaaactaactgaatgaccctaggggttacattaagtatctggtgaaacaatagtt

SEQ ID NO: 890122 - DNA, 636 bp, Homo sapiens
aattgtactttttctttgccttgtgctctcttccttgccacgtgaggataatttacttcttcttcttccttttttttttttttttttttttgagacagagtttcactcttgttgcccaggctggactgcagtggcgtgatcttggctcactgcaacccccgcctcctgagttcaagcgattctcctgtctcagcctccagagtagctgggattacaggcatgcgccaccatgcctggctaattttgtatttttagtacagacagggtttcaccatttggtgaggctggtctcgaactcctgacctcaggtgatccacctgcctcggcctcccaaagtgmtgggattacaggcgtgagctgctgcactgggggaaaatttacttcttaaagcacactcatagggcaaatttccatgggtcaaaaaactattattaatttaataggaaaaaagtgcattcttgagctcctatattaaacctaatttgtattaaaattatactaaatctccctaaaatgaagtcagtaattaattaacatgtcatatgctcacctaaatgtattcccttcttcacttgttcttcagtttggttgttaacctgttctaccaaagcttgttcttaactatcacatagtata

SEQ ID NO: 890123 - DNA, 608 bp, Homo sapiens
tatgagatggtatctcgtgatttttgatttgcctttctctggtaattagtgatgtggagcattttttcatgttttttttttttttttttttttttgctgcttgtatgtcttcttttttttaattgtatgtcttcttttgagaaatgtccattcatgtctttcttttgcctatttttaatggggttattggtgttttacttgttcaattgtttaagttccttatagattctagatattagacctctgtcagatgcacagtttgtgaatattttctcccactctgtaggttgtctgtttactctgttgatagtttcttttgttgtgcmaaagctactcagtttaattaggtctcacttgcaatttttgcttttgttgtcattgcttttgaggacttagtcataaatttttcccaaagtcaatgtccagaatggtgtttcctatgttttcttctaagattcttatagtttgaagtcttacatttaattctctgatccatcttgagttaatttttccatatcaaacaaggtaggggtccagtttcattcttctgcatatggatagccagttatcccagcaccatttattgagtagagagtcctttccccatt

SEQ ID NO: 890124 - DNA, 526 bp, Homo sapiens
agttggtgaccttccagttaacctctactgggctctctctgtggcactgcttgatgaggaccatggatatttgctgactctcaggtaacaggttatccagctgctgttttaagcctgatcgttccactagttcatcctataaaaaaattcaggggccgtcagcaggtggatttaagtattgcaatgagtttaacaggtttgaaaacacattctttagcttgtgcattattacctcttactcgaattctttttttgctttatagaaaaacctcatttcaataaaattatgacagacaattttgcctctatccaggaagaaaactggactacyttgaatttcataaagattttatatattctatatgtgcagttggcatttttatgtcctttttagcagtttagaaaaagctccaccaatattctcaagtccacctagctagtaagtgaaagaacagaaacttggactcaggtattctgagcaagtccatccaccaagctttcctcctttactcaaaaaataataacg

SEQ ID NO: 890125 - DNA, 615 bp, Homo sapiens
ataattaatctgtgtgatcttgacaaatcaatctcaggagaaataagtcaatcatttatcaaattttattgaggtatactatgcataggtgttgagccaaatgcaaagaatataaaatggaacaatgtctatgtcttttaaaactttgtgttcatgtcaaagaaatatatatatgtcatatgatggatgtgcacacagtaaaatggaagcacacaggagagacctaagttagacttgggagaaggagaaaacagcacaaagattacccagaagtgatgatatttaaactgagccttaaagaataataacaggtaaacagggatagagggrgttaaatcattcctccaggggtagaagctaacaaatgtagaaaaaaagatgagccctactccccccatacaaaaccgaaaaacgtctccctaaagctaatagatagacagccatcagagaaaggcgcctgaacagatgtgcttcaggaatatcttctgcttacacacatgacatctcccaccctccccagctcagaataacccatgttcagagaagcgacagaaagctacaattaaaagagattcatagacaagtttctcacttacaacactgggcggcagcagt

SEQ ID NO: 890126 - DNA, 499 bp, Homo sapiens
agaaaagagtaataagagtggagacatggatactggaattaacatggatactcaggagcccaaatggagtcagtataagagaaatgttaaataaatgtttggattcacatttactttgtactctgtgccataaacaatatcttttttttctccccgcaactccatagataatgttgaaatacttcatgccttctgagatagtttttagaaggaattgtccaagaggaactaattgtagaatgacctaactaaatcttctagttttcttttcttcaatggccctgcgtargtcatgagtacttgaggattcacttttttctataaattcactataacccaaccttgccactttcaatagtttcttaacactgacattgtgggatgatgaccacttgtggaattctggttgagagataaaatggccttcataagcacacttcaggttaatcagacttaaggatatttaatgtttcccttgatactgtctaccaaacaaagt

SEQ ID NO: 890127 - DNA, 542 bp, Homo sapiens
tatgtagtgtatacatgttgtgtaaataatgcttgtattttgctttgggaaaccacctcttcctcactcttaatccatgtaggatgacctcacttttgagacctagaagtaacctcagtattcatgccttggtactgaaatttaactagtgacatttttggtaactattgtacaagagagattttcctctgccttgatgaattaggtaggaagatgaaagttgggcactgttagggtcattagaaggaaaggacctaactgaaaataaggctaacytggagaaaaacaagggcatgggatgcaggtggggttgggtggtggtggtagacaaaaaaccaaaacaaaaaacagagtcttcatgacatttttgatacaaccatatgtgaaggtaaactttgggacttcagagatttataaagtcaataaatcccacttcctttctgggggctttgaatcaatgttattgtatttctacaacttgcaaatgtaaaattcctggctaatagaaataagaaattttatttactcgaacacgtttttga

SEQ ID NO: 890128 - DNA, 621 bp, Homo sapiens
ggagagcaaacccatgtggaaaaataacaaacaataacaacaaagcaaaaacaaaagcagtgaaggcagaggcccagtagcaagcaatttaatagtggtaaatacagcccattcctcttctctgctggcaggtggggcggctaccwgcagacagtgacatcgcagtgttctatgctacttgctgctgcctgctgcaaacacacacaagcacacacatgcatgcagacagacaagtgcacacacgtaagtgcacatgcatgcacacagaggtgaacacatgtgcatgcataagacacacaatgtattcacacacacacccatgcacacacaaacacatgcatatatgcatatatatgtgagcacagagatgcacaaatatgcaccacacagacacagagatacacatgctcacacctgcacacacacgtgtgagcacacattatgcatgcccgcacacaacataagctacgtttccactgctacagcagcttgtggcaattttctttatcagcctttgcaaatgaacccatgaaaatatgagggagagatggagaggtgatagaagattggcagacacacacagtgctagtggtgcccaggctccattttcagtagccatgg

SEQ ID NO: 890129 - DNA, 577 bp, Homo sapiens
aacagacccagggaattgctaaggattcttgccagtccaggctcccaagccacacaacactgtcttgaatggccaccttggccttccacaaactggctatcagcaataactccctctacttgtttttcctaaccattgtcatatccttccccactagaagatacgcttcatgagaacagaaaccctgtctttcttgtgcattgctccatcaacaggcctagaatagtgcctggaacatagcacagaactaactgaatgagtgattgcgtgaatgaataattgctrtggcttcaagctaagctatgaccatctctcagaccactgcagtgctctcttgactcatctcccaacatctactcttgatccctccaattatttcttcactctgttaccagctcaattctttaaaaacacacaactcactctcccagctaatgacttttcgggggtcacagtttagatcatattccctaatggcctgcacagtcccacctaccccttcagcctcctcctgcagccctatgctgtctgctgtggccatgctggccttctttcatccggggatattcccaccatt

SEQ ID NO: 890130 - DNA, 624 bp, Homo sapiens
atgatcaagtgaagaatgaaagagaactctcttctcttaccctgtgttagtttcctggggctgctataacaaatttactgcaaacttagtggcttaaaacaacagatattgtccaggcacggtggctcatgcctgtaatcccagcactttgggaggcccgggggggcggatcacgaggtcaggagattgagaccatcctggctaacatggtgaaaccctgtttctactaaaaatacaaaaaattagcctggcctggtggcatgtgcctgtagtcccagctactcgggaggctgaggcaggagaatcgcttgagcctgggaggcagaggttgccgtgagctgagatcgaaccactgcagtccagcccgggtgtcggagtgagactctgtctgaaaaaaacaaacaaacaaacaaacaaacaaaacaaacaaaaaaamccccaaaaaccagatgtttattctctcacagttctggagaccagaattccaaaatcagtatcacggagctcaaaccagggctatgctccctccagaggctccaggagagaatctgctccttgcctctcccagcttccaggggctgccgacattcgttgactgcatcactctgatctttgaggccagca

SEQ ID NO: 890131 - DNA, 641 bp, Homo sapiens
caaaccaagaagtatgtccttggaatgcatcctccactttagcaaaagaattatgtgttttgtttgctcttcatcatgtaactcttgaataaatttggatgcaacagattaagggcataaccaggaaatatttcttgtgatataactgatatctgggtttgttcacttaatcattcatttgacaaacatgtgatgagggctcaccatgagccggataccttgctaggcattgggtgggtatacaatggagaacaaagcagacatgttctctgccctcatagaggttgtaagctaatgggagagacagatattaaaccaataaccaataatcacacaaacaagaaatttatgcatttagataactgcatgaaatgaaagtcctgagtcctattagaaagtgtaacagggatttctaacctctatgaagagacacaggagagcttgactcaacttgagagactgaaaaggmccgtgtagccagcgaagtgcatgaggggcagttctgcaggaaaaagggctggagagacaggcaggggcagaacacagatgccttgcatccctgttaaggattttgtattttatcccaagtgagatgaacaacactgaaggcagtgacatggagcaggagagtgacataatct

SEQ ID NO: 890132 - DNA, 627 bp, Homo sapiens
ttacctaggagttgcagtcattgtggcttagcttgcccttcaagtttacttagagacccagagctctttaccccaaggtggtgaggcttgctggaactcaatctccaaccactaggatgggcaagcttgccagcactcaagctcccctctgactggggctggtttaaatgctccctctgtgtgggggcatcagctgagtttgttcgggttttgctttctgctgtgatagggcagcactgagtttaatgcaatgtatgccaattcttgtgctttcctttttctaagcacaaagattttctcttcacaccacatagctagtaccargagatggggaagggatgatgtcagcaattcaagactgtctttcctattctcttcagatcctttttcagcaatacgaagttaaatcaaggtactatgagtgcttacctgatttttggttcttatgaaaatgctttttttttgtgggggggtggtgcgcggggttggggtagggttcgatagtaattaaattggtgtccttgccatcagggatgatcagtggaggcttctatttgaccatcttgctccacccctctactggttgcactttaattgtggaatctgtataacttcttctatgaatct

SEQ ID NO: 890133 - DNA, 628 bp, Homo sapiens
acatacacttcaaggtctttgtatttgctcttcctttaggctctaatgctttctgccgagaccagctcagctggggagaccctaacccagtggcactagaggaattaaagacacacacacagaaatatagaggtgtgaagtgggaaatcaggggtctcacagcctttagagctgagagccccaaacagagatttacccacatatttgttaacagcaaaccagtcattaacattgtttctataaatattaaattaactaaaagtatcccttatgggaaacgaagggatgggccgaattaaagggataggttgggctagttaactgcagcaggagcatgtccttaaggcacagattgctcatgctattktttgtggcttaagaatgcctttaagcggttttccgctttgggcaggccaggtgttccttaccctcattcccgtaaacccacagccttccagcgtgggtgttagggccattatgaacatgttacagtgctgtagagattttgtttatggccaggtttggggccagtttatggccagattttgggaggcctgctcccaacaactttccttcctaataacacaaggccctgtacccaacttttttaaggattctgcaaaaatgt

SEQ ID NO: 890134 - DNA, 677 bp, Homo sapiens
caccacttcaatagctgccaatctcacctcttttgaggactgtttattcacagccaaagcctggaacttcttcactgtgttaccttggtttagaaaaatgcacccagcatccctagataatattttggaatagtttctaactgatcagccyctactgagattgctccttcattcaagcgtgtcagaaataatcattttaattttctatgaatgccttcatggcacttcctgcttgcgtaaccattgttttaagatgttattgcaaatgacagtcttttgagactccagcatagctattgtctacagaatttttttgcaccactttttttaaaaataaaatattttatcccctaaatactgcagtatcttagttaatctcccaacactgcctgtaaacagaaagaactttttttttttttttagatggggatcttgctctgtcacccaggctggagtgaacctggtgcaatcatgacacactgcagccttgacctccttggctcaagcgattctcccacccaggccttctgagtagctgggactataggtgtgtgccccaacacctggctgatttgggggaattattgtggagacggggtcttgctctattatccaagttggtcttgaactgctgggctcaagcagtcctcccaccttggcctcccgaaatgctgaga

SEQ ID NO: 890135 - DNA, 677 bp, Homo sapiens
caccacttcaatagctgccaatctcacctcttttgaggactgtttattcacagccaaagcctggaacttcttcactgtgttaccttggtttagaaaaatgcacccagcatccctagataatattttggaatagtttctaactgatcagcctctactgagattgctccttcattcaagcgtgtcagaaatmatcattttaattttctatgaatgccttcatggcacttcctgcttgcgtaaccattgttttaagatgttattgcaaatgacagtcttttgagactccagcatagctattgtctacagaatttttttgcaccactttttttaaaaataaaatattttatcccctaaatactgcagtatcttagttaatctcccaacactgcctgtaaacagaaagaactttttttttttttttagatggggatcttgctctgtcacccaggctggagtgaacctggtgcaatcatgacacactgcagccttgacctccttggctcaagcgattctcccacccaggccttctgagtagctgggactataggtgtgtgccccaacacctggctgatttgggggaattattgtggagacggggtcttgctctattatccaagttggtcttgaactgctgggctcaagcagtcctcccaccttggcctcccgaaatgctgaga

SEQ ID NO: 890136 - DNA, 677 bp, Homo sapiens
caccacttcaatagctgccaatctcacctcttttgaggactgtttattcacagccaaagcctggaacttcttcactgtgttaccttggtttagaaaaatgcacccagcatccctagataatattttggaatagtttctaactgatcagcctctactgagattgctccttcattcaagcgtgtcagaaataatcattttaattttctatgaatgccttcatggcacttcctgcttgcgtaaccattgttttaagatgttattgcaaatgacagtcttttgagactccagcatagctattgtctacagaatttttttgcaccacttttttwaaaaataaaatattttatcccctaaatactgcagtatcttagttaatctcccaacactgcctgtaaacagaaagaactttttttttttttttagatggggatcttgctctgtcacccaggctggagtgaacctggtgcaatcatgacacactgcagccttgacctccttggctcaagcgattctcccacccaggccttctgagtagctgggactataggtgtgtgccccaacacctggctgatttgggggaattattgtggagacggggtcttgctctattatccaagttggtcttgaactgctgggctcaagcagtcctcccaccttggcctcccgaaatgctgaga

SEQ ID NO: 890137 - DNA, 677 bp, Homo sapiens
caccacttcaatagctgccaatctcacctcttttgaggactgtttattcacagccaaagcctggaacttcttcactgtgttaccttggtttagaaaaatgcacccagcatccctagataatattttggaatagtttctaactgatcagcctctactgagattgctccttcattcaagcgtgtcagaaataatcattttaattttctatgaatgccttcatggcacttcctgcttgcgtaaccattgttttaagatgttattgcaaatgacagtcttttgagactccagcatagctattgtctacagaatttttttgcaccactttttttaaaaataaaatattttatcccctaaatactgcagtatcttagttaatctcccaacactgcctgtaaacagaaagaactttttttttttttttagatggggatcttgctctgtcacccaggctggagtgaacctggtgcaatcatgacacactgcagccttgayctccttggctcaagcgattctcccacccaggccttctgagtagctgggactataggtgtgtgccccaacacctggctgatttgggggaattattgtggagacggggtcttgctctattatccaagttggtcttgaactgctgggctcaagcagtcctcccaccttggcctcccgaaatgctgaga

SEQ ID NO: 890138 - DNA, 583 bp, Homo sapiens
cagtccagggccctccggggtccatgagccatcagactccatgaacatggtagcaaagccaggcctctgaaggcagtttccctgccgggactccagcccccactgtatttaaagatggcaaagtgcccacccaaatagcctcatcattgctgagggtctgtacatgacagtgactggggcgtaggcagctgcacacaccagggctgagtcccagcacacrtgttctacctgtgtgactccgagccttacttttctcatctgtacacagtctctgtctcaaggctattggaatgagtcaatgatagagtgcacgtaaatcacttgcacagagagttgttcaaacaatggtagctagaactgctattgatctattgtggggtaattgtcttaactgctttgaaggattcagccctatgtgttcctttgtccagtcagatgggaaaatataaatgagcccttctcaatgttaggaatgacaagatcaggccaagacccctctttctcagactatccggaagatacacagatgacctggacagtgtctgcaggctcctgtgtatcctgaggcttcctgagggccaag

SEQ ID NO: 890139 - DNA, 583 bp, Homo sapiens
cagtccagggccctccggggtccatgagccatcagactccatgaacatggtagcaaagccaggcctctgaaggcagtttccctgccgggactccagcccccactgtatttaaagatggcaaagtgcccacccaaatagcctcatcattgctgagggtctgtacatgacagtgactggggcgtaggcagctgcacacaccagggctgagtcccagcacacgtgttctacctgtgtgactccgagccttasttttctcatctgtacacagtctctgtctcaaggctattggaatgagtcaatgatagagtgcacgtaaatcacttgcacagagagttgttcaaacaatggtagctagaactgctattgatctattgtggggtaattgtcttaactgctttgaaggattcagccctatgtgttcctttgtccagtcagatgggaaaatataaatgagcccttctcaatgttaggaatgacaagatcaggccaagacccctctttctcagactatccggaagatacacagatgacctggacagtgtctgcaggctcctgtgtatcctgaggcttcctgagggccaag

SEQ ID NO: 890140 - DNA, 658 bp, Homo sapiens
cccaggctggagtgcagtggcacaatcttggctcaccacaacctccatttcccaggttcaagtgattctcctgcctcagcctcctgagtagctgggattacaggcatgtgccaccacgcctgactaatattgcatttttagtagagatggggtttctccatgttgatcaggctggtctggaactcctgacaccagatgatccaccccccttggcctcccaaagtactgggattacaggcatgagccaccgtgcccggcccttcttcctttatttctcgtggtttgctaatcaagctggcagaaagtttagggcaattcatggctacattcaacttccaacatcaagtggtaccttctagtgctgaaatcctattggcggcttggtctgttgaagatgtaacaagttttcagtgaaattttgtatttcctttgggtttattactaacagcatgaagagaaattgactaggcacaataagccaygttgtccaagctttaccaggtgaaaatcttggtttgtggttatttatttggttatgaaataaaatcatatacaaatgcatatgcatatgaaaatacacttttcattaaaaagccccagagtgctctgtcttgtctctaggcagtaatttgcacattctatataggttttccccatg

SEQ ID NO: 890141 - DNA, 688 bp, Homo sapiens
tagcgttaactattaacagtagcagcaacactatcaaagcatctattcatgtatattgtagtaagtgctatacacttaggatatttgatatgtaataattataatttcaaaatcgtaacaagctacaatctaagaaaatacacctatgtacttgtagttaggaaaacacaaatttttatttgtctataatcagttattttacatggcatggagaatcataattctctcttagaaggctttctgcattctgaggagaaaatacactgactttggagctaaattgaaataggttttaattatgcctctgctacttagtaactgtgtgacattgaggatttttcttaacctcccygagcccttttccttatctgtaaaataagagaataaaatcttacctcacgtagtttgtaaagagaaagcagaccatacgtgtgtcatgactgaaatacactgtggcctctactaaacagtcaatttatgaatgcccctgttgttccttgaaagttccaataaacacatagataaagacacacacacacacacacacacacacacagagaaatccttttccaaaagatctatctggaagcacctttgaactgctccaaacacacagcagtgttctgctggccttacttctactgagtggttcacctcaagtgtgtttaataaatatctgctgagatct

SEQ ID NO: 890142 - DNA, 660 bp, Homo sapiens
gaatgccttttgcctcctgctatgattctgaggcctctctggccgtgtgaaactataagtccaattaaacttactcttttttttcccggtttcagatatctttatcagcagtgtgaaaatgaactaatacagtaagtaaattggtacgagtagagtggggcgtcgctgaaaagatagctgaaaatagggaagtgactttggaactgggtaacaggcagaggttggaagagtttggaaggctcagaagaagaaaggaaaatayggaaaagtttggaacctcctagagacttgttaaacggctttgacaaaaatgctgatagtgatatgaacaataaggtccaggctgaagtggtctcagatggagctgaggaacttgttgggaactggagcaaaggtgattcttgttatgttttagcaaagagactggtggcatttttcccttgccctagacatttgtgagactttgaacctaagagagattatttagggtgtctggtggaagaaatttctaagcagtaaagcattcaaaggtgacttggatgctgttaaaagcattccattttaaaagggaaacagatcataaaagttcagaaaatttgcaggctgacaatgcagtagaaaagaaaaacccatttttgggggagaaattcaagccagctg

SEQ ID NO: 890143 - DNA, 707 bp, Homo sapiens
agtggtagctacaccttctcaatgaaggaaaaaacatgttgatttagtctggctcaagctacttacctcgtcaaggtccgatacattgagtagagctggtctacatcttctacttgctccctttagtccataattctgtcttacctttggaatgccaacaatcttgtttctccagctctattttcttctccagtttcctaaatgtggatgttttcttgtttgtttgtgtttttaacttaaatttgtcactcctccactcccttaaatctttttctaactttccaatattgttctgcatatgtatgcccatggaagatactctggttctcccatagtttatactggaagaaagttgagccttttgctagatgtagttcttytctgttcttagagcatacagtagatcattgagtttctcttctctttcagcaatttaatttcacatttattccttcggcattgcctgaacttgctcgctgctttcactagaatggtaagtatattgtactatgctacaatatgccttttaataatgttttctcttttttaaaaagggtgacaaaatgaaagaatgctcagatatcagtatctccaatggaaaaaattagagttctttctgttttttcctgaatccttgttatggagttctttctagaattccatgtccaacatctatacatggatcagaaagtagcattaatgaatta

SEQ ID NO: 890144 - DNA, 553 bp, Homo sapiens
ctagctaaattggaggatcatgaggtggtggtgtgctgtgattgtgccactgcactccagcccaagtgacagagcgagaaaaaatgaatttctcttaaaaaaaaaatgaatctagagagagactcttcttgattgttctgccaggtgaggttatagtgaaaagactgctctggaccaagaagcaggctctcaccaggtamtaaatctgccagcaccttgatcttggaattctcagcctctacaactgtgagaaataaatatctgttgtttttaagccacccaggttatgatattttgttatatcatcctgaatggactaagagagtcctcatctttcaactttcattctttattgctagaactgtacaccacacacaatttctcactttgcttagcaaggataaagttgactaggggcacccattctacctttggcttcttctggctgggcatagtggctcacagttattggttaccaccaaatcaaggccagcctctagtttattcctcagcatgtgctagtgaagcagctgcttgccaggtgaatttgagg

SEQ ID NO: 890145 - DNA, 433 bp, Homo sapiens
tccccagcacccatcctttggaagccgtggtatcatctctaagatataactctgtagcttttaatttctccttttccttcctggtacctgaagatattcatgtctttattttgaattcagcttagaagttttttaaaaaatgggtctatttgatccattatgtgtttggagccaggcccgggaaaaagcttatacttcatgactcttcagtctgccatttctcttgaagttttataargttttttaggaggcgtgttactttacccttagttatattcatttgttttgtgctgccactgctgttttgtttggtgaattttctttgctcttgaacaatatttgatgttaaaaaggtcccatttcaagcagaaaacaggccattagtcacactctcccatggaactgagtttattttcctcacatagttctcatc

SEQ ID NO: 890146 - DNA, 655 bp, Homo sapiens
ctagaaggttaaatagtttgcccaaaataatttgctagtggatggaaatgctggtggaaagaaataacatctaacatcgagtgggaaactgcatatattccacatatgttagtaaattcaatctttacaacaaccttataagccaggaactcctactagccccattttttaaataaacaagttaggaaccagctattagtgatgactttgtttaagggatgaagcctagatttgaatccagagtttcaggctcacagaacgtattctcaacctttatactgtggtgtagtccaacttagtatggcatctgactgtaatttgagatttccatccatacactgtgctaagatgcacctataacatgctttacacactgcctggcacaaagaatgcrttttataattgaaagcgactattaatgtatgaatagcaatggtgtatttgcctgttacctttattacaaagatttctaaacattcaacacctattgttggagtcatagaatactggattccgcatattttcaggttatatttataaagattgagattcagtggcaatatgtaacttttcaaaattgataaggtgtcagtggcaggtcaggctggcaaggcagtaaataaagttcctattgtgcttgactgcatggtacccc

SEQ ID NO: 890147 - DNA, 605 bp, Homo sapiens
gaattattttgtagctgacaaaactaatgtcaatttctgagtcctgataaattttcattgcatccccaaagtaactatgcaataaaaaaataagtacacagcttctcctgatcttgatttttatgagttatacatgtttatttctttgtttaataataataataatagctaaycttgattgagcactaaaacccagaccctgttcaagctttttaaaaatttaatactcaacatcaatctgagatgttacaacaattaacctcagaaataatgaagaatttactgaagggcatctagttgatgatggctggaggcaggattttttttttttttttttttactgttattttaagttcaggagtacacgtgcaggatgtgcaaacttgttacataggtaaatgtgtgtcatgggggttggttgtacagattatttcatcgcccgtgtattaagcctagtatccattagttatttttcctagttccctccctcctcccaccctttatcctccaatagacctcagtgtgtgttattcccctctatgtgtctgtgtgttctcattatttagctcccacttataagtgagaacatgaagtatttcattttc

SEQ ID NO: 890148 - DNA, 613 bp, Homo sapiens
ccgtttccaacgaaatcctcaaagctatccaaatatcctcttgcagattttacaaaaagagtgtttcaaaactgctctatcaaaagaaagcttcaacactgttagttgagggcgcacatcacaaataagattctgagaatgcttctgtctagttttcaggggaagatatttcctttttcaccataggcctgaaagcgctccaaatgtccacatccagatactacaaaaagagtgtttcaaacctgctctctgaaagggaatgttcaactctgtgacttgaatgcaaacatcacaaagaagtttctgggaatgctgcwgtctgctttttatatgtaatcccgtttccaacgaaatcctcaaagctagacaaatatccatccacttgcagattccacaaaaagagtgtttcaaaactgctctatcaaaagaatgcttcaacactgttagttgaaggcgcacatcacaaataagtttctgagaatgcttctgtctagttttcaggggaagatatttccttttaaaccataggcctgaaagcgctccaaatgtccacatccagatactacaaaaagagtgtttcaaacctgctctatgaaagggactgttcaacact

SEQ ID NO: 890149 - DNA, 613 bp, Homo sapiens
ccgtttccaacgaaatcctcaaagctatccaaatatcctcttgcagattttacaaaaagagtgtttcaaaactgctctatcaaaagaaagcttcaacactgttagttgagggcgcacatcacaaataagattctgagaatgcttctgtctagttttcaggggaagatatttcctttttcaccataggcctgaaagcgctccaaatgtccacatccagatactacaaaaagagtgtttcaaacctgctctctgaaagggaatgttcaactctgtgacttgaatgcaaacatcacaaagaagtttctgggaatgctgctgtctgctttttatatgtaatcccgtttccaacgaaatcctcaaagctasacaaatatccatccacttgcagattccacaaaaagagtgtttcaaaactgctctatcaaaagaatgcttcaacactgttagttgaaggcgcacatcacaaataagtttctgagaatgcttctgtctagttttcaggggaagatatttccttttaaaccataggcctgaaagcgctccaaatgtccacatccagatactacaaaaagagtgtttcaaacctgctctatgaaagggactgttcaacact

SEQ ID NO: 890150 - DNA, 552 bp, Homo sapiens
aaaaagagtgtttcaaacctgctctatgaaagggaatgttcaactctgtgacttgaatgcaaacatcacaaagaagtttctgggaatgctgctgtctgctttttatatgtaatcccgtttccaacgaaatcctcaaagctagacaaatatccacttgcagattccacaaaaagagtgtttcaaaactgctctatcaaaagratgcttcaacactgttagttgaaggcgcacatcacaaataagtttctgagaatgcttctgtctagttttcaggggaagatatttccttttaaaccataggcctgaaagcgctccaaatgtccacatccagatactacaaaaagagtgtttcaaacctgctctatgaaagggactgttcaacactgtgacttcaattgaaacatcccaatgaagcttctgagaatgcttctgtgtagagtttatatgaagacaatcccgtttccaacgaaatcctcaaagctatccaaatatcctcttgcagattttacaaaaagagtgtttcaaaactgctctatcaaaagaaagcttcaa

SEQ ID NO: 890151 - DNA, 585 bp, Homo sapiens
caaatctatgactgattagtgtacgtgaaagagatgaggagaatggagccaacttggaaaacatacttcagaatatcattcatgagaatatccccaacctatccagacagaccaacattccaattcaggaaatccagagaatctcagtaagataagccacgagaagatcatccccaagacatataatcatcagattctccaaggtcaaaatgaaagaaacaatgttaaaggcagctagggagaaaggcaatgtcacctgcaaagggaattccatcagacttagcagamttctcagctgaaaccctacaagccagaaaagatattcaacttcttaaagaaaagaaatttcacgtagtatggcagagacagatataccatataataacatggtgttattataaatggtttaaaaaaaaaaagaaaataaatttcaacccagaatttcatgtccagcaaaattaagcatcataagtgaaggagaaacaagatccttttcagacaagccaatgctgagagaaataattatcaccagatctacctttccagagctcctgaatgaagcacttaatatggggaagaaagacc

SEQ ID NO: 890152 - DNA, 606 bp, Homo sapiens
agtaaaatgaacatttatgttttgatcacagattttttttaaaacaacggaatctgtctttgaagccttgaacacagctacttttctatttatttactgagcacttaatttggttttctgattcgaatcaacatttttctgtcattgcctttctctacatggttttgtgtctctttaattttgttgacattatgtcagcaaagatgtctagatctcttcttcaaagtctttaaatcgtcacacatctctccgcccctttccttttttctaaaactgcctgtttcctttttctcctcaactcagatattaaagatgttttcttctctttttctacattgaaagatctccttgatgcttttkgtgtgtacttttttttctctgatagactgtggtcaatgcatatcaaaatgtattttttgtctttttcaaacgtatgtgttttacttttttaacttggttacttatctctgggttatggcttatatttagtaataggttattttacctagcataccaacatggatatgagtagtttatttacaaaaagtgtacagttaggccaggtgtggtggctcacacctgtaatcccagcactttgggagagca

SEQ ID NO: 890153 - DNA, 606 bp, Homo sapiens
agtaaaatgaacatttatgttttgatcacagattttttttaaaacaacggaatctgtctttgaagccttgaacacagctacttttctatttatttactgagcacttaatttggttttctgattcgaatcaacatttttctgtcattgcctttctctacatggttttgtgtctctttaattttgttgacattatgtcagcaaagatgtctagatctcttcttcaaagtctttaaatcgtcacacatctctccgcccctttccttttttctaaaactgcctgtttcctttttctcctcaactcagatattaaagatgttttcttctctttttctacattgaaagatctccttgatgctttttgtgtgtacttttttttctctgatagactgtggtcaatgcatatcaaaatgtattttttgwctttttcaaacgtatgtgttttacttttttaacttggttacttatctctgggttatggcttatatttagtaataggttattttacctagcataccaacatggatatgagtagtttatttacaaaaagtgtacagttaggccaggtgtggtggctcacacctgtaatcccagcactttgggagagca

SEQ ID NO: 890154 - DNA, 582 bp, Homo sapiens
tggatagtaaaaaactacacactaaaatgacttatttcagaaggtagtaattgtcatatgctaaaaagctgagcctaaagttctatagcatttgcatggtctcagctctagcaaatttctcacccatttctgcttcaatttcttcatctgcaaaattataaaaagaattgtgcctatttcaaatggtggttgtgaggattctatgttataatgcctgtaaagctcttaacacagttcattgcatattgtaagaccttaatcaaagctagtttttataatcatacaagatttagcttggagataaagatgtccacytgtattggaattaataatccatgtttattaccctaaaaataataatgagatatgatgttgtgtagccctaggaggggagctaaagctcacatggaaactgaagaacatcaggtaaatccaattatctgagcactgagcagcaggaggtgtttgatatacattagttggacatagcaagctgtaaaggagatggtacttttaaacaggactcatgtcatcaagaagtttctatgccaacaataattcatcataaatttaggaaacagt

SEQ ID NO: 890155 - DNA, 578 bp, Homo sapiens
ctttagttattgttgctacttacttatgttatggcaggatcagattactccagagaaaacactagtgttgccaggtggctgttggaatcctgaagttcttctattgacatagtctgaggtgccacagcctgttagcataccgggaagccctaccccggtgatctgacacggaatctgtccagcccactttggagaagtaatcaggcttatacttgatgcactgtttttttgtttttttgttttttctttcctcactcttttcaaatctattctcaatactcaagagagcagtgttcaccagggatctggaagttcccactgaaaaggatatttatttatttatttatttattgacagagtcttgctctattccccaggmtggagtgcagtggcgtgatctcagcacactgcaacctctgccttccaggttcaagtgattctcctgcctcagcctcctgagtagctgggattacaggcacccaccaccactcctggctaattttttgtatttttagtagagacagggttttgtcatgttggccaggctggtgtcaaattcctgacctcaggttatctgc

SEQ ID NO: 890156 - DNA, 603 bp, Homo sapiens
agtatattctgggtaaagagaaaccattgtgaaaatgggcaaaaggtgggacattgccagacatgatcaagggaactgaattgaaatcgttgcaacacaccaatcggatagaaaattagattgagaataaatgaaaacattggrttacataatacagtggagataagtgtcagtttttttttttttttttgagacggagtctcactctgtcacccaggttggagtgcagtggagtaatctcggctcactgcagccaccgcctcccgggttcaggcgattctcctgcctcagcctccccagtagctgggaccacaggcacgtgtcaccacaccccgataattttttgtattttagtacagacaggatttcattatgttgaccgaaatggtctggaactcctgacctcgtgatccgctcacctcggcctcccaaagtgctgggattacaggcgtgagccaccgcacccggccagtgtcagatgtttttaaacgacctttttgtaggtttaaggatttatgttatgtttttgaaaaataatgtggcataatgcttgtgacttttcaggaaaaaaaaaaaagcaaacaaaaaaaaaaaacatttctg

SEQ ID NO: 890157 - DNA, 603 bp, Homo sapiens
agtatattctgggtaaagagaaaccattgtgaaaatgggcaaaaggtgggacattgccagacatgatcaagggaactgaattgaaatcgttgcaacacaccaatcggatagaaaattagattgagaataaatgaaaacattggattacataatacagtggagataagtgtcagtttttttttttttttttgagacggagtctcactctgtcacccaggttggagtgcagtggagtaatctcggctcactgcagccaccgcctcccgggttcaggcgattctcctgcctcagcctccccagtagctgggaccacaggcacgtgtcaccacaccccgataattttttgtattttagtacagacrggatttcattatgttgaccgaaatggtctggaactcctgacctcgtgatccgctcacctcggcctcccaaagtgctgggattacaggcgtgagccaccgcacccggccagtgtcagatgtttttaaacgacctttttgtaggtttaaggatttatgttatgtttttgaaaaataatgtggcataatgcttgtgacttttcaggaaaaaaaaaaaagcaaacaaaaaaaaaaaacatttctg

SEQ ID NO: 890158 - DNA, 569 bp, Homo sapiens
ttagaagacaacacaaaaacagaatcagcaggaaaacatccatgttcagcagcttgtgccttcctgcactgagactttaaactgagaatgctgaggataggatgatttaggaaaataaaatattcaaactgggtgaccgaacttcagaaatgtaatattttgccaattcattttaaggaaaaaaagaaaaaaacataaatccaagtacacaaaaaacacctatacgtagactacaggttcttacacagttactatatgcaacactggcttgcctattagcttcctggcattttgatcgaaataattttgcatttggataaagttaaaatatctctactcttacatctttatgttacccacacaatgagtggtttgaccacttggcagatgacagtttaatggycagaatcaaagagtgtttaacaatttgcagcaagtaaggaagattgtggggatagttcccaaagcagcatctccccaaacacatgtgaaaacagggcttttattgggagtggagagtagctgagtcatatatgcagaggtggagtaaagacagtgcaggcacagtt

SEQ ID NO: 890159 - DNA, 646 bp, Homo sapiens
tctgaatgagatcaatataaacagggttcattgtattttaaatagcaggatttaagtaggcttttattcataacagagatggacagtcctctaaattacgctgaggcatcaggggacgaaaggagagaggggagtaagtgacggcccggaaagcatatctgtgggatcctaaatgaagcaaaattaaaatgcatttttccagaaagccaaacaaattataagtaggaacaattaggtgacgacaattcctctagtagaaatatatatgtttctgttttcctatttataatggagctagaaggtatcagagtcctcctgctactggtttgaagctaagccttaatttagaataaaaatattcaggaaagaaatgggggcaaggactttggtctagatagaactgtaacccacacttaagagtttccagctagttagtaccagattttgactatgaacccacaagagaataaacagttcatcctgagaacgctggggttctgaatygtccaggaatccttcttattgtctaaaaacacgaatatcttatgtcatccaaaggcaccctcagagatatgttattttcttagggaataaatagttcatagttcactctggacttttgagcccaagtttaccaagtaacact

SEQ ID NO: 890160 - DNA, 619 bp, Homo sapiens
tctgccatgttggccaggctggtctcgaactcctgacttcaggtgatcctcctgcctcggcctcccaaagtgctgggattacaggtgtgagccacagtgcccagcctcttttttcttttgagacagagtctcactctgtcacccaggctggagcgcagtggtgcaatctcagcttattgcaatctccacctcccgggttcaaatgattctcctgcctcagcctcttgagtgtgccaccgcgccagctaatttttgcatttttggtagagacagggtttcaccatgttggccaggctggtctcaaactcctggcctcaaatgatccaccccagcctcccaaagtgctgggattacaggcatgagccaccatgccccacccttggcctcttttccatccctgtcmtacttccctacttgcctaccagtgtttcctgggatcagctcgcaaataaagtccttggacttgaatccttctttgatgactttgtgatgcgtcaacttggctaggttaaactacatttcccagaattccatttcctgtatttttctggttaaggttggccccaaaggacttactgtgggagatgtggagggcagaagggaggcagcagtcattttg

SEQ ID NO: 890161 - DNA, 627 bp, Homo sapiens
aacttccaacactagttgaataggagtggtgagagagggcatccctgtcttgttccagttttcaaagggaatgcttccagtttttgcccatgcagtatgatattgactgtgggtttgtcatagatagctcttattattttgagatacgtcccatcaataccaaatttattgagaatttttagcatgaagcattgctgaattttgtcaaaggccttttctgcatctattgagataatcatgtggtttttgtcgttggtgctgtttatatgctggattacgtttattgatttttgtatgttgaaccacccttgaatcccagggatgaagcccacttgatcatggtggataagccttttgatgtgctgttggcttcggtttgccagtattttattgaggatttttgcatcaatgttcattagggatattgttctaaaattatcttttttkttgttgtatctctgccaggctttggtatcaggatgatgctggcctcataaaatgagttagggaggattgcctctttttctattgattggaattgtttcaaaaggaatggtatcagctcctccttgaacctctggtagaatttggctgtgaatctgtctgttcctggacattttttggttt

SEQ ID NO: 890162 - DNA, 666 bp, Homo sapiens
gaaaacatacagacttgtaatcataatgaaaatcaccagcctagtagccactgaaactagaaaaagcagattggatttccctaaagcaccactcctgagaattgtcattacttgacctgtctggcagtttcatggaaacccccrttcagaaggagtgtcttcatttcacctatcttagagctcttccagtgttcacaacctgttctcagtgatgttttgcaaaaataatcagcagaaattgtttaaaattatgcccacttgaagtcgtgataacaattagggcaaacaagaaagtcagcaaaaaacttcagagggaaggctggtaaaggagatgtccatgggggcgctttgaaaacaaagacaaatttggggatatcaataaggccatgcacatatgttaagctgtatgcatagctagaaaagacctgagaaggccctaagcttttagctctgtctaacgttaagtctgcacaaacaggaaggtaaaggctaagacagagttgtaagctaactgtctgagcattaacagcctgcctcaacacagaaagagagcctgttaggaaagtctaggagacttactggtttcagatgttaaagaaaatctctttgcaatcattagttgaccattaatctaaataaggagaaacttaatggtcatacattata

SEQ ID NO: 890163 - DNA, 666 bp, Homo sapiens
gaaaacatacagacttgtaatcataatgaaaatcaccagcctagtagccactgaaactagaaaaagcagattggatttccctaaagcaccactcctgagaattgtcattacttgacctgtctggcagtttcatggaaacccccattcagaaggagtgtcttcatttcacctatcttagagctcttccagtgttcacaacctgttctcagtgatgttttgcaaaaataatcagcagaaattgtttaaaattatgcccacttgaagycgtgataacaattagggcaaacaagaaagtcagcaaaaaacttcagagggaaggctggtaaaggagatgtccatgggggcgctttgaaaacaaagacaaatttggggatatcaataaggccatgcacatatgttaagctgtatgcatagctagaaaagacctgagaaggccctaagcttttagctctgtctaacgttaagtctgcacaaacaggaaggtaaaggctaagacagagttgtaagctaactgtctgagcattaacagcctgcctcaacacagaaagagagcctgttaggaaagtctaggagacttactggtttcagatgttaaagaaaatctctttgcaatcattagttgaccattaatctaaataaggagaaacttaatggtcatacattata

SEQ ID NO: 890164 - DNA, 666 bp, Homo sapiens
gaaaacatacagacttgtaatcataatgaaaatcaccagcctagtagccactgaaactagaaaaagcagattggatttccctaaagcaccactcctgagaattgtcattacttgacctgtctggcagtttcatggaaacccccattcagaaggagtgtcttcatttcacctatcttagagctcttccagtgttcacaacctgttctcagtgatgttttgcaaaaataatcagcagaaattgtttaaaattatgcccacttgaagtcgtgataacaattagggcaaacaagaaagtcagcaaaaaacttcagagggaaggctggtaaaggagatgtccatgggggcgctttgaaaacaaagacaaatttggggatatcaataaggccatgyacatatgttaagctgtatgcatagctagaaaagacctgagaaggccctaagcttttagctctgtctaacgttaagtctgcacaaacaggaaggtaaaggctaagacagagttgtaagctaactgtctgagcattaacagcctgcctcaacacagaaagagagcctgttaggaaagtctaggagacttactggtttcagatgttaaagaaaatctctttgcaatcattagttgaccattaatctaaataaggagaaacttaatggtcatacattata

SEQ ID NO: 890165 - DNA, 596 bp, Homo sapiens
aaagtctatgagatatgccactctgctgttccaaagacttcccatattattcagaacaaaagaactcatttcctttctaaccttcatctccactctttttatattcattcctcttcaaccttaagtttcgtaagcatgccaggcatgctcctgccttgggacctttgacctgcttttctctacccggacttttcttctttctcagttactgaatgtcttactcccttaccttcatacagttctggttcaartgtagttttctcagggaggcccttccagaccatcctagctctgatactgtctaattgcttccctcttttattattttttttttaatttttatttatttatttttttatttttgagacggagtctctctctgtcgcccaggctggagtgcagtggcacgatcttggctcactgcaagctccacctcctgggttcccgccattctcctgcctcagccttctgagtagctgggactacaggcgcctgccaccacgcccagctaatttttttttttttgtatttttagtagagacagggtttcatcatgatagccggaattgtctcgatctcctgacctcgtgatctgc

SEQ ID NO: 890166 - DNA, 774 bp, Homo sapiens
agattatcatatggtttttgtcgttggttctgtttatatgctggattatgtttattgatttgcgtatgttgaacaagccttgcatcccagggatgaagcccacttgatcatggtggataagccttttggtgtgctactggattcagtttgccagtattttattgaagatttttgcatcgatgttcrtcagggatattggtctaaaattctcttttttttgttgtgtctctgccaggctttggtatcaggatgattctggcctcataaaatgagttggggagaattccctctttttctattgaatggaatagtttcagaaggaatggtaccagctcctctttgtacctctggtagaattcggctgtgaatccatctggtcctggactttttttggttggtaagctattaattattgcctcaattttagagcctgttattgctttattcagagattcaacttcttcatggtttagtcttgagaggatgtatgtgtcgaggaatttatccatttcttctagattttctagtttatttgcatagaggtgtttatagtattctctgatggtagtttgtatttctgtgggattggtggtgatatccccttttaattttttattgtgtctatttgattcttctctcttttcttctttattaatcttgctagtggtctatcaattttgttgatcttttcaaaaaaccagctcctggattcattgatttttttggagggttttttgtgtctctatttccttcagttctgctctgatcttagtt

SEQ ID NO: 890167 - DNA, 663 bp, Homo sapiens
tgcatataagttagcatagcagatttttaggctatttattattttgaaactcttaagtttacttgttgaataaatgtcctgtatagcaacatttattaaccacaggtatctatttattttgttatactttatataccatttatgataaagaccttttttttcagttttggtttatttgaaaccatagatggctctattgaataaggattatgaataagagtgggttatagtagagtaggtgatgaattgtgaagttttgtgttggrtctagtgaaggtgatagttttaccgaaagaccaggtcagcaacaaattacaggggcaggagttatggaaagtttgttcactgccgtagtctggcatccattttttaccttttatttgaatagatttagagtctttttattttttaagtgaccgcatcttgctttgtcacccaggatagagtatagtggtgtgatcatagctcactgcagcctcgaatctctgggctcaactgattctcctgcctcagcctcccaagtagctaggactacaggtgtgcacccaacatgtttgtctaattttttaaaaattttgtacacatggggtcttgctgttttgccaggctgttcttgaactcctgggttcaagcatcctcttgcctcagccttagaaagtgctg

SEQ ID NO: 890168 - DNA, 663 bp, Homo sapiens
tgcatataagttagcatagcagatttttaggctatttattattttgaaactcttaagtttacttgttgaataaatgtcctgtatagcaacatttattaaccacaggtatctatttattttgttatactttatataccatttatgataaagaccttttttttcagttttggtttatttgaaaccatagatggctctattgaataaggattatgaataagagtgggttatagtagagtaggtgatgaattgtgaagttttgtgttggatctagtgaaggtgatagttttaccgaaagaccaggtcagcaacaaattacaggggcaggagttatggaaagtttgttcactgccgtrgtctggcatccattttttaccttttatttgaatagatttagagtctttttattttttaagtgaccgcatcttgctttgtcacccaggatagagtatagtggtgtgatcatagctcactgcagcctcgaatctctgggctcaactgattctcctgcctcagcctcccaagtagctaggactacaggtgtgcacccaacatgtttgtctaattttttaaaaattttgtacacatggggtcttgctgttttgccaggctgttcttgaactcctgggttcaagcatcctcttgcctcagccttagaaagtgctg

SEQ ID NO: 890169 - DNA, 655 bp, Homo sapiens
ggcgtggtggctcacacctgtaatcccagcactttgggaggtcaagatgggcagattatgaggtcaggagttcaagactagcctgaccaatatggtgaaactccatctctactaaaaataaaaaaattagctgggtgtggtggcatgtccctgtaatcccaactactcaggaggctgaggcaggagaattgcttgaacccaggaggcagaggcgttgcagtcaactgagatcatgccacagcactccagcctgggcaacagagcaagactatgtctcaaaaaaaaaaaaaaaaaaaaagaaaaagagtaaattacattacctggtatgcaactgacagtgaatatgagaaaaaatgaattaataaaaattattaaagtgttggtgaacyttattagaaataaaatcaatgcaaagtaaaaacacaaaaatataataccacactcattaatatccctcttttacaaaaagtcatgaagcctacatttttaattatgcctcctttgttacatcatccaatttctgttcaccttacaatctttaaaacaatatggatgaaatggtttttgatctgatgtagtcatcaggtaatcttcactcctaaagtatgagtctaaatttaatatttttttctgaaaaaaatggtaagattgaaag

SEQ ID NO: 890170 - DNA, 547 bp, Homo sapiens
aaaccagcatggtactgatataaaaacggacacagagtagcagccagtgaagtctaggcgttgctgggtcttcctctcctctgcctaaggcttttgcaatatacaaaggactctttccctggctcttgctaggggctctcccatttgccttatgtgctccagggccaaaatgtgtgaggacaactgccataggtgagmaagccactgagaacaacaaaacagaataaaaagcctagaaataaatccacatatcttcaactaactgatttttggcaaaggagccaagaatacacaatggagacaggacaatctctttaataaattgttttagagaaactggatatactcatgcagaagaatgaaattagacccctatctcacaccatatacaaaaataaactgaaatggtttaaaaatgtaatgtaaagcctaaaatgataaaatgctagaagaatacatagaggaaaagctccatgatgtttgctgggcaatgatttttttaatacaaccctaaaaacacaggcaacaaaagcaaaagtaaataaat

SEQ ID NO: 890171 - DNA, 611 bp, Homo sapiens
atgtggaaagtttttatctattattttgttatatatgtttaactatttcaatatctctttaccttctgggatatcaataatttgtatatttggtcacttcatggtgttccatataccatgaaggctttgtttagctttttttaattctttttttttcctttatattttcatggctgggttatttcwaaagttgaacctgaactgtcttcaggttcagaggttcttttgtctgcttgaactaatctattgttgaagctttcaaatgtgttatgttgttcattcaatgaattgttcagttgcagaatttctgtttgattcttttatgacatctatgtctttggtaaacttctcattcatatcctgaattgtttttcagatttctttgtattgtttttcagaattatcttgtatctcactatccttctttagaatctaatttggattctttttctggaatttcattaattgctttttgattgagatctgtttctggagaattattgtgttccttttttaaaaaatttatttacattttttttcttaaagaccagtatgatagtatatcttcctttaaaagtgtcattttcctggctttttcatgtttcctgtgt

SEQ ID NO: 890172 - DNA, 533 bp, Homo sapiens
ttttattgaaaccttttctgtgtctgttgagataatcacgtggttttggtcttcagttctctttatatgatgaatctcctttattgatttgtgtatgttgaaccaaccttgcatcccggggatgaggcctgcttgatcattgtggattagctttttgatgtgctgctgggattcagtttgtgagtattttgttgaggatttttacatgaatgttcagcaaggatrttggcctgaagttttctttttttgttgtatctctgccaagttttggtatcaggatgatgctggcctcacacaatgagttggtgaggagtccttcctcctcagttttttggagtggtctctgtaggaatgctaccagtacttctttgaacatctggtagaattcgactgaacccatcaggtcccaagacttttcttggttgttgggctatttattactgattcaaattcagagctcgttattggtctgttcatggaatcagtttctttctggttcagtcttggaagggtgtatgtgtccaggaatttat

SEQ ID NO: 890173 - DNA, 590 bp, Homo sapiens
gctagaccacataataatgttgcagtatttataaaagtactttagtataatagcgtatgtttatggaacactacttttagtcaggcactgttctaagccttaatacgtattaactcatttaatcctcgtaacaaccctttgttgttattatcattcctcttgtataaaakataaaactaagcacagagaagttaaggttgccccaaattacacagcaattatgtactagaggccaggatttagcacgagcagtttgattccagaacccagtctcttccatgcccttctgctgctctggacacacattacctgtatctaacttataacattccttcttctattgtaatagatttcttgatcaatggatttcccatttatagtcggtaattgtgattgcagtactgcttattctattctttttcctgcctgggggataaattcatttcaaattataacataataaaatgtacatatagtaaatatggctggaatataccaggaaacaagcagttttgccatcaattatgtaaggcttcaaatgcaacacacataattgctttatttctcaatcttgtaactattagcttcca

SEQ ID NO: 890174 - DNA, 637 bp, Homo sapiens
gaggtatacaaagagtaaaaaacatgctttaactgtctcataatctcactttctagtactgtattcttcttgctaggcttggcacagtagcaggtgctgcagccaacacagtcaggtctctatactcagaggcctttgacgggctggggaatgttctctctggttgatgttacacagatcattttaggtctcctctgattggggtggggtaagaatgagcactagtactttctacttatttctacctatgttctgcrtgtgtttccctatgggttaggtaactggattgtcccccaactttaagaacacacatggcctgtgaattattgaaattcagacaagcttttgttctttccagtttgggaacttgtcctatgtgtatactatttaagaacagggaaaaacatttttagaaggcaaacatgaatttttatatatcagccctgactctttctttctctgcaacttctgttgatgcttatcctctcttgactctatcagtaggtatgtatggggcagtgattaaggctgtggagttttgcattcaagtagacttgagttccaacacgtccctccacttagcaacttcatgaccttggataatgtacttaactgaggaagtctaagttttctaatg

SEQ ID NO: 890175 - DNA, 597 bp, Homo sapiens
gaagtttgatgtttacctggggcctgatacctacctggtgcccaagtattctcatgtgcctaacatccactagttggcctggtgttcatctgagggcttggtgtcaaccagtggctttatgtacacctggattctagtgtcctcctggggccttatgcctaccaggagtctggtgtacccctggggtctagtatccacctggagtctgggcgtccacctggagcctaatgttgaggttagactgagtgtcagcctgaggcctgatgtctactagggcataggtattcacctggggcttgttgtttacctggggactaatgtcaaccttgagcctaggtatccacctggggaatagtgtccagttgcagccagatgtccacctatggcctgaagcatggttgttatcctaaggycttgtattagtccattttcacagttataaaaaactacctgatattaggcaacttatgaggaaaagaggtttaactgacccacagttcttcaggcttaatagggagcatgactgggcgggctcaggacacttacaatcatgatgtaaagccaagaggaagtaagccctttttaccatgtgggagg

SEQ ID NO: 890176 - DNA, 597 bp, Homo sapiens
gaagtttgatgtttacctggggcctgatacctacctggtgcccaagtattctcatgtgcctaacatccactagttggcctggtgttcatctgagggcttggtgtcaaccagtggctttatgtacacctggattctagtgtcctcctggggccttatgcctaccaggagtctggtgtacccctggggtctagtatccacctggagtctgggcgtccacctggagcctaatgttgaggttagactgagtgtcagcctgaggcctgatgtctactagggcataggtattcacctggggcttgttgtttacctggggactaatgtcaaccttgagcctaggtatccacctggggaatagtgtccagttgcagccagatgtccacctatggcctgaagcatggttgttatcctaaggccttgtattagtccattttcacagttataaaawactacctgatattaggcaacttatgaggaaaagaggtttaactgacccacagttcttcaggcttaatagggagcatgactgggcgggctcaggacacttacaatcatgatgtaaagccaagaggaagtaagccctttttaccatgtgggagg

SEQ ID NO: 890177 - DNA, 499 bp, Homo sapiens
attttctaaacttcgggtaatatctgtgacttagtaaatgttctttaaaaggtgggataatatttttattttgtttaattatatgtgtttttaaactaattttataggaaaaataatttctttccttccctgttataccaaatacagcctttagctcaagacacaagtaattccaggaaaactggaatgtaagttcaatatgttgcactaagtacatttgaaagtgcatgcatttttattttaattcatcattctcagtcaactatcgcaaggacaaaaaaccaaacaccgcatgttctcacttataggtrggaattgaacaatgagaacacatgaacacaggaaggggaacatcacactctgggggctgttgtggggtggggagagcggggagggatagcattaggagatatgcctaaggctaaatgtcgagttaatgggtgcagcacaccagcatggcacaagtatacatatgtaatgtatacatatgttaatgcac

SEQ ID NO: 890178 - DNA, 499 bp, Homo sapiens
attttctaaacttcgggtaatatctgtgacttagtaaatgttctttaaaaggtgggataatatttttattttgtttaattatatgtgtttttaaactaattttataggaaaaataatttctttccttccctgttataccaaatacagcctttagctcaagacacaagtaattccaggaaaactggaatgtaagttcaatatgttgcactaagtacatttgaaagtgcatgcatttttattttaattcatcattctcagtcaactatcgcaaggacaaaaaaccaaacaccgcatgttctcacttataggtgggaattgaacaatgagaacacaygaacacaggaaggggaacatcacactctgggggctgttgtggggtggggagagcggggagggatagcattaggagatatgcctaaggctaaatgtcgagttaatgggtgcagcacaccagcatggcacaagtatacatatgtaatgtatacatatgttaatgcac

SEQ ID NO: 890179 - DNA, 599 bp, Homo sapiens
ccttacaacataacttaacccaaatacattgaaaaccccttggatttagacctacagggaggtggtttttctttctgtaccatagcacgcatagttgaagcaaacatactccttcaaacataatactcttacataatagaaagtgttctctgttttctggatgaaaaggcatgaggtcttttgtattagcaaactgaaactgttaactataaaaagtcaaaaatcaaaggtgctctcacttatttataaggaccttgaatggctcagattcatcaggaaaaaaaaacattcctcagagagtctgatctcaagctgatgtttctttattgaatttgattctaaaccatcatttttgttgaatcctctgtgctttcagaatgctgaaatgtaaaatatttttaacttatgaaagagataatttatttttattttctcctawacatttttaagtagcaccttaaaaaatagacaaatccatccagggtcaaaagaactcaactcaattctctatcactgtgaaaatagacttagttcttcattacaaaagcactacaataactacaaaaattatacctcctggagtatatatttacatatcc

SEQ ID NO: 890180 - DNA, 681 bp, Homo sapiens
gcaactatttacattgtattaggtattataagtaatcacgagatttaaagtatgcaagaggatgtgcacaggtaatatgccatgattttatttttcctccacctcttccccctccctgcatcatgttatataagagacttgagcatctgtggattttgttatctgcagggagtcctgaaaccatggatactgagggaaaactatatgatttcccccaagaaggcagtgacatgcacctgtaactctttttcccctagacatatctgtgacatgcttaactacttttrtttttccgatgtcaccttaatcagagaaaacttcccagaccaccctatgtaaaataaagcacctctgctgctgctttattctccttaacactactttttttctatagcacctgtcaccagttgacaggttaagtttaacaacttctctcctgtagaatatgaggtgctttaaaatacatgtatgactgaacctcacccacacctactgaagctcttcatttcggttctgaatgcctattttggggaaacatttctgggattatgacagacatttcaatgacaacctgctctaggaggtttcctgcattgtcattgttaagtccatctatttattccttcttttaaaccagaatttctggcctgtaattttactgagaaatagaaatactatctt

SEQ ID NO: 890181 - DNA, 551 bp, Homo sapiens
aactagaaataccatttgacccagccatcccattactgcgtgtatacccaaaggattgtaaatcatgctgctataaagacacatgcacacgtatgtttattgcaacactattcacaatagcaaagacttggaaccaacccaaatgtccatcaatgatagactggattaagaaaatgtggcacatatactacatggaatactatgcagccataaaaaaggatgagctcatgtcctttktagggacatggatgaagctggaaaccatcattctgagcaaactgtcacaaggacagaaaaccaaacactccatgttctcattcatagctgggcattgaacaatgagaacacttggacacagcagggaacatcacacaccagggcctgttgtggggtgcggggatggggtagggatagcattaggagaaatacctaatgtaaatgacgagttaatgggtgcagcaaaccaacatggcacatgtatacatatgtaacaaacctgcacattgtgcacatgtaccctagaacttaaagtataataaaaataaacaaga

SEQ ID NO: 890182 - DNA, 551 bp, Homo sapiens
aactagaaataccatttgacccagccatcccattactgcgtgtatacccaaaggattgtaaatcatgctgctataaagacacatgcacacgtatgtttattgcaacactattcacaatagcaaagacttggaaccaacccaaatgtccatcaatgatagactggattaagaaaatgtggcacatatactacatggaatactatgcagccataaaaaaggatgagctcatgtcctttgtagggacatggatgaagctggaaaccatcattctgagcaaactgtcacaaggacagaaaaccaaacactccatgttctcattcatagctgggcattgaacaatgagaacrcttggacacagcagggaacatcacacaccagggcctgttgtggggtgcggggatggggtagggatagcattaggagaaatacctaatgtaaatgacgagttaatgggtgcagcaaaccaacatggcacatgtatacatatgtaacaaacctgcacattgtgcacatgtaccctagaacttaaagtataataaaaataaacaaga

SEQ ID NO: 890183 - DNA, 658 bp, Homo sapiens
tacactttttacaaaaattaactcaagatggatgaaacagttcaatgtaagacctaaaaccataaaaatcctagaagaaaacctaggcaatacaattcaggacataggaataggcaaagacttcatgtctaaaacaccaaaagaaatggcaacaaaagccaaaattgacaaatgggatctaactaaactgaagagcttctgcacagtaaaagaaactatcatctgagtgaacagacaacctacagaatgggagaaaatgtttgcaatctatctatccaaaaaagggctaatatccagaacctacaaagaacttaaacaaatttacaaggaaaaaaaaaaamccatcaaaaattgggctaaggatatgaacaaacacttctcaaaagaagacacttatacagccaacaaacacatcaaaacaagctcatcatcactggtcattagagaaatgcaaatcaaaaccaccatgagataccaactcatgccagttagaatgatgatcacaaaaaagtcagaaaacaacatttgctggagaggatgtggagaaataggaatgtttttacactgttggtgggagggtaaattagttcaaccattgtgggagacagtgtggcgattcctcaaggatctagaaccagaaataccatttgacccagca

SEQ ID NO: 890184 - DNA, 610 bp, Homo sapiens
aaaaatgtgctctcctctcccactcaagtgctggcttgcagatcttgttctggcactcctgggctgcacaccacagctctgtggtgagctcgggctttatgttccctcctcagcctgagggcagcaggggaagggaacttggcagtggttgtagcagacgacctttcacttatctcttggggctccaccccaaagagatgcagagctgctatcaatctgtgtgattggcccagggtggggaagctgcactgtgggcccaggcagggtcttggggttctgcctagtgatgagcagggaaagtaaggaggccaccttgtggratgggggagacagactggtcttttcttagggcaactacagcttgctggaggtgtggttaaagaacttagggtctttgctccttccttaatccaagggcagcaagggcagtaccactgcagtggttacctctggaagcttcacctcagagaaacacagaacccctgctaaagggaatcttcagccaaggggtaaggtggctgcactgctgggccaagctggggctccacttgatgataagcaggggatcaagggcttacaaattggagagactgcactcctttccataagg

SEQ ID NO: 890185 - DNA, 623 bp, Homo sapiens
tgctctgtgaaatacttgtgatagaacacagcagtagttctcaaactttagcatgcatcagaattgcctgggaggacttattatatatggattgctgggactgaccaaccttcagagttcctaattcagcatacctggctggagcctagacatttatatttctaatctgtttcgagrtgattctgctgctgctggtggtccagagaccacacgtgagaaccactggactagggagatcttgtacatcatagacacattggtttctctggacacagaatggatctcagaagtcaagtgtaattttgcagatttggacactatggtttaaggaagccaagtgacattgcttgaggccatgaagcagaactaaaagctctctgctcccatctcagagcttgctgattctacattactctgttcagccagtctctgtgctcatgactcccatggtcccaacaacgtttgaggtctatgaatgtttccaaaagttaaagataggtctttaacttctcaaaaaatgattttaaccattctgcataaaaatctttctaaaatgtattatattcttctggacctcacatagagtatgtaggacatacttgaacccaatttttttcaatgag

SEQ ID NO: 890186 - DNA, 646 bp, Homo sapiens
aggaagcctcaatatccttgaatcaattggcatgccaatgaagattcctgggataataaaaaattctttgttttatatggagtaaagaggagagagtaccaatcatgcatagacaaaaagttactgattatcaaaaaagtgccatgaattttgctaggcacaatccagatttaaaagacatattttctgcttttaagaaatcacacacaaattgttatggcaggaaaataaattaacagttacaaaataacataataaataccatgcaaaaagtacagtgagagcacttagcttagatagaccttaatctaggaaggttggatacctttaaatctgaattcgatatttttcatactggaggatatctatgtttcaaacatgcatgctacattggattttccaggaagcagaataactacctcaaccataattcatgcttcctgatttaactgargctgttgggatgaggctgaggaaaaacaagaacagtctttattattattgcaccaggtgattataactgatgattaactattggatcatatgtaggagatcagagagagaaaaaaagcgtgtgaatattagctcagagttattctgaccataaaatgaggcaattctgaaagcaagttgaaatacaatgaaa

SEQ ID NO: 890187 - DNA, 443 bp, Homo sapiens
acatatacaccatggaatactatgcagccataaaaaaggatgacttcatgtcctttgcagggacatggatgaagctggaaaccatcattctcagcaaactaacaaaacagaaaaccaaataccgcattttctcactcataagtgggagttgracaatgagaacacatggacacagagagggaaacatcacacactggggcctgttggggtatgggggactaggggagggatagcattaggagaaatacttaatgtagatgatgggttgatgggtgcagcaaaccaccatggcacgtgtatacctatgtaataaacctgcatactctgcacatgtatcccagaacttaaagtataattttaaaaaaaggagcataagaaaataaaacgtgcaagaaaaaaattaaaaataaagatagtcatcacacaatgatcaaaaatgattt

SEQ ID NO: 890188 - DNA, 638 bp, Homo sapiens
acaaacacaacataaccccatcatttacatctctcattttctataatgattcttggaagggataaacataatcctagaagaaaagtgtttacggtttcaaaatgtaccccagatcacaatttaggttatggcaagttcgccaaataggggcatataagctctacttctcccaatktagtaaagacatacactagggaatttctggtttgaactagagtccatttggaaaagttatcagaaattaatttgtctctttgatatcttatcttctcagcaaagttttactggtatgacaccatcaaggagagctttctttatccttagtcttggaacaggcccccagttatgctcccatatttccctctactactattacaacatacatcattcttttcttgcttctaccatttaatgtctgctatcaactaattttaaactgtaagagttttagaataaaggaagtaaaatggtatctatgcagataactgggcaggaaagctttcaggcactggaagaaagtattaccttgaaaggttaaatacctgttatgttcaaggaataaaaacatggtttgtgttgctggagtgaataagaaaagaaggcaaagatgagatcagagaggtaatgtagagtcggaa

SEQ ID NO: 890189 - DNA, 598 bp, Homo sapiens
acatacataaatgaaatgatgacacttttctatttatctttggcctttgagcccttaccaaaattgatatcccaaacattgagataaagtattattatcttgggtttctaatatatctaattcttctgtttcagttaacctaccccaagctttaaaaaaatgtaattatctttattctaagggttgttctacctgggtgcctcaagtctttcttcaaagattcacttctgtactgtsataaagccaaatcttattctattactccttgcatttttccaaaaatgttcctttttttatatactttgaaggcacccctaaatcttttgtactttcattctgtcagtcttcagacagtgtattcatgtcagtgatcggaagatatgccctaggagtctcaattaattgctattaaatctgaagctgctttgtcagaattgtgtagggttataaagagctggttcataacagtgttttttttttaattacaaaggataaatacttcttaaccccttttccatttagaaaaaaaaaagtgcagcttgctttcagtgctcacttaattttacattagcacactctgaggttgaagcaaatctga

SEQ ID NO: 890190 - DNA, 612 bp, Homo sapiens
gtgggcgcctgtagtcccagctactcgggaggctgaggcggaagaacggcgtgaacccggaaggcagagattgcagtgagcagagattgcgccactgcactccagcctgggtgacagagtgagactccaactccaaaaaaaaaaaggaaagaaagaaaacatggagttgttcctttggccacatacatgtgactctacaaaaaattgtgatactgtagacatcaagggaatacgcactgttaaaaaawgggaatgccccaaaaatgttaccatggcaaaaccagaaagtctacagtgtcccccagtacgctgttagcattgttgtaaacaaacaagttaaggaccagagaattaatgtgcatattgagcatattaggcaccagaaatgcatgaaggaaaatgattagaaaaagaaggaaggcaaagaataagatacctgtgtttaacgaagcgccagcctgctccacccagggaagcacactttgtgagagccagtggaatggggtctgggctgctggaacctattccctatgcttcatgtcataataggtattaaataaaaaaggcttctggactgcaaaagaagataaaaaaataaaacatttattgacc

SEQ ID NO: 890191 - DNA, 666 bp, Homo sapiens
ttttttaaaactataattaataggctaagaattttaatggataaagtcaacaacatacaagaacagatggataatgtaaacagagagatggaaattctaagaaagaatacaaaataaatgctggagattaaaaacactgtgacagaaatgaagaatgcttttgatgggattattgctatactggacatggctgaggaaataatctctgaacttaaggatatgatgatagaaacttccaaagataaaaagtcaagagaaaaaagaccaaaaaaccccagagcaggatatccaagaactgtcggatggctataaaagatgtaacaaacatataatggggaaataaaaaggaraagaaagaaaggaacagaagcaatatttgcagaaataatgactgagaatttccctaaattattgcagacatcaaaccacagatctaggaagctcagagaacactaagcaagataaatgccaaaacaaaaacaaaaacaaaaaaacccacaaaaaaccagcatcaaggcatatcattttcaaactgcaaacatcaaagacaaagaaaaaatcctgaaagaagccagaggggggaaattaacacatccagagagtaacaaaattaagtattacatccaaaaaccatgcaagcaagaggagagtggcatgaagtattta

SEQ ID NO: 890192 - DNA, 666 bp, Homo sapiens
ttttttaaaactataattaataggctaagaattttaatggataaagtcaacaacatacaagaacagatggataatgtaaacagagagatggaaattctaagaaagaatacaaaataaatgctggagattaaaaacactgtgacagaaatgaagaatgcttttgatgggattattgctatactggacatggctgaggaaataatctctgaacttaaggatatgatgatagaaacttccaaagataaaaagtcaagagaaaaaagaccaaaaaaccccagagcaggatatccaagaactgtcggatggctataaaagatgtaacaaacatataatggggaaataaaaaggagaagaaagaaaggaacagaagcaatatttgcagaaataatgactgagaatttccctaaattattgcagacatcaaaccacagatctaggaagctcagagaacmctaagcaagataaatgccaaaacaaaaacaaaaacaaaaaaacccacaaaaaaccagcatcaaggcatatcattttcaaactgcaaacatcaaagacaaagaaaaaatcctgaaagaagccagaggggggaaattaacacatccagagagtaacaaaattaagtattacatccaaaaaccatgcaagcaagaggagagtggcatgaagtattta

SEQ ID NO: 890193 - DNA, 587 bp, Homo sapiens
ggaactgaacacaatttaaaacgtatgcattgtttatatctggaattttgcatttaatatttttggaccatggctggccacaggtaactgaaactgtggaaggtgaaatggagaataagggggttgctatattactttcttcaggcctagaaaagccttgtgatgaataaattgttgttatctttagacatgcctatgtgtgggtaagatgacagaggattgaagatttgctttacactgctttaaaaattataaaaacaagataagtgaagcaagtatrgcaaaattatgataattattgaatttatacgatgggtgcatgacagttttaagtacttttttctctacttcataataaataaatcctaaaacatcttcactccagtacattttctggccacaatctcttttctctctttcaggcccaggacttgactgtgcacatcggctttcgtccgtcttcttctgctctttttgaagcctcctttaaacatgtctcctcaatgatctaccgaaactcctcttaaaatcgtcacgagggatttccacactgttaaattcaagggttaattctcaatgctttcttc

SEQ ID NO: 890194 - DNA, 587 bp, Homo sapiens
ggaactgaacacaatttaaaacgtatgcattgtttatatctggaattttgcatttaatatttttggaccatggctggccacaggtaactgaaactgtggaaggtgaaatggagaataagggggttgctatattactttcttcaggcctagaaaagccttgtgatgaataaattgttgttatctttagacatgcctatgtgtgggtaagatgacagaggattgaagatttgctttacactgctttaaaaattataaaaacaagataagtgaagcaagtatggcaaaattatgataattattgaatttataygatgggtgcatgacagttttaagtacttttttctctacttcataataaataaatcctaaaacatcttcactccagtacattttctggccacaatctcttttctctctttcaggcccaggacttgactgtgcacatcggctttcgtccgtcttcttctgctctttttgaagcctcctttaaacatgtctcctcaatgatctaccgaaactcctcttaaaatcgtcacgagggatttccacactgttaaattcaagggttaattctcaatgctttcttc

SEQ ID NO: 890195 - DNA, 566 bp, Homo sapiens
ctctcgaaaggaaagttcaactctgtgagttgaatgcaagcatcacaaagaagtttctgagaatgcttctgtttagcttttctgtgaagattctcccgtttccaacgaaatcttcaaagaggtccaaatatccacttgcagattccacagaaagagtgtttggaaactgctgtttgtaaaggaaccttcatctctgtgagttgaatgcaatcgtgacaaagaagtttctgacaatgcttcyctccagtttttatgggaccataattcgttttccaccacaggcctgaaagcgctccaaatgtccacttgcagacactacgaaaagcatgtttcagaactactctatgaaaagcaatgtgaaactctgggagttgaacacaaacatcacagagaagtttctgaggatgcttctgtttagtttttatgtgaagatattcccgtttccaaagacatcttcggagaggtccacatatccacttgcagattccacaaaaagagagtttcaacaatgctctatccataggagggttcaaatctgtgagttgaatgcaatcatcacagagaag

SEQ ID NO: 890196 - DNA, 531 bp, Homo sapiens
tcccaaactggagttcaagtttgagatattacttactagttatatgatcttggacaatttacttacccttattgagattcaacattcttatataaaaatggagaaacaatctctcgggatgcaagtctgtctacaacttaacaacattttacaggatagtacaaaatagttaatctcctaggatccaaaacgcctctacaatcttttttttttttttttccaaataaraagctgtatttgtgttagaataactaaaagactgatgaagacagtgtttgcaaaataaaataatgctttcctcaaaggaacaacaaaggattaattaaatgagtattaaaaaaaaagtctttgcttctatttctcaaatttcaaaaaaataggttggaaatttaaagggcttcacaggccaggagtggttgctcacgcctgtaatcccaacactttgggaggctgaggccggcggatcacttgaggtcaggagcttgagaccagcctggtcaacatggtgaaaccccgtttctactaaaaata

SEQ ID NO: 890197 - DNA, 677 bp, Homo sapiens
aaaccaaacagcacatgctctcactcataagtgggagttgaacaatgagaacacatggacacaggaaggggaacatcacacaccagggcctgtcagggggtgggggccaggggagggatagcattaggagaaataatgatgacaggttgataggtgcagcaaaccaccatagcccrtgtatacctatgtaacaaacctgcatgttctacacatgtatcccagaacttaaagtaaaataaaaaaatacattccataaataaaaattattttgtcaggggatgtataataaaaatttaaataatgtctcaaactaatttttaagtatttttttgaattgccacaagaataatgttagttcctttattgtgctgggtaaataaagagactgtcaggctatggaagccaccacccttcagcaccagcaaggagacaaggcctctgcggcacctatgattagagctctgtgctggggattcaacttctaaagccttgcagtccgtgttgggggtccctgagcaaggacagatgggcagtcctttgagcacttcaggtggaaaagctctgctcaagtagtgatggtgctgaggaactgagccagggagagcccttcccagaaaactaaactggagaccagaaggataacaaaggtcagttagaattgggggaatgacccaaag

SEQ ID NO: 890198 - DNA, 587 bp, Homo sapiens
acttggcaatgtgggctcttttttggttccatatgaactttaaagtagttttttcgaattctatgaagaaagtcattggtagcttgatgcggatggcattgaatctataaattaccttgggcagtatggccattttcacaatattgattcttcctatccatgagcatggaacgttcttccatttatttgtgtcctcttttatttcactgagcagtggtttgtagttmtctttgaagaggtccttcacatgccctgtaagttgtattgctaggcattttattctctttgaagcaattgtgaatgggagttccctcatgatttggctccctgtttgtctgttattggtatataggaatgcttgtgatttttgcacattgattttgtatcctgagactttgctgaagttgctcatcagcttaaggagattttgggctgagacgatggggttttctaaatatacagtcatgtcatctgcaaacagggacaatttgactgcctcttttcctaattcaataccctttatttctttctcttgccttattgccgtggccagaacttccaatactatgttgaataggagtggtgag

SEQ ID NO: 890199 - DNA, 659 bp, Homo sapiens
gtagtgatgggggctggaattttttttttttttttttgagacagggtctcactctgtcacctaggctggagtgcagtggtgctgtcactgtgttctcaacttcccaggctcaagtgatcctcctacttcagcttcccaagtagctgggactacaggcgtgcgccaccatgcccagctattttttttttttttaatcttttgtagagacagtgtcttactatgttacccaggctggtctcaaactcctgcactcaagtgatcctcccacattggcctccccaagtgttaggattacaggcatgagccacctcacctggccttggaatttttcgtatgcaaggagttagcctaattagacctctcctgtctggaaagaggataaggagaaaaatttgaatccataaattcagcatgagcatggagacggtaaccagggtcttgggcacctaattactggcatatattagtgactcaagaaacatttatggaaacatgaaaaaaaataaaggagtggatagatrtcagaataagaaaactaagggatatccattaaggcttggaagcaatgctttacattagaataaaggccctaaggagtgaagtgatttgcccggaatcacagggctagttaaaggcagagccagtacttgaattccaga

SEQ ID NO: 890200 - DNA, 628 bp, Homo sapiens
caccaggtgtcttgataggatgaagatgacttggtaagtggatttttttccctgtctataagacaggttcagcatatccctgccaaaatccacctgaaattaactaatttgaagcggctatgagaaagaactagtccatctcctgcacgatgagcaatcttggaaaaaaatggtgtatttccttaattcacgtatagaatgatctctcttcctctgctgatgaattattaatggaagaaacaggaataatgactaattaaaaagagaaaaaacataagataatctgatgtgaggccatactttaacctttcttgctttaccratttcctggaaggaaggcagtgtggtattatgaaaaaaataaataaattttgagcaggctgacctgggcttgaactaaaatgctaccagttattggctgtatgaccccaacaaatcaattaacctctctgaacctcaactgcttcatatgcaaatattgggatattcaaatcttgaatgaaaagtgaaaatataatgtgtgtgcctggaaaattgtcagttttttataaatgacagagaagatggtcattatgcagcaaactgttctttgaagtatcctagaaagctaatctccaactatctggag

SEQ ID NO: 890201 - DNA, 608 bp, Homo sapiens
gataataatcaagacagagaaaagcaggcagagagaaagagaagagataaaaagccagaaagaaaagaaaattcaaagaaaagagggagaaaaagatggagaaagacatagacattaaaaagagggagtgagagagaggggggagggagggagggagagagagagagagaaaacaagggtgagggagagagatcacaatataaaataaagaaaagtagaatcatttagatttttgggaaagatggtaagtgctactgtgaagggtcaaggaaaataatactgtgtcaaagttgacatcagattaaattagaaaacttgggakgaaatcatggtaaaattaaacctaatggaatagaaagaggagaagagagggaggcaccagacagatggtgatgagggcagagggcaatgaggaattgagggaaaaaaagctaacaaaggcatggacatgaacttaaaactggagaagagaagctcctgaagtctctggaaatgcttgggtctgagacccgagaagcagtgtaaagagaaagtaaagtcaaatacacaccatggaaggtcttggggcttggacgatgtgtttagctgcatcatggggtaaggagaaa

SEQ ID NO: 890202 - DNA, 608 bp, Homo sapiens
gataataatcaagacagagaaaagcaggcagagagaaagagaagagataaaaagccagaaagaaaagaaaattcaaagaaaagagggagaaaaagatggagaaagacatagacattaaaaagagggagtgagagagaggggggagggagggagggagagagagagagagaaaacaagggtgagggagagagatcacaatataaaataaagaaaagtagaatcatttagatttttgggaaagatggtaagtgctactgtgaagggtcaaggaaaataatactgtgtcaaagttgacatcagattaaattagaaaacttgggatgaaatcatggtaaaattaaacctaatggwatagaaagaggagaagagagggaggcaccagacagatggtgatgagggcagagggcaatgaggaattgagggaaaaaaagctaacaaaggcatggacatgaacttaaaactggagaagagaagctcctgaagtctctggaaatgcttgggtctgagacccgagaagcagtgtaaagagaaagtaaagtcaaatacacaccatggaaggtcttggggcttggacgatgtgtttagctgcatcatggggtaaggagaaa

SEQ ID NO: 890203 - DNA, 568 bp, Homo sapiens
gtaaaattgagtgctttgagctctaggccagcattaaaatgaagactgaatgattattctgataaaatccatacacaaccatcaacatttgggagtgatcctaaatctatttatgatttgggcaggtgggttttcatgactattgtctgtaacaatttttcataagtcagaactgaccataatttaaaaagtggtgattgatttaaaaataaagccaggcataggtacagaaaggaaaatactactgcaatagaggtaggagaactattacaacagaaaaaacgctcggaacataagatctgcaaagctctgaaaggataaacagaattaaattttatttatagggaagagtaaacaaggctagaaagaactggatatggaggagtgagatgagctagtggtgtaatcagttgatygaaaaattttttttccctaaggttagctgattctcaggagggacttgtaaaagagagaccaaagttgaggaatctggaaaaaactggctaaattttggtaaagttaggttacccagcatttttccatattggtcaatagcaaaattgttcag

SEQ ID NO: 890204 - DNA, 568 bp, Homo sapiens
gtaaaattgagtgctttgagctctaggccagcattaaaatgaagactgaatgattattctgataaaatccatacacaaccatcaacatttgggagtgatcctaaatctatttatgatttgggcaggtgggttttcatgactattgtctgtaacaatttttcataagtcagaactgaccataatttaaaaagtggtgattgatttaaaaataaagccaggcataggtacagaaaggaaaatactactgcaatagaggtaggagaactattacaacagaaaaaacgctcggaacataagatctgcaaagctctgaaaggataaacagaattaaattttatttatagggaagagtaaacaaggctagaaagaactggatatggaggagtgagatgagctagtggtgtaatcagttgatcgaaaaatkttttttccctaaggttagctgattctcaggagggacttgtaaaagagagaccaaagttgaggaatctggaaaaaactggctaaattttggtaaagttaggttacccagcatttttccatattggtcaatagcaaaattgttcag

SEQ ID NO: 890205 - DNA, 614 bp, Homo sapiens
tctcactcttaaccatattttatgcagcatctcttattacttagatctgaacgaagtgtttgagctcttatgcactggactaaggaatgtactaaaagatatctcaagcaaaaattgcataagacaaaggtttcttaaatcatctttctagtcaacrgaaaactcaagaacgaaattcacagggactatgtacaggctgtggtggggctggtatgagcaaaaagacttgaagaagctcttctcacttttattttctgaaatatgatcttcactggtaatcttagctcagagaacctgctgtatttagactaggtgacctataaacgtaacctgagaggtatttttaagtatataaaatatatatgtgtattgtgctgtctttctacacactaattcagactttctattttaaaaatataaaataatctgatactctgctccattttgggaatataaataaagccttgagaattgagaagaaaaggtacaccatgtactgcaaggcatgtgttttactaaccactgaaatgacacatggtgtatacttaaggtttagacttcaaattttattttttggtgtatgctgtgaatgaagaaatatactagttcttcag

SEQ ID NO: 890206 - DNA, 628 bp, Homo sapiens
gtaactagtttattttgcttatacttcatgaaggctttcctatatatgacataacatttagagaaattatttggtcagggtaagtatcacaatattgggctttgaacatgtgacctccagagtttcatgccactttgggcacatgattagacagataagtgatggatatgcaggactgctagtcagataagctgatgactatatcagatgtggtaggtctaggcaggtaagagaaagttgaacaagaagtagcaagcacttttgaggaatattaataattatataaagatctgatattagcacagatctgcaaataaactacaatggaagcatctcctgtcttctacacttcctgcaatttctttccagactattttaagaagtccaggtttatggctacagcaccttctgacgctttgatgaaaaaaaaaacacaaaacaacaacaacaacaacaaaaacytagatccattaatatttacacattacacaacatttattttttcagagatgttaggaattatcaggtagtgttctcttagatatcaggtatgatatgagataacgcctctggataaaatgacaccagaaaattttctgcccattcttgattatatgctgacagcagg

SEQ ID NO: 890207 - DNA, 659 bp, Homo sapiens
gcccagactggtctggaactcctgagctcaagcaaccctccccctaatgcctttcaaagtgctgggattataggcatgtgccactgtgcctggcctcttttactctccttcatatgtgcgaactgtaagagtgatggtgaaattccttcctaaagaatccagaggcagtgccttgtcattttgcggaaagccactactagtccattagagttgggcaatggtagatacttatcatctcagtttaagataccaaatattactcatttttaaatgtgcaagtactattgtgcatggtgccaccttctcaactactctctaatcgctatttttaacagtaggccwcaataggtggggtcctaatttattctgttctattccagtgtgttcattttctattctgttctggtttgttcattgcctatttattgtctgtctctcttattagaacagtggtcctttcatttatgtaaacctcattctttgagttggccaattgcatcttcgaagttttctggataggatggctgctctcagtcctgtctagctttgcttcctctggccatttctccacaccctgcctctggaaatataagacatggatttggaataagtttatgactgtaagaaaaaaaatgagtgaggtgtggtggcatgcacca

SEQ ID NO: 890208 - DNA, 658 bp, Homo sapiens
acatgccctgacctttatacttagcctcagtcaggcaggcattgtgaacccgggtggcagtggcccagctttcactaatgatccttcccctcctgcaggtgcaacactggacctagtacgtattcctggtcctatggtggttgttcttctgttgttcttatcttcttccctgaattgctgcggatttccagtgacctgaggctggtttttgttgcctttccccctgaaatttaagattttatcactgaatggtattgcctaggttttcttctagggtttttgtggttttaggtcttacgtttaagtctttaatccatcttgagttaatttttatataacgtgtaaggaaggggtccagtttcagttttctgcatatggctagccagtttycacagcaccatttattaaatagggaatctttccccattgcttgtttttgaaaggtttgtcaaagatcagatggttgtagatgtgtggtgttacttctgaggcctctgttctgttccattagtttatatatctgtttttgtaccagtaccatgctgatttggttactgtaacctttcagtatagtttgaagtcaactagcataatagtttcttctgcttatgcatcttttatctaccagtttgccacaaggctggcctagaggatggca

SEQ ID NO: 890209 - DNA, 486 bp, Homo sapiens
tgataatggaagccagaaattaaggtgacatgggaaaggagtcaagagttaagaaatgcaagccatatttagaagctgagcaagattcaggctgagcatggtggctcacacctgtagtcccagcactttgggagaccaaggtgggcggatcacctgaggttgggagttcgagaccagcctgaccaacatggagaaaycccatctctactaaaattacaaattggctgggtgtggtggctcatgcctgtaatcccagctacacaggaggctgaggcaggagaattgcttgaaccctggaggcggaggctgcggtgagctgagatgagaacatccattgcactccagcctgggcaatgagagcgaaactcctcaaaaaaaaaaagctgaacaagattctcccctagaagcctctagaaggaaccagcctggctgacatcttgactttagcaaactgaaactaatttggacttctaccctatccacttc

SEQ ID NO: 890210 - DNA, 426 bp, Homo sapiens
ggaatgcagtgactaggccgggcgcggtggctcatgcctgtaatcccagcactttgggaggccagggcgggcggatcacgagatcaagagatcgagaccatcctggctaacgtggtgaaaccccgtctctactaaaaatacaagaaattagccaggtgtggtggygggtggctgtagtctcagctgcttgggaggctgaagcaggagaatggcatgaaccgggaggcagagcttgcagtgagccgagatcacgccagtgcactccagcctgggtgacagagtgagactcccatctcaaaaaaaaaaaaaaaaaaaaaaagaactaattctcagttgctgcagacaccagagtgggaaaatcaagaagtacctccatggagtggcccccagacacatccaggagaggtgtcctgcagggccccgcag

SEQ ID NO: 890211 - DNA, 426 bp, Homo sapiens
ggaatgcagtgactaggccgggcgcggtggctcatgcctgtaatcccagcactttgggaggccagggcgggcggatcacgagatcaagagatcgagaccatcctggctaacgtggtgaaaccccgtctctactaaaaatacaagaaattagccaggtgtggtggtgggtggctgtagtctcagctgcttgggaggctgaagcaggagaatggcatgaaccgggaggcagagcttgcagtgagccgagatcacgccastgcactccagcctgggtgacagagtgagactcccatctcaaaaaaaaaaaaaaaaaaaaaaagaactaattctcagttgctgcagacaccagagtgggaaaatcaagaagtacctccatggagtggcccccagacacatccaggagaggtgtcctgcagggccccgcag

SEQ ID NO: 890212 - DNA, 648 bp, Homo sapiens
tccctaagcaatattcggtaaaattttgcttctgtgggggctttgtaaaaatgatatcatattgtacacagtttaaagagacaggtgctttttaaactcagcatcatatttctaagatttttccatgttgtttcatgcagctgtggttcattaattctcactagacaaagtttttgaggtgagtccacaggtacgctgcctctgagggtrctgctgatgggaacaagctttctgaacaggattggaagccacacgccactcccccagcaccacccgccctgccttgccaccactgctggtgctgttgatggtgccgctgtcatactgacagaagcatcgccaggagctggagaaatggcttctcctttcttgcaccttccattatcccactaatgtctcccattggtagaacctaccaaatgtcagtgcacaggtatctgggaaatgtggttagcagctttccaaaagccctagcagtaaagaagagttgagtgtgggtaagtagagctgagagccaacctacattatccagctcactcactgatgtcattcccaggaattctttttttttttttcgagacggagtctcgctctgtcgcctgggctggagtgcagtggcgcaatcttggctcactgcaagctccgcct

SEQ ID NO: 890213 - DNA, 593 bp, Homo sapiens
tctggttcactttgctttgctttgctagttggctaagatgaaaacttgcaatctgcatttaaacaaacctctaatgtttgcaaacttttagaatggatggattacatgatcaacttcctgtttttctgttatgtggtcccctgaagattgatcaagcccccaaactttatttcacaatgctgttattttagtaatcatggatgacaggacctccttctacttttacacaatgccactttayacacatgccctaaaccaaatatacacaggatattccaataaaatgttaagcttttggtggaggcggagcaaggtggctgaatagaagctttcactgatcgtcctccctgcaggaacaccaaatttaacaactacctacacacaaaaaaaacccttcataaaaaaacaaaaattatgtgtgcaataactgtacctggttttaactttatattgctgaaagatgctgtgaagaaggtaggaaagacagtcttgaattactatcaccagccctcctccatcttctggcaacagcctcatggcatggagagagaacccatgcacttgaggaacggagagcacagtgattgtaggga

SEQ ID NO: 890214 - DNA, 593 bp, Homo sapiens
tctggttcactttgctttgctttgctagttggctaagatgaaaacttgcaatctgcatttaaacaaacctctaatgtttgcaaacttttagaatggatggattacatgatcaacttcctgtttttctgttatgtggtcccctgaagattgatcaagcccccaaactttatttcacaatgctgttattttagtaatcatggatgacaggacctccttctacttttacacaatgccactttatacacatgccctaaaccaaatatacacaggatattccaataaaatgttaagcttttggtggaggcggagcaaggtggctgaatagawgctttcactgatcgtcctccctgcaggaacaccaaatttaacaactacctacacacaaaaaaaacccttcataaaaaaacaaaaattatgtgtgcaataactgtacctggttttaactttatattgctgaaagatgctgtgaagaaggtaggaaagacagtcttgaattactatcaccagccctcctccatcttctggcaacagcctcatggcatggagagagaacccatgcacttgaggaacggagagcacagtgattgtaggga

SEQ ID NO: 890215 - DNA, 643 bp, Homo sapiens
gtgactttggaactggttaacagggagaagttggaagagtttggagggatcaaaagacaggaaggtataggaaagtttggaacttcttagagacttgttgattttgtttttaccaaaatgttgatagtgatatgaacaataatatcgagaytgaggtggtctcagatggagatgaggctcttgttgggaacttgagcaaaggtgactcttgataaatccttgcaaagagactggcagcattttgctcctgccctagagatttgtgaaactttgaacttgacagagatgatttagggcatctggtgcaagaaacacatctggtgtgtttttaaacagcacagtattcaagaggtgatttgggtgctgttaaaatcattccgttttatgtatatattcacaaatatatggttggaattggaacttatatttaaaagggaaagcagagcataaaagttcagaaaatttgcagcctgatgatgcagtagaaaagaaaatacccatcttctgaggagaaattcaagatggctgcagaaatttgtgtaagttacaaagagccaaatgttaattgccaagacaatgaggaaaatgtctccagggcatgtcagaggtttttcacagcagtctctcctatcacaggcctata

SEQ ID NO: 890216 - DNA, 666 bp, Homo sapiens
agggtgagaaacgaagcacacagattcataatgaaatactgtagcctctatttttcacaagggcagggggtaaagaaagagcctcattaggcagctgatttcctttttatccctcttgagtcagaatgcctggctggttcccattctgattattgtacttgcatagcttttcagctatctcaggctcctaagttacagaaagcgtgcaccacactcagacatgcacagaaatgttgtgataattacctgaggggaaggccattgctaagctaccctctagaagaaccaygtctgaggcaactcatactgaggataattctgttgtcttcaattcttattttccatatggctaaaatttacaatatacccttttgaaatcaagctttttaaaagaatggctagaaatttgagcagtttaaattttggcctttttttctcatgaacattctcactataacttgaccaagaaaataatgagacacaaagagttcttgttttttgaaaaaaaaaatggaaattacagtatatctctcttgatgtattataaatgtacatacatacatgactcccttccttccaggctacccttccccattactagtaaaaagtgagccagacattattttatctttctgtggttataaatgttaccattcattcattaaa

SEQ ID NO: 890217 - DNA, 620 bp, Homo sapiens
caagtttcaaactgtgctctgcagggccctaggagtccccagaacctcttaggggctcggataggagaaagaaatggggcaattaacaggtcggggctccaggatccccctccatcagaatgcttttactttcatctgattgaaaaagatgaaaaaaagccattggattaggagatattaaaatatctatgtgatctaagatttacacaataaatgtgtattaattttgttaagaggaaagaataaaacaagctaaaaacaacagtcctagagcattcaagcaggtaagggccttttgcaagtgaggcatagwggctcacagagttgagggtctgcttgtgtctcacagccgatccaccaagagccaaacagtgaggctcagggagttactccacggagcagcatatcatattaactcttaccacgttgcagagtgtaaagttccaagaacatgcatttggtccttactcttactctctgagggcctgccgatggagaggttgctgagaagcagatgggagagtgctcaaaaccagctctgggtgggacaggaaattcccctgaactctctgaatgagagggaccagctcagagaaaggagaaggaggtgtggacactcg

SEQ ID NO: 890218 - DNA, 640 bp, Homo sapiens
gggtaaatgtaaacgtgtaccatggtggtttgctgctcaaatcatcccatcacctagatattaagcccagaatccattagctattcttcctgatactgttactccccccactgacccccagcaggacccagtgtttgttgttgcccttccatgtgtccatrtgttcttatcattcagctcccatttataagtgagaatattcagtgtctgattttctgttcctgcattagtttgctaaggataatggcatccaactctatccatgttcctgcaaaaaatatactcttgttccttttcatggacgcatggtattccatcttgtatatgtaccacattttgtatccagtctatcattcatggtcatttgggttgattccatgtctttgctattggaaatagtgttgcaataaacatatgcatgcatgtgttttatagtagaataatttatattcttttgggtatatatccagtaatgggattgctgggtccaatggtatttctgcctctaggtctttgagaaatcaccacactgtctaccacaatgtttgaactaatttacagtcccacagtgtaaaagctttcctttttctctgcaacctcaccaatgtctattgtttgctgactttttaataatcaccat

SEQ ID NO: 890219 - DNA, 640 bp, Homo sapiens
gggtaaatgtaaacgtgtaccatggtggtttgctgctcaaatcatcccatcacctagatattaagcccagaatccattagctattcttcctgatactgttactccccccactgacccccagcaggacccagtgtttgttgttgcccttccatgtgtccatgtgttcttatcattcagctcccatttataagtgagaatattcagtgtctgattttctgttcctgcattagtttgctaaggataatggcatccaactctatccatgttcctgcaaaaaatatactcttgttccttttcatggaygcatggtattccatcttgtatatgtaccacattttgtatccagtctatcattcatggtcatttgggttgattccatgtctttgctattggaaatagtgttgcaataaacatatgcatgcatgtgttttatagtagaataatttatattcttttgggtatatatccagtaatgggattgctgggtccaatggtatttctgcctctaggtctttgagaaatcaccacactgtctaccacaatgtttgaactaatttacagtcccacagtgtaaaagctttcctttttctctgcaacctcaccaatgtctattgtttgctgactttttaataatcaccat

SEQ ID NO: 890220 - DNA, 568 bp, Homo sapiens
attatttgtgggcatttaggctggttccaagtctttgctattgtaaatagtgctgcaataatcatacatgggcatgtgtctttatagtagaatgatttataatcctttgggtatatattcagtaatgggatcgctaggtcaaatggtaattctggttctagatacttgaggaatcaccaaactgtcttccacaatggttgaactaatttacactcccaccaagagtgtgaaagtatttctatttctccatatcctcaycagcaactgttgtttcctgactttttaataattgccattctaactgatgtgagatggtatctcgttgtggttttgatttacatttctccaatgaccaatgatgatgagttttttttcatatgtttgctaaccgcataaatgtcttcctttgagatgcatctgttcatatacttcgcccactttttgatggggttgtttgtttttttcttgtaaatttgtttaagtttcttgtagagtctggatattagatctttgtcagatgaggagcttgcaaaaattttctcccattctgtaggttgcctgttcactg

SEQ ID NO: 890221 - DNA, 615 bp, Homo sapiens
gttttttctttccatatttagtgcttctttcagaagctcttgtaagccaggcctggtggtgacaaaatccctcagcatttgcttgtctggaaaggattttatttatcctatgcttctgaagcttagtttggctggatatgaaattctggattataaatttttttctttaagaatgttgaatattggctcccactctcttctagtttctgcagagagatcgctgttagtctgatgggcttccctttgtaggtaacctgacctttctctctggctgcccttaacattttttcctttttttcaaccttggagaatctgtcgattatatgtcttggggttgctcttctcgaggagtatcttagtggtgttctctgtatttcctgaatttgaatgttggcctrttttgcttggttgggggaagttctcctggataataacttgaagtgtgttttccaactttgttccattctccccatgactttcaggtacaccaatcggtcataggtttggtcatttaacatagtcccatatttcttggaggcttgtcttcaaccttcttttattaagttgatcttgtcttccaccttcttttatcaatctctgatattgtttcttcca

SEQ ID NO: 890222 - DNA, 606 bp, Homo sapiens; identical to SEQ ID NO: 876174

SEQ ID NO: 890223 - DNA, 567 bp, Homo sapiens
acaaagaatgaaatcctgtaatttatggcaacatggatcagcccaggggacattatattaagtgaaataagtcaggcacaggaagataagtatcatacgttctcactcatatgcggaagctaaaaaaaaaaaaattcatggcgctggagagtagaatagaggttattaggaggcagagcaagatgggataatagaaggctccagattttggcccccaccytatgcaaggacaccaagttaagaactatctacacagaaaaaagcaaacaaacacttcataagaacccaaaattagctgagcagtcatagtacctggatttaatttcatatcacagaaagagacactgaagagatagaaaaaacagttctcaatcccagacaccactcccccatggccccctgccccaccatccgcagcagtggcctggtgcggagagcatctctgggtattgggagacaacaaacactgcaattgtgaggcatttaagtcagtgctggcctgttagagcagaaaggaaaatttgaccaaattcagctgatgcttgctcatggagggagcatctgaac

SEQ ID NO: 890224 - DNA, 643 bp, Homo sapiens
ctcaaatagattttgctttatatatttcaaaactacatttaggtactcagcaaaagtagatgatgatcaggcacagtggctcacacctgtaatcccaggactttgggaggctgagatgggtggatcacttgagcccaggagttcaagaccagtctagtcaacatggcaaaacctcgtctctgcaaaaaaaaaaaaaaaaaaaaaaaaaaaaagagctgrgcatgatggtgtgcatctgtagttccagctactcagtaggctaaggtgggagggtcatctgagcatgggaggttgaggcttcagtgaaccatgattgcatcactgcactccagcctgggcaacagagtgagaccctgtctcgaaaaaaaaaaaaatgactgtaggtgaattttttttttttgaaatgctaaataatccaaactataattttcttgatttttttgtctgattactatttgtacgtactaaaaaaatctttttgctggcatttgtctagtcatagacaattttccattaatttctctcaattatgagtgtcaacacaaataccaattagatatttgaagaggttttttccattgatggaaacctatgggatattttttccaatatttaatttttgattattatggatacataatag

SEQ ID NO: 890225 - DNA, 644 bp, Homo sapiens
acagtgtctgaccaaggcagggatgagattcataaaagcagagggtgctggttaattgagagaagcccatgccttgtcagctcaggattgacaggttacaggagttccacacaggcagatgctttctcctcaagtcctaagcttctagaattctgctagtggcttgcaatcaggctgcccaggccattagatggagttgaagcagtatggtgaagtcacagaccacaaaacattgtaagttgcaaacacaggctgttttgatgccagtctgattggcttctgagaagctattgctttgcattcctctccctggacttccggtcacttgtcatctagaaattgtcacatcatccacactcagggtcatgcgacaggcaagttcctaagcacatgctcaaagttcgcttaaaattttcctatcatgattttcttattcacagttctggaatccattatgagatatrtggtatgaggtttcaattcactttagaaaaagaattttggtcacccattggtgttattaaagtccttatgcaaagaaactgttttgagacatagtaagacatgcttagtaacgtactactcattatgcatttttagcctaatcatatattacattattgttatgggtagaacattgtaat

SEQ ID NO: 890226 - DNA, 622 bp, Homo sapiens
tctagccatgactcaaaaggctccatttgcagtttggatgctgcaccacagggtgcaaaccataagccttggtggcttccatgtgatattgagtctacagatgctcagaatagaagcatgaaggaagtgtggtggcttccacttagacttcagacgacatgtagaaaagcctggatgcctaggcagaagcctaccatggaaatgaaggccccasagaggaactttcctagggcaatgacaaggggaaatgtggagttggagaccccacatagagtctccatgagagcaatacctaatggagctatgggatggagaccactgccctccagaccacagaatggtatttccacgtggcagattgcaccctttgcctggaaaaaccacaagcactcaactcctacttgtgagagcagctataagggctgtaccctgcaatgccacaggggcaggtttccaaggccttgggagccccacccattggaccagtgtgacctgaatataggacatggagtcaaatgaatttgttttggagctttaagatttaatgacttccctgctgaatttcagacttgtatgtggtctgttgcgcctttcttttggcttatttcttccttttggattg

SEQ ID NO: 890227 - DNA, 622 bp, Homo sapiens
tctagccatgactcaaaaggctccatttgcagtttggatgctgcaccacagggtgcaaaccataagccttggtggcttccatgtgatattgagtctacagatgctcagaatagaagcatgaaggaagtgtggtggcttccacttagacttcagacgacatgtagaaaagcctggatgcctaggcagaagcctaccatggaaatgaaggccccagagaggaactttcctagggcaatgacaaggggaaatgtggagttggagaccccacatagagtctccatgagagcaatacctaatggagctatgggawggagaccactgccctccagaccacagaatggtatttccacgtggcagattgcaccctttgcctggaaaaaccacaagcactcaactcctacttgtgagagcagctataagggctgtaccctgcaatgccacaggggcaggtttccaaggccttgggagccccacccattggaccagtgtgacctgaatataggacatggagtcaaatgaatttgttttggagctttaagatttaatgacttccctgctgaatttcagacttgtatgtggtctgttgcgcctttcttttggcttatttcttccttttggattg

SEQ ID NO: 890228 - DNA, 622 bp, Homo sapiens
tctagccatgactcaaaaggctccatttgcagtttggatgctgcaccacagggtgcaaaccataagccttggtggcttccatgtgatattgagtctacagatgctcagaatagaagcatgaaggaagtgtggtggcttccacttagacttcagacgacatgtagaaaagcctggatgcctaggcagaagcctaccatggaaatgaaggccccagagaggaactttcctagggcaatgacaaggggaaatgtggagttggagaccccacatagagtctccatgagagcaatacctaatggagctatgggatggagaccactgccctccagaccacagaatggtatttccacgtggcagattgcaccctttgcctggaaaaaycacaagcactcaactcctacttgtgagagcagctataagggctgtaccctgcaatgccacaggggcaggtttccaaggccttgggagccccacccattggaccagtgtgacctgaatataggacatggagtcaaatgaatttgttttggagctttaagatttaatgacttccctgctgaatttcagacttgtatgtggtctgttgcgcctttcttttggcttatttcttccttttggattg

SEQ ID NO: 890229 - DNA, 622 bp, Homo sapiens
tctagccatgactcaaaaggctccatttgcagtttggatgctgcaccacagggtgcaaaccataagccttggtggcttccatgtgatattgagtctacagatgctcagaatagaagcatgaaggaagtgtggtggcttccacttagacttcagacgacatgtagaaaagcctggatgcctaggcagaagcctaccatggaaatgaaggccccagagaggaactttcctagggcaatgacaaggggaaatgtggagttggagaccccacatagagtctccatgagagcaatacctaatggagctatgggatggagaccactgccctccagaccacagaatggtatttccacgtggcagattgcaccctttgcctggaaaaaccacaagcactcaactcctacttgtgagagcagctataagggctgtaccctgsaatgccacaggggcaggtttccaaggccttgggagccccacccattggaccagtgtgacctgaatataggacatggagtcaaatgaatttgttttggagctttaagatttaatgacttccctgctgaatttcagacttgtatgtggtctgttgcgcctttcttttggcttatttcttccttttggattg

SEQ ID NO: 890230 - DNA, 609 bp, Homo sapiens
ttcagtttctcctagttttgccttttccataatgttatatagttgaaattatacaagatgtagccttttcagcttggctcgtgttacttagaaatttgtattaaaggtttctttttgtctttttgtggcttgatggttcatttmtatcaacaaataatatttcattgtatgcatgtaccacagtttgtttatccattcaccaattaaaagacatcttggttgtttcaaagctttagcaattctaaataaagctgctataaatattcatgtgcaagtttctgtgcacacatgagttttcaattcatttgagcaattatcaagtagtgtaatggctggatcataggcaacagtatgtttagttttgtaagaaattgccaaactgttttccaaagtgactgtaccattgtgcatttccacctacaattcatgagagtttctgttgttccacaagttggtcagcctttggtgtttgccttgttttggattttagtcattctaataggtatgtagaggtatctcattgttttaatttgaaattctgtaatggcatattgtattgagcattatttcatatacattttttcccatctatatatttttagcaagttt

SEQ ID NO: 890231 - DNA, 609 bp, Homo sapiens
ttcagtttctcctagttttgccttttccataatgttatatagttgaaattatacaagatgtagccttttcagcttggctcgtgttacttagaaatttgtattaaaggtttctttttgtctttttgtggcttgatggttcatttatatcaacaaataatatttcattgtatgcatgtaccacagtttgtttatccattcaccaattaaaagrcatcttggttgtttcaaagctttagcaattctaaataaagctgctataaatattcatgtgcaagtttctgtgcacacatgagttttcaattcatttgagcaattatcaagtagtgtaatggctggatcataggcaacagtatgtttagttttgtaagaaattgccaaactgttttccaaagtgactgtaccattgtgcatttccacctacaattcatgagagtttctgttgttccacaagttggtcagcctttggtgtttgccttgttttggattttagtcattctaataggtatgtagaggtatctcattgttttaatttgaaattctgtaatggcatattgtattgagcattatttcatatacattttttcccatctatatatttttagcaagttt

SEQ ID NO: 890232 - DNA, 647 bp, Homo sapiens
gaagtaacaagaacaaacatagaaagaataatcaataccaattctatacaatcttttccagataaatagaagagaaaataacacttttcaatttatattatgaagctatattaccctgatagcaaaacaaatatagcatagaaatggaaaacaacagttcactatccctcagaattatagatggcggggtgcagtggctcatgactataatcccarcattttgggaggccaaggtgggcagatcacctgaggtcaggagtttgagaccagcctggccaatatggtgaaaccccatctctactaaaaatacaaaacatagctgggcgtggtggcgggtgcctgtaatcccagctactcgggaggctgaggcaggagaattgcctgaacctgggaggcagaggttgcagcgagccaagattgcaccattgcactccagcctgggtgacagagcaagactccgtctcaaacaaacaaacaaaaattagtaaatagaattcagcaatatataaaaataagtatgtactataagcaaatagagttcatttcagggaggcaaacctagtttagtatttaaaaattcatatatcccatcatattaacaggctaaaggagaaaaattatatgattacatcaattcaatgaaggaa

SEQ ID NO: 890233 - DNA, 703 bp, Homo sapiens
attccaaacaattaggaattgccaactgatatacaattatgggtcaccttgaaaagaatttaaaaagaagtagtagagtttgaggctcagatgaattaagtgaataggattctgcattgaagggaagaactataaggaaaatggagctaatatttgagcccatttttagtctttagtttcatgctttttccacagcactatactgtctctctccagaggcaatagtaagtcatataccagtattggtctaccttatttcaattactactgcctcacactcaaatataatttatttaaaaataaaaagatgaaatatatgtataaccatctgcaacctgacatagaggaaacaaaaaaataaatggatgaaactggaagctattatcctaagcgatctaacacaggaacaaaaaaacaaatactgcatgttctcacttataagtgggagctaaactttgagtacatatagacacaaagaagagaacaacagacaccaggacctacttaagggtggaggtttggactacagggaggatagaaaaacyatctactgggtactggccaggtgcgatggctcacgcctataatcccagcactttgggagactgaggcaggcggatcatgaggtcaggagatcaagaccatcctggctaacatggtgaaaccccgtctctactaaaaatacaaaaaattagacgggcgt

SEQ ID NO: 890234 - DNA, 688 bp, Homo sapiens
ttttttttttaagataatgggaaaacagtctgcatttattgcttcaggtgctgagttcagacaaaacttttcctttgtccactgggatggctttcatgtttggaaagaactcttgaaaatgcagaattagcccatctgttccattttcagttttctgtggagactctgcttattctgtctttcatagactctggttccaaactatactcatgttataaccattgtcgtctcctatatctgtacttacatacttccctgttcaataaattgctactgaaacaatgagaaaaatctaaaaccgtaaaactgactactttcatttgctttttcattctataatgcagttgttctggaaatgatgcagaagggctggaccccggctaaaccccactcttaagcctggaascatggccctaagtgaaaacagctgaccccatttttctgtgcaaatgttgcctttttggcctgccccgcccctatcttgtgcccataaaagacttcagctggcagagcaatactagcggctgagctttgaagatacaagtggctgagtgttggagactacagacagacaaagctaacttcagaatgtacagcttcggaaaggggcccagctggaaatagccgggcttcagaggaagatcaccctcccttcccctttccagtctccctttctgctgagagccac

SEQ ID NO: 890235 - DNA, 639 bp, Homo sapiens
agtggtgtgtagttctccctgaagaggtccttcactttgcttgttagctgcattcctaggtattttattcttttttgtagcaattgtgaatgagagttcattcatgatttggttctctgcttgcctgttgttggtgtataggaatgctagagaatttgcacattgattttgtatcctgagattttgctgaagatgcttatcagcttaagcttttgtgctgagttgatgargttttccacatataggatcatgtcatctacagagacaatttaacttcctctcttcctgtttaagtaccttttacttctttctcttgcctgattgacttggccagaacttccaatactgtgttgaataggagtaatgagagaggacatccttgtcttgtgccagtttacaaaaaggaatgcttctagtttttgcccattcagtgtgatattggctgtcagtttttcatacatgagatatttcccttcaatacctagtttattgaaatattttaacatgaaaggatattgaattttatcaaaggccttttctgcgtctattgagataatcacatggtttttgtctttagttctctttatgtgatgactgacatttattgatttgcatttgttgaaccaaccttgcatcctg

SEQ ID NO: 890236 - DNA, 638 bp, Homo sapiens
ggaacccttcctcatctggaccatctggcctctccaaagttggcaggctggaatgggtgattcaattgaatgacagagatggtgactgtccctctcctcaggagctcagtccaaggaagagatcagagctgtctgtataaccctggctggagtggctgaagcccccacagggaggtcctgcccagtgaggaggaatggattggggtcccacttaaagaagcagtctggccacgatttggcaaagcaactgtgctgcactgtgggaggcccttccttttccagaccatttggactccccaaagctagcaggctggaacaattgagtcaatcgaactacagagatggtggccacccttccccctgagaacttggtcccatctcagacagactgcagcctgttgtctttggctggctggaattccaagtcagtgagtcttaacttgtgaggtgctgtggaagtggagcccacaaaatgatgctgcttggytccctagattcaacccccttcctaggagtctgtatggatggatgtctcaccttgccagggatcctggggccagaatatgtaaaactcttgagtctctgtgtgcttgagtggctgctctgccaagagttcacagagctctgtgtatcagacc

SEQ ID NO: 890237 - DNA, 599 bp, Homo sapiens
tcttgcctttaaattttcttattattcattgagtttggtgtataggttaagttgcttttacttgtaaacagtagaataaccaactaacaatggtgtaaacaacaggatatttattgattatttaacaagaagtccagaagttggaagtcctaaggctggtttggtgactcaaataggaactcaaggttctttgcatccctccattgtcattgtctgtcttctagcaatgtcttgtctcttacgcaaaagatggctgtgtagctctaagaaggcaggaggctgaggcaaaatggcccttctgctcctttaatcagggaaaacactttttttttttttttttttttcagaaatctycataaatcacattggctagaaatgggtcttacacccacccctacaccagggaaaagtgctaattgtgattcatcccttggtggtgagcacaatgccccctgacataatcagtcttagagaagcaaaaaagaaagggcgatggctgtgggatatgtgactgacaggggctgcacgactcgtctgtcacctatggctgctcttcaagactgtgtctatttttctctacaactgaaagtctctgaggt

SEQ ID NO: 890238 - DNA, 622 bp, Homo sapiens
ctttgactcttcagtaaaaccaaaagatgctagggctcacagcaatgatctttgtgttcttctttgtatcgtaggagatcttttattgctgtgtccacagactgctaattgttttataaggtctcttgaactcttgcacagtgataaacattttttaactggattacatttcccattcttccttgaagttaggtttggccatgtacctaaattctggccaaaggaatttaagaagaaaagaggtgtgtaactttaaggttaaccaataaaaacaaaatgctgtgccttttactttactgtttcccacagctagaatgtggacattttgccagagttggagcagacgtttcggatcrtgaagtgggaataatcttgataagtgggatattggagtagtacctggtaagtgagcctggatccctggcctcctcagagtcaccatgctttgcttggatttttctgtaagagaaaaaaaatccccatcttatttaaaccactgttattttggtctttctcacagagttgtactgatgaccattttaataaactcttttataattcactcgtcctgaaataaaactttcttatagaaacataaaagtaagatatgatgcaaatcagt

SEQ ID NO: 890239 - DNA, 645 bp, Homo sapiens
gaatacagtcatccatgtaagaagcattttacttgttgttttttgagatggggttttactctgtcgcccagggtggggggcactggtgagaaacttggctcactcccgatctccatttcctaggctcaggtgatcctcacacctcagccatccaagtagttgaaacaatagagctatgtcacsatagacctgtgtcaccatgctgggctgagttttgtagagatagggttttgccttgttgcccaggctcttctttaactgttgggctcaagtgttctgctcgcctcagcctctcaaagtgctggggttacagacatgagacattcagccttaatagttgtttaatctgaataaataaacaaatgaatttttatataatggaatgttataagtaatataataaacctaatgtatctaatcattaaatattgtatttaaaatattgcttacattgtattattttttaatatttaagggtgtataagttttgacatgttatgttgagaaattatgccataattaaaaaggaaataaaagagaaataggtcatcggtagcaaagagggttacaaaatattttctagtatcattcaactggaatcttaacattgagattttagattaacatttcttaagctttttatta

SEQ ID NO: 890240 - DNA, 612 bp, Homo sapiens
ttttggccttccaaagtgctgggattacagatgtgagctattatgcccagcctactttctgagtcttaaaagatgaaaataaatttttcagaatagcaggggaaaacatttgtgatgtaaaaaatggggtgcacactaattgaggtataaacaacaataattttgcaaattattagtaactgccaactcaattagtgtcttgttaaaaagatactgttatgaagtataataaagcattacgttgtatattttgactgtgtttcaaatttctgttttgtttccaacagttttgttgacttatgttgggtggaacaatttgtgagtgaccctgagattttacatggcttgaatctggtgatatctggtgtctccycaagtggtttgttgaagttttggataattagaagtatttcttacagaagtaaatatttcagtaaacattgtttcattcaaactctcaaaatataaaatacaaagaaatgttattctctatttatttttataaagattatagtccttatctaactcttcttagttcatttgaactaaatcaatgactttgtcaacagaacaaaccttaccagtggctttagaggaagagcaagaaaggtg

SEQ ID NO: 890241 - DNA, 593 bp, Homo sapiens
caaatgacatgacctttcagactatacctttagaatccaatagatcataattttatatttaatttttaaaacatcttaaccagttatgaaacttaagatattcttactatctctagtaactattagttattctagtaattcttagtatctctagtaattcatagctgtmtttacccttagaattgaggcaagaaattttcagaattatcttgctgttttatttatataaccttactcataatacacaaggtaacatgaagtattgggtcatattactgaggaatataaattatgaacagtttaacaacaatggccactgagttaaactagtgttaaaggagtcatcattgccagtgcttcaaatgttgcagttttatattgctggtcaccagtgccgaggttaaagatttattctgttttgtggtcaccagttgacttctgtgtctgtgttcagggagtgaatggggtcataaaagtcaatgcagttgcctattaagagaatcctaccttgcagaatgggacctttggtgtcagggtgtgaacaataactttatttcaacataaatacatagtaaacattactgaaattttaa

SEQ ID NO: 890242 - DNA, 564 bp, Homo sapiens
ccaaatcactttaaaaatcacacttcttctattgttcatactcatagaagagcatattactcaaatagctctgctataaattaacagtaagtttcagaagttataccaagtcacgagactcagatttttaaaaagtgccacaaagtgtctyttctgtgtcaatgttaatagaaccctttctttaaatgatcagtaggcaaattaagaatttccggataaagaacaaactctggaaaaacaaagctagtgggagaggccctgtaaatacctacctagtcttacaagggctgtctctaactcagcttgtattttaggcagcgtcttcagtttttcaactaatgtgtttgagaaaactgttttcctcggacatgcaggcgtggactccttacttcaggtaaggtgacagcagcttgacagagagtgccttccctcccacggcatttgggacgaggctgaaggaaagacacaggcggggttacgggaaacccattctctgcgccatctgggcaagctgaagtcagtttttccgctttctcacgaggtaatggattatcatgggctcag

SEQ ID NO: 890243 - DNA, 577 bp, Homo sapiens
cagattcctcatcttaacactgaacatgtctcctagcttcctagctttttcagtggctggataagagtctaaatctttgtattgaaatctttctaattttaatacaagaataacttccaaaaaaggctaaatgtgctttagttttttaatctcttaaaaaataacatttttttaatttgaaaataaaattaaaatgtttccatttagtcagctatgctttaacatatattaatatacataatatgcttttattcatgtatttgtttactgatcatgcaagcatgcatatatcactactgacaacatttggtctgttctgatttcatttactcctctatacacatttatatatttaatatatacatgtcaaacaaggccctaacattgactsaacaccacttatatcctcagctttatctaaactagataaggactgaatttttttttttaccaaatctttgccttgataacacctccatttctctgtgaaatataaatatgtcatcatatagagatgaaattctttcttgttcctgtattctgacattagtgtcccaatcattatgctccctaagtc

SEQ ID NO: 890244 - DNA, 681 bp, Homo sapiens
aaaaagcacagtaggatagttttgcatacactgccattcttgcggtttcagatgtcgtggtcagcagggccatagcattaaaaatgcaagtttctgtaatgatagtccacaaggaaaagggatgagaggttactttgaattttctttgaaggtgatagatagtggaatagcctttgatgccaggaatcaactctagtctactcacattaaggacatctgtcctccaaaacaggacacagcaaaaaacagttattgatgggtagctcaagcggggaargaaaaggagaaaatagttatttctcaggtgtttagagagctatgggaaagggtgaattaaagtggacaacattgcttttggaaaaacatggaacagtgggtattctttacttgtaaaatgcaaaaagattgaaaaaattgttaaatgtgtcttctggctggtttactggcaaatacaagctgttctacccagatatccacagttatatgtttcttttactaaattcactaaaatatttgccacttaacaatttccttattcaaactggctggggggagactcattaaaaagagtaaaggtgacataaagcagaaaaataaaattaaataatattcacatgtcctagcaaatataggtaagtgaactgagaatgaccaatttgatttccaaatattgtcaggcat

SEQ ID NO: 890245 - DNA, 435 bp, Homo sapiens
  misc_feature 131, 177, 178, 307, 311, 312, 329, 333: n = A,T,C or G
ccctacattgtgagagtgaaattgtcagcaacctatatcagtaattaaccagaggctttttggagagtaagacttctgatagatacctcaatagctgaagttgctcttcagtactgcacataacctgtggncagattttcatcrttattaattcatttattcaacagatagatattnnattcaaggcatagttctaaactatgcagtcaattacaaaaaaataataatgaaggacattagctctgcctcataggacgttaaaactctagctgctaaatgagacaaatagggttcccacatcaagtgnctgnnctcctgttataacctgnactntgcttccattggcttctcttgtttctgttttgataaacccatcatttggcttagtccctaccctttccatgctcacccaccagtaggtggacctccttgacc

SEQ ID NO: 890246 - DNA, 467 bp, Homo sapiens
  misc_feature 190, 236, 237, 366, 370, 371, 388, 392: n = A,T,C or G
gagagatctgtggaaggcaaaggaagaggagccaagaggccagataacattcctgcttcccctacattgtgagagtgaaattgtcagcaacctatatcagtaattaaccagaggctttttggagagtaagacttctgatagatacctcaatagctgaagttgctcttcagtactgcacataacctgtggncagattttcatcgttattaattcatttattcaacagatagatattnnattcaaggcatagttctaaactatgcagtcaattacaaaaaaataataatgaaggrcattagctctgcctcataggacgttaaaactctagctgctaaatgagacaaatagggttcccacatcaagtgnctgnnctcctgttataacctgnactntgcttccattggcttctcttgtttctgttttgataaacccatcatttggcttagtccctaccctttccatgctca

SEQ ID NO: 890247 - DNA, 587 bp, Homo sapiens
tctgtattccttttcacatatcattagcacaaatgtgaaatatcagaacaaaatttttcacacaacttcaaaatttttagagcaatactcaagggaaaaggtgtttatttagaacaatgaaaacaatgagacattaacttccagcttaaataaagttgattgtgtgcataaaaatggtgaaaatattggactttcttggcaaaagaagaaaggggaagactttatattttctgacgtaatattcatcatttgtctttggtttgtgtattatgtgtatgattttgaaaaaatgcatcaaagatataactttctggtgtttgctttgatattatccttgcaaacagaaaagttggcacatgtttctgtataaaactggtcaaagttggcctaggaatgatcttacattgtactttcactttacatcataytgtaagagtttaataatagctaaggcatcagcattgatgtggacttattatacctattcaagaggtggtgtgaggtttaggagagttatgtgccctttatcataaaacaaatctatgaagcatttatataaaaacccagtatttctggtttcaaattca

SEQ ID NO: 890248 - DNA, 678 bp, Homo sapiens
tacttttagttaatctaatatctatagaaacaatgctaatgactggcttgctgttaataaatacgtgggtaaatctctgttcagggctctgctctgaaggctgtaagacccgccccccccccccgatttcccacttcacacctctatatttctgtgtgtgtgtctttaattcctctagtgctgctgggttagggtctctccaaccgacctggtctcagcaagtggtgcccattmatgggggctcaaatacaggtcaaaggatcgctggagcaacgattggagaatgtggaactagctggaggacacccgagtactcttaaagcaatccccgtggtgagtaagaaggggagctcggaagcatcagggtagcaataggacaagtgtgggctgtggttcgttctaccttggaactttttcacactgatgatgaggaggaaggagagtataacaaagtaacagtagaggttacagaccaggtttatttgtcacctaaagctaaagcagaaaaggagggagaggttcatccctatccttctgcacaccctcattactattttgaagaaaacgaccctccagatctttcttttctggaggacactgggtgaaaagtagttgccctggtgactgttcgagcagcgccttgagcgactgctcttagttctattcaggcaggaatac

SEQ ID NO: 890249 - DNA, 661 bp, Homo sapiens
ttgtacattgaaaagcatttgtattgcattaaacatgttatataatatttttaattgaaattactggcaacttttgaaaaaatgtaatgaaataatgtgctttgctattggttaaaatgtttttgggcagggtcagtggcttacacctgtaatcccagcactttggtaggctgaggtgggcagatcacttgaggtcaggagtttgagaccagcctggcaaacagggtgaaaccccatctctactaaaaatacaaaaattatctgagtgtggtggcatgtgcctgtaatcccagctactagggaggctgaggtgtgagaattgcttgaactaggcaagcagaggttgcagtgagccaagatcatgccactgcactccagcctgggcaactgagtaaggttctgtcaaaaataaaaaagaaagaaagaaaagaaaaaaatgtttttagcttcaagtaacagaatagtcaactaattgaagaaaaaaacaaggagcaactttgaccaaatcrcacaacaaatagatggtatcaatgcttagttaattcaacatgatccacttctttgtgattctcttatctttctacctatgttttcaagatggctatggcattcccagccttacaacttcatgtgacaaaattcaatggcaggaaataataag

SEQ ID NO: 890250 - DNA, 620 bp, Homo sapiens
tctcattgtggttttgatttgcattcctctgatgaccagtgatgatgagcattttttcatgtgtgttttggctgcataaatgtcttcttttgagaagtgcctgttcatatccttcgcccactttgtgatggggttgtttttttcctataaatttttttgagttctttgtagattctggatattagccctttgtcagataagcagattgcaaaaattttctcccattctgtaggttgcctgttcactctgatggtagtttcttgaagacagtgtggcgwttcctcaaggatatagaagtagaaataccatttgacccagacattccattactgggtatatacccaaaggattgtaaatcatgctgttataaagacacatgcacacgtttgtttattgcagcactattcacaatagcaaagacatggaaacaacccaaatgtccatcaatgatagactggattaagaaaatgtggcaaatatacaccatggaatactatgcagccataaaaaatgatgagttcatgtcctctgtaaggacatggatgaagctggaaaccatcattctcagcaaactatcacaaggacaaaaaccaaacaccacatgttctcactcataggtg

SEQ ID NO: 890251 - DNA, 603 bp, Homo sapiens
gatctctggtgatataattgccaaaatggcttgacatttaaaatatcagagatgacccagctgccctaagtgataataatgctattatagtgggggtagaaacagccccaaaggagagaagagtgggatactaatgataaagttcagaaaaataagaattaagatgagataatgaacaacagggagactcgatccaagtcaagtcaatggtcatctcaccatggggaccgattggagaaaaactgaagttaaataaggacgctggcaagagaagacaacaggcagtggagtcagatggcctcatccttgtagaagctatgcacacccatttgaagaggaggtagttggattaaaggaattggctctaattcagtaggaaaaagttgcaggagccaggaggctgaaagaygcctgccatctggagaaactggggaaggagaattggaagtcaggcagatcaggggtggggaaacggtaaggaagaaaggctatttggcaggaatactttgggcggggtcagcttctcccacgatgctcttaattcagggatgtaacttgcacactcttcagtagaagcatcagcaataaaagaaaataatttta

SEQ ID NO: 890252 - DNA, 606 bp, Homo sapiens
cccaaagttcatgctcctgccatgacagtgatggtggacaggagggaagaaaatgacaaggaggaaaggaggtgtcttttgctcttaaaaatgagaagggtcataaacaatccatcggctgcaaaccacgagttgcccccaaagcaaagcaggttagtggctgctgccgcctcatcatagcttcagaacccacagagcctggaggactgtcaaacattatctaatatcccattctacagaagagaaaactgaggttgaggcaggaacgcagacaggaatcaaggttttggggttgggatttgcaatccattactttgcctcctgcatccactgcttttccctgggcattctcttcttccggtttcttggaagttaaaattgcgagagaagcaacacagagtggttttcccagggcctcgacctcsgtaagggaagacgtggaattccgagtgtggagacccagacagcctccgaaacccccacgcaaccctgggcgttcagcagctgccaatgcccgcctgacaagtttctggggcatctctgcacacggagaggtgtgtctcctgcagctccaaaaacagattttgccatctcatccccatattt

SEQ ID NO: 890253 - DNA, 533 bp, Homo sapiens
tatctcagaataaccatttgtaggactagagtccgtccatcagcagtaactgttcttactcaaccttgataaaagctttgccagatgagttgggctctgtttaagtttactaggcctgccataacaaggtaatacaaattgggtggcttaaatgtagtatcacagttctggagactagtagtctgagatcaaggtgttcacaggaccatgttttctgaaactctgggtagaatccatccttgcctgttcctcgttcctaatggtggccatcaatttttggcattcacaagcttgtagctgtgctatgccaatctctgcatcagtcatcgcatagcattctccctgkgggtctttatcttcatgtgatgttttcttcttcttataacaacaccagtcacattagatgagagcacatactaatgacctcatcttaacttgattgcacctgcaaaggtactattcccaaataaggtcacattcataactaccaggggttagaacatctgcatatcttttggggaacataataaccc

SEQ ID NO: 890254 - DNA, 559 bp, Homo sapiens
ttttctcagacttaggacctccaatatttttctttaactctgggggctgctgtgaagttacaaatatatggtatggagccatttaagctccagatcttgaccttttttttttctgatgctgctgctaagagtccagaaatctggtcagcctttgctttacttcataagaagagaagagggctgaaaaaaatattcatagacaccaaagtgaagatggaraaagatgacactggtgttacaggaataagcctggagctgaagtgattgggaagcccaaaaggacatcaaaagttacaggatttaagaccacagccaacgtagctgtgtcaaaagaataattcaagttttaaaaactgatttttgtttaataagaaaaattatatgtctacctcagaactctttctttggccctaggtttgtaaatccaatttcccacttgacttccaaccccaaatagaaattaggatattttattgtcaccccaaatggaacatggctaaaatagaactttggggttctatgcctagcttttcctatctggggaaattgacactactta

SEQ ID NO: 890255 - DNA, 603 bp, Homo sapiens
ttaccttgtcacccaggttggagtgcagtggtgcaatcccagttcactgcaacctctgcctcacagattcaagcaattctcctgcctcagcctccctcctgagtagctgggacaccaggagcatgcctccatgcacagctaatttttataattacrtgtagagagggggtttcaccattttgaccaggctggtctcgaactcctgacctcaggtgatccacccacctcagcctcctaaagtgctaagatttcaggtatgagccaccatgcccagcccatgtttgccctcttgcttctcctgaaatagccaagctcttcctcatctgaaggcttctgctcttgctctttaatctgctacaaaaatctctttccttgcttcttgctctttgcctggtgtcttcctttacctctttcttatcccagattaagtctcgccaccttttgaaggccttttctggccaccctgtctaaagtggtcttcctgtcccaccatttttctccattgtcccatcctattcagttcattgaaaatattacgattgctgattcttggtgtatttacttaacaatatgtgttttcttgcctgtcttttctactagatt

SEQ ID NO: 890256 - DNA, 594 bp, Homo sapiens
acagactaatacacctgcctttctcttcctctctcatcttacttcctcttctccctcttgctcaatatattccagccactctgccttgaatttgccaatcttgtttccctttcagagactttggtcttgctgctccctctttccagaatactttcttcccagatcttgacaaggttttcttccacacttcactcaggttgcccattcaaagatatttcctgactctacccgccatctaaaataacatcttactcccactcttttccatactttgttttattttcktctcagctcttatcacttattgaaattataatgtatcatgttataatgattctatcttatataattaacatttaatttaatataatttaatgtaaattacattagcatagagagtagcaaatagtagaggctcagctggctttgtggaatgaataattttactctaattctaataatagccatctgtttagctttgaggtatttatgacaaaaacccaccttaatcacaagccctgcttttaacatcttttgttcgaatatatggacagtttttttatccaagtggattttaagaaacttgaagatcct

SEQ ID NO: 890257 - DNA, 594 bp, Homo sapiens
acagactaatacacctgcctttctcttcctctctcatcttacttcctcttctccctcttgctcaatatattccagccactctgccttgaatttgccaatcttgtttccctttcagagactttggtcttgctgctccctctttccagaatactttcttcccagatcttgacaaggttttcttccacacttcactcaggttgcccattcaaagatatttcctgactctacccgccatctaaaataacatcttactcccactcttttccatactttgttttattttcttctcagctcttatcactyattgaaattataatgtatcatgttataatgattctatcttatataattaacatttaatttaatataatttaatgtaaattacattagcatagagagtagcaaatagtagaggctcagctggctttgtggaatgaataattttactctaattctaataatagccatctgtttagctttgaggtatttatgacaaaaacccaccttaatcacaagccctgcttttaacatcttttgttcgaatatatggacagtttttttatccaagtggattttaagaaacttgaagatcct

SEQ ID NO: 890258 - DNA, 564 bp, Homo sapiens
attagacccagagtttaaaccagaatgatgtgttctactgatgaggtctttctgctttttatcaaactcatcctatttggccatttgattctagaaatatggtccaggcaaaggtcacagtaagccgtacaaagtgttcccagttcattcagaaagaagctcatggaaactatctcagagtctttaagtgcctatgccccaggttaggagatcaaggacaagaaatctgggtgtaactcctggtgaacagaataaggctcagaagaggaaaggtcaagaatctccctcatatacatgtttactcaatggtaacaagaatgcaccagatttttcacaacagtactatttgtaatagccaaaaatggtgagaatccccatgttcatcaacagtagaatggataaattatgttggaattcatgcrtagattagtgtacaaaaaatgagaatggatggtttacaactgcattgaatgatacagatacatattgttgagagaaagaagacagtcaaccaaacacaaaagagtacatactaaataattcagtctaatgttcaaaaaaaca

SEQ ID NO: 890259 - DNA, 653 bp, Homo sapiens
attcttgcagcaccatttgttaaaaatactatttttttccacattgaattctgttgtcacccttgtcaaaaaataaattaatcataaatgaaagggttacttctggacatttaatctgatcccagttatttgtttttatgttggtgtcgtaaagtctttattactatacctttgtattaagtatggaaatgcggaagtgtgactcttccaactttgttcttctttttcaagattttttggctattctgggttacttgcattgctatataaattttagaaccatactgtttaytttcccaaaaacatttctgggtttttcagtaaagtttttgttttgttttgttttgtttgtttgtttggagatgatgtctcgctatgttgcccaggctgggcttgaactccgggactcaagggatcctcccacctcagcctcttgagtagctgagattacaaaggtgagccactgtgcatagctgggaagtacaattaatgtgataagtttttaaaatctagttcaaattaatacaaacttgattttgatagtacaccaaaactttgctctgacatagctctattccctcctccctccttggtgcttttattttcatacaaattacatctgtatacattataaactcatcaacatagtttta

SEQ ID NO: 890260 - DNA, 653 bp, Homo sapiens
attcttgcagcaccatttgttaaaaatactatttttttccacattgaattctgttgtcacccttgtcaaaaaataaattaatcataaatgaaagggttacttctggacatttaatctgatcccagttatttgtttttatgttggtgtcgtaaagtctttattactatacctttgtattaagtatggaaatgcggaagtgtgactcttccaactttgttcttctttttcaagattttttggctattctgggttacttgcattgctatataaattttagaaccatactgtttattttcccaaaaacatttctgggtttttcagtaaagtttttgttttgttttgttttgtttgtttgtttggagatgatgtctcgctatgttgcccaggctgggcttgaactcygggactcaagggatcctcccacctcagcctcttgagtagctgagattacaaaggtgagccactgtgcatagctgggaagtacaattaatgtgataagtttttaaaatctagttcaaattaatacaaacttgattttgatagtacaccaaaactttgctctgacatagctctattccctcctccctccttggtgcttttattttcatacaaattacatctgtatacattataaactcatcaacatagtttta

SEQ ID NO: 890261 - DNA, 638 bp, Homo sapiens
agtggtgtgtagttctccctgaagaggtccttcactttgcttgttagctgcattcctaggtattttattcttttttgtagcaattgtgaatgagagttcattcatgatttggttctctgcttgcctgttgttggtgtataggaatgctagagaatttgcacattgattttgtatcctgagattttgctgaagatgcttatcagcttaagcttttgtgctgagttgatgargttttccacatataggatcatgtcatctacagagacaatttaacttcctctcttcctgtttaagtaccttttacttctttctcttgcctgattgacttggccagaacttccaatactgtgttgaataggagtaatgagagaggacatccttgtcttgtgccagtttacaaaaaggaatgcttctagtttttgcccattcagtgtgatattggctgtcagtttttcatacatgagatatttcccttcaatacctagtttattgaaatattttaacatgaaaggatattgaattttatcaaaggccttttctgcgtctattgagataatcacatggtttttgtctttagttctctttatgtgatgactgacatttattgatttgcatttgttgaaccaaccttgcatcct

SEQ ID NO: 890262 - DNA, 637 bp, Homo sapiens
ggaacccttcctcatctggaccatctggcctctccaaagttggcaggctggaatgggtgattcaattgaatgacagagatggtgactgtccctctcctcaggagctcagtccaaggaagagatcagagctgtctgtataaccctggctggagtggctgaagcccccacagggaggtcctgcccagtgaggaggaatggattggggtcccacttaaagaagcagtctggccacgatttggcaaagcaactgtgctgcactgtgggaggccctttcttttccagaccatttggactccccaaagctagcaggctggaacaattgagtcaatcgaactacagagatggtggccacccttccccctgagaacttggtcccatctcagacagactgcagcctgttgtctttggctggctggaattccaagtcagtgagtcttaacttgtgaggtgctgtggaagtggagcccacaaaatgatgctgcttggytccctagattcaacccccttcctaggagtctgtatggatggatgtctcaccttgccagggatcctggggccagaatatgtaaaactcttgagtctctgtgtgcttgagtggctgctctgccaagagttcacagagctctgtgtatcagac

SEQ ID NO: 890263 - DNA, 610 bp, Homo sapiens
gtgtacacacacacatacacacacatataatatacacttacacacatgtacacacatatatacacacgcacatatgtacacacaaacatatatatatataaaataattttaacgttttaattttggtagcctgtgaaatctcagtaatctatactgagttttgctaaaactcagasttaaaaagagcacaagaaattagtctgtagaactgtattatttacactgatgtccatggtgacaaatctttaatatcccaacagatggctctccacaattccaccacgagtgtctgacttttctagtcacatcgatccctagctgttgaagtcttttgtgtcttacattatttttattaacctaccctgaatctagcctgttacgtgttctccaaaacaaccatactgttttggttgcatatgttcttttattggaagtatctaggaaaatttcccccctacattgtccttcctctttttttcaatatttttaaccaatgtaatgaatactgtagttccacgcagaaccatttttaaaagtctatcactctaaccccaaattctggaaatagaaactggtggcagatgatagctccgccccacgttgaggattg

SEQ ID NO: 890264 - DNA, 610 bp, Homo sapiens
gtgtacacacacacatacacacacatataatatacacttacacacatgtacacacatatatacacacgcacatatgtacacacaaacatatatatatataaaataattttaacgttttaattttggtagcctgtgaaatctcagtaatctatactgagttttgctaaaactcagagttaaaaagagcacaagaaattagtctgtagaactgtattatttacactgatgtccatggtgacaaatctttawtatcccaacagatggctctccacaattccaccacgagtgtctgacttttctagtcacatcgatccctagctgttgaagtcttttgtgtcttacattatttttattaacctaccctgaatctagcctgttacgtgttctccaaaacaaccatactgttttggttgcatatgttcttttattggaagtatctaggaaaatttcccccctacattgtccttcctctttttttcaatatttttaaccaatgtaatgaatactgtagttccacgcagaaccatttttaaaagtctatcactctaaccccaaattctggaaatagaaactggtggcagatgatagctccgccccacgttgaggattg

SEQ ID NO: 890265 - DNA, 609 bp, Homo sapiens
ttttttttttcaaatctgataggtgagaaatgataccttagtagggttttcaaattcacttgtctagcaaatgctctcaaggtgaaacctggcctcagcacctcatctacctctttagctcttactttctttattaggcatccctcacccttaccttctccacaggttgattgtacattttaaaagctgtgttttatgcatcactgatgatattttacaatgtaacataaaagtaatgttttagagttgaagtcaaggtagacagtctgccatattttaaaaacaaaagatttctctgtctacagattcatggattactatagtgttttttaaaatgtggttctgtactatctctatcagtatccctaggaatgattattaaagtatagggcytttgagaggctgaagtgagaggattgcttgaggacaggagtttgagaatagcctaggtgacatagcaagatctcacctctaaagaaaacaaaattttttaattagctgggcatggtggcacacacatgtagtcccagctacttgtaggatagcttgagtccaggagttcaaggatgcagtgaactatgatcataccactacacaccagcctgggtg

SEQ ID NO: 890266 - DNA, 471 bp, Homo sapiens
ctagccagctttttcctttcaagaactaggctgatgaatcatgcactttgaagcattatagactaaaggtgctcccacttgtaggtctatgcacatttttgacaaatatcataggaaaaggtcaatgttttcctttaaggamgagttgttagtattgggatttctggcctcagtgcatttgtatcaaagtagttggccaggcagttcagagaacccacaaacagtcatttactgcaaaccagaatatgactccaagactataagctgatggctgctaactttaatatattttttgtcattaggtaattctctgcaagatgggctttgtgaagccgtgtctaggagtgctattatgtactgagggacacttggggggatgtcaggctcatctgtgacccttttctggcctcagtttcctcagttcttgaatagaataaagataatactaccttgcaaagctagcaggaggat

SEQ ID NO: 890267 - DNA, 624 bp, Homo sapiens
taataatagtatttatcctcaaagactattgtgaagattaagcaaggtataaagagcttagcacagtgccccccatatgtaaggcttaaaaaatattagctattcatatttttaatattttgatgactattcttgttcactaatatagcaaatattgctgattagtcaatgcaacacattcattctctaccttctccttccttccacagaggctaggaaagctaaaatttctctctgtggctcccctgcagctaagctagaagtggccgtgtgatgcatttctgtctaataaggcatatatgtacataaagtatggtatttctagamataaaagatgtatatgttgataaccactcttcctcttcctatcttaaatatggcctggaattacggcagctatgactgctatcatatgttaccacctccttcttcctatcttgaataggcctggatctgtagcatccatcttatacttaggagtacagaccacaaggtcattcttttagttgctctggataaaacatacggcttgctggagcccaggaggcagaggttgcagtgagctgagatcacgcctcagcactatagcctgggtgacatagcaagaccctgtctcaaaaaaat

SEQ ID NO: 890268 - DNA, 638 bp, Homo sapiens
ccagcaatgggttttacgacttccagcagcttagcaattattccaccacatggtgctgaaaaaaggaactacttaatcatttttccagtggtaaatgattgttaaaatgtcttgcatgtaagtattcaagtaacccactctgatgagcttgttcactctgacctattctaaaattactaaagaaagcaaaatttagaaactggcattgactccctggcaaaaagaatgctaccacagtcgaccttgtgtgttatgtagggtctagggtgctgaacagatgccttcagttgcaaaagcacagaatgtcggcgggtgggggggaatgtatctatttaaatacatatgtagatgtgaagtgataatgacatttaacaaaatgtgactatcacacagagcgaacacccacgatcctttaatcacagagtaacccagggaggaaaaggttaattacatggcacascacctccacttctgggtagaagtttcacttgtcacccacaagagcttcactttattctgagtgaagtttaacaagcttaagcttgacaaatgcttacttcgcattgaaaatatattaggatttgttttagatttgttttagtattttattagtgaagaattgacttttcaatggcttt

SEQ ID NO: 890269 - DNA, 626 bp, Homo sapiens
gatacatgctttccagatatgcttattagtataatttccatgcactgtttcataatactcaaagatgacagtgctatctccatgcagttataggacttatgccaaagatgactgtagtgggtgagtagtgccccccaaaaatgcatatccacccagaacctcagaatgtgacttatttggaaataggaactttgcagatraaattagttaaggatcttgagatgaaatcatcctgtgactgacatcatccaatgactagtgtccataagcagaggtgaggaccccgagagacatggagaagatggtgagaagatgcaggcagagagtggagtgatgcatctacaagccaaggaacacgaaggactctgagtagccactagaagctggaagagaagcatggatgcttcctcccctggagtcttctgaagatgccaaccctactaatactatgatttcagagactttagtgagagacttaatttctgttgtttacaggcactcagtttgtggtaattggttatggcagccctaacaaaccaatacaactactaattcaagattctgtaagatgcataaatacattctggtttctggagagcagctgacaattctacctgcagcatttg

SEQ ID NO: 890270 - DNA, 593 bp, Homo sapiens
tctgaataaaaaataaactaataaaagtaaagtatttttaaccacaagtgtcacatataattttatattttgttgctctttacaattctaaaaaaatggctaatttctctgcattgttaaattatctgccattcctaagaagtttccattctttatttaatttcttatatttcatttaatatgtttacaaattaaacagataaatgagtatagtcttatgtgtgtggttatatttttctagttaatttcattgggagactatcttatttgcctcagaatcartacatctttatgtctttgatattatgtctgacatatttttcttcagtctacacttaaaaattttccaggaaatatatgatttttattcacaaatatttaagtgatattaaaatatgactcaaatgataataaacgaacaaggtgagagcaaacataaattgccgagagattgacttttcacatgaagaagattaaagaaagtatcaatttatacctctaagtaaaagttcactttatcttgacattatactaactatagtagtagtttatgataactactaaatttactagtatttgaaagtgtactgttt

SEQ ID NO: 890271 - DNA, 646 bp, Homo sapiens
tttcctataagccagacttgggataaaggagagtagcaaatggagccatttgcccttggggccaagctcattttaccaatcacaaaatacaaaaatacaaaaaataaaaaagaacaaaagactttgtgttaaatatttttaaaatggttaactgtgtttaaaatgattaaaattatttgagtgaggagaggtgaatatttcagaaccctcaaagcacaagtcctttgaatttatttatttagctttgtggagttttgtgctttcagcaatttataggtatagaatcacatacatggctgctcatgcaaacatgcacacacacatgcaaacaaggcatcacacacctagrgtcacagaaccaatatattctatatattctctcactttcctggaactacaaccatgggaacaaattcttttacgtagggctccagcatcataggagaactgggggaacttggcatgggttattgtccctctgtggattccatactatggaacatcaagatggtgatataggtctcctttgcccttccttattatgggtattgtctgttggagtttatcactacttcatttgtaaatactaagcattcctgttttctatcccccttaaaccttgaaagctcagtttggatatcacttc

SEQ ID NO: 890272 - DNA, 602 bp, Homo sapiens
gaaccattcttgcatccctgggataaatccatttggttatgatgaatgatctttcttttttaaattattattatacttcaagttctggggtacatgtgcagaatgtgcagatttgttacatagatatatgcatgccatggtggtttgctgcrcccatcaaccctcatctacattaggtatttctcctaatgttatccctcctctaacccccaaccccaacaggccccagtgtgtgacgtccccctccctgtgtccatatcttctcatttttcaactcccacttatgagtgagaacatgcagtgtttgattttctgttcttgtgttaggttgctgagaatgatggtttccagcttcatccatgtccctgcaaaggacatgaactcatccttttttatggctgcatagtattccagagagtatatgtgccacgttttctttatccagtctattattgatggacatttgggttggtaccaagtctttgctattgtgaacagtgctgcagtaaatatacgtgtgcttgtgtctttatagtagaatgatttataatcaaactgaatccagcagcacatcaataagcttatccaccatggtcaagttg

SEQ ID NO: 890273 - DNA, 602 bp, Homo sapiens
gaaccattcttgcatccctgggataaatccatttggttatgatgaatgatctttcttttttaaattattattatacttcaagttctggggtacatgtgcagaatgtgcagatttgttacatagatatatgcatgccatggtggtttgctgcgcccatcaaccctcatctacattaggtatttctcctaatgytatccctcctctaacccccaaccccaacaggccccagtgtgtgacgtccccctccctgtgtccatatcttctcatttttcaactcccacttatgagtgagaacatgcagtgtttgattttctgttcttgtgttaggttgctgagaatgatggtttccagcttcatccatgtccctgcaaaggacatgaactcatccttttttatggctgcatagtattccagagagtatatgtgccacgttttctttatccagtctattattgatggacatttgggttggtaccaagtctttgctattgtgaacagtgctgcagtaaatatacgtgtgcttgtgtctttatagtagaatgatttataatcaaactgaatccagcagcacatcaataagcttatccaccatggtcaagttg

SEQ ID NO: 890274 - DNA, 632 bp, Homo sapiens
gggaaaggtgacctgaattatccaggtgtcactgatctaatcacccaatctaatctaatctaatcagcctctaaaagcagataattttgggaaggcgaggctggtggatcatgaggtcaggagttcaagaccagcctggccaagatggtgaaaccccatctctaataaaaatacaaaaattagcccggtgcagtggcaggtgcctgtaatcccagccactcaggaggctgaggcaggagaattgcttgaacccggggggyggaggttgcagtgagccaagatcacgccactgcccagcctgggcaacagagtgagactccatctcaaaaaaagaaaaaaaaaaaaacaaaaaacaagcagagtattgtctacagctagttgaagaacaagatggcataaagaggcagcaaaagggaagttggagagattcaaagtctgagagggaatccacttgctgttgctggagaccatgggtgagaagggccgttactaagagtgtcgcaggcacctcaaagcatgagaagaaatacccctaacctctaggagggaagattaaccctcacatctgagaggcagcaaagaaatgaaaacctcagttacagaaactgaattcttccaaacaaccagagtga

SEQ ID NO: 890275 - DNA, 571 bp, Homo sapiens
aagcactgatgttaggagcagtttagggggatcagaatcttgcagcctccagctgcgtgactcctaaaccataatttctaatcttctaagagaagataagtaaattgggtgtgttctgtgagatacctagattttttgcataacggcagtttccagactgaagcacattatttgggaacctgaggacagtccagtagtcttgctgagaagaggaaagaggaataagaaataagagaggccaagataacagaaatctgtgaattcaagtgtcagaggtaagcagaaaaaacccagtgaaagagttccaaaaatgtacaaatgtaattcamtgaaatatttgaaagaatattaatctgaacataaatagagtaaaactctgttaggtcaggcatcgaaacagtgcttggtagtgacttgtttgattattttagagagttcatgcagacctggtgatgtggtttggctgtgtctgcacccaaatctcatcttgaattgtgccataatttccatgtgtcatgagagggaccaggtaggaggtaagtgaatcagggggtgagtctttcttgtgata

SEQ ID NO: 890276 - DNA, 626 bp, Homo sapiens
agaattgctgctagaaggaaaccgggttggggaaggaggacccaacctgccctggacccatagagtagcccctaagacaagagaggtaggggccgggcacagtagctcatgcctgtaatcccagcactttgggagatggaggtgggtggatcacctgaggtcaggagtttgagaccagcctggctaacatggtgaaaccccatctcttccaaaaatacaaaacttagytgtgcgtggtggagcacacctgtaatcccagctactcaggaggctgaggcaggagaattgcttgaacccaggaggtggaggttgccaagagccaagatcatgccattgcactccatctcaaaaaaaaaaaaaaaaaaaagggtgagatgtgtgtgtgcatgctcaggtagggttgtgtgcatgaacatatgtgtgtatgtaaattccaaaacagaattgcattagctgcaaaacttaataaaaatttctaccgagagtgaggtcatgtcttcccggacctctgctttagaggctgcacaagggaaaaggtgtagaatttaagtgactaggacagtgattcactgcttgggaaaagggcggatcataggttgagataagctctctctggtctgcaaagc

SEQ ID NO: 890277 - DNA, 644 bp, Homo sapiens
gcatctcctagaacgctgaggaagaaagacagggatttgtccattaggcccatttatgtctgaggacacaatacagaccacacaataactaactcaaacttaattagataattcataaaaataattcctgagtaaaaagaaactgattcagggatgcctgaactggaaaggaagacagggacttggggccagggctgaggcaggaagaagccaatgtacccaaaccctgcttgctggcctcccragaggagcagaaccctggaggtggtagactcaggccagaggccttctactggcaaacctcatggataagaagtgttgttagctgtggaactttgatagcaaagaattccatttggacatggcacagaagggaagagggaccacatagctgtccatcaaagcagggatgcacaggatagagggccaagcatactcagccattgcccctatgtggaccctaagacactgctcgctccttaagtcagtcacagcatctgaagacatcaaaaccagattgggcagggctgagtcacagctgcataagggtaagcgaagagagaaaaacagccctttgacccagaccagccagaggatcccaaggagggagaaaccaacacccaaagtctgactcttgtttggtc

SEQ ID NO: 890278 - DNA, 671 bp, Homo sapiens
catcatagtagtgtacaattaaatgtttagcaaatttgtggaattggctaaccatcaccacaaaccagtttcaaaacattttaatcacctccataaagtacactgagacaatttgcaatcaaccctagcttacactctcggctccaaaaaaatactttctrtattaataaatttgtcttttccagacatttaatataaacaaaacagaaatatttttgtgtgtagttttttttatttatgttgtggcacatatggttttctgtttctttttattgttgaatggtatttcattatatgactataacgcatgttatccattcaccatttgattggcatttggattgttttgactttttagctgtaacaaataatactgtgaacacttacacaagtctctgtgtagacatacactttcatttctcttgtatagatgtgtagaagtgatattattgggttgtatggttatattatgttgaactttttaagaaaatgctaagatgtttttcaaagtggttgtaccattttatattaccaccaacatcaaggctttagttcttctacacttcgccacacttggtgtggtctttggattataactccttgagtgggtgtgcaatggtatctaatcttgattttaattttcatttccttaactaataaatatttcaact

SEQ ID NO: 890279 - DNA, 671 bp, Homo sapiens
catcatagtagtgtacaattaaatgtttagcaaatttgtggaattggctaaccatcaccacaaaccagtttcaaaacattttaatcacctccataaagtacactgagacaatttgcaatcaaccctagcttacactctcggctccaaaaaaatactttctatattaataaatttgtcttttccagacatttaatataaacaaaacagaaatatttttgtgtgtagttttttttatttatgttgtggcacatatggttttctgtttctttttattgttgaatggtatttcattatatgactataacgcatgttatccattcaccatttgattggcatttggattgttttgactttttagctgtaacarataatactgtgaacacttacacaagtctctgtgtagacatacactttcatttctcttgtatagatgtgtagaagtgatattattgggttgtatggttatattatgttgaactttttaagaaaatgctaagatgtttttcaaagtggttgtaccattttatattaccaccaacatcaaggctttagttcttctacacttcgccacacttggtgtggtctttggattataactccttgagtgggtgtgcaatggtatctaatcttgattttaattttcatttccttaactaataaatatttcaact

SEQ ID NO: 890280 - DNA, 639 bp, Homo sapiens
taatgtgatgactgcaaaagttggtgagctatatatatgtatttgtgtgtgtgtgtgtgtgtgtcatacatacagaataccgtcatgcactgcataataacatttcaatcaactatgtaccacatatactataatgatctcataagattataatggagctaaaaactttctatcaccttgtgacaaaatcattgccatcttaacataatagcccaattcattaatcctgtgttcgtggtgatgctgatgcaaacaaacctaatgtgctgcaagycacttaaaaagtaaatataaattaaaaaatagaaaaatatcttagaaaaaatatttacaaatacttagatatacttagaaaatattttatacagttgtacaatgtatatacataatttattatatgttaaatatgtaaaccagtaaatgcgttctaagctaagtgttataactagagtcaaagtgttttttaatcaaaaatttataaatagttatagtaagttaagtttatcactgaggaaagaaaaatattttaaaaacatatagtgtagcctatgtttgcagtgtttataaagtctacagcagtgtaatgtcctggttccacacattcattcaccactcactcactcaatcacccagagcaaa

SEQ ID NO: 890281 - DNA, 631 bp, Homo sapiens
tttaacatgtaagtctttaatccatcttgaattaatttttgtataaggtataaggaagggatccagtttcagctttctacatatggctagccagttttcccagcaccatttattaaatagggaatcctttccccattccttgtttttgtcagctttgtcaaagatcagatggttgtagatgtgcagtattatttctgagggctctgttctgttccattggtctgtatctctgttttggaaccagtaccatgctgttttggttactgtagccttgtagtatagtttgaagtcaggtagygtgatgcctccagctttgttcttttggcttaggattgacttggcaacgcaggctcttttttgtttccatatgaactttaaagtagttttttccaattctgtgaagaaagtcattggtagcttgatggggatggcattgaatctataaattaccttgggcagtatggccattttcacaatattgattcctcctatccatgagcatggaatgttcttccatttgtttgtatcctcttttatttccttgagcagtggtttgtagttctccttgaagaggtccttcacatcccttgtaagttggattcctaggtattttattctctttgaagcaatt

SEQ ID NO: 890282 - DNA, 570 bp, Homo sapiens
ggctgaccctgtctcaaaaaaagctgaccctgtctcaaaaaaggctttgaatcatttatcattaagtttgaagaaactctgggggaagcactggattaagtatgacacaactttaaaaatcactggagaaattgtagaggttcacctggrcatttgattttcacatgctccggttcttgggatggagtcatattatgtaacccagtatctcaaggcccatctatgcccagagtgaggttcttcattcaaataaatgggtgtaaatccacatttcaaataatcttctggattaattgaagtcctgggccttgaaaaagggtcagtttgacatttttttttcttgtctcattctgtcaaccaggctgagtgcagtggcaagatctcggcttactgcaaccaacacatccccggctcaggtgatgctccctcttcagcctccgaagtagctgggactataggcatgtgtcaccatgcctggctaatttttgtacttgtttttttgtagagatggggtttcatcttgttgccaaggctggtttcgaactcttgggttcaagtgatcctcctccc

SEQ ID NO: 890283 - DNA, 585 bp, Homo sapiens
ttgggtccggggcgctgagcggcgttcgcggggccgttcctggcgcggggtgggccgggccccggcggcgctaaagttggcggctgggggagggaggcgagcggccgcccagtctcggtgtgagtgcgggaaccagagggttattttcgaaatgctgaatgctccatgctaaaaatgtttaataataaacaggatgtcgccactcggggcctgccagatggggtttttttttttttcctcctcttttgcctccccycaacccccaggagagaaattcagccctgttgaaactgtgggcctctgaagagtggatttgccttaagaggtggatttttttcctttttcttttttcctccttctaaatatcgtgggaggtcggagcccacctttaggcaagaattggaggtgttttcagtggtgagcttgaaggaagtgggagaaggggggctggggagtgtcttttgctaaatggcttcctgggagaaatctttaaatgcctttggtttacaggactgttaaactttccctaagattttttttttctttaaggtttagtgtgcatttgatgtggctttgtacagtgtc

SEQ ID NO: 890284 - DNA, 585 bp, Homo sapiens
ttgggtccggggcgctgagcggcgttcgcggggccgttcctggcgcggggtgggccgggccccggcggcgctaaagttggcggctgggggagggaggcgagcggccgcccagtctcggtgtgagtgcgggaaccagagggttattttcgaaatgctgaatgctccatgctaaaaatgtttaataataaacaggatgtcgccactcggggcctgccagatggggtttttttttttttcctcctcttttgcctcccctcaacccccaggagagaaattcagccctgttgaaactgtgggcctctgaagagtggatttgccttaagaggtggatttttttcctttttcttttttcctccttctaaatatcgkgggaggtcggagcccacctttaggcaagaattggaggtgttttcagtggtgagcttgaaggaagtgggagaaggggggctggggagtgtcttttgctaaatggcttcctgggagaaatctttaaatgcctttggtttacaggactgttaaactttccctaagattttttttttctttaaggtttagtgtgcatttgatgtggctttgtacagtgtc

SEQ ID NO: 890285 - DNA, 671 bp, Homo sapiens
cccttaagggctggaacacaacaaaaaggcagaggaaggaacaatttgctctctgcttgatagtgtaagctgggacattgagcttcttctgccattgaactgggacttttatcatctatgttccttgttctcaggcctttggacttggactggaactacaccactggctttcttgggtcttcatyttacatatggtagacttctcagccttcgtaattgtgtgaacaaataccttataataaatccctttccttctctctccacacacacacacacacacacacacacacacacacacacacatttagatagatagataggtagatagatagatagatagatagatagatagatagatagatagatagatgatagatgatagatagataatccttctggttctgtctttctggagaaccctgacaaatacattactgaccttaaactattcttcaaaaagtaaaactctttagtcagccaaatctaacaccatgtttattagttggctgaatgtttgagacagaatcatggcgtacctccatgaaaatagtaatgaatacctcagcatgatggcaattgttattcatgatgtctctaccaatattttaataagaaaattgggaaggttcacacagacctgctctacagtgtaacttactagctagcaagac

SEQ ID NO: 890286 - DNA, 630 bp, Homo sapiens
atgcaggggatacatgtgcgggtttgctacatgggtatattgcacccaggtggtgagcatagtacccaataggtattttttcaaacccaacccccttcttccctccccgctctagcaggccaccatgtctattgctcccatgtttacattcttgattgctcaatgtttagctctcacttataagtgagaacatgatatatttactttgctattcctgcattaatttgcttargattatggcctccagctccatccatgttgctgagaagaacatgacttcattctttgtgtggctgtgtagtattccatggcatatatgtaccacattttctttatccaatccaccagttatgggcacctaggttgattccatctctttgctgttgtaaagcaaagcatgtgtcttttcggtgtagtgatctattttggggggatatatgcccagtaataggattgctgggtcaaatggtatctctgtcttaagtcctttgagaaatctccagaaagctttccacagtggccgaactaatttatatacccaccaacaatgtatacgtgtttcctttttcctgcagcctcattggcatctgctgtgtttttaccttttaataaaagacactctgactggta

SEQ ID NO: 890287 - DNA, 592 bp, Homo sapiens
agcacaagtaagtacatgaagaagtggctcaaatgcccatgcttcctactcctgctacactgccttctttctcccagcctgcacctgggacctcatgaggagtttcctacaattcattgataaaggaagagaagactcaggcctggcttataaatggttctgygtgatatgcaggcaccactcaaaagtggacaactatagcactacagctactctctgagacatccctgaagggcagtggtaaagattaatcttcacagtgggaagaattccaggtagtacacctggttatacacttttattggaagggaaaatgattatatgtgttattatacactgactcataggctgtagctaatggtttagtaggagcatcagggacttggagggaacatgattagaaaactggtaacaaatacatttggagaagaggtatgtggaaaaccctcttttaaatgggaaaaaatcatacagacatttgtgtccttgtgaatactcaccaaaggatgatattagaagaggaatattttaataaccaagtgtctgggattactcattccatggataccagtaagcttccttccccactcac

SEQ ID NO: 890288 - DNA, 574 bp, Homo sapiens
cctttaaataaacttttcaagccaatctattaaatggttatctgctgtctgctccagggagtgcaggcagatggagagctgggctggggtagaccagttgtaaattcatacacacatacacacacacacacacacacacacacacacacttgaagtcctgcacgargtcacctacaaggtcaggccacctcttcctgggaccttgctcaggttttggtgtctcagaagatgctgcattaccaacctttgaggagaaaaccaaatgggcttgtcacaaagaaatacaaagtgtgactcagagcagggagcaagtgtggagggaagggcctggagaggacagtgagtgggagagctgccatttgggctggtctggcttcagaaccctgctttgctttctctccttttggctcaggagatgattgcacatgtggctcacagctgactcttgcaggatctcagataaatgatgagaagacaggtaacacctgggcaactttttctcattctgtgtggatagaggttggggccagatggcctctctcctcctcccccattatttatggaagccttcact

SEQ ID NO: 890289 - DNA, 574 bp, Homo sapiens
cctttaaataaacttttcaagccaatctattaaatggttatctgctgtctgctccagggagtgcaggcagatggagagctgggctggggtagaccagttgtaaattcatacacacatacacacacacacacacacacacacacacacacttgaagtcctgcacgaggtcacctacaaggtcargccacctcttcctgggaccttgctcaggttttggtgtctcagaagatgctgcattaccaacctttgaggagaaaaccaaatgggcttgtcacaaagaaatacaaagtgtgactcagagcagggagcaagtgtggagggaagggcctggagaggacagtgagtgggagagctgccatttgggctggtctggcttcagaaccctgctttgctttctctccttttggctcaggagatgattgcacatgtggctcacagctgactcttgcaggatctcagataaatgatgagaagacaggtaacacctgggcaactttttctcattctgtgtggatagaggttggggccagatggcctctctcctcctcccccattatttatggaagccttcact

SEQ ID NO: 890290 - DNA, 593 bp, Homo sapiens
gaacaagttggattgctccgaatttcagtgcctatcgggcagccagtgaacatttgtccatctttaaggcattaaactgagaagaaccactgaggaaagcatgccacagtctttcccaaaatccctgtgtcttaaggaacaaccaagaagttaactggtcagggaaaagatttcttttggaacrcaggtaagcaaaaccaagacgccatcggagacacccttgcctgcaacggttgtggtataaagcaaggtaagtagcgtgatattcactgctttttgtcccacagaagccatcgctgtgtgcggaaatccatgacctggccatgacttctacaacccggaggacttgcctggcattaccgaaaagcacaggggaaagattctgtggcaggtgccgcatttcatccagctcactccgtgctagttcctaagacatcttaattcttacacatatgcataatcgtgatattttgccatgaataacaatatatttcacaattatcaaccattttaatttttagctttctaacctcggactactataataaaaagaaataataaatccaaaagtagtagtggaaaaaataagtatc

SEQ ID NO: 890291 - DNA, 407 bp, Homo sapiens
tctaacatttaactaacaggagtctgaaaaaactaccagtggaaaaaacagaaaccagtaatattttaatagatcacctcagggaagaaggaataaagaaacagagcaggctgggcgcagtggctcacgcctgtaatcccaacattttggaaggccgaggcaggcagatcacttgagsctaggagtttgagatcagcctgggcaacatagtgagattctgtctctacaaaaaatttaaaaattagctgggcatggtgaggcacatctgtggtcccagatacttgggaggctgaagcaggaggatcacttaagcccaggagttaaaggctgcacctccactgcactccagcctggatgacagagcaagaacctgtctcaaaaaaaaaaaagaaaggaagcaaaggagc

SEQ ID NO: 890292 - DNA, 634 bp, Homo sapiens
atgctgtggatgctttgttcttccattccgactattaaattttctctatatcagcaataaggctgttttgtttctttttttgtttgtttatcattggtgtgctcagtgcagtagcactgtaaattttttgaagaactttttatttgcattcacaacttggctaattggtacaagaggcctagctttcagcctgtctcrgcttttgatatgccttcctcactaagcttatttctagttttgattttaagtagagatatgcagctcatcctttcatttgaacccttagaggccattgtagagttattaattggcctaattccaatactgtcatctgtcagagaccccagaagaaggagtgagatggcggaagggcttattgtggagcagtcagatcacacaaaacatttatcaattaagtttatggttttgtgtgtggatggtccatggtatcccaagacaattacaatagtaacatcaaatatcactgattacagatcaccgtaacacatatactaataatgaaaaagtttaaaatattgtgagaattatcaaaatgtaacacagagacatgaagtgagcatgctgttggaaaatggcacctatagacttgcttgaggcagggttgccacaaacc

SEQ ID NO: 890293 - DNA, 707 bp, Homo sapiens
atatttgatttgcaatatctacttcctatttggaactttaaaaagcagataggaatgtaaaaaatgtgtggaacatgtggaaattgacatctaaggcttaaatttcactgtaatttaatagtcttttaactgggaatcagtctgtatggtgtttatattttgtatgttatggaagagttatttttagggacttaaaacttctcaaaattgtcttctttcattgagaaatagattgctacatcctgtataactgagrtcacaaagaaataatttgatgaaattaataaagaaacttaatgttctctaggcaattgtatgctgccaatgtgctaaatctttgtctgttaacttattcaattattgttttatgaatcttctgcaagactatatccaaattgaatgttttgccaatatcaatcccctactggtggttctaacaaagaattctctttcagggactggtctttttccttagggaagtaaatacagccagtgatttactgataaatccacccagtatatacatcatttctgtcccatatatcaatgtcattggcaacagcttgctttactaagtgattctgcagtgtcttctcaaagactattttgttcagtaatcagatcaaagtgccaacatgaatactttttagcattgtatgaattgtttttatctttaatagcacaattagttctgagacacttttgtg

SEQ ID NO: 890294 - DNA, 730 bp, Homo sapiens
tgatgtaatgcggtagagtttctaaatgtcctgagtgttttcaaggcatacgttttaaaaatttaaatctaatgatggaatttttctgagttgaacctgcagtcatttcactgaaacatgactttctttgtctgggatcccaaatcagctctccctctggaaagagtaccaaagaggctgaacttgacgcttccaaagcttgtcyttactgctgtgtattttctcaaagtaaactcacttaatggagactagtagggtctgattcaaaagaaaaccttgaacaagacctattctgtaagtaaactgggatttaaattacttccttgaagtgaaactgactttcctttcccaaccaggtggagaaaagctctgactgtcatgttcattctgtttctgtttcaaagaggttacaaagtttgaatttacaagtaaaaatccaggctcctgtgagcttggataccaacattgaatcaatgctttaatgactttccagtaatgggaatctgctgttgccccaagttacccttcctaatgttctcgaagggggaaaaaatcatttatgaatacaaaagtttactctaagttgcaatgtgataacattattactggaattaaagctcaatgattaatgacatatttttggtcatgtttattgaaattctttttgtatagactctaccatgaaaagctttatttccatcccccttgtttccttgggtttgtctaaaga

SEQ ID NO: 890295 - DNA, 684 bp, Homo sapiens
ttccctttcaattttttggaatagtttcagtggaaatggtaccaccttctctttgaattctacctttggtagaattcagctgtgaatttgtctgggtctgaggtttttttttggttggtaggccattattgcctcaatttcagagcacatttttggtctattcagggattcaatttcttcctggttcagtcttgggagggtgtatttgtccagaacaytgttcatttcttttagattttctagtttatgtgcagagaggtgtttataatattctttgatgtttgtttgtatctctgtagggtcagtggtgatatctctgttatcatttctgattgtgttttgtttatttgatttttctctctttctttattagcttagctagttgtctattttattaatttcttcaaaacactagctcctggatttgttgatttttttaagagtttttcatgtctttatctccttcagtttggctctgatcttcattatttcttgtcttctactagctttggggtttgtttgctcttggttctctagttcttttatttgagatgttaggttgttaacttgagacatttctagatttttcatgtgggcattttgtgttagaaatttccctctaaacactgctttagctgcatcccagaaatcctggtatgttgtctttgttttcttcagtttcaa

SEQ ID NO: 890296 - DNA, 684 bp, Homo sapiens
ttccctttcaattttttggaatagtttcagtggaaatggtaccaccttctctttgaattctacctttggtagaattcagctgtgaatttgtctgggtctgaggtttttttttggttggtaggccattattgcctcaatttcagagcacatttttggtctattcagggattcaatttcttcctggttcagtcttgggagggtgtatttgtccagaacactgttcatttcttttagattttctagtttatgtgcagagaggtgtttataatattctttgatgtttgtttgtatytctgtagggtcagtggtgatatctctgttatcatttctgattgtgttttgtttatttgatttttctctctttctttattagcttagctagttgtctattttattaatttcttcaaaacactagctcctggatttgttgatttttttaagagtttttcatgtctttatctccttcagtttggctctgatcttcattatttcttgtcttctactagctttggggtttgtttgctcttggttctctagttcttttatttgagatgttaggttgttaacttgagacatttctagatttttcatgtgggcattttgtgttagaaatttccctctaaacactgctttagctgcatcccagaaatcctggtatgttgtctttgttttcttcagtttcaa

SEQ ID NO: 890297 - DNA, 586 bp, Homo sapiens; identical to SEQ ID NO: 877798

SEQ ID NO: 890298 - DNA, 691 bp, Homo sapiens
tctggtaatttaatctctacaatgaaaagaaactatttgactctttgcttctttgattgagttatagcctctatttagatttaaggttttagggtgtatgtatgtagaggaaatactgtttcaaaaaaaatggaatctcratctaaacacttttacatttactcaaaatggatcatggacttaaatgtaaaactatgaaactttttgaaaaaaggagaaaaatcttcaggatctagggctaagcaaagagatcttagacttgacaacaaaagcacaatccataaaaggaaaagtagataaatcgggtctcattaaaactgaaagcttgttatctgtggaacatatgtgaaaaagatgaaaagacaggttgcagaccaagagaaaatacttgcaaatcacatatccatcaaaggactagtatttagaatatataaagaactctcaaaactcaacattaaaaaaaatccagttagaaagtgggcaaaacacataaacagctatttcaccaaagagactatacagttagaaaataagcacataaaaagaagttcaacctcattggacatcacgataatgcaaatgaaaccacaatgaattatcaatacacagctattggaatggctaagataaaaaacagtgacaaaaccaaacctagcagggatgcagaaaaaaaatggagcttttacattcc

SEQ ID NO: 890299 - DNA, 691 bp, Homo sapiens
tctggtaatttaatctctacaatgaaaagaaactatttgactctttgcttctttgattgagttatagcctctatttagatttaaggttttagggtgtatgtatgtagaggaaatactgtttcaaaaaaaatggaatctcaatctaaacacttttacatttactcaaaatggatcatggacttaaatgtaaaactatgaaactttttgaaaaaaggagaaaaatcttcaggatctagggctaagcaaagagatcttagacttgacaacaaaagcacaatccataaaaggaaaagtagataaatcgggtctcattaaaactgaaagcttgttatctgtggaacatatgtgaaaaagatgaaaagacaggttgcagaccaagagaaaatacttgcaaatcacatatccatcaaaggactagtatttagaatatataaagaactctcaaaactcaacattaaaaaaaatccagttagaaagtgggcaaaacacataaacagctatttcaccaaagagactatacagttagaaaataagcacataaaaagaagttcaayctcattggacatcacgataatgcaaatgaaaccacaatgaattatcaatacacagctattggaatggctaagataaaaaacagtgacaaaaccaaacctagcagggatgcagaaaaaaaatggagcttttacattcc

SEQ ID NO: 890300 - DNA, 674 bp, Homo sapiens
agaatcagtaacaaatactgacccagttttttgatctttttctttttgaaaataaaaatttggggtaagagtatttctgtatttatagacattttcaaaaatgtgataaaatatttagaatatttaaaagccttctttagcgtatcgattttaaaaagaaatatcatgcaaaattaaaaacattcttcttctagagaaattcccatttctttttcctgcattttcttccttccttttaaatctaagactaacacagtgcrtttacgcacacattgcaccaagtgaagctaacttatgcaccctatcccagcccatattttagctttattattgtctttattcttcttcttctaaataagcaacctctacgtctgtgtgataagcttacattttcagagagatatgagtctgttgccaaggagtcagctcagggcccaaagaggaactcctgaattcttcttgttttgactctgagacttctaagagtgagtgtctagggaagaagaagcttggcaaatttaaaaacagaggactgcccggtttttaggcatatgtccctattcttgagacaggaataggaccacctagagaatctttagacatttcagaggaggtagatggaaaccaagaatgagttgctgaaagggaggtgggtgtgcactccaagcaggttt

SEQ ID NO: 890301 - DNA, 674 bp, Homo sapiens
agaatcagtaacaaatactgacccagttttttgatctttttctttttgaaaataaaaatttggggtaagagtatttctgtatttatagacattttcaaaaatgtgataaaatatttagaatatttaaaagccttctttagcgtatcgattttaaaaagaaatatcatgcaaaattaaaaacattcttcttctagagaaattcccatttctttttcctgcattttcttccttccttttaaatctaagactaacacagtgcatttacgcacacattgcaccaartgaagctaacttatgcaccctatcccagcccatattttagctttattattgtctttattcttcttcttctaaataagcaacctctacgtctgtgtgataagcttacattttcagagagatatgagtctgttgccaaggagtcagctcagggcccaaagaggaactcctgaattcttcttgttttgactctgagacttctaagagtgagtgtctagggaagaagaagcttggcaaatttaaaaacagaggactgcccggtttttaggcatatgtccctattcttgagacaggaataggaccacctagagaatctttagacatttcagaggaggtagatggaaaccaagaatgagttgctgaaagggaggtgggtgtgcactccaagcaggttt

SEQ ID NO: 890302 - DNA, 575 bp, Homo sapiens
gctgtggtaagtgtggcactggggtattccagaagcccagggccactgtggtgggtgcagcactggggtgggcccaaagcccaggttccatggaggctgatgtaatgctggggcacaccagaagcctgaggtccatctcaggcccactgtgtacctgaagyccagggctgctaaggcctaccagagcctgggactgctgaagtaggcccagtggctgtatgggcctggaatctagtctgttatgcaagcctgaagcctggggctgcatggtcctgcttggcaccagggcaggtctgcaggcttagtctgtgggtactggcttggagtgtggggctattaatgtcttcctggtgctgagttttactgtcacaggcccagtgttggagtccaaggcaaagttctgtgctcactttcctctttttcccccaagtggacagtgtttctctccacactgtgctgaccggggttgggggagagtgaggcaggtaatgtgaaactgtcctttctattctccttaatgtgtattttttagttattattttgctgcaaccaggaactgtgatctttcatctggt

SEQ ID NO: 890303 - DNA, 641 bp, Homo sapiens
ggaaatccgagaggacataaacaaatggaaaaacatttcatgctcatggataggaagaatcaatatcatgaaagtggcaatactgcccaaagtaatttatagattcaatgctatccccatcaagctaccattgactttcttttcacaattagaaaaaactattttacatttcatatggaaccacccccccgcccccgcaaaaaagagcctgtatagccaagaaaatcytaagcaaaaacaacaaagatggaggcatcacgctacctgacttcaaactatactacaaggctacagtaaccaaaacagcatggtactggtacaaaaacagatatatagaccaatggaacagaacaaaggcctcagaaataatgtcacacatctacaacaatctgatctttgacaaacctgacaaaaacaagcaaagtgggaaggattccctatttaataaatggcgttgggaaaactggctagccatatgcagaaaactgaaactggacctcttccttacaccttatacaaaaattaacgcaagatggattaaagacttaaatgtaaagcctaaaaccataaaaaccctagaagaaaacctaggcaataccattcaggtcataggcatgggcaaagacttcatgactaaacac

SEQ ID NO: 890304 - DNA, 371 bp, Homo sapiens
tttatcagaaaatgattcgcaaatttttttccattctgttgtcttttttacttttgtgatgtgtcctttgaagtacttgttttttttttaattttgatgaaatccaacttatctatttttaattggttgtttttatgtttagtgtcatatttaagaaactgttakctaaaccaaggtaaagaaaagtttgtgtctatgttttatgttaagacttctatagttttagctcttcttctctgaggtatttgattgattttgacttaatttttgtgtacagtgtaaagcaggggttcaatttcattcctttgcatgtgactatgcagttgttccagtaccatttgttgaaaagaccccctgttgaatggtcttgg

SEQ ID NO: 890305 - DNA, 564 bp, Homo sapiens
cttttactgggaaacagtattcgagaataaatttggatgctagagatctcattacaattgggtcaaccattgctctaaatcttttcatagagctaaaaattatgggttttttaaaaagagaaaaatacattatgagctcatactgatatttcaaattaaaatttaggattatagactatttatttaaactcattgatcttacaactgtatctcctttcaattatgccaaaaatcttggatctctacaacactaacaaggattcatttttttatactgtattatacacataacaatctcagtataattctcatactcctgccaacacrttactgaaaatagtttatgatttattgctgttcttttttcctcagggtaactgtattagtccattttcacactgttatgaagatactacctgagactggataatttacaaacaaaggaggtttaattgattcacagttctgcatggctcaggaggcctcaggaaacttacagtcatggcagaagaggaagcaggcaccttcttcacatggccacaggagagcaaatgagagggggga

SEQ ID NO: 890306 - DNA, 536 bp, Homo sapiens
taacaggcaatatgatataatgggaatcacattttatagatttccagaagagaaaggtaaaataaacaagcaccggccgggcgtggtggctcatgcctgtaatcacagcactttgggaggccgacgcgggtggatcacgaggtcaggagatcaagaccatcctggctaacatggtgaaaccccgtctctactaaaaatacaaaaaaattagccgggtgtggtggcgggcgcctgtagtcccagctacttgggaggctgaggcaggagaatggtgtgaacccaggaggcrgagcttgcagtgagccgagatcatgccactgcactccagcctgggcaacagagtgagactccatctcaaaaaaaaaaaaaaaaaaaagaagcatcaacgggaaataaaaagggcacttacccatctcgcttaatacaacagatgtgaagagaaaacagcatcatgtgttaaataattatatagcatatcatcctattttccctttaattacacattaaagggagtgaatatttaaatttgatattgt

SEQ ID NO: 890307 - DNA, 628 bp, Homo sapiens
tttgagttattttagcctttttcccctctgactaccaatacctttttcatttgtcaagccaaggaatgtaaaactcccactgagctagtcctaagttttagggctaaaagaccatgaggctgaagttgctgcctgggcagggtaatgctgagggactcaagctttgactcaccttccagctttagtctgatcctcagcttcgcttggcacttttcttaccctakgcccccgggatggggcataagtaggctcactcagcaagctgattgcatggcgcaccatcgacctcacatctgagatcacctttgtcagcatgcagtgtcttcgctccactagtaagatgtattgcttttgacatacttttgtcaaaggtagtcaatctttccaaaaacaaatacaagaaatattaaatgggcagaaagtaatcagcacaatttaggtagcttccaagagtgtcttgttataatgtgacataggaaaccatttgcccttatacttcatgccaaagagctggggctgggagaagaaagcaaggaaaccagcacagaaatgggagtctgaaccctgagctgctccctggctctccactgtctcctgtatagctttgggaaagtaccccttgtgtctg

SEQ ID NO: 890308 - DNA, 499 bp, Homo sapiens
cttcttttttttttttttttttttttttttttttttgagacagagtctcactcttgttacccaagctggagtgcagtggcgcaatctctgctcactgccacctccgcctcccaggttcaagcagttctcctgcctcagcctcctgagtggctgggattacaggcacctgccaccacgcctggctaatttttgtatttttagtagagacagggttttgccatgttggccaggcttgtctcaaactcctgacctcaggtgatccacctgcctcggcctcccaaagtgctgggattacaggcgtgagccaccacacccrgcctcagcccccatttcttaagcctactaaagttttagattatgtaaaatgcttagcacagttaagagactgttcacatatgccaggcaccttatctagtagctggaagcatacgaaattgccaattgccaatagtctatcatttttgacctttaaaaatggcaatttcatatggctcaaccg

SEQ ID NO: 890309 - DNA, 511 bp, Homo sapiens
taacaactacactcagatgaaattttctttttttttctttttttcttttattatactttaagttttagggtacatgtgcacaatgtgcaggtttgttaaatatacatacatgtgccatgttggtgtgctgcacccattaactcstcatttaacattaggtatatctcctaatgctatccctccaccctccccccaccccaaaacaggccccagggtgcgatgttccccttcctgtgtccatgtgttcccattgttcaattcccacctatgagtgagaacatgtggtgtttggtattttgtccttgtgatagtttgctgagaatgatggtttccagcttcatccacgtccctacaaaggatatggaactcatcctttttaatggctgcatagtattccatggtgtatatgtgccacattttcttaatccagtctatcattgttggacatttggattggttccaagtctttgctattgtgaatagtgccacaagaaacatacgtgtgcatgtg

SEQ ID NO: 890310 - DNA, 627 bp, Homo sapiens
actccataaatatatatgtgtatatatatatatttatgtgtgtgtgtatatatatatatatatatacacttactatgtacccacaaatatttttaatgtgaataatatggcctggaacatagtaaccgtttaatacatgataacctttataataatactcattatggccrggcatggtggctcatgcctgtaatcccaacactttgggaggccgaggcgggcggatcatgaggtcagaagatcgagaccatcctggctaacgtggtgaaaccctgtctctactaaaaatacaaaaaaattagccagacgtggtggcgggcgcctgtagtcccagctactcgggaggctgaagccggagaatgacgtgaatccaggaagcagagcttgcagtgagccaagatcacgccactgcactctagcctgggcgagagagcgagactctttctcaaaataataataataataataaataatactcattattttttaatgtttaattatctttatcttaatgtaggcagtagacttggaccagacttgggttccagtattgagtccatcttcaatccctgtttgacagtgggaaagttacttaacctctttgagcctcagtttccttattagaat

SEQ ID NO: 890311 - DNA, 651 bp, Homo sapiens
aatccctcagcatttgcttgtctggaaaggattttatttctccttcgcttatgaagcttagtttggctggatatgaaattctgggttgaaaattattttctttaagaatgttgaatattgaccctcaatctcttctggcttatagagtttctgtgagatgtcggctgttagtctgatgggcttccctttgtatgtgacctggcctttctctctggctgcccttaacaggttttccttcattttaacttcagagaatctggcaattatgtgtcttggggttgatcttctcatggagtatcttaatggtgttgtctgtattttctgaatttacatgttggcctgtcttcctaggttggggaagttttcctagataatatcctgaagtgtgttttctagcttgtttccattctccccatctccttctgctactccratcaatcgtaggtttggcctttttatgaagtcccatatttcttggaggctttgttcattccttttcattcttttttctctattcttgtctgtatatcttatttcagtaaggtggtcttcaaactctgatatcctttcttccacttggtcgattctgctgttgatacttgtgtatgcttcacgaagttctcatgctgtgtttttcagctccatcaggtt

SEQ ID NO: 890312 - DNA, 596 bp, Homo sapiens
gcccctgacggtcctctctggaagctttgacctggtacctggtcagcacgaacacctgaacagctctgagatgaatttcttcagagcactggggggtctcgtgcaagtaactcctatggaactgcctcaaaactattcagagattgacccagacagtcacttccaggaaagagcacagcatttggagctgctattgttgatcactttagacactgaagataaacaaattggggttttccaaggtttgtgtttgattaagaggagtttaaatgctggctgtctggcagccctggatatggccgtccctgacyttccaatataaagtatacacaaaaagacacagaaaatgatagaaaacgatgaaaacttaccatatcatcaaaaactaagaataatagaccaactactgcaaaaagccagaaggaagttacctcataataggaagaatagagctgcaatgagaaaattcaaggcctacccatgccggggctcatgaaacagaggagcccccccaaaatttttaaaagataataataatgagaaaaacaatattaacactgttgttgagtacatgttatgtgccatggtctgtcgta

SEQ ID NO: 890313 - DNA, 636 bp, Homo sapiens
tgtctacagaaaatgtattgtaaatataaaaatgcagaaaagttaaaagaatgggaaaatatatatatataattgtaacattgttcaaaagaaagctggagaggccatataaaatggactttagggcaaggaatattaccagatataaaggcggaaattttataacaataatgatcaattcatcaagaagatatcacatttcttatatgtgtatgcaactaataagagaatgttaagatacatgaaataaaaacctattaatgtaaacaaataaacagggaaattcacaattacagttgaaacagaacattcaccaagaagtataaccaatatctatgttagttatctattgttgcataaaaaattttaccaaaacttaataagtataaacagcaaacattcattatggcacagtttctgtgagtcaagaatctgggagcagcttarctcggtggttctagctatgggtcttttatgatgctacctcagtcaatgtgtcagctggggctacattcatcaaaattgctgactcagaggggttctactttcaaagtaattcacccgccttggggcaggccccagatgctctgatccaggtcagtcacatgagcctctgcacagagctgtctctcaaaa

SEQ ID NO: 890314 - DNA, 621 bp, Homo sapiens
ggtgctcagatgttgggtgcatgtatatttacaattgttataatctctcaataaatttacacttttatttttattgatggtcttctttgtctcctgtgataatttttgacttaaagtctgttttgtctcatataaagtattgccaccacttctacattcttttggttactgtttgcatggaatatctttctttgattacttcactttgtccttaaagctgaagtgagttcttctattcctttgatctgcctttctttgtgattgattatttttatagtaagatgctttccttcctttctctttatttttgtgtatctgctaaaggtttttctttgttattactatgagacttacgtaaaagatcttgtagttataacagtctattttaagctgataacaaygaagtttgatcacaaagaaaaactctacatttttacttcttcccccgacacacattttatgttattgatgtcactatttatgactttcattctgtgtttctattaacaatttattatagctatagttacttttaatacttttgttttttaacttttatacaagagttaaaagttattcgtgtacctccactgtaacataaatattttagatttgactata

SEQ ID NO: 890315 - DNA, 603 bp, Homo sapiens
gagggaatccttcctaaatcattctgtgaagcctgtatcactttaataccaaaaccaggaaagacataactacagaccaatatcttaatgaacatatatacaaaaatccttaacaaaatactagctaactaaatccaacaacgtatcaaaagataatccaccacgatcaagtgggtttcataccagggttgcagrgatggtttaacataaacaagacaataaatgtgatacaccacataaaaagaattaaaagcaaaaattacatgatcatctcaacagatgcagaaaaaacatttgacaaaatccagcaaccctttatgattaaaactcagtaaaattggcatacaagggacatacctcaatttaataaaagccacctgtgacaaacccacaaccaacataatactgaacggggaaaagctgaaggcattccctctgagaactggaacaagacaaagatgcccactctcaccacttctcttcaacatagtactggaagtcctagccagagcaatcagacaagagaaagaaatcaagggcatccaaattagcaaagatgaagtcaaactgtcactgtttgttgatgatatgattatataccta

SEQ ID NO: 890316 - DNA, 554 bp, Homo sapiens
tataaaactaccagcagcatacacacaggttgtaatttttatggaagctttttttccacttatacagtgcttaaaatcaattttattgattatttctccaaacaagtgtgtcaaatcagtactatggatagcatatgggagaacttcacatggtctaagacaaaacttgtctaagccagttgagagatagaaaacactacagaaagcttacaaaattgcttgtctgttctggggtaatatgaaatttgtgcatgtccaaaaatgagctcattatattcccctttaaactgaatctattcmaaaaaaaaaaaaaaaaaaaacactcaggccaaaaatctttgagccatctttgtctccaattttgctttcacagtttgtatccaattcattatgaaatctgttgtctctactttgaaaacatatcctgaatctgaccatgcctccctacttattgtatatattgatttatggattatacctgttgcttattttctgtcttctcacccagcccatccctgcccctgccaatgtaatctccatatgtgtaggactaa

SEQ ID NO: 890317 - DNA, 596 bp, Homo sapiens
tgcaataagattatttttcttctacctctaagaatcaattagagtcctataatggacaaaataaactaagaacaaagaggaatcattacttgaccttgggcaaattattcatttctcaataataatatctgtgtttcttaatctgtaacattagaagtggctaaatttgatgactgttcttcttcttccagctgagtgattctatgaagtagttgtgcacaacatcactaaaccaccaaatgaaattatttctaaataaatttcaaaaaaawtgttttttttttttttttcaagacagagttctgttcttgttacccaggctgaagtgcagtggcccagaatcttggctcatctcaacctctgcgtccccaggttcaagcaattctgcctcaacctccctagtagctggtattacaggagtccaccaccacacctggctaatttttatatttttagtagagttggggtttcaccatgttggccaggctggtcttgaactcctgacctcaggtgatccatccacctcggcctcccaaagtgctgggattacaggcatgagccatcatgcctggccaaaaattgtcttcttatttgta

SEQ ID NO: 890318 - DNA, 596 bp, Homo sapiens
tgcaataagattatttttcttctacctctaagaatcaattagagtcctataatggacaaaataaactaagaacaaagaggaatcattacttgaccttgggcaaattattcatttctcaataataatatctgtgtttcttaatctgtaacattagaagtggctaaatttgatgactgttcttcttcttccagctgagtgattctatgaagtagttgtgcacaacatcactaaaccaccaaatgaaattatttctaaataaatttcaaaaaaaatkttttttttttttttttcaagacagagttctgttcttgttacccaggctgaagtgcagtggcccagaatcttggctcatctcaacctctgcgtccccaggttcaagcaattctgcctcaacctccctagtagctggtattacaggagtccaccaccacacctggctaatttttatatttttagtagagttggggtttcaccatgttggccaggctggtcttgaactcctgacctcaggtgatccatccacctcggcctcccaaagtgctgggattacaggcatgagccatcatgcctggccaaaaattgtcttcttatttgta

SEQ ID NO: 890319 - DNA, 593 bp, Homo sapiens
caactctctagcattcagtaagcattttaattaattttaacatttttattattttgtttttatgttaaatttcttcattgacttttaaaattacatctgtctacctttgtgatttaagtaaatatacaacatttccttttcttggtatcttaaacttcctctttgactacttttaaaattctacttgatgcatttaactttttttaaatgtcatttataaattaacttggaaaaaagactgaagtaggcgtgatttataatttgaccttccttactaataaatgtgttcactttatattttcttcaacacttgggaaataaagcagtatctcctctaagttaaatttytaccagaactagaagatttatttgatgactaataaataaaatacattatattattatattatgtaacatatcataatttcttatttatattaattataaaatatttatacgtgagtatataatatagagccaggcacagtagtggatacctatagtcctggctacgtggggaggctgaggtgggaggcttgtttgagtccaggaatttgaggctatagtgtgcaatgattgcacctatgaagagc

SEQ ID NO: 890320 - DNA, 633 bp, Homo sapiens
aaaatgcaacatacaaagtgactaaaaagaaaaaagagctagcatatttgtgaagaaatctaatatgtattagactctccataaaataaaagacattgaaacttcttattgtgtaaatgtcaaggttctgaggtaaacattaatttttctgtgagtcttacaggttagaaaattaatatacttttcattttctcatatcaactaaacatcaaagttgaatttggattcaaactgccatttagcaactggttgagaaaaaatgatttttttcgaagttaaaaatgaargaagattctttgtagagctaactgaatggaaatggcaccataaatttgattccagctctcttgaaaagaaattccacatttatgtgcttctgtaattagttccaatcagcacactataaatatgtaaggattttacccatctattacttgcatctttggtttaaagctcttcagttgaaatggcaaacacaaattctgagcaggtaatacatcaatgtggatttgtctaagacttaaaagctacagacaattcttcctttgttcttgagttttagtcttatttatccttctattgaatacagtaatcatttctgtctaaaataagagatagtaaaagagatgatat

SEQ ID NO: 890321 - DNA, 627 bp, Homo sapiens
aaactaggtagcaagtgtgagtggcaagtatccaaaaagagaaagcgattcacccaaatgcttttaactgtgaggggggaagacagttagccagttacaatactgtaacagtcacatggcataacttttggtcaaagatgaagcaaggcctaaatatcctctatatcctaaattctgctgcagttgccatggtgacagtgtcctgcattgggcctatgaaagatgacagtgagatgaagagtccgtgtttttatttcttggaaaataatgaarggtgctgcacaaggggagcctgcctccagtcctgccataggcagaaatcacgtcaagatgtctgggattttgaaaagggaaagttactctcttcctgaaaaataaaccaggtacagattcaagttttcattcagggagaacgaagagagatttcataacgattagaaagctagatatttctggaagtgttacatataagcctcagctacatgatctaaccagcccccgttacatgcctcatcttgagaaggcactcaatacacatgtgccttccctgtctccctctgtgcacttttttttacccctggatctcagcaagaatgtgggaagtagcacaagaaggtgagcccatag

SEQ ID NO: 890322 - DNA, 609 bp, Homo sapiens
agactcccaggagtctcagatggtcagccggagcggaccagataaaagcatctagatgctgaggaaaccgaggcaggaagggctcatgccatgactgcagggctgggtctggaacgtgactccagagccctgagctcygcccatgtcttccaccctggaagctgctaatccactcggtttggggtctgacaggccaaggaggcagcaactcacatcctgcccaccttcctccccgcagctcgccagggctgggaggcgactttcctgcagcgctcatggctgcccgtgcccccagggttgctcacctgggcttcctggatctccagcctctgcccaccccgcagagcctgggtccgctgtgccaggaccaggggctgcccatccttgtaccaggtcacagttggctcagggagcgcatctgtctcgcagctcaggacagctttgtccccgaccctcaccaggaccgcatcctggggacctctgggagcctgcctgaaggccgggggaactgggggcaggagatagcagagtgaggtgctgcagctgtccctgcgccctccccactcagccacagggaaaatgccagtggaaacccaccagggtcacaca

SEQ ID NO: 890323 - DNA, 650 bp, Homo sapiens
caccaagtttccaattctggacactcagaaaataattgccttggtgtgtcagttgggaatatgttcagcggcaagtaacaggaaacctaatttgcagcagctttaacaactggcagcttactttcccttagtccaagaagtctgagtcgagtgatttttgacattgattcagtagctgaacaaggagagrgactcagaatctatgtgattctcctggtctttcctgctaagcatagatggacgctggtgttaggcaaccatctgcatctgagacaaggagaagggagaaaggcattccagtagcaccaacagtccttttttagcagatacaaaagaactttatcataatcaatacctcagctgacttcaaccatgtctcattgtctaaaactgtattatctggccatatcttgctacatgtggagactgagtaagagagttttaaaaatctatagtcttcaaagtttaaagtaatgatttaggagataaaaagaaattatttaggcagatagtgaaggtaagagagtcctcagtaaggttttccttttaacgagaagcagcccccaaatcattacttttctaacaaacagcagcctgaaaattcgagcggcagacagagaaaagcaagctggaagcttgcacgcataatg

SEQ ID NO: 890324 - DNA, 650 bp, Homo sapiens
caccaagtttccaattctggacactcagaaaataattgccttggtgtgtcagttgggaatatgttcagcggcaagtaacaggaaacctaatttgcagcagctttaacaactggcagcttactttcccttagtccaagaagtctgagtcgagtgatttttgacattgattcagtagctgaacaaggagagagactcagaatctatgtgattctcctggtctttcctgctaagcatagatggacgctggkgttaggcaaccatctgcatctgagacaaggagaagggagaaaggcattccagtagcaccaacagtccttttttagcagatacaaaagaactttatcataatcaatacctcagctgacttcaaccatgtctcattgtctaaaactgtattatctggccatatcttgctacatgtggagactgagtaagagagttttaaaaatctatagtcttcaaagtttaaagtaatgatttaggagataaaaagaaattatttaggcagatagtgaaggtaagagagtcctcagtaaggttttccttttaacgagaagcagcccccaaatcattacttttctaacaaacagcagcctgaaaattcgagcggcagacagagaaaagcaagctggaagcttgcacgcataatg

SEQ ID NO: 890325 - DNA, 675 bp, Homo sapiens
tatccaggttcctacctttaagaagggaacttggttccatctctggcttatacatggttggtatttattaggcaccaaaacttcagcttctaggatacatttggtcctcttacttctgtgcacagctaagttccactttctgatcattattttagatttgagtttccatttcatgtagcattgagcatttctttttatttatttattttttgctttagtgctcagatacgttgttttaaataattgttttgcattcattttttacatatttagaatgaagtcagatttttctcatctacttaacctcctcattgagaaaaagtgttttggctttgcactccaggttgggctatctgatgttaagatctagcctatattgaatgccacatgttccgtcaggtcatgaagaatagtaaataaagtaactaacatttcttatgctattattgagaattctgagtctaaagttccacctctgtgtcctttcatagatggtgyggcatgggggattgcagagtgcagattggagtgtggattcaggagcaaaactgcattatttcaaatcctagctctgatattaaccacatgaccttgggcaaattacatagcctcttcttttctcatctgtgtaatggggtcaaaatatttacctatttcatgtgcttttgtgtaaaa

SEQ ID NO: 890326 - DNA, 582 bp, Homo sapiens
actgcaccccagcctgggcaacagagcgagactccctctcaaaaaagcaataataataaatgcaagtttgtatatgtgtatattgatgtatgtataattataggtataaatgcctagaaaaatatttggaataagatataccaaaccattaatggtgcttatcactgcagggtggtacatgggtagattttttttatttctgcttatctgcattataactttttaaaataatgaccatgtgtgacatgtgtaataaaaataataataaaacatacgctgggtgcagtggctcatgcctgtaatcccagcactttgggaggccaaggcggatagatcacgaggtmaggagtttgagaccagcctgaccaacatgatgaaatcccgtctctactaaaaatacaaaaattagctgggcacctgtaatcccagttactcaggaggctgaggcagaagaattgcttgaacccaggaggtagaggttgcagtgagctgagacccaaccaccgcactccagcctgggctacagagtgagactccgtctcaaaaaaaaaaaaaaacatgaaaatgtgtggtcgagagcaa

SEQ ID NO: 890327 - DNA, 507 bp, Homo sapiens
atactggcaaaccaaatccagcagcacatcaaaaagcttatccaccacgatcaagttggctttatcctcaggatgcaaggctggttcaacatctgcaaatcaataaacataattcatcacataaacagaactaaagatgaaaaaacatgattaaatagacacagaaaagcctttgataaaattcaacatcccttcatgttaaaaactctcaataaactaggtaaagmaggaacatacctcaaaataaaagccatttatgacaaacccacagccaatatcatactgaatggacaaaagctggaagcattcccatcgaaaactggcacaagaaaaggatgccctctctcatcactcctattcaacacagtactggaagttcgggccagggcaatcaggcaagagaaagaaataaagtgtattcagacaggaagagaggaagtcaaattttctttgtttgtgaatggcatgatcctatatctagaaaaccccatcgtctcagaccaaaag

SEQ ID NO: 890328 - DNA, 603 bp, Homo sapiens
gagagagagttgaacaagagcaaagcgtagaaagcttattcaaaaaaaaaaaaaagaactaaaaaactttctaaacttaagaaagatataaatatccacatgcaggaaggtcagagaacaccaaacaggtttgacccaaataagactaccctaaggcacatgctaatcaaactcttaaaagtcaaggacaaagagaggaccctaaaagcagtaagagaaaagaagcaaataacatacaaaagaagctccaatttgtctgacaacagacttctgagtggaaaccactcaggtcatgggggaggaggacaacatgttcaaagtgctgaaaaaaaaacaaaccctgccacccaagaatatggcatccagcaaagctaccctttgaataggaaaaagagataaagtctttytcagataaacaaaagctgagagaattaccaccaccagacccatcttacaagaaatgctaagagaagttagttaatctgaaaaaaaaaaacaccaaaaaacaaaaaaaaaacactaacatgcaaaaaaaattttttttgaaggtataaaacccactggtaaaattaaatacacagataaccccagaatactctaata

SEQ ID NO: 890329 - DNA, 693 bp, Homo sapiens
gtaggagtctaagtctttttgtaggtctctaagaacttgctttatgaatctggttgctcctgtattgggtgcatatatatttaggacagttagctcttcttgttgcattgatcactctaccattatgtaatgcccttcttgggcttttttttttatctctgttggtttaaagtctgttttatcaggcttttttttgctttccattcacttggtaaatattgctccatccctttatcttgagcctatgtgtgtctttgcatatgagatgggtctcctgaatacagcacacagaggaatcttgactgtttatccaatttgccagtctttgtcttttaattggggcatttagcccctttacatttcagattaatactgttatgtatcaatttgatcctgtcatcatgatgctagctggttattttgcccattagttgatgtagtttcttcatggtgttgatggtctttacaatttsgtatgtttttgcagtggctggtaccagttgttcctttccatgtttagttcatccttcaggagctcttgtaaggcagtcctggtggtgacaaaatctctcagcatttgcttgtctgttaaagattttatttcttctttgcttatgaagattagtttggctgggttgaaaatctgggttgaaaattcttttctttaagaatgttgaatattgcccccactct

SEQ ID NO: 890330 - DNA, 606 bp, Homo sapiens
tcactgtctcttgcctttaaattttcttattattcattgagtttggtgtataggttaagttgcttttacttgtaaacagtagaataaccaactaacaatggtgtaaacaacaggatatttattgattatttaacaagaagtccagaagttggaagtcctaaggctggtttggtgactcaaataggaactcaaggttctttgcatccctccattgtcattgtctgtcttctagcaatgtcttgtctcttacgcaaaagatggctgtgtagctctaagaaggcaggaggctgaggcaaaatggcccttctgctcctttaatcagggaaaacacttttttttttttttttttttcagaaatctycataaatcacattggctagaaatgggtcttacacccacccctacaccagggaaaagtgctaattgtgattcatcccttggtggtgagcacaatgccccctgacataatcagtcttagagaagcaaaaaagaaagggcgatggctgtgggatatgtgactgacaggggctgcacgactcgtctgtcacctatggctgctcttcaagactgtgtctatttttctctacaactgaaagtctctgaggt

SEQ ID NO: 890331 - DNA, 596 bp, Homo sapiens
aaagaaatggattctcccctagagcttctaggaggattgcagcctggcccatgccttgattttagccaatacaatctatatcagacctctgacctccagaattttaagataatatatttgtcttgttttaagtcactaagtttgtcctaatatttttacagtarccattagtaactaatacgccaccattctctcttgcctagagaacttcagctaactccagactggtctctctcttcccactctgcccaccccaacctacgaaatctattctccatacagcagccagaggaatcatttaaaattgaaacttgctaatgtcccttttgtgctgaagatcctcaacagcctcctgtcacacttaggataaaaggcagaccccttatcatggcctcattttcccacctaaggcttgaaggttaataaacttgcccagtcactcctgggaggttagggggagagctgagcctagaactctaagatctggactaagttcctctatttggggatatgtaagcactttctttgatctggactaggttcctacgagcaaggaagttatgagattttccccaaaaatgtcagcacaattgcca

SEQ ID NO: 890332 - DNA, 557 bp, Homo sapiens
ttttaaggggcttttccctctttgctcaactctccttcttcctgctgccatgtgaagaaggatgtgtttgtttccccttccaccatgattgtaagttttctgaggcctccccagccatactgaactttgagtcaattaaacctctttcctctataaattacccactctyaggtatgtcttcattagcagcatgagaaaggactaacacagtaaactggtatcacagagagtggggtactgctacaaggatacccaaaattgtgaaagtgactttggaactgggtaacaggcagagtttggaacagtttagagggttcagaagaatacataaaaatgtgggaatatttggaacttcccagaggcttggaaggctgagaagacagcaaggtgtgggaaagtttggaacttcctagagattgttgaatggttttgaccaaaatgctgatagtgatatagacaatgaattccaggctgagatggtctcagatggagagggacttcttggaaactggagcaaaggtgattctgttatgcttttgcaaagggactagtggcag

SEQ ID NO: 890333 - DNA, 700 bp, Homo sapiens
gacatggttttttgtcccaccacttgcaatggcagattctaccttctaatgggttagtctacctgttaagatactgacttctgatacaacatggatgaacctcataaacatatcctatgttgtattaactagggttctccagaaaaacgacaaaaaatagaatatatacgaacagataattgagagaggatttattaggtgaagtggctcacatgattttggaggcagagaagtcccatgatgtgccatttgcaagctgaagaaccaaagaagatggtagggtggytgagtccacttttcaagtcaaccaggggagctgatggtgtgattctcagtttgagaccaaaagctggtggggaagggtagtggctagtgcgagtcccagagtcaaaaggccagagaacctgaagttctaatgtccatgtgatatagtttggccatgtccccacccaaatctcatcttgagttgtaactcccataattcccacatgtcatgggaggaacccagtgggaggtaattgaatcatgaaggcaggtgtttcccgtgctgttctcgtgatagtgaataagtctcacgagatctgatggttttaaaaatgggagtttccctgtatagtctctctctctctctttgcctgcctccatccatgtaagatgtgacttgctcctccttgccttctgccatgattgtgagccctac

SEQ ID NO: 890334 - DNA, 700 bp, Homo sapiens
gacatggttttttgtcccaccacttgcaatggcagattctaccttctaatgggttagtctacctgttaagatactgacttctgatacaacatggatgaacctcataaacatatcctatgttgtattaactagggttctccagaaaaacgacaaaaaatagaatatatacgaacagataattgagagaggatttattaggtgaagtggctcacatgattttggaggcagagaagtcccatgatgtgccatttgcaagctgaagaaccaaagaagatggtagggtggckgagtccacttttcaagtcaaccaggggagctgatggtgtgattctcagtttgagaccaaaagctggtggggaagggtagtggctagtgcgagtcccagagtcaaaaggccagagaacctgaagttctaatgtccatgtgatatagtttggccatgtccccacccaaatctcatcttgagttgtaactcccataattcccacatgtcatgggaggaacccagtgggaggtaattgaatcatgaaggcaggtgtttcccgtgctgttctcgtgatagtgaataagtctcacgagatctgatggttttaaaaatgggagtttccctgtatagtctctctctctctctttgcctgcctccatccatgtaagatgtgacttgctcctccttgccttctgccatgattgtgagccctac

SEQ ID NO: 890335 - DNA, 606 bp, Homo sapiens
gtaaaagaggcccatcattaactgaaatgtcattatgcagtgcatgactgtgtgtgtgtatttgtgtgtatttgaagacatatcttatacaaaacaatggattgggaaaaatatatgcagtcagaatgccatcagaagacatgtaagtgatattcctaatgtacaaatgactactaaaagaagttgtaaataaagaaaagaaaatgggccacaaacattgtattttcactagtgaatcaaggaaatgaaaaatataagaaaattagatggaatatttcacacaccagataagcaaaaatttaaagaagaaaacactgtccaacattagtgaagtargccctctacttagctgctgggagtgtgacttgctcaaacctttttagaaattaaactggaaatggctattacaatttaaaacatcatacacttttatttagcaatcccaattgaggaattaccagtacataaacacatgtctattaaagggtttattacttataaagtaaaagctctgtaataaacaggtgatttttcaggtggcaaaaacctgaaaacaagttgaatgttcattacagagggaatagttgaataaattatgatatggta

SEQ ID NO: 890336 - DNA, 611 bp, Homo sapiens
acctgacagactgaaaagtaagatatatttattaatattattaaatgtttcaggaaaggtcgttttgcatgagtgtttaaaagcttgggttctcttttcagactatctgaatttgaattcagggaccagaacaaatagttttggtagattaattacagtgaatatagatgagatcatgtctctctctctcccctcattttcccttcattattcccacttctccctgtttctttataaggaacactatgaagaaacactctaccgtgygtcacagtggagttggtgcggcattccagtaaacataaggccacccaacttctaattacagctctgcatcccaatccattgcataattctgcttcagtacaataagggggttgggctaggccactaaatatttgttttctttcagactacatgggcataaatttaacatggtttttctttgttcattcggaacctgtgctacccactcagctacctacttaaacaggctctggaaatattactcacctgcatccccacagaatcctcacatttttgtctgggaatgaatggcaaagaaaacacattatttttgtaatttgtgggcgaacccggctcttctagtt

SEQ ID NO: 890337 - DNA, 680 bp, Homo sapiens
aacaaataatgttagaacaactattcatatgcaagaaattgaatattgatccacatcttgcataatgtacaaaaattaactcaaaatgtatcatagaactaaatgtaaaacacaatgacattaatcttccagaagaaagctaatagaaaatctttctaattttgggtttggcaaatacttcctagatacaatattaaaagcatgaaccatacaagaaaatatttacgaattagactatcaaaattgaggacttctgattttgaaagacattgctaaaagaatgaaacaaaaaagccagagactgagataagtgtttatagattacatatctgataaaagacttgtaaccagggcatatgaagaactctcacaactaaaatttaaaaaaataaaataaaagggcstattgtctaacgtccactttctaggcaactgaactccataagtttataaatttctggtatggtaataattagcaatctaggcaaaatgggaatattatgctaaaagccccatggatcagaaatttagctatttttcagatagtaaatgccattagaacatatacaaggctgtctgtccaaggcaaaattgacttaagacctgatttctcaatctttttgtcattactacccatctacagaaactttttatacattttttctaaacgtaacccatga

SEQ ID NO: 890338 - DNA, 595 bp, Homo sapiens
tgtcaaaccatcatgatggggctggtcacaaatgtgtgcagaccattgcttatctgtggtaaacccaagtaatttcttctattcagcagaatctagaattattggtgcggtcccctagtcatttattctggggatctacrtaaccaagtttcattagtcttctgcagaacttctccatgaagtagcctagctctttatttaatagacagcctaccctgtggatgtccctgacatctggccatggcccttgactcccactgtagtcttttttggtgatcaatgataataagcaaattactttgtagatgaatataatatctaaccaggtagccatagtaacatgaaaatgcttttcgggtaactagggaaaaaatggtttaatttctttctgttccacatttctagttaaccctttagagatttcattttcatcagtgatgccagtagtagcttagagttctctctctaatccacttagctaatttccctagggctatttccaccaatgccagttggtaagacttgtcccaagaatcttctacaaggctcttggcccttcttctcaaggatttgttgggagccatcttgaccccaa

SEQ ID NO: 890339 - DNA, 664 bp, Homo sapiens
tagcttggaggggaaaaaaatatatacgtgtgtgtgtgtgtatatatatatatatattttttttttttttcagcagcttgcaagtgttatcagccagttaggcggggaaatgtgatccagtcccttctactctgaggtatcttaggtcagctctctgtgtaacagctaatttggggttcctcaatcattgctgtttgagctcaggagaatgttctgaaatgagcaccaggagagagatctgatcacatcccaaaggattatcagtgcacatgttctacagttagaaacatttaaagaaaaaaagcagctcggcatgcgggctctcgcttgtaatcccagaattttggaagactgaggcaggaggactgcttaagcccaggagttggrgaccagcctgggcaacaaagagagacctcatctccacagaaagttaaaaaaaaaacaaacaaacaaaaaaaaaaaaccagcctgagttacagagtgaaaccatgtctcaaaaaaatttttttaaagaaaattgtaaataataataaacactgactcatctaatcactgaatacttatgaaagcattatttttaatattttagataaggtattataagaattagggatacatatctgcttccaagcagcttccaatccaagaagtaatttaacacaga

SEQ ID NO: 890340 - DNA, 613 bp, Homo sapiens
ttaataatagccatcctgactggtgtgagatgttatctcattgtgattttatttgcatttccctgatgattagtaatgatgagcattttttcatatttgttggctacttgtacatcttcttttgagaagtgtctgtacatgtcttttgcccacttcttaatggggttattttgttttttgcttgctgaattaagttccttatagattctggatattaaacctttgtcagaggcattgtttgtgaatattttctcctatcctgtaggttgtttatttagtctattgatagtttcttttgctgtgcagaagctttttagttygattaagtcccatttatcaatttttgtttttgttgcaattgcttttgagaacttagtcacaaattctttctcaaggccaatgtccagaatgatgtttcctaggttttcttctaggattcttatagtttgaggtcttacatttaaatcgataattcatcttgagttaagttttgtatatggcaaatggggtccagtttcatttttccacatatggctagacaactaccacagcaccatttattgaatagggagtcctttccccattgcttagttttgttggctttcttgaagat

SEQ ID NO: 890341 - DNA, 554 bp, Homo sapiens
ttataaagctaccatattcaaaataatgtggaattggcatcaggatacctcagtggaacctatcaaatcaatggagcagaatagagtacagaaatggacctacacatttataggccattgattttttaggattcatttttacaaataggcagtcaagtcagtggaaaagatagtctttcaaaaagtgatgccagaacaattaggtatgcatatgtgaaatttgatccttatctcataccaaacacatacaaaaataacttaaaatgaattataaatgttaatgtaaaacctaaaactataaaacttttagaagaaagcatagacaaaatctttgagactttggattaggtagaaatattttaratatcaggctgggcacagtggctcacgcctgtaatctcagcactttgggaggctgaggtgggcaaatcacctgaggtcgggagtttgagaccagcctgaccaacatggagaaactccgtctctgctaaaaatacaaaattagccggacgtggtggcacatccctgtaatcccagctactcgggaagctgaa

SEQ ID NO: 890342 - DNA, 618 bp, Homo sapiens
aaaaccaatctgatgtttgcataggggtataattttgtaacttcacttcagcctctgattggtcaccttctgcaaccacttagactggttgctggccactacttcatttacatagggtgtaaccaagtaaccaatgagaaacctctagtggatatttaaaccccagaaaattctgtaaccagtgcttttgagccacttgctcaagcctgctccyactctgtggagtgtactttcatttcaataaatctgtgcttttgttgcttcattatttagttgctttgcttgtccgttttgtccaattctttatttaaaatgccaagaacctggaaaactcataatcaagattctccactggtaacagaaccacaatgagataccacttcacacaaactaggttgaaaataataataataataataataataataataataaaaaaacaagaaaataacaagtggtagtgaggatgtgaagaaattagagcctttgtacattgctggtgaggatgtaaaaataacaatgtaaaaccgaatctactttgggaaactgtttggaagttcctcaaaaggttaaacatataattagcatatgatcctgcaatttcatctttgggtatat

SEQ ID NO: 890343 - DNA, 595 bp, Homo sapiens
ggaaggctgttatctgttctttgacaaactcttatctatcctccagaactccctgggaagctttggacttagatgtctccatcgcaggcacaccccagcgaatatcttatcaccatgagctgcgcttgctgatctcatttattcttcatgaaatatttgtggattttctttttgtggccaggcacaggatagacttagaacagcatccactttgtgaaacaagtaggacaggaatgcagatgagtaaggggcaagacaagaaagcacagtgagatgtgagatgtgtcctgctagcatgggtggcgggtggcacacagcaaactttggggagtcaggaaaggcttccaagaaaaaaagtgtctgggagttactcatcaacggcataaagtttcaatcaaccaagatgagtaagcttcagacagyggctgtacaccattgcatctgcagtcagcaataacacaccgacacctaaacattggttaagacggtggatctcatgttaagtgtactaaccataatagaattaaatatgagaaagaaacaatgtctaaactgagacctgtgagttaagaaggacttaaccaggtgaaaatgg

SEQ ID NO: 890344 - DNA, 602 bp, Homo sapiens
gggatatgagatatttcaaaagtaaaagtgtatttaaaatgaagttcatgcactatggtttgaggaggatagataaagaccatctgttgagatagggtccaaagcagttttgccactgaaatcatagatgcagttgcactcagatgccctgcttctggtgaacatttctggtgggaaagaattcttggctgaaagctgccaagtttgcctaacatacttagcattaggaaggatcaggcagagctcactagaagcgaagatgcaggccagacaaagtggctcacgcctgtaattccagcattttgggaggccgaggtgggtggatcacctgaggtcaggaattcgggaccagcctggccaatatggcaaaacaccatctctattaaaaatacaaaaattagtcaggcatggtggtgtgtgcctgtaaactcagctactagggaggctgaggcacgagaatcgcttraacccgggaggcggaggttgcagtgagctgagatcgcaccgctgcccgctctccagcctgggtgacagagtgagactccctctcaaaaaaaaaaaaaaaaaaaaaaaaggaaaagaaaagaagaagaagaagatac

SEQ ID NO: 890345 - DNA, 634 bp, Homo sapiens
gaaaatgggattttcttttctatcacattgtcaggctgcaaatattccacacttttatgttctgcttcccttataaaactcagccaggcacagtggctcacgcctgtaattccagcattgggaggctgaggagggtggatcacctgaagtcaggagtttgagaccagtctgaccaacatggagaaaccctatctctaccaaaaatacaaaattaatcaggcatggtggtgcacgcctgtaatcccagctactcgggaggctgaggcaggaggatcacttgaacctgggaggcagaggttgtggtgagccgagatcatgtcattgcactccagcctgagcaacaagagtgaaattccatctcagaaaaaaaaaaactgkatgcctttaacagcacccaagtcacctcttcaatgctttgctgcttataaatttcttctgccagataccctaaatatttctctcaagttcaaagttctacaaatctctagggcaggggcaaaatgtcaccagtctctttgctaacacataacaagagtcaccttctctcgagttcccaacaagtccctcatctccatctgagaccacctcagcctagatttcattgtccatatcattatcagcattttggtcaaag

SEQ ID NO: 890346 - DNA, 668 bp, Homo sapiens
tcaatgccatccccatcaagctaccaatgactttcttcacagaattggaaaaaactactttaaagttcatatggaaccaaaaaagagcctgcattgccaagtcaatcctaagccaaaagaacaaagctggaggcaacacgctacctgacttcaaactatactaccaggctacagtaaccaaaacagcgtagtactggtaccaaaacagagatatagaccaatggaacagaacagagccctcagaaataatgctgcatatctacaactatctgatctttgacaaacctgacaaaaagaagaaatggggaaaggattccctatttaataaatggtgctgggaaaactagctagccatatgtagaaagctgaaactggatcccttccttacaccttataaaaaattaattcaagatggattaaagacttacatgttagatattaaaaccataaaaaccctagaagaaaacgtaggcaataccattcaggacataggcatgggcaaggacttcatgtctraaacgccaaaagcaatggtaacaaaagccaaaattgacaaatgggatctaattaaactaaagagcttctgtacagcaaaagaaaccaccatcagaatgaacaggcaacctacagaaagggagaaaatttttgcaacctactcatctgacaaa

SEQ ID NO: 890347 - DNA, 443 bp, Homo sapiens
acacttttgttagtgattttgattatttgtgaatattgcctcataatatgttagtgtggtagctaaaaggtacacaaactgggctttgcttttttttttattattatactttaagttttagggtacatgtgcacaacgtrcaggttagttacatatgtatacatgtgccatgctggtgtgctgcacccattaactcatcatttaacattaggtatatctcctaatgctatcccttccccctacctccaccccacaacaggccctggtgtgtgatgctccccttcctgtgtccacgtgttctcattgttcaattcccacctatgagtgagaacatgcagtgtttggttttttgtccttgcgatagtttgctgagaatgatggtttcctgagctggttctttcctcaaaaccaagttttcccaaattactgtactttcctttcca

SEQ ID NO: 890348 - DNA, 609 bp, Homo sapiens
attcaaccccttatccttcaccttagaaggaatatattgacaggccccacaccacaggagccctagaaattttactcaggtagaaggcccctgaattttggtcagatttatttcccatcctctaggatgcaaatgtctcaccaataagtccagtatgtttggtacttcttgctcactggatccaatcagcatcatgtcatcagtgtaatggatcagtgtaataccttatggaagtgaaaagagatcaagatctctctgaacaagattatgacacaaagctggagagttgatatatccctgaggcargacagcaaaggtatgttgctgacattgtcagttgaaggcaaattgcttctggtaggccttatggacaggaatggagaaaaagacatttgccaagtcaatggctgcataccaggtaccagatgtgttaatttgctcaagcaatgaaacctcatctggtacagcagctgcatttggagtcatcacttggttaatcttatgattacccactgtcactcaccaagatccttctgtcttctgcacaggccaaatgggagagttgaagggggatgtgatgggaatcaccacccctgcatctttccagtc

SEQ ID NO: 890349 - DNA, 592 bp, Homo sapiens
atgaaaaatttggtagaattgacccaaaacttctactcacttttctcttgggacgggataaagggggaaataagaggaagggcagagtgctgttgagttcagcacttcggtctatcagctttttcagtgaccacagattgaacttctaatgcagccaactctcccaaaatacttgtttttggtcacaaagggaaacaaaatgagggtgtatgagtcactctacattctttaaagttacttgcaaaacaatcttcttaagaggggagcggtagtgtcatctttatcttgaaagaccgtatcttcaataattgaataatatgagcaaactaccataagagatgatgcagacatttaattttaattatgggttctrgctatatcctttgctaggactaaccacagcaaaatagcagaaattctagagtttactagatacctcctaagaaatccaactgtcaaagaacagccttctgcacccagaacacagctgctagctatcaccttgaagcagttgtttctgtggtggaattagttgaaagaagatagtgctttgagactagggccagaaactttccccttgaaaaagatgtgc

SEQ ID NO: 890350 - DNA, 504 bp, Homo sapiens
agagtcctgatttcactggagtcctggatgctcttgagaactaatcacataattgccctcagattctgtgatatgccccattgattaaccagaaattattcattgggatacaaagaacagaaaactcaaacaacagcagcttcattttttgtttgtttktttgctttttctttttttcaaattccgtgatgtccagagctgaagtaaggatgccatctaggacctaagttacctccatcttccctgttctaccacacttagcatagaagagcatttgtcataataaagagaatgttgcacctcttaggtttggtgagaccctgaaaggcaatatatctgattttcaggcagaacagaataaagaatagctaaagggcaaagtgtaaaacccttctctttttgaaattttatttgagagaatgggtcttcccagggactcccaccagagcacatggtcactcctagcttaccagaggctgaaatttctaattttctggttttcta

SEQ ID NO: 890351 - DNA, 642 bp, Homo sapiens
gggctggtcagttgcatattaatgaatttatggtttctattctcatctattagtgaagataactataagtggaatttataaaatgaacataaaaagaaatgaatgaattagtaaaagtcttatttcttcttatttattagagaattggatagtgtctaaaatgtgtattcagcaacattgggacttctatttatttattcaccatgtattaattactattagtggaattggaatttaaaaattaataacatatggtctctgatttctgcatatcaagagaaataaaatcttatgtcttctagaagacatgggtccttttctctgatatcggaggtagtcagagtggtggcagcaacagaaataaattattttggaactgaacaaaaaataacaagagcaaaggtgatgaaaagaccttcccaggtgatggaatacagccttcctctactccgggagaaacttttgmtgagaaacaagcaactgcagcagccaagagctgctaggtagaaatttcagtgcagacccagaacatctatttgggagtgtcatctgcatgggagacattaaaagcaggggaataaggacaagcagggccagaaagatgctaaatttaccataaatgtggaatccaggtattaggaa

SEQ ID NO: 890352 - DNA, 685 bp, Homo sapiens
gggctaagtcaagaaagtagtgttgtagctccacaaatatgaccttcgatactatgttcacatgtaaggggcaggttagaaagaagtgaaagaaagatagcaattcagaagaattttgatttacataaagaatattgacaatgtatattaaagaaaaaagcctatgggtcagtttaatccatttctgcaatagtcctcttctgagcataaccctgccaacaaaattttatgaccattagtctatttcatttaaaaatattgaattttatttaaaagtataaatttctgaatattcacaatacatagtcactaatgaatggggttgcccctcccatcccatgccttactgatatttgtaagttacggtcaacccaattaagatgatctattctaattcatctttttttttttaatcagccaggcctggatgcacttcacwagctaaaggtgaaaattcagcccctatccccctagcactccatagtttaactttattcaacttttattaccaccaaggtcatctttacaagaagaatcaaactacttccagaaagcacaccagatacatttccataacattattccactagcagaatttccagatgaagctgtcaagtacggctttcctttagtctcaccagaaaagatcaccagtgtgatttcatgggatgctgtggtagctcta

SEQ ID NO: 890353 - DNA, 636 bp, Homo sapiens
taatgctgaaatgaattgagactttggggaacagttgggaaggcatgatttgttttgaaatgtgaggacatgagatttgggaggggctggggtggaatgatatggtttggctatgtccccacccaaatctcatcttgaattgttcctatcctaatccccatatatcatgggagggaactggtrggaagtaattgaatcatgggggtgagtttttcccatgctgttatcttgaaagtgaataagtctcacgagatctgatggttttataaagggcagttctcctgcacacgttctcctgcttgctgctatgtgagatgtgcctttgcttctcttttgccttccgccatgattgtgaggcctccccagccatgtggaactgtgagtcaattaagactctttcctttgtaaattacccagtcttgggtatgttcttataacagcatgagagtggactaatacagccatcgaagctgcttatggtacacctggttcagctgcagtctcacagggagccagtgcccttgccagtgcctagagctgtcctcccttctgcagctggtgtgccttgctgcacacagtgtgtggaccccacactcactcacacacccccactgctccacacttggcttgcccttg

SEQ ID NO: 890354 - DNA, 681 bp, Homo sapiens
ggtgcatatatatttaggatagttagctctacctgttgaattgagcccttaatcattatgtaatatccttctttgtctttttttttttttttaaatctgtgttggtttaaagtctgttttgtcagaaatcaggattgcaacatctgcttttttctgtttttcatttgcttggtaaattttcctccattcctttattttgatcctaatgtttgtctttgcatgttagatggatctcttgaaggcagcataccaaagggtcttcactctttatccaatgttccattctgtgtcttttatttggggcatttagcccatttacattaaaggttagcacatatatatatatactttaagttctgggatacatggactgaacatgaaggtttgttacataggtatacatgtgccatgatggtttgctgcacccatcaayctgtcatctacattaggtatttctcctaatgctatccctcctcttgcccccatcccctgaaaggccccagtgagtgatgttgccctccctatgcccatatgttctcattgttcaactcccactgatgagtgagaacatgcagtgtttggttttctcttcctgtgttagtttgttgagaatgacggtttccagcttcatccatgtccctgtaaaggagatgaactcattcttttttatggctgcatagt

SEQ ID NO: 890355 - DNA, 682 bp, Homo sapiens
tagcattgaatctataaattactttggtcagtatggccattttcgtgatattgattcttcctatccatgagcatggaatgtttttccgtttgtttgtgtcctctcttatttccttgagcagtggtttgtagttctccttgaagaggtttttcacatcccttgtaagttgtgttcataggtattttattctctttgtagcaattgtgaatgsgattttgctcatgattcggctctctgtctattattgatgtagaggaatacttgtgatttttgcacattgattttgtatcctgagacttttttgaagttccttgtcagcttaagagattttcaggctgagacaatggggttttctaaatatacaatcatatcatctacaaacagagataatttgacttcctagctttttatctgaatatgctttatttcttcctcttgcctgactgccctggccagaacttccaatactgtgttgaataggagtggtgagagaggcatccttgtcttgtgccggttttcaaaggaaatgcttccagtttttgcccattctgtatgatattggctgtgggtttgtcataaacagctctttattattttgagatatgttccatcaatacctagtttattgagagtttttagcatgaagtgctgttgaattttatctaaagccttttctgcatct

SEQ ID NO: 890356 - DNA, 598 bp, Homo sapiens
atttccttttgcacaaaccagtctcatcccatcctcaaacgagttcttcaaggtggacaatgaatctgtccaagcccaacttacccttttatgctcatctcagcttctaccttctctaagaatcttttgatgtctacctcagtgagaattaccttctctatcttctacccaactcctcatgtagctttgagagcaatgcascttatgtttactgggctcaagactggttttgaagagtctacctcattgtcaaatcttgtgacgtaattttgggtttcaaaataaaattgcaaccaataattcaataacaggaatcataattacaggaacggtattagatgtctcagaattgtttttttttaaaaagttattgttaaaagtatcctgaatagggaacagatctaaatatactgagctcccactctatgttgaataccgtgacaaaagggggtggttataaaagtggaagaaagagtccctgcccgaaagtagtgtatggttcaattgagagatgacaagatagaccattataatagaacataatcagtgtagtgataaagataaaacaggaagctttgggcacacagagcagggatgc

SEQ ID NO: 890357 - DNA, 658 bp, Homo sapiens
caggacataggcatgggcaaggacttcatgctaaaacaccaaaagcaatggcaacaaaagccaaaattgacaaatgggatctaattaaactaaagagcttctgcacagcaaaagaaactatcattagagtgaacaggcaacctacagaatgggagaaaatttttccagcctactcatctgacaaagggctaatacccagaatctacaatgaacacaaacaaatttataagaaaaaaacaaacaaccccatcaaaaagtgggagaaggatatgaacagacagttctcaaaagaagaygtttatgcagccaaaaaacactcatgaaaaaatgctcatcatcactggccatcagagaaatgcaaatcaaaaccacaatgagatgccatctcacaccagttagaatggcaatcattaaaaagtcaggaaacaacaggtgctagagaggatgtggagaaataggaacacttttacactgttggtgagactgtaaactagttcaaccactgtggaagtcagtgtggcgattcttcagggatctagaactagaaataccacttgacccagccatcccattactgggtatatacccaaaggattataaatcatgctgctataaagacacatgcacatgtatgtttattgcggcactattcacaata

SEQ ID NO: 890358 - DNA, 541 bp, Homo sapiens
tccctatcacttaattggtatagttagactacttatatttgatgtaattattgatatggtagggcttaagtctgccagttaattttttgttttctgtttattctctctgatttttatttctctgtttatttttttctgtcttcctgtgggtaaattgaatgttttttagaattttatgattgaatgaaaataaaagtaatatgacatcaaacatatacaaaatgctattggcattcaaaaatgtttcccattagttgtgggggtgacaggatttcaacttggtttgaatgataggatttggacagttagaaatgaagacgacttgcagagaatgaaaagtataascctgtgatggggactggaggtagcttgcatgggtgggaaggtaggaaaaatctatggatatagtgggattcaaggcaagacaagtaagagtaaggactatattctaaattgtactgggacttgaatttcaggctgaagacatggcctttggtaaactggcaatagtgagcgattgaagatcttggggcagaaaagt

SEQ ID NO: 890359 - DNA, 611 bp, Homo sapiens
cacccaggctggtgtgtagtggtatgatcatagttcactgcatccttgaactcctggactcaagctatcctacaagtagctgggactacatgtgtgtgccaccatgcccagctaattaaaaaattttgttttctttagaggtgagatcttgctatgtcacctaggctattctcaaactcctgtcctcaagcaatcctctcacttcagcctctcaaargccctatactttaataatcattcctagggatactgatagagatagtacagaaccacattttaaaaaacactatagtaatccatgaatctgtagacagagaaatcttttgtttttaaaatatggcagactgtctaccttgacttcaactctaaaacattacttttatgttacattgtaaaatatcatcagtgatgcataaaacacagcttttaaaatgtacaatcaacctgtggagaaggtaagggtgagggatgcctaataaagaaagtaagagctaaagaggtagatgaggtgctgaggccaggtttcaccttgagagcatttgctagacaagtgaatttgaaaaccctactaaggtatcatttctcacctatcagatttgaaaaaaaaaatc

SEQ ID NO: 890360 - DNA, 663 bp, Homo sapiens
tttctatagttttaggttttacatttaagtctttaatttatcttgagttgacttttgtatatggtgtaaataaggtgcccagtttgaatcttctgcatatggctagccagttattccagcaccatttattgaataggaagtcttttccccattgcttgttttcattgacttattaaagatctggtsgttgtaggtgtacagtttatttctgagctctccattctgttccgttggtctgtgtctgtttttgtaccagtatcatctgtttttgttactgtagcctttgtagtatagtttgaagtcaggtaatgtgatgccccagctttgttctttttgcttaggattgctttgtctatttgggctcttttatggttccataggaatgttaaatactttttctaattctatgaagaatgtcattggtagtttgataggaatagcttgaatctgtgaattgcttttgtcagtatggccattttaacaatattgattcttggtatccatgagcatagaatgtttttccatttgcttgtgtcatctgtaatttctttgagcagtgttttgtcattttcattgtagagatcttttacctccctcgttagctgtgttcctaggtattttattgtttttgtggctattgtgaatgggattgcattctttatt

SEQ ID NO: 890361 - DNA, 682 bp, Homo sapiens
gttcaactgattctcctgcctcagcctccctagtagctgtgattacaggtgcctaccaccacgtctggctaatttttttgtatttttagtagagatggggtttcactatgttggccaggctggtctcaactcttgacctcgtggtctgccctctttggcctcccaaagtgttgggaattacaggtgtgagccactatgcccggccaagaagtgacatttttacacctggactcactgtgtaagaatagagcaaattttccatcttcaaaatctgggaaatttcttaaaaaatgaagagcagcacccatgtctccaaattccaactgaggtagtgacagggccaaaagtgccaaaccacccaccactaactactctcaaccaatggacaggctgagcttcctcaagtgtcaggcctgggatgtgcgtttagcttgctgtttkgtaaatgagacactgctctctctttgacattaaaaaaaaaagtataagccatgattaatacataccctgtttaagaatgctaatgccttctggaaaacaaagagtcatgagctgctagcacactccaaattcatatgttagtatcctagtttgaaaaagaaaatgtgccactatatcagcaacagttacataagatttttattatgtctagcaaaaattttaaaactctaactaaaatgga

SEQ ID NO: 890362 - DNA, 682 bp, Homo sapiens
gttcaactgattctcctgcctcagcctccctagtagctgtgattacaggtgcctaccaccacgtctggctaatttttttgtatttttagtagagatggggtttcactatgttggccaggctggtctcaactcttgacctcgtggtctgccctctttggcctcccaaagtgttgggaattacaggtgtgagccactatgcccggccaagaagtgacatttttacacctggactcactgtgtaagaatagagcaaattttccatcttcaaaatctgggaaatttcttaaaaaatgaagagcagcacccatgtctccaaattccaactgaggtagtgacagggccaaaagtgccaaaccacccaccactaactactctcaaccaatggacaggctgagcttcctcaagtgtcaggcctgggatgtgcgtttagcttgctgtttggtaaatgagacactgctctctctttgacattaaaaaaaaaagtataagccatgattaatacataccctgtttaagaatgctaatgccttctggaaaamaaagagtcatgagctgctagcacactccaaattcatatgttagtatcctagtttgaaaaagaaaatgtgccactatatcagcaacagttacataagatttttattatgtctagcaaaaattttaaaactctaactaaaatgga

SEQ ID NO: 890363 - DNA, 556 bp, Homo sapiens
tattgttttattttaattctagagaaaacttcaccagtgagtcttatttctactggcttatgtcagactgtgtgttttagtctcacaaacagcattaatacaaaagtgatgggttcaatctgatttacttccttacaataagcaaatcatttgaaatttgagcatataataaatttctcattactctcattgtgatgtttgtttctttttcatagtttatttcatgacatgcttaaactttaacctttataaagattyaaaagtgtgataaaggtcaagtgtaaagtgggttattttggctgttggggctcaaaaaataaaccccaaaaatatggtgctttgatgtgctgaactaaagtagcagcttcaaggtctctctgacatcctcccaattttctctctcaatcctcttcctctcccaagccacaagatgaggctgttctctgaaattcccttatgcacctaaaaccaggtcccccagagagaaacgcgattgccttcaatcccttccctgacatttcgttatccagagaagattagaactcatatcaaagag

SEQ ID NO: 890364 - DNA, 657 bp, Homo sapiens
tggtcttgaatgtgcccacaggtgtgacatgaaaaggatttgttccacaaaagcttaaaagcctttctcaaaattgggaaaactatgaaggcaagcacagacatataattagtgtcctaaaatcttccatataatcatttaaagtttttttaaaaatttgctcctatgttttcccaaagtctagggctttctctaaaagaaatgggtctcttcaaaatatttcattgtcttttattactgtttaagcataccagaaaaccaaaacatacaggatttacaagtggtaaagtaagtttttcttttgtctggctgtaggaaatgataactgaagcttcattttacctatttaatgctaccaagagaagagtatttttcagaaatataaagattttaatacctgccacatggaaagctaataataacagcaaaataaaacaagaatcatatgaaaaggtaagaatccaggatttcaytcaatgatctcaaggggaaaaaaaacaccaaaatatactgtgctcaaacgataaaagtgagaagttaagtaaaaacaaatcatcagtattaacaatgcaaataatattaatgggcagaatgttatcaacaaaatatatgagaataaatgaatgcaaattgtgcagtaaaaaatgagtcaaatgc

SEQ ID NO: 890365 - DNA, 656 bp, Homo sapiens
tggtagtttcactgagggtccagatctgaaactgcacctccccctacacaataaatggccttggtaacaagcagcactccaactgcatattcatggacaatatctaaaatcttttctttctcctctatggtacagcaagtagataataatatttgcaagtcatgccaagttaaatcaaaggacatggtcaacaaattcctctataaacttccctggatcctctgaaaactggctaaatttcttctygcataaagctaaattgtacattaaaaaaatgagatatactctgattgttcccccatctctgtctgcttcccacaatggggacagatttaattttgggagctgatgtggggccccactcttggtggtattggttaggcttatttctgtaggctgcaaaggtatagactaggcttagttggataagggagacgggtgcctaatgaccttggaaagaaatcctgcactggagaactggcaggacttccctcagaattcaggaaatgcagaggctccaaaggggggcatgaaactcctagcgggtgcagctaaaagggggtcatctaagatatctagtgctgtcttttggtccctgaaagtgacatggactagacacattctacagcattctcttaggttcagatcctggtaga

SEQ ID NO: 890366 - DNA, 623 bp, Homo sapiens
gtttacatttaggtttagatgtagtattctgcaatcatctttctgatcatttaccactttaataaaaaacttaatgttgtaaatttgggtaactttatttttaagcatcagtcagttcatgtgtaagctatttagaaatagaataagctgtagagtactgaaacttcagttagcaagtttggaaaaagtaaragttcttttttctacttctcagcatacatggagaatcttaactaataaatgtcaaatgaaaggcaaagattaatgggtcagtgaaattaatttttacatttaacttggcacatatgcaaatagattcattaatatttgaagggattattagcaatcacataatggtttctttatattctaattattcccaattgtgtaattactttcaattcattcttttattattttactttgaatacagtgttactgtgaaaatatgtattacaaatgtttacttctaatgcaatttttgttattttaactaactaatgatattgtgaataatgtggataaaatttacaggaattttgtgaaacagacctagaactgagcatttgttattgaaaatatttcttagtactaagatccccaaatcatatattatattgtaa

SEQ ID NO: 890367 - DNA, 635 bp, Homo sapiens
aaatttatcaaacacacagaaaacagaaaaaagcaggggttgcaattccagtctctgataaaacagactttaaaacaaccaagatcaaaaaagacaaagaagggcattacataatggtaaagggaacaattcaccaacaagagctaactgttctaaatataaatgcatccagtacaggagcacccacattcataaaatgagttcttagagaactacaaagagactgagactcccacataataacagtggggagactttaacactccactgtcagtattagacagatcaatgagacagaaaattaacaaggatattcaggactcaaacttaggtctggatcaagtggacctagtagacatctacagaactctcttacttcaaatcagcagaatatgccttcttcttcagtgccatgtggcacttattctaaaatctrccacataattggaagtaaaacactcctcggcaagtgcaaaagaaagaaatcataacaaacagactgtcagaccatagtgcaatcaaattagaactcagggttaaaaaactcaatcaaaaccacacaattacatggaaattgaacaacttgctactgaatgcctcctggataaacaatgaaattaaggcagaaatcaaga

SEQ ID NO: 890368 - DNA, 655 bp, Homo sapiens
aaggaaataacaactttcttaaaagtatcatgagatttttgaagttattgttataggaggcactatattaaaattctctgtggagaatttctatgctaaaaaacaaagttggggaatagattttagaatacattataagataaacaacagagaatactatatttatgaggattcccarcttaaaggaagaaacactaatatgaatgatctcctgtcactactgcatggatagatcggggatgtataagaatcttaagatgagtaggttgcaaaaattttctcccattttgtaggttgcctgttcactctgatggtagtttcttttgctgtgcagaagctctttagtttaattagatcccatttgtcaattttgtcttttgttgccattgcttttggtgttttagacatgaagtccttgcccatgcctatgtcctgaatggtaatgcctaggttttcttctagggtttttatggttttaggtctaacgtttaagtctttaatccatcttgaattcatttttgtataaggtgtaaggaagggatccagtttcagctttctacatatggctagccagttttcccagcaccatttattaaatagggaatcctttccccattgcttgtttttctcaggtttatcaaagatcagatagttg

SEQ ID NO: 890369 - DNA, 655 bp, Homo sapiens
aaggaaataacaactttcttaaaagtatcatgagatttttgaagttattgttataggaggcactatattaaaattctctgtggagaatttctatgctaaaaaacaaagttggggaatagattttagaatacattataagataaacaacagagaatactatatttatgaggattcccagcttaaaggaagaaacactaatatgaatgatctcctgtcactactgcatggatagatcggggatgtataagaatcttaagatgagtaggttgcraaaattttctcccattttgtaggttgcctgttcactctgatggtagtttcttttgctgtgcagaagctctttagtttaattagatcccatttgtcaattttgtcttttgttgccattgcttttggtgttttagacatgaagtccttgcccatgcctatgtcctgaatggtaatgcctaggttttcttctagggtttttatggttttaggtctaacgtttaagtctttaatccatcttgaattcatttttgtataaggtgtaaggaagggatccagtttcagctttctacatatggctagccagttttcccagcaccatttattaaatagggaatcctttccccattgcttgtttttctcaggtttatcaaagatcagatagttg

SEQ ID NO: 890370 - DNA, 663 bp, Homo sapiens
agcaatctatcgtctttggagttttatgaccaataattatttgaagaaatctaccaagataactgacacttgcctatgtcccttccataactgcattattgagcctcctatttcatctccagaagagagttgttctagagtgatgaagctctatcatagactgacggacctccattcacacctcatatattagcatatgaagtaattttccagagtggccttctctgaattccacactgaattggtccccttcaatattttctcygcatcacttcatattttttatgaaattgacaccggtgagagtgagtgtgtatatgcaagagagaaacagagacagagagagagattacttttaatattgatttccctcacttgactataaatccctaaaggcacggttttcttttctatagtgtatccatgtctaccacagagctgaattatacacagtgttcaaagacaattactgaaaataattaatagaaacaattgaacaaatgttttctttccttttaaagaacatactccgaaaacaagtatgcctaaactcaaatattattgaggaaataatgtttaactcttttcttttgtaccctaaaattcttcaaggttggcaaagatctttataatttagtcacacatatctaatattttaacaat

SEQ ID NO: 890371 - DNA, 545 bp, Homo sapiens
  misc_feature 512, 513, 514, 515, 516, 517, 518, 519, 520, 521, 522, 523,524, 525, 526, 527, 528, 529, 530, 531, 532, 533, 534, 535,536, 537, 538, 539, 540, 541, 542, 543, 544, 545: n = A,T,C or G
cttttgagtgtcaaaaatttaaatagaataatttaaatctggtgacagaatgatcaacaaatatttttattatattttacagaagaatatttggaaatcaattgaaagaaccagtttttaaaccatcaaagataaggacattgatttttttttttttttttttttttgagatggagtstctccctgtcacccaggctggagttcagtggcacagtcttggctcactgcagcctctgcctcccgggttcaagcaattctcctgcctcaacctccctagtagctgggactacaggcgcataccactgtgcccagctaatttttgtatttttagttgagacggggtttcaccatcttggccaggctggtctcaaactcctgacctcgtgatccacctgctttggcctcccaaagtgctgggattacaggcgtgagcctctgcgcccggccaggacattggttttaaaagttgttaatttagttattaaatgaagctgttaatacagcttatctannnnnnnnnnnnnnnnnnnnnnnnnnnnnnnnnn

SEQ ID NO: 890372 - DNA, 536 bp, Homo sapiens
gaaaaatgaaaactgtggtcacaccaaaatttgtatgcaagagcttatagtgatttattcacaatcactcaaaactgagaacaaccctaatgaatggaaagacaaacagtagcacaacagcaataaaaaggaacaaattattaatacatacatcatagataaatctgaaatatattaagtgaaaaaagccaggctcaaaaagctataratagtactatttctcatttatttgacactctgaacaaggcaaaactatatggatggagaacagacagatcattgttgacagaggttgaagtgggaggaagggttaagtagggtgagcatggaaaaataatttcagacaattggtcttctctgtatcttggtggtggtagtggtcacatgattccatttatttgttaaaattcttaaacctgtgcatccaaaagagtgaagtttattgtaagtaaattaaaaagtgaatataaaatttaaaaacatttttaaagttaaattttcagagttttccattgctctcataagacaggtaacag

SEQ ID NO: 890373 - DNA, 621 bp, Homo sapiens
attataggaattggctcacataattatggaagttccatgatattctgtctgggagctggaaaactagaaagggcagcggcataattctgtactgtacaaacgcctgagacccaggaaagccaatagtgtaattctcagtctgagtcaaaggactgagagaaaggggtgaaaagggggttcttgtatacattctggtgtctgaaggacaacggagctcttatgtccaagggcagaagatgcctgtcccagctaaagaaggaaaagcaatttcatcttttctctgcctctttgtttgagttgagcccttaagagattgaatgacgcccacccacattggcgaggatagattttctttactccgactactaattcaaatgccaatctctttcaraaacgtcttcacaagcacacccagaaataatgttttgccagctatctggggattccttaacccagtcaagttgaaatataaaggaaaccatcacacctttcttgtgtttattgagtatttgtgtagctttttaaattatttgcctagtattaaactggctatttgtctttctgttattaagcttaaagtgttttttatatattcaagacacaaggcacttaacagatata

SEQ ID NO: 890374 - DNA, 636 bp, Homo sapiens
aagcaaactgataagtcatgtgtatgaccgatcaagataagtgtcatgacttaaaatcattgatcctagcaggctgttccagttagaataaaatttcctctttttacagtcaatttcaattacttcatcaagacattaatttaatacatttggatgaactcagaatgtggcccttctagaaaagagtaatttctgtacacaagaaggaacagttatgaaacattcaaaccagcagagtggttttggctttgaacttagagcttgaaaagtcattgccctcttccatggagatggacaaatcttgtgacagtgactgtcgctatgargctccaggtttggtgagatgactgggaaattctagaatttatcacattttactcctaaacttcactggaatagaggctcaggacaggtttacgcctaagtttgaagttggctttgttttcgcctttatacttttctccatttgttaaatattttgcaataagtcttcattacttttctaattttcttgttaaaaaatgtttaacaaaattaaagcagtctgaatcagtagagtttccaagttacccagtttttaaatgaatctagcagagaggagattttgcagctttagaaggatgaattatatgattt

SEQ ID NO: 890375 - DNA, 625 bp, Homo sapiens
cttcctgtacagctgtggaacaatgaaccaattaaatgtcttttctttataaattacccagtctcaggtatttctttctagcaatgcaagaatagcctaatacacagagcctcaaaagtaacctattttattttttcacattcccaccawcagtgtacaagagttgtcttttaccacatcaacgacacttaccttttggcaggaatagccatcctaacagttgtgaggtaatatctcactgttgttttaatttgcatttccctgatgattagtgatgttgagcattttttcatgtaactcttggtgatttctatgtctgcttttgagaaatgtctgttcaggtcctttgcccattattaaattatctgttttcttgctattgagttgtttgagttccttatgtattttggatattggccccatatcagatgtatggaatagaaatattttctctcattgtacaggtcatctttttactctgattattttctttgctgtgcaaaaacttttagtttgatgcaatcccatttgtctatttttgctttttgtcgcctgtgtttttggagtcatatccaaaaaatcattgccaaaaccaatgtcaagaaactcttctgtgttttcttct

SEQ ID NO: 890376 - DNA, 625 bp, Homo sapiens
cttcctgtacagctgtggaacaatgaaccaattaaatgtcttttctttataaattacccagtctcaggtatttctttctagcaatgcaagaatagcctaatacacagagcctcaaaagtaacctattttattttttcacattcccaccaacagtgtacaagagttgtcttttaccacatcaacgacacttaccttttggcaggaatagccatcctaacagttgtgaggtaatatctcactgttgttttaatttgcatttccctgatgattagtgatgttgagcattttttcatgtaactcttggtgatttctrtgtctgcttttgagaaatgtctgttcaggtcctttgcccattattaaattatctgttttcttgctattgagttgtttgagttccttatgtattttggatattggccccatatcagatgtatggaatagaaatattttctctcattgtacaggtcatctttttactctgattattttctttgctgtgcaaaaacttttagtttgatgcaatcccatttgtctatttttgctttttgtcgcctgtgtttttggagtcatatccaaaaaatcattgccaaaaccaatgtcaagaaactcttctgtgttttcttct

SEQ ID NO: 890377 - DNA, 615 bp, Homo sapiens
ttatactgctagctacatgctcaaaagtgagaagattgcctttctaagcaggaaaagagtagaaggaaatcataactaaggtagcttcagaatagggtgaacaacttctcccagtttgctggggactttctggttttagcattgaaagtccaacattctcgaaagcccctaattctcaagcaaactgatgcagtaagtgactatattgcagagtctgccaataacatatacaggaatacctcagatatatwgcaggcatggttttgaccaccacattaaaaggactatcacaataaagtgactcatacaaatttgttggctttctggtgcatataaaagttatgttcatactatactatagtctgttaaatgtgcaatagcattgtctaaaaataatgtacatatcttaattaaaaatactttattgttaaaaaatgctaatgagcatctgagctttcagcgagtcattatctttttgttggtggagtgtcttgcctcagaatttgatggctgctgattgatcaaggtggtggtgactgtggcaattgaacaaagaaagacagaaatgaagtttgacatactgattgactcttcctttcacaaaagagttctcca

SEQ ID NO: 890378 - DNA, 534 bp, Homo sapiens
tcattagcatatacaaagtatttaagtccattagattggatgagatcagcagacggtgagtatagatttttaaaataggttcagggtttgagccctggagcattcctccttttggggatcaggaaaatgaaaagtaatgggcagaagagactgasgaggagcagctaatgaggaagaaggaaaaccaaaagggagtggtgatgtagaagctgaggaaagatgccatttgaagaatgtttcaaaacttattacacagaagagagagggatgattgctaaagcaatgctcgcagttcacatactgctgactgactgagttaggtgaagtctaagttgtttctgtttagtatggcaatttggaggtaattaataagtaaccttgacacaaacagttcaggtgtgggtgggaaaagatcctgatggcagtaggttcaagagaaaacagcaaaagagaaagtggagtcaaagtacacaccctttggaggagttttgttattaaaggggcagaaaaatagtgcagtagctggagggtaat

SEQ ID NO: 890379 - DNA, 569 bp, Homo sapiens
ttattccttttatataaggaccatataaagaactcaaaatggacaacatgcttgtcagtagcaaatgaagaaaactattaaagaatcaccagaattacggtctttagacaatgtttacacttgcaatattaagcgaagcttaacattttgaattgcttttccatgggaaaatatacatgcttatgtatatatctgttgatttayagagaagttctataaattaagtctccataacacattacattcccctttaacatgtaatagaattctctgaaatacacacctatacaggcaactttaaaaattaaagctactcttaaaaacctaacctacaaaaaattgttatattagatcaaaagcaagacatgaatctaaattagagggaaaaatttgttcatttacctcaacaaactgtccccaaggtatttctacaagtgatgttgctggaattctcaaatagatctttccaatgtaactgcttttacttattttggtgcattattttttatatgtttatatgtatgtaaaacaaattaggtgcagttaagtaacaaactaaagatactttg

SEQ ID NO: 890380 - DNA, 569 bp, Homo sapiens
ttattccttttatataaggaccatataaagaactcaaaatggacaacatgcttgtcagtagcaaatgaagaaaactattaaagaatcaccagaattacggtctttagacaatgtttacacttgcaatattaagcgaagcttaacattttgaattgcttttccatgggaaaatatacatgcttatgtatatatctgttgatttacagagaagttctataaattaagtctccrtaacacattacattcccctttaacatgtaatagaattctctgaaatacacacctatacaggcaactttaaaaattaaagctactcttaaaaacctaacctacaaaaaattgttatattagatcaaaagcaagacatgaatctaaattagagggaaaaatttgttcatttacctcaacaaactgtccccaaggtatttctacaagtgatgttgctggaattctcaaatagatctttccaatgtaactgcttttacttattttggtgcattattttttatatgtttatatgtatgtaaaacaaattaggtgcagttaagtaacaaactaaagatactttg

SEQ ID NO: 890381 - DNA, 659 bp, Homo sapiens
acttaatagtaaaagactgaatattttcccttaaaatgagaatgaaggcaaaggggtccactctcaccaattttattcaacattttattggcagtcatagccggtttagtaaggtaatcagaagaaatgaaaagcatacagatttaaaaagatraaataaaaccgtctttattcacagacgactgaagaaaatcctaagaaacctgattgaaaaggttactagaactaataagtgagtttagcagcattttaggaaatgtacatttctgtatgctggtaagtaatttatagtagataagaaatacttggaataattaagcataaattcaccaaaatagtcaaggacactaaaaacaatacacttctgagtgaaactgacgtagacctaaataaagagatataccatgtttatgtattggaagattcaataatgtaaagatgttcattatcatccagttaatttataaattctgtgcaatcacagtaaagcccccaacataattgctttttggcagaagtgaataaactgtttctaaaacttatatggggttgcaaaggacgtagaatagtcaaagtaattttaaataagtataacagtgttggaggacttagactacctgacttcaagacttactataaagcttctgtagcaagataat

SEQ ID NO: 890382 - DNA, 661 bp, Homo sapiens
tgagaaaataaatggaagatataaaaagaaactatgtggaactggtagagctatgtctaaaatgcaaatttcactggataagcttgacagctggttcaaagactagtgaacttgaagacatagttctataagtgatctgagacacagcacacagagaaaagagactggaaaacaataaacagattcgcagtgactatggggcaatagtaagtcatctaaggtatggaaaaattgaagtcttcgaaagcaaggagaggacaaaaaatgttttaagatataatggatgaaaaatttccaaatttgaagaaaaccataaatctataaatccaagaagtgcaatgaagaccaagmaggataaatacaaagaaaaccacagcaagccacatcataagcagttttctgaaaccggcgttaaggagaaaatcctagaagcagccagagaaaaatgagacgtgtaacatacacaggaacatggtgaaaatgaaaacagtattctttttggaaacaatgtaagccagaagtcaatggggtaacatctcaaaagaagtgcaagaaagaagctgttaatctagaactctgtatcctacgaaaatatcttttaaaaatgaaggcaaaataaacattttaagacgtcatcagacttgtactaccagaaatgtta

SEQ ID NO: 890383 - DNA, 681 bp, Homo sapiens
atcaaactaccattgacattgtttattgaattagaaaaaaactactttaaatttcaaatggaatcaaagaagactccgtatagccaagacaatcctaagcaaaagaacaaagctggaggcatcacactacctgacttcaaactgtgctacagggctacagtaaccaaaacaacgtggtagtgatatcaaaacagacaacccaaacatcatggtactggtaccaaaacagatacatagaccaacgtaacagaaaagagacctcagaaataacacaacacatctacaatcatctgatcttcaacaaatctgacataaacaggcaatggggaaaggatctcctagtcaataaatggtgctaggaaaactggctagccatatgcagaaaaytaatactggaacccttccttacaccttatacaaaaattaactcaagatggattaaagacttaaatgtaaaacccaaaaccatacaaaccctagaagaaaacctaggcaataccattcaggatatagacgcgggcaaagacttaatgacaaaaatgccaaaagaaattgcaacaaaagccaaaattgacaaatgggatctaattaaactaaagagcttctgcatagcaaaagaaactatcattagagtgaacaggcaaaatacagtatgggagaaaatttttgcaatctacgcat

SEQ ID NO: 890384 - DNA, 594 bp, Homo sapiens
ttaaaattcaatctttctggacttctgtggctgaagtccacttgcaatttgaaatgccaccagcacctctctttttttcataattgatctgcttccagattcaaaattttgtttcagccataccagcgtctggtgggggacacacaccctaaatcatagcatgcctgtcatctgaccctttctccgccagtctgctggaaatcccgtgcaagcttctttccctaacctgggatcagacagtgtttcccacccaaatttgattaaacgtgccctcccttgctgttgtccatatggcaccaaaatgcgggctgcctttctcatttttccagactgtggggtcagacggtgcccagacaggcaaataatagtcaaattatacaggaagttgtcaaaggagtccgaacacagacagaggaaayctctgaccccacgacaggtcaaaggtctggttcaagtttctccttcttaatctgtcaccacagccaaattaaaagcagccctttgaatgaaaccatttatggagtctgctttttttttttttttttttgaaagtttttcttttattacaagctgaactttttttttaattgcact

SEQ ID NO: 890385 - DNA, 612 bp, Homo sapiens
gaactggagcaaaggtgactcttgtcatgttttagcaaagagactggcagcatttttcccctgccctagagatttgaacttgagagaggtaacttagggtatctggtggaagaaatttctaagcagcaaagcattccaaaggtgacgtgggtgctattaaaakcattctgttttaaaagggaaacagagcataaaagttcagaaaatttgcaggctgacgatgcagtagaaaacaaaaactcattttttgaggagaaattcaagccagctgaagaaatttgcataagtagcaaggagcctaatgttaatccccaagacaatggggaaaatatctccaggccgtgtcagagaacttcatggcagtcccttccatcacaggcccagaggcccaggaggaaaaagtggttttgtgggtgaggcccagggtccccttcctatgttcagcctagggacttggtcccctgttgtagccacttcagctgtggctgaaaggggccaatgtagagcttggtctgtagcttcagagggtggaagccccgggctttggcagcttccacatggtgttgagcttgcgtgtgcacagaagtcaagaatggaggttttggaacctct

SEQ ID NO: 890386 - DNA, 652 bp, Homo sapiens
caaactaaaattggcctatgttaatttctattctcagttcttctgtgcccttcctcctcttaaaaaaaaaaaaaaaaagagagagagagagaaagggccaggtgtggtggctcacgcctgtaatcccagcactttgggaggccgaggcagctggatcacctgaggtcaggaattcgacaccagcccggccaacaaggctaaaccttgtctctactaaaaatacaaaaattagccaggtgtggtggcacatacctgtagtcccagctactgaggaggctgaggcaggagaatcgcttgaacccaggaggtgaaggttgcagtaagccgaggtcacaccactgcactccagcctggatgacagagcgagactcygtctcaaaaaaagaataaaaagaataaaaagaatgaaagaatgaaagaaagagagagaaagaaagcaagccagccagccagccagccagccaaggtggttcatgcctataatcccagccctttgggaggttgtggcaggaggatcacttaaatctgggagttcaaaacccacctggacaatatagcaagaccccaactcttgaaaaaaaattgctttaattagctagacgtggtggcatgaacctgtgttgggagactaaggtgggaagatcgctcgagc

SEQ ID NO: 890387 - DNA, 664 bp, Homo sapiens
caccttgcttaaagttttctcatgccaaataacctagtttatcactcttaaattcctcctttcccaaagcagaagggacacggacacaattcagccaagttatttaccacattttgtaacaagagtggactttcctccagttcccaataagataatcttcatttccctatgaagacctaatcagaatggcctttattgtccatatttttaccaacattctgttcaagaccatttagatgttctctaagactgagactgtctctgtagctcttctgttcttctgaggtcttgcaagaatcacccttaattttctgtcatagcaatatagcaggttttcagcattcatttcagaaccattccagcctctacccatgacccagtttcaaakatgttcccacattttcaggtatttgttacagcaacacccaactcctagtatcagtttcttagtccatttgcactactgtaacaaaataccagagactaggaatttatacaaaataaacttttattgttctagagatgaagttcaagatgaaggaactgatcaattaagtgtctgataaggacctggtcttcatttttaacatggtgccttattggtgaatcctctggaggagattaacactttgtctttacatggcaagaggaatagaagggcaat

SEQ ID NO: 890388 - DNA, 643 bp, Homo sapiens
ttttgttccaaatcagttggaaatatttagtcaagttattcaatgaatagagcagcaaaacgtcaactttcaaagcttttagtgaattataaatattgaaaacaaagctggtatgcagaaaaattataaaatgtatcagaaaatgatcaaaatcaaatgctgtacaagagttaattttgaaattctaaaatgagctctggaacatttcagcttgtgggaagaatctttttaattggataaattcatgttctgtatgaaatgagatgaaattgagaaagccaatgattttttttttttttgcagtatctgaatctgacaaaacattcaaaacttataagtaggtacaacttatttgaaaggtttaatctggttaaaaaaaaatacgtgtgggctgggcacggtgtggctcatgcctgtaatcccwgcactttgggaggctgaggcaggtggatcacatgaggtcaggagttcaagaccaacctggccaacatggtgaaactttgtctctactgaaaacacaaaaattagccgggcatggtggcaggcgcctgtaatcccagctacacaggaggctgaggcaggagaattgcttgaacctgggaagcggaggttgtggcgagccaagatcgcaccactacattcc

SEQ ID NO: 890389 - DNA, 705 bp, Homo sapiens
gtcaggagttcgagaacagcagtgggcaacatggtgaaaccccgcctcttctaaaaatacaacaattagccagacatggtggtgtgtgcctgtaatcccagctactcggcaggctgaggcaggagaaccaaaaaaaaaaaaaaggaaagaaagaaaagaaagaaagaaaagaaaggaaaggaaaggaaagaaaggaaagagaaaacgaaaccaaataattccatcaaaaagtgggcaaatggcaggaatagacatttctcaaaagaagataacaaatggcctacaaacatgtaaaaatgcacaacatcactaatgatcagggaaatgcaaattcaaaacgcaataagataccaccttacttctacaagaatgaccattatgtaaaagtcaaaaaacaatagatgttggtgtggatgtggtaaaaagggaatgggtatacattgctggtrggaatataaattagtacaacctctatggaaaacagtatagagattccttaaagaactaaaagtagatctaccattcaatcaagcaatcccactattagatatctacccaaaagaagtcattacatgaagacacatgcacatgtctgtttattgagcacaattcataattgcaaagacatggaaccaacctaaatgcccatcaaccaatgagtggattaagaatatacggtatatatacaccatggaatactactca

SEQ ID NO: 890390 - DNA, 577 bp, Homo sapiens
tggttgcttatagtgtgcacatttaacttatcccagtctactgttcaaaaataacattgtagtttatgtatgtaacaagctcttaaaatagtatattttcatttttctcctttggctatgtgttatttttgtcacactattatctttacataaattgtagaccctacaatacatygttataaattttgctttaaataatcagttatctttttccctttcatttttagttgatacataataattgtacatatttatgggacacagagtgatattttcatagatgcatacaatgtgtagtgatcaaatcagagtaattaggattacaaacatttattttttttgtgctgggaacatttgaaattctctcttctagatttataatatatacaataagttattgtcaactatttttctccacagtgccatagaacactagaacttattcttttctagctgtaattttatatctattaataaaactctgtcttctcctccctgctacatttcccagcctctagtaaccataattctactctttccttctacttctgtgagcttttttgttgttgtttccaca

SEQ ID NO: 890391 - DNA, 645 bp, Homo sapiens
ctttatttacaaaaaattgttaattttgacattaccttaatgtctttttacagatgtaaggcattttacacatccccctgccctcaattatttggttggctttattttaaataaaaatcaagggatggtattttttttaaaaagcccaaagtatrtaaatgtgaaactcttcagtaaatgatcagaacttaatatccagtttgctattgaaacattacaaatcactaactataaaggttgaaatagaattgcagcatcagaaataatattttagctttagaaatacaaaccagaaatacaaagcagaaattttgttgcctgtaaaatcagtactacatccttttatggaatagaagatttctttttcacagagtattctctggagccaaatacctgggttgtcaaaaatgctgcaaaatgagaatttagtttacagtagttgcaattgggcagtgtaccctaattgacttggaactagaaatctattaaaaggaagcctattaaccagatctcaaaaattcctgtagataaagctctagcaaatatgagcttacaatcaaaattcataaaacatgcaagagcccaagataccctaaataatataactattggaaaaatcagatatagaataaaaatttatatgtt

SEQ ID NO: 890392 - DNA, 495 bp, Homo sapiens
ctatcattgtgaagcagaattcaccaagcgttggattgttcacccactaatagggaacgtgagctgggtttagaccgtcgtgagacaggttagttttaccctactgatgatgtgttgttgccatggtaatcctgctcagtacgagaggaaccgcaggttcagacatttggtgtatgtgcttggctgaggagccaatggggcgaagctaccatctgtgggattatgactgaacgcctctaagtcagaatcccgcccaggcggaacgatacggcagcgccgcggagcctcggttggcctcggatagccggtcccccgcctgtccccgccggcgggccgcccccccctccrcgcgccccgcgcgcgcgggagggcgcgtgccccgccgcgcgccgggaccggggtccggtgcggagtgcccttcgtcctgggaaacggggcgcggctggaaaggcggccgccccctcgcccgtcacgcaccgcacgttcgtggggaac

SEQ ID NO: 890393 - DNA, 607 bp, Homo sapiens
actcttctacttcgtgtttctatgaacttaactgctgtaaatatctcatatgagtggaaagagacaatatagcaaaaaaatcatgaggaagaataatatatactatataacatatgtttatccattttaagaaaaatgctagcagagatcaggtcatggtgwttatagagaaaggtaggtaacagtgaaaaagggattggttgcattaaatttacgacgtgatgcctcaagtgccagagtagtgagctttctgccccactcgcagggctggtcaatggtgtggctggaaccctacttgagctgcctgactgccagagcccatgcttagtacaaacttcaatgagccatgaaagcaattccaacaacaggcacttaatggctctgagattttatcacagcctgttcttcatggctagcaacttcagagaagagtgacagctgtgaggttccagaagccacacctcaggtcccccagttcctccccagcagctggagtccaggtgcaacaggacctgatgccggccagggaaccatggccacacgctgtgtgaggctggcggcaagacagtctcccctcctaccctctgctcatctgctaggtctttgc

SEQ ID NO: 890394 - DNA, 607 bp, Homo sapiens
actcttctacttcgtgtttctatgaacttaactgctgtaaatatctcatatgagtggaaagagacaatatagcaaaaaaatcatgaggaagaataatatatactatataacatatgtttatccattttaagaaaaatgctagcagagatcaggtcatggtgtttatagagaaaggtaggtaacagtgaaaaagggattggttgcattaaatttacgacgtgatgcctcaagtgccagagyagtgagctttctgccccactcgcagggctggtcaatggtgtggctggaaccctacttgagctgcctgactgccagagcccatgcttagtacaaacttcaatgagccatgaaagcaattccaacaacaggcacttaatggctctgagattttatcacagcctgttcttcatggctagcaacttcagagaagagtgacagctgtgaggttccagaagccacacctcaggtcccccagttcctccccagcagctggagtccaggtgcaacaggacctgatgccggccagggaaccatggccacacgctgtgtgaggctggcggcaagacagtctcccctcctaccctctgctcatctgctaggtctttgc

SEQ ID NO: 890395 - DNA, 607 bp, Homo sapiens
actcttctacttcgtgtttctatgaacttaactgctgtaaatatctcatatgagtggaaagagacaatatagcaaaaaaatcatgaggaagaataatatatactatataacatatgtttatccattttaagaaaaatgctagcagagatcaggtcatggtgtttatagagaaaggtaggtaacagtgaaaaagggattggttgcattaaatttacgacgtgatgcctcaagtgccagagtagtgagctttctgccccactcgcagggctggycaatggtgtggctggaaccctacttgagctgcctgactgccagagcccatgcttagtacaaacttcaatgagccatgaaagcaattccaacaacaggcacttaatggctctgagattttatcacagcctgttcttcatggctagcaacttcagagaagagtgacagctgtgaggttccagaagccacacctcaggtcccccagttcctccccagcagctggagtccaggtgcaacaggacctgatgccggccagggaaccatggccacacgctgtgtgaggctggcggcaagacagtctcccctcctaccctctgctcatctgctaggtctttgc

SEQ ID NO: 890396 - DNA, 633 bp, Homo sapiens
ggaatttcccctgtggggaaagccaggatgccattgatgcctcttggccaggcttccaggcactctctttgcagaactctattgaggagatccctgaggagctgtttgatgagtccaactactccatctcattgaacaaaaggcaggtgcatcatgccaacaaccatggcccgtgctagtctggagtcaaggtgggcacagagaggtctccaaatggaaaagaccagggaagcccaggaccctgacccaaatgtgaggattccccagaaaccgttttagggctttctccattaaggacccacagttccttcccagaggaatttggcctccattagtccataatggcaacttaggtgcacagtccctggtcatatgcttgcaggaatgtcaaaagaaacacttttgtgttgttattactttacattaagttgtgagtatctttgcattttgctattatttttattgttatatctaccyaccccacatacttcctggagcaggcagcttcgctgccttgccagaccttctctaagtcttagaagttcacactgttactagagagaggtttcacccaaaaagtgggagttatgcaaaagggtcttatatgactctttacatatgtgtcccagagcc

SEQ ID NO: 890397 - DNA, 633 bp, Homo sapiens
atgttagggtgtcgatttcagatcattccagctttctgttgtgggcatttagtgctagcatatcccctcttaaaactgctttagctgtgtccaagagattctggtacattgtctctttgttctcatttgtttcaaaaaaaacttaatttctctcttaattttgtcatttactcagtagtcgttcaggagcaggttgttcaatttccatgtatttatgtggttttgagtgagtttcttaatcctgagttctgatttgattgcactgtggtctgagagacagtttgttatggttgccattttttccatttgttgaggagtgttttgcttccaattatgtggtcaattttagaatatgtgctatgtggcatggagaagaatgtatattctgttcktctggcatggagagttctgtagttgtctattaggtccgcttagtccagagctgatttcaaatcctgaatatccttgttaattttctgtctcattgatctgtctaatattggcagtggggtgttaaaacttcccagtgttattgtgtgggagtctacgtctctttataggtctgtaagaacttgttttatgaatctcagtgctcctctgttgggtaggtatatatataggatagttagctct

SEQ ID NO: 890398 - DNA, 582 bp, Homo sapiens
atttatgtttctctctaagctggttattctagttagcagttcccataaccttttatcaagatacttagcttctttgcattgtgttagaacatacttctttagctcagaggagtttattattacccaccttctgaagactacttctgtcaattcttcaatctcattctccatccagttttgtgtcattactggagaggtgttgtgatcatttggaggagaaaaggcattcttgtttctggaatttttggcatttttgtgctgttttttcctcatcttcatggatttatctactttcaatctttggggctgatgacatttggatggggttttttttgggkgggtcctttctgttgatgttgatgttgttgctttctgcttgttagtttttcttctaacagcaaggttcttctgcaggtccagtgcagtttgctggagttccaatccagaccctgttcacctgggtgtcaccagtaaaggctgcagaacagcaaagattgctgccttctccttcttctggaaacttcatcccaggaggatacccgcccaatgccaactggagcccttttgtatgaggtgtctgtc

SEQ ID NO: 890399 - DNA, 697 bp, Homo sapiens
caatccataaacacagaacactgactaatacaatctgcaaatgggtagtttgacttcctctcctcttatttgaatgcctttatttttttctcttgtctgattgctctggccaggattttcaatactatgttgaacagggctggtaagagagggcatctttgtcttgtgccagtttccaagaaaaatgcttccagtttcacccattcagyataaagttggctgtgggtttgtcatagatgacttttattatttcaaagcatgtttcctcaatacctagtatatggagagttttaacataaagtggttttgaattttaatgaaagctctttctgcatctattacaataatcatgaggtttttgtctttcgttctgtttgtattatgaatcacatttattgatttgcatatgttgaaccaaccttgcatcccagggaaaaagcctacttgattgtggtggataggctttttggtgtgctgctggatttggtttgccagtattttatggagaatttttgcatcaatattcatcaaagatatgaaatttttctttcttttgcttttcttccaggttttgatatcagaagggtgctggcctcataggatgagtgaggaagatgatcctcctcaaatttttgggagtttcagtaggaatgataccaaattcttctttgcatatccagtagaatttggctgggaa

SEQ ID NO: 890400 - DNA, 602 bp, Homo sapiens
tgcatctcagggattctggtaggttgtgtctttgttctcattactttcaaataactttttgattgatgccttaatttcattattcacacaaaagtcattcaggagtgagttatttaatttttatgtaatcatatggtattgagtattggttttctcaacttttacctccaattttactgtactctggtctcggagagtggttgtcataatttgaattcttttataatttctgagaacagttttatgtcgattaagtggttgattttagagtatgtgccatgtggcaatgagaacgtatatgttgttgtttttggtggagagttctgaaagtgtctgttacatccatttgatccagtgctgcattcagatcttgaatatcttgttaattttctgccttaataatctaatattgtcaatgggttgttgaagtttttcactataawtgtgtaggaatctaagtctttttaaagacctctaagaacttgctttatgaatttgggtgttcctgtgttgggtgtgtatatatttaaaatgtatatatttaaatatgaatacatatattcttgttgaatttaaccctttagcattttgtaatgcctttt

SEQ ID NO: 890401 - DNA, 645 bp, Homo sapiens
acctactaatgagggtttagaatttttcaaatgctgagaaccatcctccaaacaaggaatccggggactacctggatcaagtctgaagtggaacctgggccaacttgtgcattctagctgtaatttttatgaccagtaatattgatttcttggctattgatttctaggcaacagttgkttaaattaaattttctacatattcctccttctgaggataagagataatttaaagccagcctattttgatatatagcatttcctttttgtgttgcttgtattgccaataaatctagtgccctcgatatttcattggttatgatttgaaggactgcctgcaacttcatgatgcggctgaggatacagattatggtgcagtaccctcatgacctgtcttgcacctaggtagctggcccatagcatgtcatgattctttcaggaggtcatttattacctttttagtctcctgtgtccacatcttttttgatatttttgttacttttgtgattatgctttttctagttcttcttttatttttattataaactggatattctaagaatttcccttgctttagaggaattagaaagaaggatggcttgattgcttttaacagacatgcccctgcccattttgctggcagttgcc

SEQ ID NO: 890402 - DNA, 583 bp, Homo sapiens
cctacacattctgcacttgtacttcagaacccaatttaaatttaaaaaataaagaaagattccttacatcatatacaacaataaactcaacatggtttaaatgtaaaacccaagactataaaaactttggaagacaacctaggcaataccattcrggacataggcatgggcaaatattttatgatgaaggcgcaaaagcaattagaacaaagagaacattgacaaatgggatctaattaaactaaagagcttttgcacagcaaaagaaactatcaacagagtaaacagacaatgtatagaatgggagaaaatttttgcaaactgtgcatctgacaataatctaatttctagcatccataaggaacataaatttacacgagaaaaacaaacaaccttattaaaaattggccaaaggacacacagaaacacttcttgaaagaagacatacatgcagccaataagcgtatgaaacagaagttcaacatcactgaccattagagaaatgtaaatccaaaccacaatgagacatcattttataccaggtataatggttaccatgaaaaaatcaaaaaatcacagatgc

SEQ ID NO: 890403 - DNA, 603 bp, Homo sapiens
aataaataacttaacaatgcctcttaaacaattaggaaaccaagagtaaaccaaaaccaaaattagtagaacaaagaaataataaagatcaaagcagagggaaatgaaattgaaagttaaaaaaaaaaagatcgttttaaaagagttggtgtttttatttttagttttataattttatttcattttattattattatactttaagttttaggctacatgtgyacaatgtgcaagttagttacatatgcatacatgtgccatgttggtgtgctgcacccattaactcgtcatttagcattaggtatatctcctaatgctatccctcccctctccccccaccccacaacagttcccagagtgtgatgttccccttcctgtgtccatgtgttctcattgttcaattcccatctatgagtgagaatatgcggtgtttggttttttgttcttgcgatagtttactgagaatgatgatttccaatttcatccatgtccctacaaaggacatgaacccatcattttttatggctgcatagtgttccatggtgtatatgtgccacattttcttaatccagtctatcattgctggacatttgggttggctcc

SEQ ID NO: 890404 - DNA, 604 bp, Homo sapiens
tctgtgcccattggtatttttgggttgctgatttttcagctccatgtcttagatatatgagcaaaaggaaaacccaaaggaacctatcaccatgttgttcctcaggtctcaatgtcccttgccagtctgctttctcttctgtagatttcagtctttttatgtttgttttatatatcacattcagggtttctagttgtacttaatgtgaggaatagggaaaattgtatctactccatcttctcagaagcagaagtctatataaaatattttgtttattttgcacaacatattatcttatacatttcctgatgtaggcacaccccacttttgagaactcaggcctaaagaatgactctaagcatttgaggaagtggaggactggaagtaagaagaagtgggttctactcctggcttgactactgtgtgattttggactcatcattctttatcctcagtctctgttacttyatctcgaagatgagcataaaaacagttaccttgcccacttctaagagttatgtaatataaaattttagaggaatgtgaaaattctgtaaaaatattaataatcactagaaatccaatacacaagtattgtgtattg

SEQ ID NO: 890405 - DNA, 664 bp, Homo sapiens
tagagtggctctgtggtgggggagaatggagtgatggtggtcaaagagtacaaaatttcagttagacagaagaaatggttttctttttttgaattctattgcacagcatggtgcatagagttaataatagagtattgtacatttcaaaattgccaagagggccatgtgcagtggctcatgcctgtaatcagagcactttgggaggccaaagcgggaagatcatttgaggtcatgagttcgagaccagcctggccaacatggtgaaaccccatctctattaaaaaatacaaaaattagctgagtgtggtggcacacacttgtaatcccagctactcgggargctgaggcaagagaattgcttaagcccagggggtggaggttgcagtgagctgagattgtgccactgcactctggcctgggcgacagagcaagactccatcttaaaaataaataaataaataaataaagattgagtttgggtgcagtggctcacgcctctaattccagcactttgggaggctgaggcaggcggatcacctgaggtcaggagtttgggaccagcctagccaacatggtgaacccccattcctactgaaaatacaaaaattagccgggtgtggtggtacacatctgtaatcccagctacttgggaggctgaaacata

SEQ ID NO: 890406 - DNA, 551 bp, Homo sapiens
tatatttttgttatttggaagggtttgtgaaagattgatgttagttattttttaaatgtttggtagaattcaccagtgaagccatctagtcctgaggttttttttttttttttttttttttctcccatgtgggaagttttcaagattgaatgaaattatttattaaatctttttcttgttataggtcttctcagattttctacttcttcttgagtcagtttctgtaggttgtgtctttctaggactttatccatttcatcaggttatgtaatttattggcatacaattggtcataatattccctttaattcttatttctgtaaractggtagtaatatttcttctttcatccatgattttaataattttaatctattttttctattttaactttttgcaaggcaaatgtgttcttgtataatgtataattttaaaaatagaaaaaaaaatggaaggcacaaaataaaaatgcacattaaagatatgggtatattgctaactccctggctgtctctgtgggtatcagtttctttattacgaaattgagagga

SEQ ID NO: 890407 - DNA, 618 bp, Homo sapiens
gcgagaaggcagagatgaacattctagaaatgaatgagaaattgcgcccccagctggcagagaagaaacagcagttcagaaacctcaaagagaaatgttttgtaactcaactggcctgcttcctggccaaccagcagaacaaatacagtaagatctataggctcaccatcacgaaagtgatgaacgaagtcctrtcttctctctgagaaactaagtgctctctccatctaaaataatgtcatcctccccatacttctaggaaaacagaaatgggtattttaacattttgttaaagttggaagacagaggtcccaaaatatttagcaactttccatgtttgcaatcaggtgggggtgggactagagttaaactgccatttattgatttctgacacaggcacagaatgacctgttttctccaagaggctcaatcatgttttcaagaatcctctctgtaccatgtaagatcctgcagacaaataacatctagtctgttgttctaaatgtctgagactagtgaacttttattcagttcaagtttctgttgaggcccaacaggcaaagctctgttctagtgactctgagggaaacttggtgatagtagccagtacccgctctg

SEQ ID NO: 890408 - DNA, 580 bp, Homo sapiens
gatttcttaatcccaatttaattaatttgaattaaaaaatttaattaaaaaatttaagataactactataatgcaaaattattttcaactgttcatatagttaatatgattaagtaggcagctatacccttaacttagtattactaaatattttcttttaagtaaaataatctttacatgattgccttttattctttttagatgtgcttttgcagacttaaaactacaaggtggtcagtaattatagatgactttttcaatatttcatttgcagctgcacataaaatataaagttatatttgaagagaatgggtatggtataggtttctataaacattaaccrcaatgaacatttaaataatcaatatcacagagataagatagaatcttaattgtccaaagaaagtaaaattgctcaaatttaagtcaatgactgaatttttgttggtgtaccaaaataaggtttctaatttttaaaaagtagaaattacacttgaaaaaaagtgtgattaatcaattaaaatttggagggaaagcttcttcacctcagcatgtgtaaaacaagcatgaagagcagtgt

SEQ ID NO: 890409 - DNA, 622 bp, Homo sapiens
ctttaatttctaccaaattttaaattgtggtgatatgtttaagtatatgatattatatgaaatctcttaattggcaaatgtttttatggttttgtgacacattgttatttttaatttttcaagttattcattcatttatctaataaatgtttattaatttcctattacagggagcttacattctgcgagtttatayatgaaatgtcaaatatgaaacatccagatcagtggtgtgggtcttaataattcatgttagttatctatgcttacattactcctgccaaacaagaataaagtgtgtgtgtgtgaatgcagacatatttgaactgtatttcactagaactttctaattgtaaataaaattgcaatacaaaagagagatatcttttgcatcttgagtgtggaggcaatatggtttgtggaatcatgggtttaaattttgccttcaaacccataacatttttaaacaaatcacataatttttgaatgtctgttttggaatggggataatgctctacttgccggctgctgtgaaaatttgagatcatgtacacatacaattctttgcatgtaatagatgctcaaaaatggtaattatttctatcatgactcactatcacct

SEQ ID NO: 890410 - DNA, 601 bp, Homo sapiens
gagctagaatatatttttggatttttattggtcgattcttttctgtgaaatgtttgttcagatcatatcgttttttattttgaaattttaatcttaagagttctttatatgttctggatactaatatcctgtaagttatgtgttgtaaataacttcttcctgttagtggcatgactcaatattctattgtatcttttgatgaagatttttattttatggttagtactttttatatcttgttttttaaaaatttgtgtatattccaagattataacaatattctctataaattactttgaaagcataaagttgctctgaacatttatttcatttgtaattggtttttgttcatatttttrttgtggtaaactacatataaaatatactatctcagccatttttgagtgtacagttttgtggtattaagtacattggtatcattgtgtaaccatcaccaccatccaccttcagaactctttcatcttgcaagactgaaactctctactcattgaacaataactcccatcttccctctaccatgtccctggccactaccattctactttctgtctctatgatgtttactactctagaatcctct

SEQ ID NO: 890411 - DNA, 597 bp, Homo sapiens
tgaccaaattggaaaataatttagctgtttatatttcagagagaagatcaacacacacaggtactcgagtactgacatttccatattggtcatgacgggatcagtcctgtaaggtttgctactcatgagtactgtgctgcccattayctgttctacaccaaacccagctcctccctgggtctgccgaggatgggcagtggagcccttgggccaggagcccccaccagggccaggaatgtggctgcctctggctggtctccagggaggatgaggtttaacctttaacccagaatggcatagccatctggcacctctgccttttgttgtgtgttgcctttaagctctctcttcaggccttgtgatgcagtttactgactggcaaggttttctctcagttttctagtctccttagtgaggccatgttagggcagagtctaagaaaatcaaaaagatgcggtaccttatgacaaggagagaggaaaatgcttccgagcccttgtaccaataaactcctgaccaaggagtcagtgaacggaggttgctctacttcaaaatccagtttatcccagcccaagaggaactcttgttcctcacttc

SEQ ID NO: 890412 - DNA, 597 bp, Homo sapiens
tgaccaaattggaaaataatttagctgtttatatttcagagagaagatcaacacacacaggtactcgagtactgacatttccatattggtcatgacgggatcagtcctgtaaggtttgctactcatgagtactgtgctgcccattacctgttctacaccaaacccagctcctccctgggtctgccgaggrtgggcagtggagcccttgggccaggagcccccaccagggccaggaatgtggctgcctctggctggtctccagggaggatgaggtttaacctttaacccagaatggcatagccatctggcacctctgccttttgttgtgtgttgcctttaagctctctcttcaggccttgtgatgcagtttactgactggcaaggttttctctcagttttctagtctccttagtgaggccatgttagggcagagtctaagaaaatcaaaaagatgcggtaccttatgacaaggagagaggaaaatgcttccgagcccttgtaccaataaactcctgaccaaggagtcagtgaacggaggttgctctacttcaaaatccagtttatcccagcccaagaggaactcttgttcctcacttc

SEQ ID NO: 890413 - DNA, 548 bp, Homo sapiens
catctttttttttaagcactcatgtacaacttacaaaaatattatcctacacacaaagaaaacaaaacatctaaaaaataagttacactgtatacaatgtgatcacaaagcaataacactagaaattgttaacaaagtataaacaaatagaagaaaatgggttggagtttttaagtacagttattcctcaaaattcacaggattttggtttcaagacctctctcccaataccaaaacctctaatgctcaagtctctgatataaaaaggtatcatatttgcatataacctatgcacattyttctgtttaagtcatgtctagattatgaaaaaaaaaacctaatacagtgtaaatgccatgtaaatagttacactatattgtttagggaatgatgacaaggaaaaaagtctgtacattttcagtacagacacaatattttttaaatattttagatctatggttgattgactccatggatgcagaacccacagatatagaaggctgactgtacacacatttcatcaactcatattaaataaaaaattaaaa

SEQ ID NO: 890414 - DNA, 548 bp, Homo sapiens
catctttttttttaagcactcatgtacaacttacaaaaatattatcctacacacaaagaaaacaaaacatctaaaaaataagttacactgtatacaatgtgatcacaaagcaataacactagaaattgttaacaaagtataaacaaatagaagaaaatgggttggagtttttaagtacagttattcctcaaaattcacaggattttggtttcaagacctctctcccaataccaaaacctctaatgctcaagtctctgatataaaaaggtatcatatttgcatataacctatgcacattcttstgtttaagtcatgtctagattatgaaaaaaaaaacctaatacagtgtaaatgccatgtaaatagttacactatattgtttagggaatgatgacaaggaaaaaagtctgtacattttcagtacagacacaatattttttaaatattttagatctatggttgattgactccatggatgcagaacccacagatatagaaggctgactgtacacacatttcatcaactcatattaaataaaaaattaaaa

SEQ ID NO: 890415 - DNA, 496 bp, Homo sapiens
tgtttgttctgtttttttttttttcattgctgtttatggaggaccattgtacaaggaaaattaaagcttaaaaaagacagttctgccaatgttacatgggtggaaactgcactattgattctcatttgcctcatgagtcacccaggatttttccctatttcctgtcaatggaaattgtctggtagggttttaaagaataaactgtgtctcatggtcagggcaggcagaacagcattaatggtgaaaagcgtgtggcttttaggtaractgcctgggtttggagcctggctccacaacttactggttatgtgaccttgtgcaagtttcctaacatttttgcctcaaattccacatctataaatggagatgataatagtacctacttagtagagatgttatgaggattatatggattaatgcatgttaagctcttaaaatagtgtgtagcacatggaaagtgctcaacatgtatttgtcactgtaatcagctcaggtg

SEQ ID NO: 890416 - DNA, 624 bp, Homo sapiens
gtaacagagaggatgcatggagtagaatgttgaaactcacccggagcacacactaaaaagagagttgcccatgtagatagcagctctgttacagatcaccatcttccacttggagcatccaacctagtgagtttgcctagatgctcatactggaagccactgtgtgwtttctttgtccctggcatcaatggaagacatctttcctaatagactaccccatagatttcttgcttggtgtaaatctcagtagtcctgggggctgaccctaggagcctcagaactaaatcctggaaatcctacacagtctgtttttaagccaggctgtccaaatatacccccatatcactgtttttatgtaacatggcatcaaactgtcaaaatcttaactctggttgtatagattcccctgccttattccagaaaggattatgagtcaataatagatttagtgtaccaagataaaaacaggtgagtaaagaaatggaggtcagaggaaaataactttataaaaaatccaatgaagcccagggtaaggttagcacatcaagtgtgcatgatatggttccagaagtgtggctatgagctccttagcctccaaagcacaggcataaataagattcgtgg

SEQ ID NO: 890417 - DNA, 665 bp, Homo sapiens
atcccagaacttaaagtataataccaataaaaagttgaaaatgtgggatccccttacaatgaaggtgaggaaaaggaggctatgtgaacagatgcccaacacatatgcttaaagaccttaccttctgaacagttacatatagaaaaggagaagccattttcccaaaagaaaatggaatggtctacattaaagaaaatggtatggactacattatggcctcttttacatcttccctgaatatgtattttattcttttggagaaatatgctragcaggaagattgggatttaaaccttcaggagctgcagtgctttctctttttatgctaacttccttccttccttccttccttccttccttccctcctttttctttctttctttctttctttttctttttctttcacaaaggtgatggtgagaaaatgtttggatttttttattacagcttgatagtaatctcatgtttgtattatagctcatgtcttcctggatttgtctgtctttcttgaattgacttgtaagttgcttttaaatctcaactgtgtctgagaccaggatagtctttatctctctagtctctgtcttcgaattgtctcagcagagatacagcagcttttgttctgtgtttctcaggctatcattaaatgcaagactgcaagcctg

SEQ ID NO: 890418 - DNA, 582 bp, Homo sapiens
aactctggacttctcaggggagagagcaagagtccagagaataaaatcccacttatatttaaaacagaacaaatgtttaaccagcactttaatgcattcatctgcactgggtaagatgctataggagaggcgaagaagcccaaatactggtataagagaggaagaaataatttccccccamccttcctcttacctgtaacagacccttataacaaaaaacaggttaacaagagaaaagcagaagtttattaacatgtatgcctcatgtattcatgggagataccagggaaaaatgagtaaatctcaaagaggtgccttacagctctggcctatacagcatcttcaacaaaaacaacacattttgggagaagcgacaagacagagaaaggaccttgatacacattttccaggaaatactacacagccataagaagaatgaaatcatgtcttttgcaataacacggatgcagctggaagctgttatcctaagcaaatcaatacaggaacagaaaactgaacaatgtatgttctcacttagaagtgggagctaaacattgggtacacagagacagaggggagaaa

SEQ ID NO: 890419 - DNA, 530 bp, Homo sapiens
aagaccaccttgctgaggtaaggcatgcagacaagactagagaaacaaaacaaaacaaacaaacaaacaaacaaaaacgaaaaggaatgaacaaagcctccaagaaatattggactttgtaaaaagactgaacctacgattgattgaagtacctgaaggagacgggaagaatggaaacaagctgaaaagcacacttcaggatattacccaggaaaagttccccaaactagcaagacaaggcaatatgtgaattcaggaaatatagagaacaccacwaagatactcagtgagaagatcaaccccaagacaaataatcaccagattctccaaagtcaaaatgaaggaaaaaatgtcaagcgcaaccagggagaaaggccaggtcacctacaaaggaaagcctaacagactaaaagaggatctcttagcagaaactctacaggccagaagagattgggggccaatattcaacattcttaaagaaaagaatttccaacccagaatttcatatccagccaaactaagcttcataa

SEQ ID NO: 890420 - DNA, 593 bp, Homo sapiens
ggcctcttctagatttaagattccgggatgtcaagacacctctggctgcttagatagagtgctgagaaagagcagtccccaagagttccccatgccagggagatctctcgctagtgtattagttatctattgttgcataacaaattagcttaaattcagcagcttaaaacaacacatatttattatctcatacaatttctgagggttgtgaatctgagagtggcttagctgggtagttctggctcagtctctctcatgaagttgaagtcaagatgtcagccagggctgcagttatcaggctaaactgggactggagcctaggcctccaggctcactcacatgactgttggctgttggcctcagctccttaccacgtgggcctctccatagwgatgctcatgacatggcagctacctcccccgagagcaagtgatctgagagagaaagctgccaggatgaaagctgcaacgactttttataacttaacccaggaagtgacatgctatcacctattttattagctatacaaaccgaccctggtataatgtaggaggggcctgtataatgtgtgaatatcagaaagtgggaatctg

SEQ ID NO: 890421 - DNA, 619 bp, Homo sapiens
  misc_feature 1, 2, 3, 4, 5, 6, 7, 8, 9, 10, 11, 12, 13, 14, 15, 16, 17,18, 19, 20: n = A,T,C or G
nnnnnnnnnnnnnnnnnnnncacagcagacaccagtggatagtgctgtgcagcgtactcaagacccaagggcagagatgatcaatggaagggcagtgcaggacccactggctgtgaccatgttatttatttgtgccctacacacttcctaaaggatttctgaaaatggaaagagaagaccaaaacccgagcctgaagaaggaggaagaaaatatactccacacttcaactagagttgtaaagaatatgaaatggagctccacctttcgaggcagtcaaagaagggaggtaaaggaagggaagcagttattcttatctgataagaagaaacctaccagttcttcaggggtggccattttctttctgatactcagttgtaagaagtattccttggccgggygcggtggctcacgcctgtaatcccagcactttgggaggccaaggcggtcagatcatgaggtcaggagttcaagaccagcctggacaatatggtgaaaccctgtctctactaaaaatacaacaaaactagtcaggcgtggtgtcgcgcgcctttagtctcagctactcagggggctgaggcaggagaatcgcttgaacccaggaggtggcggtgcagtgag

SEQ ID NO: 890422 - DNA, 558 bp, Homo sapiens
attttaaatttgcatgtggttattggctcatatattgtgacaccttttggtcttgaaaaattacaggtggaatgtcacccttacctcaaccagagcaaactcctggagttctgcaagtccaaggacattgttctagttgcctacagtgccctgggatcccaaagagacccacagtggtaataagaatgtcaaagagttaacctatggcgggaattctgctgatgctgaaaaactcctattaaagcgaagttttaaaaattgtattataaaaaagctcaaagattaaaagcgaaaagcaacggtgtagtttgttcccatgtatcactactgagcttaaatgtcaccaacattctttccttcctgtttcatctatgtgactacttactcccaaccscactcctaaaataaattttaaagtggtctttaggtaagatttgcctaggctgtaatgctgtacaattttggcaaatggacatactctgtaacccacatccctaatgtggtatacaaacttgttatctcccaaagaagttattttttttccttctgagacaataa

SEQ ID NO: 890423 - DNA, 654 bp, Homo sapiens
tatgtctttcttggccctctttacctaccacaactcccatttcctcagctatataatctcaccatgctgaattgtgaatgaattatgagattaatagaccctcaaatgctagtgactgaggtgtcaatagcctttaccaagataagatcctttggagtttctctggatcctcaaggcatgactcttactccagtgtcatctttgtccacctgaagtccacctctggagagcccaacatcccttgactttggtttatttataaacgtgacgttccagttgctcaactactgcaggatctcaggactaaggagasagaaggctaaatagagaggagtttagaggaaagtttagaagcaggggaaatacaattttggttgccagagtaaagactcagtctccaaaaaagatctgaagaatcctcctttatgtaaaaccacaccaagattctgagaggaaacattttcaatgagaaaaatgtgggaagtaacttttctgtacccagaggctaagtataagtctgtgatctgccttatgagactgtgaatgcattgtcttactcatgtctgtggccctgtgtcaatatgactcctggcacatttaactgcttagaaggtactctttaatgtcacccaattaaaaagaacaaattgtaaa

SEQ ID NO: 890424 - DNA, 622 bp, Homo sapiens
aaccaatgcctaacaagttccagactaccccttatcttcccattttcttctgaaccctcctgacacttccaaactgtgctaattatccagttctaaagccactaccacattttcagacatttttagcaatgtcccactcctggtaacaattttccatattagtccattgtgcgytgctataaagtacccgaggccagataaaatatgccgaaagttgttttgacttaccattttgcagactgtacaaaaatcatggcaccagcatttagttttggtgagggctcaggaagcatttactcgtggtagaaggtgacagaggaggaaacatatcaaataacaagagatgaagagggaaaaaaagaaaatgtcaggctcctttttaaaccagatttcatgtgaactaatgcagtgaacactcattaccatggggagggcacccagccattcatgagggatgcccccagggcacaaacacctcccaccaggacccacttccatcattggggaattactttttaacatgagattaggaggggacaaatatccaaattgtatcaccatcaaactgtctaaattatacatttcaaaatttctctagattcttctgaatctaagtacatga

SEQ ID NO: 890425 - DNA, 677 bp, Homo sapiens
agaactctacaacccaaatcaatagaatatacattcttctcagcagcacattgcacttattctaaaattgaccacataattgctagtaaaacactcctcagcaaatgtaaaagaacagaaatcacaacaaactctccctcacaacacagtgcaatcacgacagaacccaggattaagaaactcactcaaaactgcacaactacttggaaactgaactacctgctcctgaatgactactgggtaaataacgaaatgaaggcagaaataaagatgttctttcaaaccaatgagaacaaagacacaatgtaccagaatatctgggacacatttaaagcagtgtgtagagggaaatttatagcactcaattcccataagagaaagcaggaaagatctaaaatcracaccctaacatcacaattaaaagaactagagaagcaagagcaaacaaattcaaaagctagcagaaggcaagaaataaccaagatcagagcagaactgaaggagatagaaccacaaaaaaaccttcaaaaaatagatgaatcaaggagctggttttttgaaaagataaacaaaatagaccactagcaagacaaataaagaagaaaagagagaagaatcaaatagacacaacaaaaaatgataaaggggatatcaccactgatcccacagaaatacaa

SEQ ID NO: 890426 - DNA, 620 bp, Homo sapiens
agagtttagtctgacattggcactctgagctttgacacccagaagctcagtgactcactgacttttgcagggagctctggcacagggtgacgccagcagcctcatggatggtacacccagctccctggcctcagtgcttccttggtttattctattctattctattctattctattctattctattctattctattctattctattctattattttattttattttatattgagataggatctcgctctgtcacccaggctagagtgcagtggtgcaatcttggctcactgcaacctctgcctcctgggttcaagagtttctcatgcctcagcctcccaagtagctgggactacaggcatgcaccacctggctaatttttgtatttttagtaaagatggggtttcaccattgttggccaggctggtctcraactcctggcctcaactgatccacccacctcagcctcccaaagtggtgagattacaggcgtgagccactgtgcccggccccttggtgttttttaaaatctctgttaactttgtctccactccgatggccactctcagaatctggtcatgactcagcatccccgtcacaccaaccttctaaatctctgctc

SEQ ID NO: 890427 - DNA, 591 bp, Homo sapiens
atttaaggttattattgatatgtgtggatttgaacctgtcataatgatgttagctggttatttttcagagttgtttatgtggttgctttatagtgtcactggtctttgtacttcagtgtgtttttctagtggctggtaaaggtctttcctttccataattagtgcttccttcaggagctcttgcarggcaggcctggtggtgacgaactccctccgcatttgcttgcctgaaaaggatcttatttcttcttcaattatgaagattagtttggccacatgaaattctggattgaaatttcttttctttaagaatgttgaatattagcccccaatctcttctggcttgtagggttcaactgagaggtctgctgttagtctgacaggcttaccttagtaggtgacctggcctttctctctagctgccttttaacattttttctttcattttgaccttggagaatctgatgactatgtgtcttggggatgatcttctgatggagtatcttactggggatctctccatttcctgaatttgaaagttggtctttctagctatgttggggaagttctcatggatgatatcctaaaata

SEQ ID NO: 890428 - DNA, 630 bp, Homo sapiens
catagagcaggtttgaatcactccttttgtagtatctggaagtggacatttggagcgctttcaggcctatgttggaaaaggaaatatcttcccataacaactagacagaagcattctcagaaacttatttgagatgtgtgtactcaactaagagaattgaaccaccgttttgaaggagcagttttgaaacactctttttctggaatctgcaagtggmtatttggctagctttggggatttcgctggaagcgggaatacatataaaaagcacacagcagcgttctgagaaactgctttctgatgtttgcattcaagtcaaaagttgaacactccctttcatagagcagtcctgaaacactccttttttagtatctggacctggacttttggagcgctttcagggctaaggtgaaaaaggaaatatcttcccataaaaactggacagaagcattctcagaaacttgtttatgctgtatctactcaactaacaaagttgaacctttcttttgatagagcagttttgaaatgctctttttgtggaatctgcaagtggatatttggctagttttgaggatttcgttggaagcgggaattcatacaaattgcagactgcagcgttctgagaaacat

SEQ ID NO: 890429 - DNA, 681 bp, Homo sapiens
tgtgtgtcctcaactaaaggagtagaaccttccttttcatagagaagttttgaaacgctctttttgtggaatctgcaagtggatatttggctagttttgaggatttcgttggaagcgggaattcatacaaattgcagactgcagcgttctgagaaacatctttgtgatgtttgtattcaggacacagagttgaacattccctatcatagagcaggtttgaatcactccttttgtagtatctggaagtggacatttggagcgctttcaggcctatgttggaaaaggaaatatcttcccataacaactagacagaagcattctcagaaacttatttgagatgtgtgtactcaactaagagaattgaaccaccgttttgaaggagcagttttgaaacactctttttctggaatctgcaagtggatatttgrctagctttggggatttcgctggaagcgggaatacatataaaaagcacacagcagcgttctgagaaactgctttctgatgtttgcattcaagtcaaaagttgaacactccctttcatagagcagtcctgaaacactccttttttagtatctggacctggacttttggagcgctttcagggctaaggtgaaaaaggaaatatcttcccataaaaactggacagaagcattctcagaaacttgtttatgctgtatc

SEQ ID NO: 890430 - DNA, 667 bp, Homo sapiens
ctagttttgaggatttcgttggaagcgggaattcatacaaattgcagactgcagcgttctgagaaacatctttgtgatgtttgtattcaggacacagagttgaacattccctatcatagagcaggtttgaatcactccttttgtagtatctggaagtggacatttggagcgctttcaggcctatgttggaaaaggaaatatcttcccataacaactagacagaagcattctcagaaacttatttgagatgtgtgtactcaactaagagaattgaaccaccgttttgaaggagcagttttgaaacactctttttctggaatctgcaagtggatatttggctagctttggggatttcsctggaagcgggaatacatataaaaagcacacagcagcgttctgagaaactgctttctgatgtttgcattcaagtcaaaagttgaacactccctttcatagagcagtcctgaaacactccttttttagtatctggacctggacttttggagcgctttcagggctaaggtgaaaaaggaaatatcttcccataaaaactggacagaagcattctcagaaacttgtttatgctgtatctactcaactaacaaagttgaacctttcttttgatagagcagttttgaaatgctctttttgtggaatctgcaagtgg

SEQ ID NO: 890431 - DNA, 604 bp, Homo sapiens
ggaattcatacaaattgcagactgcagcgttctgagaaacatctttgtgatgtttgtattcaggacacagagttgaacattccctatcatagagcaggtttgaatcactccttttgtagtatctggaagtggacatttggagcgctttcaggcctatgttggaaaaggaaatatcttcccataacaactagacagaagcattctcagaaacttatttgagatgtgtgtactcaactaagagaattgaaccaccgttttgaaggagcagttttgaaacactctttttctggaatctgcaagtggatatttggctagctttggggatttcgctggaagcgggaatacatrtaaaaagcacacagcagcgttctgagaaactgctttctgatgtttgcattcaagtcaaaagttgaacactccctttcatagagcagtcctgaaacactccttttttagtatctggacctggacttttggagcgctttcagggctaaggtgaaaaaggaaatatcttcccataaaaactggacagaagcattctcagaaacttgtttatgctgtatctactcaactaacaaagttgaacctttcttttgatagagca

SEQ ID NO: 890432 - DNA, 568 bp, Homo sapiens
gatgtgtgtactcaactaagagaattgaaccaccgttttgaaggagcagttttgaaacactctttttctggaatctgcaagtggatatttggctagctttggggatttcgctggaagcgggaatacatataaaaagcacacagcagcgttctgagaaactgctttctgatgtttgcattcaagtcaaaagttgaacactccctttcatagagcagtcctgaaacactccttttttagtatctggacctggacttttggagcgctttcagggctaaggtgaaaaaggaaatatcttcccataaaaactggacagaagcattctcagaaacttktttatgctgtatctactcaactaacaaagttgaacctttcttttgatagagcagttttgaaatgctctttttgtggaatctgcaagtggatatttggctagttttgaggatttcgttggaagcgggaattcatacaaattgcagactgcagcgttctgagaaacatctttgtgatgtttgtattcaggacacagagttgaacattccctatcatagagcaggttggaatcactcct

SEQ ID NO: 890433 - DNA, 693 bp, Homo sapiens
tgcagactgcagcgttctgagaaacatctttgtgatgtttgtattcaggacacagagttgaacattccctatcatagagcaggtttgaatcactccttttgtagtatctggaagtggacatttggagcgctttcaggcctatgttggaaaaggaaatatcttcccataacaactagacagaagcattctcagaaacttatttgagatgtgtgtactcaactaagagaattgaaccaccgttttgaaggagcagttttgaaacactctttttctggaatctgcaagtggatatttggctagctttggggatttcgctggaagcgggaatacatataaaaagcacacagcagcgttctgagaaactgctttctgatgtttgcattcaagtcaaaagttgaacactccctttcatagagcagtcctgaaacactccttttttagtatctggacctggacttttggagcgctttcagggctaaggtgaaaaaggaaatatcttcccataaaaactggacagaagcattctcagaaacttgtttatgctgtatctactcwactaacaaagttgaacctttcttttgatagagcagttttgaaatgctctttttgtggaatctgcaagtggatatttggctagttttgaggatttcgttggaagcgggaattcatacaaattgcagactgcagcgttct

SEQ ID NO: 890434 - DNA, 593 bp, Homo sapiens
aatgctctttttgtggaatctgcaagtggatatttggctagttttgaggatttcgttggaagcgggaattcatacaaattgcagactgcagcgttctgagaaacatctttgtgatgtttgtattcaggacacagagttgaacattccctatcatagagcaggttggaatcactccttttgtagtatctggaagtggacatttggagcgctttcaggcctatgttgaaaaaggaaatatcttcccataacaactagacacaagcattctcagaaacttgtttgtgatgtgtgccctctactgacagagttgaacctttcttttcatagagcagttttgaaacactctttttgtagaatctgcaagaggatatttgcatagctttgaggatttcgtgggaaackggattgtcttcaggtaaaatctagacagaagcattctcagaaacttctttgggatgtttgcattcaagtcacagagtagaacattccctttggtagagcaggtttcaaacactctttttgtagtatctggaagtggacatttggagcgctttcaggcctatgttggaaagggaaatatcttcccgtaacaa

SEQ ID NO: 890435 - DNA, 604 bp, Homo sapiens
gttttgaggatttcgttggaagcgggaattcatacaaattgcagactgcagcgttctgagaaacatctttgtgatgtttgtattcaggacacagagttgaacattccctatcatagagcaggttggaatcactccttttgtagtatctggaagtggacatttggagcgctttcaggcctatgttgaaaaaggaaatatcttcccataacaactagacacaagcattctcagaaacttgtttgtgatgtgtgccctctactgacagagttgaacctttcttttcatagagcagttttgaaacactctttttgtagaatctgcaagaggatatttgcatagctttgaggatttcgtgggaaacgggattgtcttcaggtaaaatctagacagaagcattctcagaaacttctttgggatgtttgcattcaastcacagagtagaacattccctttggtagagcaggtttcaaacactctttttgtagtatctggaagtggacatttggagcgctttcaggcctatgttggaaagggaaatatcttcccgtaacaactaggcagaagcattctcagaaacttatttgagatgtgtgtactcaactaa

SEQ ID NO: 890436 - DNA, 627 bp, Homo sapiens
cgggaattcatacaaattgcagactgcagcgttctgagaaacatctttgtgatgtttgtattcaggacacagagttgaacattccctatcatagagcaggttggaatcactccttttgtagtatctggaagtggacatttggagcgctttcaggcctatgttgaaaaaggaaatatcttcccataacaactagacacaagcattctcagaaacttgtttgtgatgtgtgccctctactgacagagttgaacctttcttttcatagagcagttttgaaacactctttttgtagaatctgcaagaggatatttgcatagctttgaggatttcgtgggaaacgggattgtcttcaggtaaaatctagacagaagcattctcagaaacttctttgggatgtttgcattcaagtcacagagtagaacattccctttggtagagcaggtttcaaacacwctttttgtagtatctggaagtggacatttggagcgctttcaggcctatgttggaaagggaaatatcttcccgtaacaactaggcagaagcattctcagaaacttatttgagatgtgtgtactcaactaagagaattgaaccaccgttttgaaggagcagttttgaaacactctt

SEQ ID NO: 890437 - DNA, 621 bp, Homo sapiens
aaacatctttgtgatgtttgtattcaggacacagagttgaacattccctatcatagagcaggttggaatcactccttttgtagtatctggaagtggacatttggagcgctttcaggcctatgttgaaaaaggaaatatcttcccataacaactagacacaagcattctcagaaacttgtttgtgatgtgtgccctctactgacagagttgaacctttcttttcatagagcagttttgaaacactctttttgtagaatctgcaagaggatatttgcatagctttgaggatttcgtgggaaacgggattgtcttcaggtaaaatctagacagaagcattctcagaaacttctttgggatgtttgcattcaagtcacagagtagaacattccctttggtagagcaggtttcaaacactctttttgtagtatctggaagtggacatttggagcgctttcaggcctatgttggaaasggaaatatcttcccgtaacaactaggcagaagcattctcagaaacttatttgagatgtgtgtactcaactaagagaattgaaccaccgttttgaaggagcagttttgaaacactctttttctggaatctgcaagagtatatttgcctag

SEQ ID NO: 890438 - DNA, 514 bp, Homo sapiens
tttcatagagcagttttgaaacactctttttgtagaatctgcaagaggatatttgcatagctttgaggatttcgtgggaaacgggattgtcttcaggtaaaatctagacagaagcattctcagaaacttctttgggatgtttgcattcaagtcacagagtagaacattccctttggtagagcaggtttcaaacactctttttgtagtatctggaagtggacatttggagcgctttcaggcctatgttggaaagggaaatatcttcccktaacaactaggcagaagcattctcagaaacttatttgagatgtgtgtactcaactaagagaattgaaccaccgttttgaaggagcagttttgaaacactctttttctggaatctgcaagagtatatttgcctagccttgaggatttcgttggaaacgggattgtcttcagatcaaatctagacagaagcattctcagaaacttctttgggatgtttgcattcaagtcacagagtagaacattccct

SEQ ID NO: 890439 - DNA, 562 bp, Homo sapiens
tgcattcaagtcacagagtagaacattccctttggtagagcaggtttcaaacactctttttgtagtatctggaagtggacatttggagcgctttcaggcctatgttggaaagggaaatatcttcccgtaacaactaggcagaagcrttctcagaaacttatttgagatgtgtgtactcaactaagagaattgaaccaccgttttgaaggagcagttttgaaacactctttttctggaatctgcaagagtatatttgcctagccttgaggatttcgttggaaacgggattgtcttcagatcaaatctagacagaagcattctcagaaacttctttgggatgtttgcattcaagtcacagagtagaacattccctttggtagagcaggtttgaaacactctttttttagtatatggaagtggacatttggagcgctttcaggcctacgttggaaaaggaaatatcttcccataacaactagacagaagcattctcagaaactagtttctgatgtgtgtcctcaactaacacagttgaacatttctttagacagaacagttttga

SEQ ID NO: 890440 - DNA, 503 bp, Homo sapiens
tgtgatgtgtgccctctactgacagagttgaacctttcttttcatagagcagttttgaaacactctttttgtagaatctgcaagaggatatttgcatagctttgaggatttcgtgggaaacgggattgtcttcaggtaaaatctagacagaagcattctcagaaacttctttgggatgtttgcattcaagtcacagagtagaacattccctttggtagagcaggtttcaaacactctttttgtagtatctggaagtggacatttggagcgctttcaggcctatgttggaaagggaaatatcttcccgtaacaactaggcagaagcattctcagaaacttatttgagatgtgtgtactcaactaagasaattgaaccaccgttttgaaggagcagttttgaaacactctttttctggaatctgcaagagtatatttgcctagccttgaggatttcgttggaaacgggattgtcttcagatcaaatctagacagaagcattctca

SEQ ID NO: 890441 - DNA, 675 bp, Homo sapiens
attccctttggtagagcaggtttcaaacactctttttgtagtatctggaagtggacatttggagcgctttcaggcctatgttggaaagggaaatatcttcccgtaacaactaggcagaagcattctcagaaacttatttgagatgtgtgtactcaactaagagaattgaaycaccgttttgaaggagcagttttgaaacactctttttctggaatctgcaagagtatatttgcctagccttgaggatttcgttggaaacgggattgtcttcagatcaaatctagacagaagcattctcagaaacttctttgggatgtttgcattcaagtcacagagtagaacattccctttggtagagcaggtttgaaacactctttttttagtatatggaagtggacatttggagcgctttcaggcctacgttggaaaaggaaatatcttcccataacaactagacagaagcattctcagaaactagtttctgatgtgtgtcctcaactaacacagttgaacatttctttagacagaacagttttgaaacactctttttgtggaatctgcaagtggatatttggctagatttgaggatttcgttggaaacgggattacatataaaaagcagtcagcagcattctcagaaagttctttgtgatgattgcattcaagtcacagaat

SEQ ID NO: 890442 - DNA, 648 bp, Homo sapiens
cgggattgtcttcaggtaaaatctagacagaagcattctcagaaacttctttgggatgtttgcattcaagtcacagagtagaacattccctttggtagagcaggtttcaaacactctttttgtagtatctggaagtggacatttggagcgctttcaggcctatgttggaaagggaaatatcttcccgtaacaactaggcagaagcattctcagaaacttatttgagatgtgtgtactcaactaagagaattgaacmaccgttttgaaggagcagttttgaaacactctttttctggaatctgcaagagtatatttgcctagccttgaggatttcgttggaaacgggattgtcttcagatcaaatctagacagaagcattctcagaaacttctttgggatgtttgcattcaagtcacagagtagaacattccctttggtagagcaggtttgaaacactctttttttagtatatggaagtggacatttggagcgctttcaggcctacgttggaaaaggaaatatcttcccataacaactagacagaagcattctcagaaactagtttctgatgtgtgtcctcaactaacacagttgaacatttctttagacagaacagttttgaaacactctttttgtggaatctgcaag

SEQ ID NO: 890443 - DNA, 631 bp, Homo sapiens
caagtcacagagtagaacattccctttggtagagcaggtttcaaacactctttttgtagtatctggaagtggacatttggagcgctttcaggcctatgttggaaagggaaatatcttcccgtaacaactaggcagaagcattctcagaaacttatttgagatgtgtgtactcaactaagagaattgaaccaccgttttgaaggagcagttttgaaacactctttttctggaatctgcaagagtatatttgcctagccttgaggatttcgttggaaacgggattgtcttcagatcaaatctagacagaagcattctcagaaacttctttgggatgtttgcattcaagtcacagagtagaacattccctttggtagagcaggtttgaaacactctttttktagtatatggaagtggacatttggagcgctttcaggcctacgttggaaaaggaaatatcttcccataacaactagacagaagcattctcagaaactagtttctgatgtgtgtcctcaactaacacagttgaacatttctttagacagaacagttttgaaacactctttttgtggaatctgcaagtggatatttggctagatttgaggatttcgttggaaacgggattacatat

SEQ ID NO: 890444 - DNA, 592 bp, Homo sapiens
taaaaagcagtcagcagcattctcagaaagttctttgtgatgattgcattcaagtcacagaattgaacattccctttcacagagcaggtttgaaacactctttttgtagtgtgtgtaagtggacatttggagcactttccggccwaaggtgaaaaaggaaatatcttcccataaaaactagacagaagcattctcagaaacttactcgtgatgtgtgtcctcaactaaaggagtagaacctttcttttcatagagaagttttgaaacgctctttttgtggaatctgcaagtggatatttggctagtttggaggatttcgttggaagcgggaattcatacaaattgcagactgcagcgttctgagaaacatctttgtgatgtttgtattcaggacacagagttgaacattccctatcatagagcaggtttgaatcactccttttgtagtatctggaagtggacatttggagcgctttcaggcctatgttggaaaaggaaatatcttcccataacaactagacagaagcattctcagaaacttatttgagatgtgtgtactcaactaagagaattgaaccaccgttttgaagga

SEQ ID NO: 890445 - DNA, 703 bp, Homo sapiens
tgcaagtggatatttggctagatttgaggatttcgttggaaacgggattacatataaaaagcagtcagcagcattctcagaaagttctttgtgatgattgcattcaagtcacagaattgaacattccctttcacagagcaggtttgaaacactctttttgtagtgtgtgtaagtggacatttggagcactttccggcctaaggtgaaaaaggaaatatcttcccataaaaactagacagaagcattctcagaaacttactcgtgatgtgtgtcctcaactaaaggagtagaacctttcttttcatagagaagttttgaaacgctctttttgtggaatctgcaagtggatatttggctagtttggaggatttcgttggaagcgggaattcatacaaattgcagactgcagcgttctsagaaacatctttgtgatgtttgtattcaggacacagagttgaacattccctatcatagagcaggtttgaatcactccttttgtagtatctggaagtggacatttggagcgctttcaggcctatgttggaaaaggaaatatcttcccataacaactagacagaagcattctcagaaacttatttgagatgtgtgtactcaactaagagaattgaaccaccgttttgaaggagcagttttgaaacactctttttctggaatctgcaagtggatatttggctagctttgg

SEQ ID NO: 890446 - DNA, 707 bp, Homo sapiens
actgcagcgttctgagaaacatctttgtgatgtttgtattcaggacacagagttgaacattccctatcatagagcaggtttgaatcactccttttgtagtatctggaagtggacatttggagcgctttcaggcctatgttggaaaaggaaatatcttcccataacaactagacagaagcattctcagaaacttatttgagatgtgtgtactcaactaagagaattgaaccaccgttttgaaggagcagttttgaaacactctttttctggaatctgcaagtggatatttggctagctttggggatttygctggaagcgggaatacatataaaaagcacacagcagcgttctgagaaactgctttctgatgtttgcattcaagtcaaaagttgaacactccctttcatagagcagtcttgaaacaccccttttgtagtatctggaactggacttttggagcgatttcagggctaaggtgaaaaaggaaatatcttcccataaaaactggacagaagcattctcagaaacttgtttatgctgtatctactcaactaacaaagttgaacctttcttttgatagagcagttttgaaatggtctttttgtggaatctgcaagtggatatttggctagttttgaggatttcgttggaagcgggaattcatacaaattgcagactgcagcgttctgagaaacatctttgtgatg

SEQ ID NO: 890447 - DNA, 610 bp, Homo sapiens
gggaattcatacaaattgcagactgcagcgttctgagaaacatctttgtgatgtttgtattcaggacacagagttgaacattccctatcatagagcaggtttgaatcactccttttgtagtatctggaagtggacatttggagcgctttcaggcctatgttggaaaaggaaatatcttcccataacaactagacagaagcattctcagaaacttatttgagatgtgtgtactcaactaagagaattgaaccaccgttttgaaggagcagttttgaaacactctttttctggaatctgcaagtggatatttggctagctttggggatttcgctggaagcgrgaatacatataaaaagcacacagcagcgttctgagaaactgctttctgatgtttgcattcaagtcaaaagttgaacactccctttcatagagcagtcttgaaacaccccttttgtagtatctggaactggacttttggagcgatttcagggctaaggtgaaaaaggaaatatcttcccataaaaactggacagaagcattctcagaaacttgtttatgctgtatctactcaactaacaaagttgaacctttcttttgatagagcagtttt

SEQ ID NO: 890448 - DNA, 627 bp, Homo sapiens
atttggctagctttggggatttcgctggaagcgggaatacatataaaaagcacacagcagcgttctgagaaactgctttctgatgtttgcattcaagtcaaaagttgaacactccctttcatagagcagtcttgaaacaccccttttgtagtatctggaactggacttttggagcgatttcagggctaaggtgaaaaaggaaatatcttcccataaaaactggacagaagcattctcagaaacttgtttatgctgtatctactcaactaacaaagttgaacctttcttttgatagagcagttttgaaatggtctttttgtggaatctgcargtggatatttggctagttttgaggatttcgttggaagcgggaattcatacaaattgcagactgcagcgttctgagaaacatctttgtgatgtttgtattcaggacacagagttgaacattccctatcatagagcaggttggaatcactccttttgtagtatctggaagtggacatttggagcgctttcaggcctattttggaaagggaaatatcttcccgtaacaactatgcagaagcattctcagaaacttgtttgtgatgtgtgccctctactgacagagttgaaccttgcttt

SEQ ID NO: 890449 - DNA, 558 bp, Homo sapiens
gtcagcaacccaacattgcaactaaaagaactagagaaccaatactaaacaaatcccaaagctagcaaaagacaagaaataaccaaaatcagatctgaactgaaggagacagggacactaaaaaccattgaaaagatcaatgaatccagaagctgtttttctgaaaaaaattartaaaatagactattagctagaataataaagtaaaaaacagaaaagattcaaataaatacaatcagaaatgataagggggatattaccaatgaccccacagaaatacaaacaaccatcagagaatattatgaacacttctatgcacataaaatagaaaatctagaagtaatagataaatttctgtacacatacacacacctaagactcaaccaggaagaagtcaaatccctgatcagaccaataatgagttctgaaattgagggagtaataaatagcctatcaacctaaaaaagcccaggaccagatggattcacagctgaattctaccaggtgtactaagaagatcctgtaccatacctactgatgctattccaaaaaattgaa

SEQ ID NO: 890450 - DNA, 620 bp, Homo sapiens
ttacaaaagagaaaaccaagatctagaaacaataagcaacttatccaaagtcagaagtatttagtaacagaaataaagataaaatataggcttccaaatagtcttctttagttctaatttaaagaccaacctattttatcgtatgtgtacctaaaagtttattaaaaagcacagcaagctaaaaagtaattttacaaacagtagggacatgtaaaacaaaaatatttttcaaggaaacaaaacaaaaccctttagaataatattttargttggtcagaaatgcaactatttcaacccagtgcatttaattacagataattttataattaaaacttatctttactctgaataaataatggccaaattttgctaatatggattaaggcccaggcaattggacttgtatttaaagaaatgtccagatttgtcattaattaagttgaaattattacagccacttttttcctttaatttagtaatgattaagaatggcatgttgctcagagctaagcaacaaagaacaggtatgctgtcttatgattagagagcaagactaggagccagaacttgtgagccttattagagaattttgtaaagcactttgaagatgaaaagaacta

SEQ ID NO: 890451 - DNA, 702 bp, Homo sapiens
tccatagtgaaaagcatggcttctgttatccttaatgtattaactcatttgatcagtctctttgaatgtagccagtgttctgttgcagccatcccttcttccatataaacatattcattcccaaactcaggttctaactccctgtgtttattttctcctcctgcatgaagtcctcattgtatttggcctctgacaccaagtaaaagctctcctcaccctgcaaaggttttgaagcctcataccaggctggccctgatgcaggacaccagccttgggctctgacatcccacactagaccactcttctacggaaacactctccttactctacttggaacctgatacctgaactggctcacccctctgaatgggtgcccttctcaccctgcagaaggttctggcagcccattctgtgttactatgtgttgccctcaatgaaatgtcttctttaccccaccaaggctctacacccsaggcaaggccatccctctgtggaaatgttctccttattctgctcaggatctgatggccaccaccaggctgcccatctgggctctctccccacgccaagtccacctcttcatatctttcttcccatcctggcatggacatcctgttcaccctgctggtgtgccacgtgccactcctctgtgaggacaccctcctcaccctgcttggacataattgattttttttaactttt

SEQ ID NO: 890452 - DNA, 640 bp, Homo sapiens
aaccaatatagttctacaaggcaaacttgtaatcatgttactccccaaatacaaaaatttttggatgatattcaaggttctttgacaatttggaccttgctttcatctccagttacagctcctctggtatattcttaatctttcctgaatacacatacattcattcattcattcatccatccatccatttgtccacagatgtttatatgtcagctatgtggtgctgtcctaggtactttgaagatacagaggtaaataaatatgactgccgtgattattgcccattagtgcttatagaatgccatgtatattatttctgtctttaaccatgctatttcaaatgtacttttactatttatagaggttctattccttttttataccctactcaagtgtcatctmttctaaagcgttttatgactttctcaggtagtgcttctttgtgctccagtaataatttatagtaatatctctattatagtatttactgtatgttatacttacttgcttatagtggatctctcccattaggttgaattttagggcaagagaaagatgaaagaggaacgtagaaataaggattgaggcaagggatagaaagaggcaagaagaggagagaaggaaaacagaagcagtatga

SEQ ID NO: 890453 - DNA, 641 bp, Homo sapiens
tatatctttttaggtttgcgttatgaccaaatgggaaatgtacataggccatttctgttgcacaccaaagtatgatggctattgcaagcaatgtgagattgtttcagttgcaacctgaattagccacttttcccaagaayatcaggggtttttttttttttttttttgaaagagctactaacagatgagatacagttattcatgtttgggtatagggcagacattttcttgaaaattaatgtcagactgtcagttcaggaaaacaatcatcactctttgttgctaatgataaaattaaagctttcaagagaaaattgaaactttggaaaatgtaatctgccatttttaatatgacagttttctagtacttaaaaagtttccgatgagattggaggtgatattaatgaatgccacttatgatattgcctagtaaaatgtgttaacatttgggagatctgcctaactcagggaacgaataggagtttatgaatgaataaaagattcattcaaactgaaagttagaggcacagatgtataaaattttattgatataatttgattctacattgcagcaacatttaagaaattacctcttgtctacttttgatattgtatcaaagaagaatattcacaaatatcta

SEQ ID NO: 890454 - DNA, 564 bp, Homo sapiens
tggtcagatgcagtggcccaggcctgtaatcccagcactttgggaggccgaggcaccatggatcacctgaggtcaggatttcaagaccagcctgaccaatatggtgaaaccctgtctctactaaaaatacaaaaaattagccaggcttggtggcatgcacctgtagtcctagctactggagaggctgagaccgggtaattgcttgaagccaggaggtggaggttgcagtgagccaagattgcaccactgcactccagcctgggcaacatagcaagactccatctcaaaaaaaaaaaaaaaaatatatatatatatatatatatayacacacacacatatatacacactttgtctctatttcacacgctcaatttttctcttcctttttgaatataaggaatatgctatggactgaacgtgtaccccccaaaattcacatgttaaagccttaaaccctaatgtggatttatagaatttggaggtatggcctctaagaggtttggacctggtaaggggaggaagagtgacctgactgctctctctttctcatgctctgccatgtga

SEQ ID NO: 890455 - DNA, 661 bp, Homo sapiens
ttaagtcttttatgcattttgagttaatttttgtttatggtgtgagatataggtctaatttcattcttctgcacgtggatatccagctgtcccaacaccatttattgaagagacttttctttcactattatgtattcttggcacccttgtcaaaaattagttgaccatatatgcrtgggtttatttctgtgctttttattctcttccattggactatatgtctgttttcacatcagtatgatattgttttgattactaaagcttcgtaatatacttggaaatcagggaacgtgatgcctccagttttgttcttctcaaaattgctttggctatttggtgtcttttgtggttccaaattttagaattgttttctgtatctatgaaaaatgcaattggaattttcatagggattgcattaaatccgtagattgctttaggtagtatggacatccaatttcacatcttaagagactagaacagcaagagcaaactaagctcaaagttggcagaaggaaggaaataatgaagatcagagcagaaataaatgaaatagagattagaaagataatataaaagattaattaagagttttttgaaaaaatcaacaaaattgacaaacctttatttagactaaccaggaaaaaaagatgaatcaaatgaa

SEQ ID NO: 890456 - DNA, 673 bp, Homo sapiens
ttaataccttgtggaattgctgtcaagtcaaggtttaaagaaactttagtaacgttcaaagaggcatctatatgacagtgaagttcttctacatggaaagggtatatggagataatatagccaatgtggaaactaacgttaattagggaattgggtaagggtaaacttggctcctgggatatggaacaaacttctgtcttcagttaacaccatacaattttaccaacagagctgagttctttgtaactatgtataaatgcacctcatgctatatcctcctgatccccagagcatgagtaactgctagagaactggagggtaatttgcaaggtctctaagcctgttattgattttcactggttaaaacccataagtgggctgttcacacatcctgagaatatggattctttcatccctagggccaccagctggctagaatctccaagagacttcaggcctcatgctgatcatcatgctgcttctctctgttctctattaatgcttaggagggatgggtgggggsattgaaggcagttgagcttcctgcctccatccaagtgctgaaaagaaaaggactacatatcagggttcatgtttcagcatgaagatgttgtgtgaactgattccacgtatacatcccttcaacttctctttgtccaggtcagtgatgctg

SEQ ID NO: 890457 - DNA, 635 bp, Homo sapiens
gaaactcactcaaaactgcacagctacatggaaactgaacaacctgctcctgaatgactactgggtaaataacgaaatgaaggcagaaataaagatgttctttgaaaccaatgagaaaaaagacacaacataccagaatctctgggacacatttaaagcagtgtgtagaaggaaatttatagcactaaatgtccacaagagaaagcaggaaagatctaaaatcgacaccctaacatcacaattaaaagaactagagaagcaagagcaaacaaattcaaaagctagcagaaggcaagaaataactaaaatcagagcagaactgaaagagatagagacacaaaaaacmcttcaaaaaaaatcaatgaatgcaggagctggttttttgaaaagatcaataaatagatagactgctagccagactaataaagaagaaaagagacaagaatcaaatagacagaataaaaaatgataaaggggatgtcaccaccaatttctgtgtattgtcattacacagaaatacaaactaccatcagagaatactatgaacacctctacacaaataaactagaaaatctagaagaaatggacaaattcctggaaacatacaccctcccaagactaaaccaggaagaagt

SEQ ID NO: 890458 - DNA, 591 bp, Homo sapiens
aagatgtacagacgtacagaatttagtgagcaagggtgaaagtggtattaggtcagacaaataggtcaggcaagtaagtgtatgaaaagatgctcaaaatcatatgtcattagggaatttcaaattaaaacagtgagacaccactatgtacttattagaatacggaaaatccagaacactgacaccaccaaatgctggtgaggatgtggagaaacaggaactctggattttttttttttttttttttttttgctggkggggattcaaaatgatattgaaacttagaaccacagtttgacagtttcttagagaactaaacatactcttaccatatgatccagcaattgtgctcgttatctatccaaacgagttgaaaacttacatgcgcacagtaacctgcacacaaatgtctataggcagcctgattcataattgccaaaacttggaagcaaccaagatgtccttcagtaggtgaatggacaagtaaactgtgtgcatctagaaaatgaaatgttaattcagcaataaaaataaatgagtttgtatgaagccaaggaaagaaatggaaaaagcttaaatgtatatttaaag

SEQ ID NO: 890459 - DNA, 591 bp, Homo sapiens
aagatgtacagacgtacagaatttagtgagcaagggtgaaagtggtattaggtcagacaaataggtcaggcaagtaagtgtatgaaaagatgctcaaaatcatatgtcattagggaatttcaaattaaaacagtgagacaccactatgtacttattagaatacggaaaatccagaacactgacaccaccaaatgctggtgaggatgtggagaaacaggaactctggattttttttttttttttttttttttgctggtggggattcaaaatgatattgaaacttaraaccacagtttgacagtttcttagagaactaaacatactcttaccatatgatccagcaattgtgctcgttatctatccaaacgagttgaaaacttacatgcgcacagtaacctgcacacaaatgtctataggcagcctgattcataattgccaaaacttggaagcaaccaagatgtccttcagtaggtgaatggacaagtaaactgtgtgcatctagaaaatgaaatgttaattcagcaataaaaataaatgagtttgtatgaagccaaggaaagaaatggaaaaagcttaaatgtatatttaaag

SEQ ID NO: 890460 - DNA, 662 bp, Homo sapiens
aattcttccttttgcttgctgaaacctgctattgaaaacttctagtatgttttttgttttaattattgcacttttcagctccagaatttctttttggttcctttttataatttctgtctctattgatttctctttcatgtattgttctcctagtttcctttagctctttgtctrttaattcctttagctctttgagcatatttaacacagttgctttaaagtctttgtctaatacgttcaatgtctttgcctcagggaaagttgctgctcatttcttctgtaagtgggccatacttgtttccttaaatgtctcataatttttagttaaaactggacaatttgaatactgtaatctggtaattatggaaatcacaatctagttctccttagaatttgtttttattgcttgttgtaggctttatctatttgttcagtgatttttctaaactatttttgtaaagtttgtattctttgtcatgcatggtctctgaagtctttgttccttgcttgcattgagctagtgttttgatgaagatttccttgaatgccaggagccaaaaggcatgaagggaggggcaagagagaaggagagaaagggcatgagggagagacagggagcgggagagaagagaaaagcaaagaaataaaaaataaaaaatatc

SEQ ID NO: 890461 - DNA, 576 bp, Homo sapiens
ggatttctcatatgcaagtttgaatctttccctagtagttaacactgtgactaacacatattggctgttagatgactaacttagtaaaaggttgcctaccttttatgagatggaaaacaattaaaaatattttaaacaagaaataaatctttttctagctatattgtgtgtagtgctgctaagtaaaatttgacagtgaatagtttactcttttttaaattttgtttttttttttttgagctggagtctcactatgttgcccaggatggagagcagtggcgccatctcagctcactgcaacctccgcttcccaggttcaactgattctcctgcctcagcttcccagctagatgggactacaggtgtgcaccaccacacctagtgaattttttttttttttttttttttttgkatttttagtagaggtgggatttcactatgttggccaggctggtctcaaactcctgacctcaggtgatctgcctgccttggccttccaaagcgctgggattataggcaagagccagtgaacctggcctaaaaaattgtttttaacctgtgagcactccttaatat

SEQ ID NO: 890462 - DNA, 597 bp, Homo sapiens
tatgaattacagacccttcagacatcaaaaggataaccagggaatactacagaccactctacacatataaatttgacaatttagatgaaatggaccattaaataacacaaactaccctaactaccccaatacaaaatagagaacttaaatagccctgtaactattaagaaaattaaatcttaattatctccccccaaaaaaactctattttcactgaaaaattctaccaaacattkaaagacttgacacgaattctatacaatctcattcagaactaaaagaggaaacacttcccaatttattttatgaaatgagtattacctgatagcaacataagacaaaaacagtattaaacagaacactacaaacaaatatcccttattaatacagacacaaaactctttatgaaaacattagcaaatagaacatagcaacacatgaaaagaattatacatcatgacctattggagtttattccagggatgtaaggttggtgcaacattggaaaatccattaatataatatcatattaacaggttaagcaagaaaaataacatgatcatatcaattgattcaaaaaatacacttcacaataat

SEQ ID NO: 890463 - DNA, 658 bp, Homo sapiens
cactacaaacaaatatcccttattaatacagacacaaaactctttatgaaaacattagcaaatagaacatagcaacacatgaaaagaattatacatcatgacctattggagtttattccagggatgtaaggttggtgcaacattggaaaatccattaatataatatcatattaacaggttaagcaagaaaaataacatgatcatatcaattgattcaaaaaatacacttcacaataatttaacaccctcagaaaaataagagtggagggaaaccttttcaacttgataaagagcatctacaaaaactatacttggttgggtgcggtggttcacgcctctaatcccagcactttgggaggccgaggcaggcggatcactttctgaggctgggagttcaagaccagcctkgccaacatggcgaaaccccgtttctactaaaaatacaaaaaaaattacccagatgtggtggcaggcatctgtaatcccagctactcaggaggctgaggcaggagaagtgcttgaatctgggaagtggaggctgcagtgagccaagatttcgccattgcactccaacctgggcaacaagagtgaaactccatgtcaaaaaaaaaaagaaaaaaaaaaactacacttaacattatacttaatgaatggctta

SEQ ID NO: 890464 - DNA, 637 bp, Homo sapiens
tagtttgaataacttattcctatataccacagttttcagtcaagtattcttacctcaggaagggcatgtataagtttatacatgtttaaatgtatacgtgcatctaagaatacaagccaggcaggcagacagaatgcaaaatctccacaatggttgctgacattctttgcactcactaaatcttacatatacggaatttcttgacataaaaatggattaggtctcaaaagcgagaaatggtaaggcatttactatttaccgtcttcagaccataaaacctctttaaactgcaactttactgtcagcaccttagaatctaaacataacgtttcaaaacgtttccatggagaaggttttgatttcaacttagcatgccaacagaccattttcttgtcttcccaytgtctacgtggtggaaatttcttcagctgtaagccagactggaaacttgtagcccaatgggtgtcaaggataaaaggtgtggtaagctccttattcccttgttattgaggtgggaccatcggcttccattttcagtggtgtttccataaagattttcatcttctccagcgcccgaggcatcagaagaatttatgtgaccccaagatcaccttgaaaccatattaccggtttatgg

SEQ ID NO: 890465 - DNA, 634 bp, Homo sapiens
ctggcctcacagagtctgcattattgctaaaacccaccatcctggggtctagagtctaggttctacatggtgcctcatccccaaggacccaagttgccactgagccttagtggctcaggtttccaaattatagttataccctgcaccctgggattgaaccttcagagtatcccttcctccctggagtcaggccagggctgtaccctccccatcggkggtggaatcacagtacaactgaaccccctggacccaagctgccagggggtgtctcagagccacagattctgttgctgtgagcaaccaaccaaccctgcaacagagggtgaacctgcattccaaggcctaagtgccacaatatgtttgtcagactctgaacctagcatcgtcagccccacattgtccaagcacctgtatctgctggaatcctgctgtttggaaactgtaagacataatgagaaaagggatctcttcaattaagtctctccattgtgaggaaagtgagaatagaaggatctcaggagctttcatgacagagaatattaatagcctacactgccaccatgactactacaaacttccagagcctaggacactgaggacctccagttattgatgataatgaaaacagctgaag

SEQ ID NO: 890466 - DNA, 634 bp, Homo sapiens
acaaagtacataaaggaaaaagcagacaaaaaaccaacatcaacaaaccacaaaacatccactaaacaaatagatgtaatgtagttttggggttacttttgatttttttttttaattggtaaagttctttttgtgatagtttttccttggggttgggatgaaatagagaaaccaggtttcagcttatgtttgagaacttttctttatagataatttcccaattgttcaaaagcaaaaacaaggtcatgctaatgttaggagtttagagtttaagtaagctcaagtatcaaactttgttctgttccataagrcccaagaggaaaatgttctgaattattaaagttgttttccttcacagttagagcaacagtacacagaactcccatttttctctgccttatttttacaaagcacatcaatgagaatgactcctctcttctcttatcagcattctccatcattttgtttaggatcttttgagtttgagggcatggtgaaaaccagttcagttttgatgaacaaaagttaggaggtttactctaaaagttaggagtcttgacacagatgggggctgctgttgtggtcattatatacaacctaatggaactatgttctcatacccagccacactttt

SEQ ID NO: 890467 - DNA, 645 bp, Homo sapiens
gctggcttggtagtcacaaattctctcaacatttgtttgtctgagaaagactatatctttccttcacttctgaagcttagtttcactggatacaaaattcttggccgataattgctttgtttgaggaggttgaagatagggcctgaatcccttctagcttgtagggggtttctgctgagaaatctgctgtttatctgatagggtttttttttttcttaatatatatgttacctggtgcttttgcctcacagcaattaagattctttcctttgtcttaactttagataacctgatgacaatgtgcccaggtgatctttttgtgatgaatttcccgggtgttctttgtgcttcttgtatttaggtatttggatgtctaggtctctagcaaacccacraaagttttccttaattattcccccaaatgtattttccaaacttttagatttctcttcttcctcaggaacaccaattattcttaggtttggtcatttaacataatctgagacttcttggagtctttgtttatatatttttttctttgtccttgttagattgggttaattcaaaaaccttgtctttgagctctgtagttctttcttctgcttgtttgattctattgctgagactttccagagaattttgcat

SEQ ID NO: 890468 - DNA, 581 bp, Homo sapiens
attatctaatatattgacatcctttgaagaaatgaatacctagataaagaatgtacataaataacagagttgcatggagccttgaagatcatctagttcatcctcttgtcttttccagtgagtgcattgggtgctaggaggccatgggctttgcaaggggccacactgctggttacaggcagagttgagaagaggttgcaaccacttacccttccataatatgctacctctaaacacactgatgaataaggaggactggtggatgtaatctattcagacttccaaaaagtgattgtcaacttttaatcctaaagttactaaaacatagarcttcagggggttagttttattgtaataaataactaaaaaatacaggaattaaaagatagagagatggacatttatcatagtaaatatttacattatttagtagatatctattaaatgtccagtaggccatgtcgtagctgggctttttaaatagaaacattttttaaaatttatttttttaacttctattttatatttaagggtacatgcaaactcgtgtcatgggggtttgttgtacagattatttcatt

SEQ ID NO: 890469 - DNA, 611 bp, Homo sapiens
gctggaggaatcacattgcccaacttcaaacagtactataaggctacagtaatcaaaacagcatggtagtggcacaaaaacagacaaatacaccaatggaacagaatagtgagcctagaaataaaggcacacacctacaaccatctgatctttgacaaagctgacaaaaacaagcaaygggaaaaggactccctattcaacaaatggtgctgggataactggctagcaatacgtggaagattgaaactggaccccttccttacgccatacacaaaaatcaactcaagatggattaaagacctaaatataaaacctaaaactataaaaaccctggaagataacctaggaaataccattttggacatagaaactggcaaagatttcatgacgaacatgccaaaagcaattgcaacaaaagcaaaaattgacaaatgagacctaactaaagagcttctgcaaagcaaaagaaactatcaacagagtaaacaaaaaacctacagattgggagaaaatattcacaaactatacatctaataaaggtctaatatccagaatctacaaggaactttaaacctacaagcaaacaagaaccccagtaaaaagtgggcaaa

SEQ ID NO: 890470 - DNA, 655 bp, Homo sapiens
tacttcacagtccataatcagtgacatgggaggtggaaaagtcttaaaatccctcaagaggaaaaactgtggccaacacaattcatagttaaaagatcaacctgatattgctcacaaagttctaagtattcttttagatgtttatgtgaatgcattaataatattctattatttgcctttgtccagttcagatagttttcttgctcttatcagcattgataagatgaagtaaatcagatgtgagagaaagcacgggaacccatcatctgtgcctcagccaccgattgttctcctctggctgtgctcatcttgccagtctgctggctcacaaaggccccagctttgatgtcagtctgactgtttgacaaagccagttgcagatgctcttcatggagacagcagattacagacaataccatgctaaagaaatgctatcrtctagccatgtatacactgaaagttatctcagtgtatacatgggatatgcttctttcaagaagtcacagaaatgaggcaactgtggaatgaatgacaggcatctatttatccaagttacaaaatctccctgagaaagacgaaatttatcagcaacagctaagtaacaattgtgtatgatgtgaaagtcttattgattcatttttttaggtgtagctgg

SEQ ID NO: 890471 - DNA, 659 bp, Homo sapiens
aagtttccaagggcaaactcaagtaagtgggcagaagagaactgggcattgtttatcattggtcaagatggcacagctgcagctctggtttctactgcaggtctgggaagctgtcatttcagtgtcccattagaggaggccaaccaaagggggccaaccattgctgcccagggccctactcacaactcarcttctctctacctctgcttttctctgtctccctctcccagccttactcttctgcctgtttttttctctaggctatgtgtgagttttgcagtcacagttcctgaggatgttttttttataattttttttttaagttccagggtacatttgcaggacgtgcagttttgttacataggtaaacgtgtgccatggtggtttgctgcacttatcaacccatcacctaggtattaagcccagcatgcattagctcttttccctaatgctctcccctccttgcccttccccaacagaccccagaaagtgttgttcccttccctgtgtccatgtgttctcattgttcagctcccacttatacatgataacatgcagtgtttggttttctcttcctgcattagtttgctaagtataatggcttccagcttcatccatgtccctgcaaaggacatgatctcattcctttttatggctgc

SEQ ID NO: 890472 - DNA, 659 bp, Homo sapiens
aagtttccaagggcaaactcaagtaagtgggcagaagagaactgggcattgtttatcattggtcaagatggcacagctgcagctctggtttctactgcaggtctgggaagctgtcatttcagtgtcccattagaggaggccaaccaaagggggccaaccattgctgcccagggccctactcacaactcaacttctctctacctctgcttttctctgtctccctctcccagccttactcttctgcctgtttttttctctaggctatgtgtgagttttgcagtcacagttcctgaggatgttttttttataattttttttttaagttccagggtacatttgcaggacgtgcagttttgttacataggtaaacrtgtgccatggtggtttgctgcacttatcaacccatcacctaggtattaagcccagcatgcattagctcttttccctaatgctctcccctccttgcccttccccaacagaccccagaaagtgttgttcccttccctgtgtccatgtgttctcattgttcagctcccacttatacatgataacatgcagtgtttggttttctcttcctgcattagtttgctaagtataatggcttccagcttcatccatgtccctgcaaaggacatgatctcattcctttttatggctgc

SEQ ID NO: 890473 - DNA, 659 bp, Homo sapiens
aagtttccaagggcaaactcaagtaagtgggcagaagagaactgggcattgtttatcattggtcaagatggcacagctgcagctctggtttctactgcaggtctgggaagctgtcatttcagtgtcccattagaggaggccaaccaaagggggccaaccattgctgcccagggccctactcacaactcaacttctctctacctctgcttttctctgtctccctctcccagccttactcttctgcctgtttttttctctaggctatgtgtgagttttgcagtcacagttcctgaggatgttttttttataattttttttttaagttccagggtacatttgcaggacgtgcagttttgttacataggtaaacgtgtgccatggtkgtttgctgcacttatcaacccatcacctaggtattaagcccagcatgcattagctcttttccctaatgctctcccctccttgcccttccccaacagaccccagaaagtgttgttcccttccctgtgtccatgtgttctcattgttcagctcccacttatacatgataacatgcagtgtttggttttctcttcctgcattagtttgctaagtataatggcttccagcttcatccatgtccctgcaaaggacatgatctcattcctttttatggctgc

SEQ ID NO: 890474 - DNA, 659 bp, Homo sapiens
aagtttccaagggcaaactcaagtaagtgggcagaagagaactgggcattgtttatcattggtcaagatggcacagctgcagctctggtttctactgcaggtctgggaagctgtcatttcagtgtcccattagaggaggccaaccaaagggggccaaccattgctgcccagggccctactcacaactcaacttctctctacctctgcttttctctgtctccctctcccagccttactcttctgcctgtttttttctctaggctatgtgtgagttttgcagtcacagttcctgaggatgttttttttataattttttttttaagttccagggtacatttgcaggacgtgcagttttgttacataggtaaacgtgtgccatggtggtttgctgcacttatcaacccatcacctaggtattaagcccagcatgcattagctcttttccctaatgctctcccctmcttgcccttccccaacagaccccagaaagtgttgttcccttccctgtgtccatgtgttctcattgttcagctcccacttatacatgataacatgcagtgtttggttttctcttcctgcattagtttgctaagtataatggcttccagcttcatccatgtccctgcaaaggacatgatctcattcctttttatggctgc

SEQ ID NO: 890475 - DNA, 543 bp, Homo sapiens; identical to SEQ ID NO: 878849

SEQ ID NO: 890476 - DNA, 543 bp, Homo sapiens; identical to SEQ ID NO: 878850

SEQ ID NO: 890477 - DNA, 643 bp, Homo sapiens
ttaatacacatctacagaattcttcaccccaaatcaacagaatatacattcttctcagcaccacattgcacttattctaaagttgattacataattggaagtaaaacactcctcagaatatgcaaaagaatggaaattgtaacagtctctcagaccacagtgcaatcaaattagaactcaggactaagaaaytgactaaaaaccacacaactgcatggaaactgaacaacctgctcctgaatgactactgtataaacaatgaaattaaggcagaaataaataaattatttgaaaccaatgagaacaaagacacaacataccagaatctgtgggacacagctaaagcagtgtttagagggaaatttatagcactaaatgcccacaggagaaagcagaaaagatctaaaatcgacaccctaacatcacaattaaaagaactagggaagcaagagcaaacaaattcaaaagctagcagaagacaagaaataactaagatcagagagtggaactgaaggagatagagacacaaaaaaacccttaaaaaaaatcaatgaatccagaagctgtttttttttttaaaaagatcaacaaaatagatagaccactagccaaactaataaagaataaaagagagaagaatcaa

SEQ ID NO: 890478 - DNA, 613 bp, Homo sapiens
gtgagtcatgtgaatacactggaaaaaattaaataccccaattttttgacaccaaatattgatatcaatgaataaaatataaactcaaaatacatcaccacaatgagtacacctataacaaactggttaatgactgtcattaattcaaagtactcaacataggatagtgcactagaaagcttgaaatgccttgaaaacaaacagatcatatgtgccaaaaacttaatagaggtttccaaatttgagaacagtcctaacaatttacatgacattgtcaactatgagttgtgaaagctatawgaaatgtttctaaattatcaaaaataaaaaacaaactgtaatccatcatggtagaagaaagactaaattatctttctattctctctatggaattgtattcctaaaacattatcatatgaagatgaaactaaagaatttgctttcagaaatggaagggaaaaaatatcaaagaagtctgaaagtaggaaattcgattaaatattaggctaaataaaatgtattcatttacttttaaaataaaaaatattctattacttttcaggatgttgttttttgtgctgtttgtcattaagtatctgtcatttcttgtcag

SEQ ID NO: 890479 - DNA, 597 bp, Homo sapiens
gacttagaaaaaaaaaaaaggtttgttaaaccaaataaaaatataaaccattgtaagaatatgttttcaataattaaaaactttaagaaacaaagcctcaacatacatagatatactgtcaacatgcttagcaaactaatcacattattttattaagtagagactatgagggtcttacaccagctactagagtatcacgkcccctaggtacaattccaaattccaggaagtttgaaaccaatttctttttcttaattcatctggcaccttgtttaaactgaaataaattacagtcacgtgctgtgtaacatttctgtccactctggactacatacatgacggtggtcccttcgaattacagtaacatagttttactttcttatgtttaagtatgtttagatacacaaataccactgcattacagctggctacagtgttcagtccagcgcatcctatataggtttagagcctgggagcaacaggccatatcatacagcctaggtttgttggggaccgcaccatctacatctgtgtaaattcactctgtgatgctcacatcatgatgaaactgcctggcaatgcatttctcaggaggta

SEQ ID NO: 890480 - DNA, 658 bp, Homo sapiens
aacctgagctataccttggcccccctttatttgtatttttatatttttttgagatggagtcttgctctgtcaccaggctggagtgcaatggcatgatcttagctcaccccaacctctacctcctgagttcaagcgactctcctgcctcagcctcccgagtagctgggattacaggcacatgccatcatgcctggctaatttttgtatttttagtagagacgaggtttcaccatgttggccagcctggtctcgaactcctgacctcaggtgatccacctgcctyggcctcccaaagtgctgggattacaggtgtgagccactgcacccagtctactttgaccgcttttagccatggctagagtggctgggacgtaaggcaccaagtcactagactgcacatagcaggggggccctgggccagcccatgaaaccattttttcctcctagacctctgggcttgtgatgggaggggctgctgcaaatgtctctgacatgccctggagacattttcccctttgtcttggtgattaatatttggctttttgttacttatgcaaatttccgcagctggcttgaatttctccttagaaaatgttttttttgtttttctaccacatattcaggctgcacattttccaaacttttatgctgttttcct

SEQ ID NO: 890481 - DNA, 606 bp, Homo sapiens
caccaacagtgtgaaagtgttcctatttctccacattctctccagcacctgttgtttcctgactttttaatgattgccattctaactggtatgagatgatatctcattgcggttctgatttgcataaaaaccctagaagaaaacctaggcattaccattcaggacataggcacgggcaaggacttcatgtctaaaacrccaaaagcaatggcaacagaagccaaaattgacaaatgggatctaattaaactaaagagcttctgcacagcaaaagaaactaccatcagagtgaacaggcaacccacaaaatgggagaaaattttcacaacctactcatctgacaaagggctaatatccagaatctacaatgaactcaaacaaatttacaaggaaaaaagcaaacaaccccatcaaaaagtgggcaaaggacatgaacagacacttctcaaaagaagacatttatgcagccaaaaaacacgtgaaaaaatgctcaccatcactggccatcagagaaatgcaaatcagtctatcaactcacatgccaatatcctccaaaaccaccctctcagacccacccagaaacaatgcttccccaatcatataggc

SEQ ID NO: 890482 - DNA, 370 bp, Homo sapiens
caagaccattcaacagggggtcttttcaacaaatggtactggaacaactgcatagtcacatgcaaaggaatgaaattgaacccctgctttacactgtacacaaaaattaagtcaaaatcaatcaaatacctcagagaagaagagctaaaactatagaagtcttaacataaaacatagacacaaacttttctttaccttggtttagmtaacagtttcttaaatatgacactaaacataaaaacaaccaattaaaaatagataagttggatttcatcaaaattaaaaaaaaaacaagtacttcaaaggacacatcacaaaagtaaaaaagacaacagaatggaaaaaaatttgcgaatcattttctgataaa

SEQ ID NO: 890483 - DNA, 642 bp, Homo sapiens
ggtgtttagtcatgaagtctttgcccatgcctatgacctgaatggtattgcctaggttttcttctagggtttttatggttttaggctttacatttaagtctttaatccatcttgcgttaatttttgtataaggtgtaaggaagaggtccagtttcagttttctgcatatggctagccagttttcccaacgccatttattaaatagggaatccttcccactttgcttgtttttgtcaggtttgtcaaagatcagattgttgtagatgtgtgacattatttctgaggcctttgttctgttccattggtctatatatctgtttttgtaccagtaccatgctgttttggttactgtagccttgtagtatagtttgaagtcaggtagcgtgatgcctccatctttgttgtttttgcttargattttcttggctatacaggctcttttttgcgggggcgggggggtggttccatatgaaatgtaaaatagttttttctaattgtgaaaagaaagtcaatggtagcttgatggggatagcattgaatctataaattactttgggcagtattgccactttcatgatattgattcttcctatccatgagcatgaaatgtttttccatttgtttatgtcctctcggatttcc

SEQ ID NO: 890484 - DNA, 580 bp, Homo sapiens
tttgctatcctagtagtgggcccatgctttaaaatgaacaatctggattttaattccttttttattagcatagataaccatagtctttcttcatcttaatttctatgtattgctgtttggatttgtaaaagtattctagaatgttgggtaaatactgtttcccccattgtaatagtgagtccttcaggagaagggctaccttgcctttgccatcaaaagtaatcyttaatataatgctaactacagatttaaaatcattaattattgtcatacaaaagttaccacattataagactacactgattgtcaaataaagtgtcttcttcacatttgaagcactctctgaaagatgaccatgacttgctataatgctgctttctgtgggacccatgtaacacacaaaattgttaactcttcaagctaacaaagccagccagtttcaggcccccaaatttgaagatagattttccaaatatttccagctgttagaaactattgagttcactaccaaagccagcttggtacctagagtctgtgtgctactctcttttttttcctgattatgtttatacttcaaaga

SEQ ID NO: 890485 - DNA, 616 bp, Homo sapiens
gcataactactcagcaaatttcttggcttttttaggggtagggagccagtgactttaatatgtgtcttacactaccttctttccatggtaagtggatccctgaggggcaagctttttccaaatcttgttttctgatcctcttcctgggtaatctgatgtgggtctcaggctcttgcccagacccaggggaagccctcacctcagtttctcccctgggtacccccagaacccaaggccatgttaacacctagccctgcattggtttaaactgctgtttggctcaaratagacatgtatcctggagttgttagtagaaaggtgggtagcagcaatcatttcctagaatcttatcttagtttacaagacattaattttagcagagtaaaacagggaaatgtttttgttcaaatgtcttccttttttaccctgtggcttagtgattttatcccacttttgtataaactgctttgcaatatatgctaatgatgttttattttcttgaactatcagtggcctcagagaaaactggtctgacagcctattattgccaatggtaatgctttaattactttaaacaaaaataatcatttttggtagttggcctccagcacttgat

SEQ ID NO: 890486 - DNA, 635 bp, Homo sapiens
ttattatgctacagtgtattttcactaggtaaagaaagctctttatggttcactgaggacaatcccttcacaatctagaacctgattggatcttctgagaatatcagagaaagactgtccttgccatccacactacagcaaaactggagccttgaactttggggtcataatctcacaactgagaagagttcctccacactcctggaactgtacctccattggtacccttaaggtaaaactaaccaggaaagtttctccccagaagaagatggcatccctgatgtgaacagcttttcccaagatcacggatcaagacttctactatcacaagactcttatctttgaatattttttctgtgtttatgcctctatgaacaatagaaatgaaaaggaggtctattatgtaaacttacagggtaaacttttatttgtgaatgattttgcagccagcyttatatatgaataaacttatactttaattgatagaagatgaaggcccaatgtaggtgagaaagtttagtggttcatacattgctttataatcagtcaaaactcctcttaacacacatcatggattaaagagaacattgccatgaggccttcactcttctagaaggacatcatttgttagttcc

SEQ ID NO: 890487 - DNA, 710 bp, Homo sapiens
cctgtgtccacgtattctcattgttcaattcccacctaagagtgagaacatgcggtgttgggatttctgtcgttgtgatagtttgcccagaatgatggtttccagcttcatccatgtacctgcaaaggacatgaactcatcctttttatggctgcatagtattgcatgctctatatgtgccacattttcttaatccagtstatcactgatggacatttgggtaggttccaagtctttgctattgtgaatagtgcctcaataaacatacgtgtgcatgtgtctttatggtaacatgatttataatcctttgggtatatacccagtaatgggatcactgggtcaaatggtatttcttgttctagatccttgaggaattgccacattgtcttccacaatggttgaactagcttacactcaccaacagtgtaaaagcattcctatttctccacatcctctccagcatctgttgtttcctgactttttaatgattgccattctaactgctgtgagatggtatctcattgtggtttgatttgcatttctctaatgaccagcaatgatgagtattttttcatgtgtctgttggctgcataaacgtcttcttttgtgatgtgactgttcatatcctttgcctgctttttgatggggttgtttgtttttttttcttgtaaatttgtttaagttctttgtagattctggatattagccct

SEQ ID NO: 890488 - DNA, 596 bp, Homo sapiens
accaatacgaccagtaagctgacttcttaatttatctctatgatcaacaaatgctttagagtctaaattcgcagaaaaagatccttcaacaacatctccattatcaataggtttgaatcttcaaattattgtcaacatagttagcaagccctatccatttatccattctttcattcactcatttgtttactatttatgttttacttttaaaaatacaagtaaaacaaaataacaacaaaaaattaaactaagtatctcttacgggctgggaatagaaataggcctcagggatatgtctaattcagatttcagaagcaaaactgacatttttctatgtagtgggatttggaagcatcccctgccccaaatatgtcccttttttatcctacattttcttttttattgcctacttttaraccccccaaaaacaggttgtctaccaaggaatggtaattagatttttcatcagcaaaaaacaaaaaaactaaaagctaataacataaccatgaaaatagaatgtatagaaaattatcatttacttctgaagcatatgaagaattaatcacctgcagtcaaccctatctgaaagaattatt

SEQ ID NO: 890489 - DNA, 504 bp, Homo sapiens
aaaaatggaagaaaaactttatctctttaccaaggaggatatccacatggtcaatatgcagagaaaaaatatgctcaatgtcatcacttaatagtaaaatgtaggccaggcatagtggctcattcctgtaatcccagcactttgggaggccaagacaggcgaatcacctgaactcagaagtttgagaccagcctggccaacaaggtgaaaccctgtctctaccaaaaatasaaaaattagccaggtgtggtggagggcgcctgtaatcccagctactctggaggctgaggcaggagaattgcttgaacccaagaggcagaggttgcattgagctgagatcttgccattgcactccacgctgggtgacaagaggaaaacttggtctcaaaaaaaaaaaaaaaagtaaaatgtaaactaaactgttactactattccatacccactataataccacaagaaaataacagataataccaagttttactgataatgtgaatttattgg

SEQ ID NO: 890490 - DNA, 629 bp, Homo sapiens
aaggaatgctggattttgtctaatgctttttcagcatctattgagatgatcatgtgatttttgtttttaactctgtttatgtggtgcatcacatttattgacttgcatatgttaaaccatccctgcattcctggtacaaaacctatttgatcatggtggattatctttttgatatgttgttggattaagttagctagtattttgttaaggattttagcatcaatgttcatcataagtattggtctgtaattttctttttggttatggcctttcctggtttgggtattagcatgatgctggcttcataaaatgaattagagaggattccttctttttctatcttgtggaatagtgtcaaaaggattggtatcaattmtttgaatgtttggtaaaattctgctgtgaatccgcctggtcctggacttttttgtttggtaattttttaattaccattttaatcttgctgcttgttattggtctgctcaaggtatctaattcttcctgatttaagctaggagggttgtatttttccaggaatttacccatctcttctaggttttctagtttatgtgtgtaaaggtgttcatagtagccttgaatgatcttttgtatctctgtagtgtcagttg

SEQ ID NO: 890491 - DNA, 661 bp, Homo sapiens
tttggatggtaaattatatggtcactctatacataacatttaaggaaagccaagcctaggataatgtttacctaggatgtcttccagcaacaatttcaaaattctttcactctttttcttcctcaattgtctttctttccagtctttctcctttctctttcgtcagataaggcttaaatatcctccaaacagctcatttcctcayctcactcctcatcccaatcccctagaaatttttcttctcatctccatgtttctggagtccatgttgagactacagcttgaagattttttatcttgtttgccttgtttgggggcaaggagagaaggaagtgtcctgaagctctgtgtggccagactaccctggactcttccccagaccctggaagactagagaaatggtctatcaagcatgatgtgtacaggaaatgtgctatggctgacgagcgaatcaggcactgtcaaatgaagactgagccaagtgtgaggctcagaccactaccagcagaggaacaagttgacccatgggtcttctagattaagcgaaatcacagacttctcacaaaggaatgcaagggccagaaacggccatcttattggtcccacctgtcctgtaaggttttgagctcaacgtttctccttgagttggactctatacttt

SEQ ID NO: 890492 - DNA, 650 bp, Homo sapiens
ccctaataggctctctagttcccaaccacacttaatactttaaaaagtcattgtggtctattagccttatggtaaaggagatgcaactgcagtaggtgatatgggaaggggcatgttgaggattcagttgggaagattagagaaggccacatgactgatggccctgaaagtcatgataaagatttgccctttattctgtgttccaaagagaaactaccagacatactggaatatraagtcttccttatcccctgacaccaaagttaaagtgaacactagtctaggaggaagccgagagtgagataaaatccaggcggtttcaaagccctcttccctgcatctctcagtctgtaacaaccaatttcagttgttccccataggagagcagaatcaataactgtgtttaagtgaagaccgccatacatatgtatttggggctgtgtgataaaaaccacattattcttagaaatgaagctgtgtgaggaaaggacatgttttctctggtccctggctcctcatactatcgttgacatatgacaagaaaaacatggagattaagactgggctttggaatcaaaacctccttggtttccttcccagctctctacttactatgtgttcttaacttctctgtgtctccgattctttat

SEQ ID NO: 890493 - DNA, 600 bp, Homo sapiens
catcggtgagggtgatcttctttactcagtgtaccaacacaaatgctaatcttttctataaacacctttatagacacacccagaagtaaagttttaccagatatctggacatcgcttagatcagttaggttgacacaaaaaattaaccctcactcctggaacaaccacattggttccacattakgaaccaacaaattgaggatgtcagaatcatcctactattgctgacctgctaagcctccaattattgtggatgaaatatagcctatttcatttaaggcaatatgttggtagactagactcgactctatactaatacttaacttatttcataaaaaagttattcaacatgctctacatattattcagtttttgatgcttttttcctattccttggtccccaaactctcacttgctgttatccttaatccttagttcaccctacatataaaaatgttaacttattatttgttggtggccaacatcaaaatgtctctataactttgttatgctcttcctacattctgcaatgtcatactcttgtttttctctttaattactgtccttcttttaatgacaactttaagtgtacatcttcca

SEQ ID NO: 890494 - DNA, 695 bp, Homo sapiens
gtgggagctaaatatccagcacacatggacataatcatgggaacaatagacaatgtggaccaatagagtggggaaggaggagggaatgggttgaaaaactacttattgggcactgtgctcactgcctggctgcaatctacccatataacaaacctatacatgtattcttctrtctaaatgaaagctgaaatcttaaaaaagacgaagacagatacattagggttaagttgttaagtcttccattttattgttttatagttgtttgctctgtttctcattcctttgcctctgtttctttctttctctctctttggttacttattttgatttttagatcttcattttaatttattgatggtatttcaagaatacaaatttgtatagattccttaatggttgatccagttatgacactgtccacagtctactgttaccattgaagtgttgtaacccctcttttttttttattatactttaagttctggggtacatgtgcagaatgtgcaggtttgttacataggtatacatgttccatggtggtttgctgcacccatcaacccatcatctacattaggtatttcttctaatgctatgccgtccctaaccccccacccccctacaggccctggggtatgatattcccctccctgggtccatgtattctcattgttcaactcccacttataagtgagaac

SEQ ID NO: 890495 - DNA, 646 bp, Homo sapiens
tgtctcagctcactgttaatagtgctgctcatttatgctgtgttttctttacacttttctttcttcagactaaacaaagtataaattaggcagcaaggagtacgcagtcttacatttatccacctaagggggctcagacagaaacagatgagtttaagcagaggcaaaactgaaaatcaagttgarttccatcttgaattgtcacatggaaaaaaatgacatttggtgagatctcaaaagattatgaaaattaagagatagcaatacaagtcatgtgtgtttcaattgtggatttcactgagttgactttaagcaggaatgctacacaagtcctcgttctgcaaacaatttgcaagagaaagagaagaaacagagaagatactctctccttaaagagactaaaattatactcttttgtgccttctataacttcctgtatctcttttttcttgaccaacttccacaaagcgctgtcatgaaacaatagccaaacagaagtctaaaaactcttgataggcaccatgctgtccaagggatcaataatattgaacttaactcccaggatctggcatattaagaaacaagaaatgtgttattttataaatattctgatgccatctttaaaaatatataactcacttaattt

SEQ ID NO: 890496 - DNA, 583 bp, Homo sapiens
atccaatgtgattagttccttggccctggagcccaccagtaggtggaacctctgtaccaaccagtgacttagtgacagattgctggactgtgactcaggaagtatacagaggaccctttatttcagtgcctctccaaatacttggcaatattcattcccctgcagctatttaccagccacaaaatctacaactccctgtcccataattttcactgagcatttcttcctgcctctcttctcttcacgttttgttaattcaactgatgggtgtcgagcatctatcatatcccagcagaaactgttccaagtgcaggggcagagtgacagaaagatattcatagtccttggctgtgtggagtttatattgcaggaggataggtggaaaaggaagagaaasacattcaaatagaaagaagaagatggaggaggaagaggaaaaagggaggaaggggggaggaggagaaatacaaatattatataatttgtgacaataatttttaatcaattcccatttcttactttaagcttctttaaatttgtcatttaattagtgaccattatcagcatttacaaatggtagttc

SEQ ID NO: 890497 - DNA, 604 bp, Homo sapiens
gccaaggcttgacgctttcaccctttgaagcaacagcctgagctgtaccttggccccttttagtcatggctggagtgggtgggacacagggcaccaagtccctagacttcacacagcaaggggaccccaggcccagcccacgaaaccagaaaccattttctcctaggcctccaggcctgtgaaggctgcagtgaagacctccgacatgccctggagacattttccccattgtcttggggattaacatttggctcctcgttacttatgcaaatttctatataggcggctggaatttctcctcagaaaatgggatcttcytttctatcaccttgtcaggctgcaaattttccaaacttttacgctctgcttctcttataaaactgaatgcccttaacaacacccaggtcacctcttgaatgctttggggcttagaaatttcttccaccaggtacccatctttctcaagttcaagattccacaaatctctagagcaggggcaaaaggctgccagtctctttgctaaaacacaacaagagtcacccttgctccagttcccaacaagttcttcatctctgtgtgataacacctcagcctggaccttatt

SEQ ID NO: 890498 - DNA, 624 bp, Homo sapiens
atgagaatcaaatgtgataatgcctgtgaaatgcttagccagtgagaactctcttaataaatgaagcttggggcctggtgctgtggctcacacctgtaatacagcactttgggaggcccaggcaggtggatcatgaggtcaagagatcaagaccatcctagccaacatggtgaaaccccatctctactaaaatacaaaaattagcaaggtgtggtggtgtgtgcccgtagtcgtagctactcgggaggcttagacaggaggattgcttaaacccaggaggcagaggttgcagtgagctgagatcacgccattgtactccagcctggtgacagagtgagactcygtctcaataaaataaaataaaataaataatgaagctagtataatcaaaagagaagtgttgctatgagaaccactgtgctagtcaagactgatctaatctgccccaggatgtaggagaaccacttaatattcatagatgctgtctctttctacaaaacctcagtataatcctgtctctcaaactttgtgctggccaattccaactgaataaacccaaacactttgccaactacccatctaccctcccctcacttatccatttatccctgtttgtatcttgtc

SEQ ID NO: 890499 - DNA, 580 bp, Homo sapiens
tttttaaaataaagtaataactgttttcttttccagctgtgtgactggctacgtgttaatgaaagctattttaagccatcccctacgtgtagctccattggacttcacaagacatctttaaatgcttatgtaaagagcattgttcaagagtatgttaagtcatctgcttgggaaagtaagtctgcaatcatttttatggattgatataaccaaaatattttcaaagaacttttaactagtttttcagactgagagttaggctttacgaaatatatgatgatttattgatgccaaacttgtatttcagtaaaataatgtgaaaaaaaagtaaagatactgtctcctaacttgtattaatactttatctgttctgagacttgagattctaaattattttatgtttaaggaaactaataagttgccagagttaagaagtggatgcraagtcatttatttattctgcaattactgggtccttgtgaactagatactgcagatatggttttggagcctctgtagtggaaatatatgcattggaaatacgtgtttatctttttcatttttaaagcacgtttagtat

SEQ ID NO: 890500 - DNA, 557 bp, Homo sapiens
taaatgaactcaccaaccttgtgataattaacctactgcttattactcatcttactggtcttatgtagaaaagcacactgctatacatgattattgtataatcataatgcattcttgtctagctttctattctatgatctgcttgatgtaaatagtgcttctttttttttcttttattattattatactttaagttttagggtacwtgtgcacaatgtgcaggttagttacatatgtatacatgtgccatgctggtgtgctgcacccattaactcgtcatttagcgttaggtatatctcctaatgctatccctccccccttcccccaccccacaacagtccccagagtgtgatgttccccttcctgtgtccatgtgttctagcagatttaaagcccaatgcatccagaagcccctttcatacacaatttctctttataacgttaaaacaatagcaacaatataagaaagtgccttaccatggtaatagtggttatatctcggaggtaagataacaagtcatttttacatccttgggattctctatattttccagtgt

SEQ ID NO: 890501 - DNA, 557 bp, Homo sapiens
taaatgaactcaccaaccttgtgataattaacctactgcttattactcatcttactggtcttatgtagaaaagcacactgctatacatgattattgtataatcataatgcattcttgtctagctttctattctatgatctgcttgatgtaaatagtgcttctttttttttcttttattattattatactttaagttttagggtacatgtgcacaatgtgcaggttagttacatatgtatacatgtgccatgctggtgtgctrcacccattaactcgtcatttagcgttaggtatatctcctaatgctatccctccccccttcccccaccccacaacagtccccagagtgtgatgttccccttcctgtgtccatgtgttctagcagatttaaagcccaatgcatccagaagcccctttcatacacaatttctctttataacgttaaaacaatagcaacaatataagaaagtgccttaccatggtaatagtggttatatctcggaggtaagataacaagtcatttttacatccttgggattctctatattttccagtgt

SEQ ID NO: 890502 - DNA, 767 bp, Homo sapiens
tgtctttaggtattagtctatgaaccatataggattaccatggacagatctaaattacagatttctagctattactgtcataccacaaattttgatttctgcaatattttatgtatgtaatataatggaatgcttaatatagtatttttttcaaaaaaatatccttaagagatgttgtgagtccaaggtgrtcagtatcaattaaattaaccatatattaaagagtatactctgcagtataagagtaaggattttataaatagatcatcttgggtttaaatctggtgttcatcaatgacaactgtgtaaattaactagtttcttaggtagttacctaacagatgtaaacaaatgctaataagaatgccaagtatccactattctcaaaatttttacttacatacacacatacataaacttagggcccagtaaatacttagacacttggacaacagtaaaacgtttatgtgaaaagaattatggcaagggaggtctttaaggcaagggaggtctaatttttcaacattatactattttcccacaacagaaagttattgaaaaatcaagaggcagaagcaattacagaggggataacactgattgatgataataataaactaatatcctgccacatttttataataatagcaaagtaatttagtagagatttaaggaaaatttggggaacttttttttgtgtgtgtgagacagggtctcactctgtcactcaggctagggtgcagcctcaacctctcagactcaagcaa

SEQ ID NO: 890503 - DNA, 767 bp, Homo sapiens
tgtctttaggtattagtctatgaaccatataggattaccatggacagatctaaattacagatttctagctattactgtcataccacaaattttgatttctgcaatattttatgtatgtaatataatggaatgcttaatatagtatttttttcaaaaaaatatccttaagagatgttgtgagtccaaggtgatcagtatcaattaaattaaccatatattaaagagtatactctgcagtataagagtaaggattttataaatagatcatcttgggtttaaatctggtgttcatcaatgacaactgtgtaaattaactagtttcttaggtagttacctaacagatgtaaacaaatgctaataagaatgccaagtatccactattctcaaaatttttacttacatacacacatacataaacttagggcccagtaaatacttagacacttggacaacagtaaaaygtttatgtgaaaagaattatggcaagggaggtctttaaggcaagggaggtctaatttttcaacattatactattttcccacaacagaaagttattgaaaaatcaagaggcagaagcaattacagaggggataacactgattgatgataataataaactaatatcctgccacatttttataataatagcaaagtaatttagtagagatttaaggaaaatttggggaacttttttttgtgtgtgtgagacagggtctcactctgtcactcaggctagggtgcagcctcaacctctcagactcaagcaa

SEQ ID NO: 890504 - DNA, 583 bp, Homo sapiens
atagtgtgtttgtttatctaaacatagctgaacataggaaaggtacagtaaaaatatagtaaaaaagatttaatatgatacacctatataaagcatgtattagtccgttcttatggtgctgtaaggacatacctgcaactgggttatttataaaggaaaaaggtttaattcactcatagttctgcacgrctggcgaggcatcaggaaacttacaatcatggcagaaggggaaacaaacacgtccttctttgcatggcggcagaagagagaagagtaagagctatgcaaaaggggaagccccctataaaaccatcagatctcacgggaacttaatattatgaaaatagcatgggggaaactgaccccattattcgattacctcccactgggtccctcccatgacatgtggggattatgggagctacaattcaagatgagatttgggttgagtcacagccaaaccatatcagagcatttaccatgaatggagcttctaggactggaagttgctctgagtcagtgagtgagtggtgagtgaatgcaaaagtctagaatattgctgtgcactactgaagactttata

SEQ ID NO: 890505 - DNA, 609 bp, Homo sapiens
ttggtcttgcttctctacttcttttaattgtgattttagggtgtcgattttaaatctttaagttttctgatacaggcatttagtgctataaatttccctgttaatactgctttagctatgttccagagattctggtatgttgtctctttgttctcattggtttcaaatagcttatttctgcattaattttggtattcamccacgagtcattcaggagcaggttgttcaatttccacgtagttgtgcttttttgagtgaatttcttaattctgagctctaatttgattgcactgtgctctgagagactttttgttatgattgcagctcttttgcatttgctgaggagtgttttacttccaattatgtggtcgatttcagaataagtgccatctggtactgagaagaatgtatactctgctaatttgaggtgaaaagttctgtagatgtctactaggtccacttgatccagagctaagttcatgtcctgaatatccttgttagttttctgtctcatctatctgtctaatattgacagtgtggtattaaagtctcccactattattgtgtgggagtctaagtctctttgtaggtctgtaagaacctgtttta

SEQ ID NO: 890506 - DNA, 460 bp, Homo sapiens
  misc_feature 379, 418: n = A,T,C or G
acaacacgtgttcccatcccacatgttcttctatactgtcaactggccattgccctcatcaagaagtggagtctaattcctcccaccccaccttgaatctggaccacttgagactgcttcaactaattgagtacagtagaggagatgttgtatgacttctgaagctagatcagaaaaggccatgagacttctgcctggttctcttgaaatgaagccatatgtcatgtaagaagtctgactacccccagactacccctgctggagaggctgtgtacagcagatgacagctggcatcaactgccaaccatgcatctttatttaycttagcacagacaagataaataaagccccaaccaacatccaactacaactatgaggnagacctcaagtgtgaaccacccagcagagcccttcccanatttctgacccacaattgttttaagctgctaagcactggagt

SEQ ID NO: 890507 - DNA, 595 bp, Homo sapiens
ccatctctactaaaattatacaaattagctgggcatggtggtgcatgcctgtagtcccagctatgttgggaggctgaggcacgagaattgtttgaacccaggaggcagacgtggcaatgagccaggatcacagcactgtactccagcctgggtgacagagtgaaactgtctcaaaaaataaaataaaataaaatataaaataaaatagtaaagaccgagsgggagaggtctgctccttgaagaactatcaaacacattttggggatgtcttcatccaaggacaactctgattacctggatttttcaccagaaagatctaaagagaaaatcaaattttattatttattttttgcaacttctattttggattcaggtttgtgcaggtttgttacatgagtgtattgcatgatgcagagatttggggtacaaatgatcctgtcacccaggtagtgagcataatgcccaatagtttttcagcccatgtcctcctcccagtagtcctcagtatctgttgttcccatctttatgtccacgtgtaatcaatatttagctcccactcataagtgaaacatgtagttatttgcctttctgtttt

SEQ ID NO: 890508 - DNA, 494 bp, Homo sapiens
tattgagtgtctactatgtgccacacactgttctaggcctgggaatataggtatgaacaaataaagtccttctttttcagcatttcactataatggtagcacacacatgcacagagaaatacataattttgtctgggtatggtggctcatgcctgtaatcccagcactttgggagactgaggcggacagatcacctgaggtcaggagttygagaccagcctgaccaacatgcagtaaccctgtctctactaacaatacaaaaattaaccatgcgcggtggcacatatctgtaatcccacctacttgggaagctaaggcagggagaatcgcttgaacccaggaggcagaggttgcagtgagccaagatcacgccatttcactccagcctgggcaacagagtgacactccatctcaaaaaaaaaaaaaaagacatacataactttgttttaatttttaaataaagagtgatatactgtactgtccttagacatgta

SEQ ID NO: 890509 - DNA, 684 bp, Homo sapiens
tacctgcccaccaaggttttgttagttgtggttgtgacattttgccacagagtcagttaatagggcacctccagttccctgtcatgtggcaggtgccagatccttgcttagtaagccacgctcaggtgttattgccttacactctgacaatactcagggaataatggttgatatagtttggttgtatccccacccaaatcttgaactgtagctcccataattcccatgtgtcatggaagacctggtgggaggtaattgaatcatgagggtgggttttttcctgtgctgttttcatgayagtgaatgagtctcatgagatatgatggtcttataaaggggagttcccctgcacatgttctctctcttgcctgccgccatgtaagacgtgcctttcttctctttcaccttctgtcatcattgtgaggcttccccagccatggaactgtgaattcattaaaccactttttctttaaaaattacctagtcttggatatgtctttattagcagcatgagaacagactaatggtttagtttaccactggcagaaggagaaggttgctgtggtctgtgacaggaggaggtccagggtggcagatccaacacttcgtcaggttgcctgccatggccatagcttgaaagagcccaccaaagcattacaattccaggcttctgctgccacatcc

SEQ ID NO: 890510 - DNA, 575 bp, Homo sapiens; identical to SEQ ID NO: 877621

SEQ ID NO: 890511 - DNA, 625 bp, Homo sapiens
ctgagtggtttaagcagaaatgtactttctcaaagttctagaggttatatggcagtgttctttcttctacggcctatttgccttggagatggcagtctttaccctctgtctccttatggtctttcctcagtccctgtctgtgttttaatcttttcttcctatagggtcattagtcacatttgattaggaccaccgtaatggttctcatttaaacttaattacctgtttaaaaactctatctccaaataaagtcacatcmtgagatagtgggagttaggacttcaacataaacattttggagaaatatatcccccaaaagctcagcccacaccaggaggtatttgattataacgtctgttaacaaattccaaaacatatttagggaaatgcgtctgagctttttgagtcttttgactatacttctttcataattcttccaaaggaaagtattaggaattttatacagcctaaaggcagcatttaaacaattagtttttttttttttattaaaatctacattcaggtatctgataggtgtgtggagagatctcaatgtggctttaatttgcatttctctgatgactaacaatgttgagcaacattaatttgctaattggcttatttg

SEQ ID NO: 890512 - DNA, 577 bp, Homo sapiens
tacaagagtccattcacatttccagttagattacagttcactatgtatggagaaacctttaggctgaacttaaaatatataaggaagcagctttaggctaaacttaatttaataattcctcccttttggttaatctctcaaaattmagaagttgatcaaaactttaggcattgatgtcattctttcaccgttgtaaatgaactaacttcttctcaattccactggaaaatagcaaaacagtgggttttgtaaggtgaaaacaagcaaagagaacaacggtaaaaaaaaataataataataataactgattggtttcttcaggtcacttttctataaaggttaaagcagagaggacttccttattattctgtgatctcctgttttcagaagacaaaataggtttgttttgagatctctttgcttccttagagtttccaatttcttatatggcatttagcaggaatgactccattttgtttggtctggtctgttagggcctagtgcttgagctcagtctaaaatcatggcctcttatagttttgtttaataatcattatatgcagaaaacatgatctcc

SEQ ID NO: 890513 - DNA, 616 bp, Homo sapiens
gaatgaagatgatcaccctcaccagcgtgggtgggcatcatcccgtctgtgaggacctggataaaacaaaagtatgagggaaggtgatatttactcctgacctgactgctgagctggaacactgatcttctcttgcccatggtgctcctggttctcaagtcttcaaactcagatgggaatctttaccattgctgtccagctcccaggcttttgaatggtaccaccatgtattagtccattttcacgctgctgataaagacatacctgagactgggcaatttacaagaggaagaggtttatgggacttacgattctgcgtggctggrgagccttcacaatcatggtggaaggtgtaaggcacatctcatgtggcggcagacaagagaagagaacttgtgcagggaagctcccatttttaaaaccatcacatctcatgagacttattcactgtcatgagaccagcatgggaaagacacacccctatgattcaataacctccaaccaggttcctcccacaacacgtgggaattgtgagagttacaattcaagatgagatttgggtggggacacagccaaaccatatcacagcatctttcctgggtctctaacttccaga

SEQ ID NO: 890514 - DNA, 605 bp, Homo sapiens
ccactaccatcccccattatcccattacccttcccagcctctggtaaccatcattctactctctgtgtccatgagttcaattgtattgatttttagatctacaaataagtgagaatgggatgttttgtgtacaggtattcttaggtattttattctttttgtggcaattgtgaacggaattgccttcctggtttgtctcttarcttggctgttgttggtgtataggaatgctagtgatttttgtacatcgattttgtatcctgaaactttgctgaagttgtttatcagctgaaggagcttttggcccgagactatggggttttctatatatagaatcatgtcatctgcaaacagggatagtttgacttcttctctttctatttggatgccctttatttctttctcttgtgtgattgctctggctaagacttccaattctgtgttgaataagagtggtgagagagggcatccttgtcttgtgctggttttcaagggaaatgcttccagcttttgcccattcagtatgatgttggctgtgggtttgtcatagatggttattattattttgaggtatgttccttcaatatcttgtttactgagttttt

SEQ ID NO: 890515 - DNA, 646 bp, Homo sapiens
ctgatattcctcttcttgttacttatgcaagtttctgcaactggcctgaatttctccccagaaagtaagtttttcttttctaccacaggatcaggctgcaaattttctaaacttttatgctctgcttcccttttaaatagaagttccagtttcagataatctttttgtgaatgcatatgactgtatgctttcagaaaaagccaggtcacctcttgaatgctttgctgcttggaaatttcttctgccagataccctaaatcatctaagttcaaagttccacagatctctarggcaggggcaaaatgctgccagtttctttgctaaaccatagcaagagcgacctttactccagttcccaataagttcctcatcttcatctgaaaccacctcagcctggacttcattgtctatatcactatcagcattttggtcaaattcattcaacaagtctctaggaagttccaaactttcccacatcttcttatcttcctctgagccctccaaactgttccagttctgcctgttacccagttccaaagttgcttccacatttttaggtatctttacagcaataccccactatcccagtaccaattttttgtattagtctgttttcacactgctataaagaatacctgagactggg

SEQ ID NO: 890516 - DNA, 575 bp, Homo sapiens
  misc_feature 142: n = A,T,C or G
tgtttcctaaatccagcctcctcctgctcacggtcttccagtgaatgactctttgccttggagaggatatccggggcggaggcagtcagacgaggaaggaagtttatcctgcagagggtgtagtgtgggttagaggagaggnaaggagagaactgyctgcaaggcctgagatgcccaggatggagggtatggggaagaagcaggagagaaactaaagagaaggcccatcaactctgcaattggcctgctaataaaatgggaaaaacaggggtgctgtggcctatttgcctctggtctgtcttagcacctgccttcctggcccaggtgtttgctcttttaattgcacacatgtgcatctgcctctggagctagtgagtcctgactgggccagagttgcagcctgggagtgtagtgacacttgactgagtgatcagcaaacatttgatgaatgagtggggtagcaatggtctttcagctgagttggcctacgggatactcataaaccttgcaaatagttactagccagtttttccacttgggtagattgacaagcaggtgagagaaaaaaggcgtag

SEQ ID NO: 890517 - DNA, 575 bp, Homo sapiens
  misc_feature 142: n = A,T,C or G
tgtttcctaaatccagcctcctcctgctcacggtcttccagtgaatgactctttgccttggagaggatatccggggcggaggcagtcagacgaggaaggaagtttatcctgcagagggtgtagtgtgggttagaggagaggnaaggagagaactgtctgcaaggcctgagatgcccaggatggagggtatggggaagaagcaggagagaaactaaagagaaggcccatcaactctgcaattggcctgctaataaaatgggaaaaacaggggtgctgtggcctatttgcctctggtctgtcttagcacctgccttcctggcccaggtgtttgctcttttaattgcacacatgtgcatctgcctctggagctagtgagtcctgactgggccagagttgcagcctgggagtgtagtgacacttgactgagtgatcagyaaacatttgatgaatgagtggggtagcaatggtctttcagctgagttggcctacgggatactcataaaccttgcaaatagttactagccagtttttccacttgggtagattgacaagcaggtgagagaaaaaaggcgtag

SEQ ID NO: 890518 - DNA, 597 bp, Homo sapiens
cccatttccgctgtgtccgcatccacccctgccagggtcgaggtgtcctgtgattgcttttgtccctgccaagggctgtatcagccccgccaggtctggtggccattgattttgaaagagcagagtagtcagcatccactgtgagctgtgtggactcgcaggccctggctcctggatctctgggctagccagtgggactaagcacaattgccatcatggtgtgatgaaggagaagtcagactgacctctctgagtctcattttcatcagaaaggggaggtagtgctgggagttgctgtgagaatgacatgagataatggatgtgatcatgtgtgcagggttcctasaacagtgcgtgacacataattggtgcccagtgaataaatgacagctccctttcctacatagtcatggcttaatacgccttcaggccagggtagaagatatatattgagcaccttccatgtttgttccaggtactgccaggctccaggcactggggaatgcagtccctgctgtcagggagtttgtcacacagctgggaaaccagtcccccaccatgatgagatcacagacaaaggggaccacagagtgagca

SEQ ID NO: 890519 - DNA, 597 bp, Homo sapiens
cccatttccgctgtgtccgcatccacccctgccagggtcgaggtgtcctgtgattgcttttgtccctgccaagggctgtatcagccccgccaggtctggtggccattgattttgaaagagcagagtagtcagcatccactgtgagctgtgtggactcgcaggccctggctcctggatctctgggctagccagtgggactaagcacaattgccatcatggtgtgatgaaggagaagtcagactgacctctctgagtctcattttcatcagaaaggggaggtagtgctgggagttgctgtgagaatgacatgagataatggatgtgatcatgtgtgcagggttcctagaacagtgcgtgacacataattggtgcccagtgaataaatgacagctccctttcctacayagtcatggcttaatacgccttcaggccagggtagaagatatatattgagcaccttccatgtttgttccaggtactgccaggctccaggcactggggaatgcagtccctgctgtcagggagtttgtcacacagctgggaaaccagtcccccaccatgatgagatcacagacaaaggggaccacagagtgagca

SEQ ID NO: 890520 - DNA, 658 bp, Homo sapiens
ccccactccaccttgaaatgctacccccatcagttcccagggtctgaaattcctttaaggagagactgattctttttcttccatagtcagagatatagttgaccatataaagtaaaggaggaagggaaggagatgtgagcagtacgcatcttgtgctggagcagaaatgctggctggggaccctggagtctgcgctcatggtttctgagctgagcacactctcccmacagtctcagtccacctgctcttgtgtctgatccctggagagtctctcatcccttcacgcaatagaacctagattctgaagactaaggtgagaaggagctgtgagttggaggggtgagtaataaggaggaaatcccctaagcccaactggagagaaatccaggagtctatagcgttctcggctggaaaccccaaacattgctggttcactgttctctggtttcctggtcattcagcattttcccagcacttgccaggaacacgaagacaagtagaactgtggctcccaccttccagggattctgtagggatgcctgtggtgcccgactcacagcccctggatccactgctctcagccacagctgctgggacagtggcaggtgagcctgacagcaccccatcttgcctgcctagttcatgccccagggctgtc

SEQ ID NO: 890521 - DNA, 658 bp, Homo sapiens
tgaatatccacatacctctcacccagcttagacagttattaattgatggtcaggctggtttcatctctacctctgcctccacttgctcttccccccagattattattattattattattattattattattattattattttatttwatttttttttttgagacggagtctcgctctgtcgcccaggccggactgcggactgcagtggcacaatttcggctcactgcaagctctgcttcccgggttcatgccattctcctgcctcagcctcccgagtagctgggactacaggcgcctgccaccgcgcccggctaattttttgtatttttagtagagacggggtttcaccttgttagccaggatggtctcgatctcctgacctcgtgatccacccgcctcggcctcccaaagtgctgggattacaggcgtgagccaccgcgcccggcccccccagattattttgaagcaaattccaaatatcacataatttcatctatgacatgtttattgtatccttatttaatttctatatttgtaatgttttataatatgtataatatattggtacactagtatataaaatttacaattcacaaataaatataaatattttggaggttgtttaggctacattttttaacaatgatgtgcctgaata

SEQ ID NO: 890522 - DNA, 658 bp, Homo sapiens
tgaatatccacatacctctcacccagcttagacagttattaattgatggtcaggctggtttcatctctacctctgcctccacttgctcttccccccagattattattattattattattattattattattattattattttattttwtttttttttttgagacggagtctcgctctgtcgcccaggccggactgcggactgcagtggcacaatttcggctcactgcaagctctgcttcccgggttcatgccattctcctgcctcagcctcccgagtagctgggactacaggcgcctgccaccgcgcccggctaattttttgtatttttagtagagacggggtttcaccttgttagccaggatggtctcgatctcctgacctcgtgatccacccgcctcggcctcccaaagtgctgggattacaggcgtgagccaccgcgcccggcccccccagattattttgaagcaaattccaaatatcacataatttcatctatgacatgtttattgtatccttatttaatttctatatttgtaatgttttataatatgtataatatattggtacactagtatataaaatttacaattcacaaataaatataaatattttggaggttgtttaggctacattttttaacaatgatgtgcctgaata

SEQ ID NO: 890523 - DNA, 706 bp, Homo sapiens
gcataattagctattggtcagcggctagaaactgaggtcttggaatatcccctatgctactaattgataagggtgtttggtagtcttaaaattttaaaccatgctgttccagtttctctataaagtttatgcaaacaatgcgacttttgatgaacatgtgctttgtttctgtgaggtttggaatgactataactgaggtcagtcacgaagatactactacttgaccaacccccagtaaaaactctgcacttttagactcaaaagaacttttctggaagaaaacacttcaaacatgtgattgtgatgcctttctgggagattaaatatgtcctttatgacttcattgacttttggaaactcatgcctgrcattctccagacactgcctggtggtcttattttcctttattagaccttactttccttcactaataagtcttatccagaatttaaaaacttctgagtcctgagagtacctctagtgcatcccaaacctgagagtgctcttgaaaaaaaactgattcatcattttatccacaatattggcatactagctgtgcctatttattattgtttttaaagattgctctaggattttacatatttatctttagcttattccaatttactaccaaataacattatgctacctcatgtctaatataaaaatctacaacataatactactttttacctctcattttaaa

SEQ ID NO: 890524 - DNA, 544 bp, Homo sapiens
ttaggagctttaagatttaattacttcctcactggattttagacttgcatggggcctgtagtctctttgttttggccaatttctgccatttggaatgggtgtatttgcccaatgcctgtacccccattgtatcctggaattaactaatttgattttgattttyacaggcttttaggcaaaagggatttgccttgtctcagatgagactttggatttggacttttgggttaatgctggaatgagttaagactttgggagactattggaaaagcatgattgtgttttgaaatgtgaggacataagatctggcagaggacaggggtggaataatattgcttggctatgtctccaaccaagatctcatcttgaattgtaatgtgaattaaaattccattgtcttgggtgacagatcttgtgaaaggtaattcggttatggggttgtttcccccatgctgttctcatgatagtgagtgagttctcatgagatctgatggttttataagaggtttttccccctttgttctgaactgctccttcctgacat

SEQ ID NO: 890525 - DNA, 663 bp, Homo sapiens
aggtaattatatatgtatgaaaatatttaaatcagataaaagcctaggagcatgttgtttaatgcctctatgctggggcattaaatatcaattgcaattaagcctgtgagccatgtatctgatttatgatcacactcagaaatggaattgagctcctatatatctcacacatcatgttccgtagaactaaatagttaaaaatgtgagtcatttatgcyggtccctgacaacatttcaaattctttaatgtgaagctagaaagcatcatagggagcttttctattttttagaggaataagagcagtacttccaagaatccaattattctcaattaaatgagttctgcaaaagtaaaggcctgatttcactattaagaggcagaagttagcaaccaacagaagagtagagtatgtatgtagacttttcccatttagaaaaaaaaagtgcagctcactgacagcactcattaaattttacgtaaacatgctcttcgaagctgaagcaaatctgactaattttcaatgtgaaaataaaatataaaaaactgttttttggagctatttctaaacagagctaatatcagaattgtctgagtcatcagaatcgtctatttcagaaaaattggatttatcaaatgaatctacaaccaaaaattgttcgaga

SEQ ID NO: 890526 - DNA, 624 bp, Homo sapiens
ttcctttccttccttctttcgagacagagtctcactattttgtccaggctggtctcgaactcctggcctcaatcaatcctccctcctttggtcctcccaaagtgctgggaatataggtgtgagtcattgcacctggccagaacaatttcaagggagttggcttttcaaagactttcatctagagtccataccaaagaagaaaggattgttggctaatcaattaaagcaagatcattgggcatacttttattttgcagcagtaaaattcacaggagaattacatcaggacaaatggcttataacttaggctatgaataaagcaagccttttctaagtccacatttttgaggaaaaagttacatggaatgggggatgtctggtggtttaggctatgagtcttctgggatggtgtaagtagcatgttcscttcccatctgccctcatcctcatcaatggtaatgaagagaagaggcgttgcagaggaagaacacacataacttagcagctgatgggcttgagcaggacgcaactgggaagaatcaagattaattttcaggtatgtcagaagatttcagacccattgcacaaccaatggaaagatttgaagtgggattaaggttaggt

SEQ ID NO: 890527 - DNA, 624 bp, Homo sapiens
agttgaaggcctgaatagaacaaaaacactgatcttcccctaagtcagagataattctctagctgactaccttctgatttcatctgcagtattgactcttcctgtctgatggtctttgaactaaaactttggctttccctgggtcaattggcccaccctgcagattttgggtttcccatcctccataattgcctgatccaattcctggtaataaatctttctctctctctctctccatatatatatatatatatgtctctgtgtgtgtttgtgtgtgtatgcataggcatgtatagacacacacatatatatacacattaatttttcccccagagkacccttgatgaatacaaatggtaactctggaaaactgttacttgtttcagaaaagcggctccagtgattaataagattttgatgttaagaggcacgtggagtttgaataaaattatttcataaaatttgcaggtggaaaaaagtaatattttaaatgtaatgctttcattcacagggtgtgttatttaaaataaatatgcaactaaatcaaatgcatacatatttaacttttaaaatttatttttttattagtatatattttcaagtcaggctcttgtcgtcattttt

SEQ ID NO: 890528 - DNA, 481 bp, Homo sapiens
aacactttttgtatttacccaaagagactttacagaatctatagagactctatcctgaatctaaatcattaccttacaagtatgcatagtggaaccactgagtagactatagtcattggatgagcggagagaggggaatgatgaggtcaatactaagagctgtaccttcttttatttatttacttatttttttcctgagacggagtttcactsttgttgcccaggctggagtgcaatggcgcgatcttggctcactgcagcctctgccttctgggttcaggcaattttcctgcctcagcctcctgagtaactgggactgcaggtgtatgccgctacgcccggctaacttttgcatttttttagcagagatgaggtttcaccaggctagtcaggctggtcttgaactcctgacctcaggtgatccatctgccctggcctcccaaaatgctgggattacaggtgtgagccaccacatccggcc

SEQ ID NO: 890529 - DNA, 655 bp, Homo sapiens
ccataaaacattatataaatacaaggttttatttttgcagtttggtaagtaattttcattattcaaatacttaaatttttttccttaaaatttgtttgtttgtttgtttgttttgagacagagtctcgctctgtcgcccaggctggagtgcagtggcatgatctcagctcactgcaagctccgccttctgggttcacgccattctcctgcctcagcctcccgagtagctgggactacargcgcccgccaccaaacccagctaattttagtgtatttttagtgagacggggtttcaccgtgttagccaggatggtctcgatctcctgacctcgtcatctgcccgcctcagcctcccaaagtgctgggattacaggcgtgagccactgcaaattgttttctataaatgcaaaacacagggtattgttgaggttggtacgtagggaagtgcttgcagattctgagtttgtgcagttcttgcaagttttcacagggcaatgtctctttatcacaaaacacttctcaaataacttcagttaaaaaaaagtctcctctgctgctgactttatgtctaaaggtccttcattgccctcaagtagcacaggcagcaagttgtaaagaacacagaccacgtggagcaaaactaaactgactgctc

SEQ ID NO: 890530 - DNA, 666 bp, Homo sapiens
tcttttgcttaacctacctggtcttgtgtgtcatttttttttctttggtttttctttttcttggagataggatctcactctgtggctcaggctagagtgcagtggcatgatcgcagctctttgcagcgttgaccttccatgytgaaatgatcctcccaactcagcctccggagtagctggcaccacaggttgcacaccaccattcccagctaattaaattgttttttttttttagagatgagatctttctatgttgctcagactggtctcaaactcctgggctccagtgatcctcccaccttggcctttagagtagctgggactactcgagggcacacaagtttgttgtataatatttaattttgtcataaagtatagttgtcaaagataatgatatatacatattaaatatatgactaaaagtatagggacctgtgtagactcatctgcttctatgacagtaaaataaaaaaaatagacttcatagtttgaggttcacaggaaaattgagcagaaggtacagagaattcccatttacctcctgccccaatgcatacacagcttctctcattatcagtatctcccaccagagtgtatattcattacagttcatgagctcacactgacaaatcattatcaaccaaagtcatagtttacattagcatt

SEQ ID NO: 890531 - DNA, 650 bp, Homo sapiens; identical to SEQ ID NO: 871479

SEQ ID NO: 890532 - DNA, 706 bp, Homo sapiens
atgaaatagtgttttgcagaatgatttatatctgagtctatacccagccaaaatatcaattaagttagagggcagaatagggatatttttagacatgaatggaatttaaaaattattccaagggttccttggatccttactcagaaagctacagaaggatatgtcctagtaaaacaaggaaataagccaaggaagaaaacaacataggatctataaacagggaactcaacacaagaaagatgtaaatgaactcctggggcagcagtgaagcaaggtcccaggatgacaaatgtataaaatgcaacggaacaaccagtcctgattagaaaagacaaagccaaaagggagatctctgatttaaaatgaacaaaatggaactgatatattatcttatatgttgaccgtgttttgaaagatttcatagatctgtcagtgaattagaaaagaatcagctagagatatacacacacaaagaaacaaagaaaattaaaatgtaaggcaattaactcgtgggaaaaaaagttgaccaaaaaaataaaygaaattacagctgctcatcaatgaacaatatttacattgttaaatagtgtaaacagtgaattatcaaaaaattgggttatataactgttgaaaggatgggagaaaaatgatgtgggaatgttaagacagcatgatttttacctaccataatagaagataatacaat

SEQ ID NO: 890533 - DNA, 605 bp, Homo sapiens
catgctacctcaattagttcatgcaaccttgtgagataaagacttaagtttgaatttccctggctacaagtccatggtttttctattaagccatgttggatggtgtcaattggtgacatcatccatgtgaacattcctcatgtttagatctagcaggacaatgtggcatagagaggggtggtcaggagaactgagttcttagcctggtcccaaggccacctcttgggaagtcctttcaccactctggggtccartttccaaatccagagtctcctctatctaacattttcagatgaaataaaatccagtgaaagacataataacggaataaatattttcagctattatcttaaatggattacttcaatattcatcttttgtttaaatctacatctcatttctctttaggtagtatctttttgaaaagctgtcatttcaaagtactgaaaacctaaaatctaggcaatgaaagtagagtaaatgactgaggttttcctaaaattaccctggaaagatgagaggattcaactactgttctgggaaatggaaatagctgttcccagcactcactcctcccctgatgctcccaattaacttttaaggac

SEQ ID NO: 890534 - DNA, 601 bp, Homo sapiens
agtccttcagagcaataattagggttaaaatcacaacataacctggctggagaagtgttagacctgacaagggggataaaggacaccaaaggaggtgtaggatctagtcaacatggaccagaaaaaactaggagtcgtagtagattctaggggtgctggatcaaaagggacagaacataaagttgaatgargaaaaatatgttgatgtgggatcattgtcctggaatacagaatgtaatatcctgtcaaggacccttgggaaaagtgttagtgtgcttggaggaagcaacagcctaccataaatgaagtagaaacgtcaaaattgctatggtagcagaaggaaacaagggctcggagaagcagcatgcaggagtgggtatattttgtaaagcctaacaactcacctaatgccaatgttctgagatattccatttaccaaagcagtaaagaatacatgagtgacaaaagaccattcatatcatgaagagtgcattgggggctctcccttacaaactatggctagagatgtcacagaactaggctctcaaatggcaatgcaaagataggatcataaaatgataaatgcaaagtggtgtgtttc

SEQ ID NO: 890535 - DNA, 681 bp, Homo sapiens
aaatgacagacatggaattcagaatcttgacggcaaagaagctcattgagatcacagagaaagttgaaaatcaatccaagaaagccaagcaatccactaaaacaaagagctgaacaacaaaattccctttttaagaagaamcaaactgaacttcctgagctgaaaagctcactacaagaatttcataatacaatcagaagtattaacagcagaatagaccaagttgaggaaagaatctcagagtttgaagactggttctatgaatcaactcagtcagacaaaaataaagaaaacaattaagaaaaatgaacaaaacatcccagaaatatgggattatgtaagaaggcaaaattaacaattcattggcattcctgagagaggagaataagcaacttgtaaaatatatttgaggatatagtccacaaatattttcctactcttgctagagaggtcaacatgcaaatccaagaaatacagagaacttcagccagatacgatataagataatcattcctatggcaattaatcatcagattcatcaaagggattgcaaaagaagaatccttagaggcagctagagagaaggtgccagtcacctagagaaggaattccatcagcctagcagcagacctctcagcagaaacattacaagacagaaaagattgggggccaattttcttt

SEQ ID NO: 890536 - DNA, 681 bp, Homo sapiens
aaatgacagacatggaattcagaatcttgacggcaaagaagctcattgagatcacagagaaagttgaaaatcaatccaagaaagccaagcaatccactaaaacaaagagctgaacaacaaaattccctttttaagaagaaccaaactgaacttcctgagctgaaaagctcactacaagaatttcataatacaatcagaagtattaacagcagaatagaccaagttgaggaaagaatctcagagtttgaagactggttctatgaatcaactcagtcagacaaaaataaagaaaacaattaagaaaaatgaacaaaacatcccagaaatatgggattatgtaagaaggcaaaattaacaattcattggcattcctgagagaggagaataagcaacttgtaaaatatatttgaggatatagtccacaaatattttcctactcttgctagagaggtcaacatgcaaatccaagaaatacagagaacttcagccagatacratataagataatcattcctatggcaattaatcatcagattcatcaaagggattgcaaaagaagaatccttagaggcagctagagagaaggtgccagtcacctagagaaggaattccatcagcctagcagcagacctctcagcagaaacattacaagacagaaaagattgggggccaattttcttt

SEQ ID NO: 890537 - DNA, 602 bp, Homo sapiens
tcccaagtagctgggattacaggtgcctgccaccccgcctggctaatttttgtatttttagtagagacggggtttcaccatgttggttaggctggtctcgaactcctgacctcatgatccacccacctcggcctcccaaaatgctgagattacagacgtgagccaccatgcccagtgctattgtgatttttatagagaatatacttaatatgttcaccactgtaggttgtattgacattttaacacaattaaattttttgacccctgagcaagaatatgatgaagagatgaagagtgtgtttttttagttttctttctttttctttctttctttctttttttttttttkttttgataaggatttcctatgtggcccaggctaatttcaaactcctgggctcaagaaatcctcctgcctcagcctcccaaaatgccagtattagaggttgggagccactgtactcagcctgtgtgtttcaattttatatattcttggatttgccattattacttttgcttttaatttctagtttcattcagttttgttaagaaaacacacatgtatgattttggttttaaatttatttgttgttgtcattttg

SEQ ID NO: 890538 - DNA, 682 bp, Homo sapiens
gagttctgtagatatctatcaggttcacttgacccagagctgagttcaagttctgaatatccatgttacttttctttctcaattatctgtctaatattggcagtgaggtgttaaagtctcccactattgttgtgtggcaatctaagtctttttgtaggtctctaaraatgtgcttgtttaatctgggtgctccttgaattgattattttagcattatgtaatgctcttctttatcttttttggtctttgttggtttaaagtctgttttgtcagaaactatgattgcaacctctgcttttttttctgcttttatttgcttagtgaattttcctcctttttttattttgagcctatttgtgtctttgcatgtgacacatgggtctcttgaatacagcacaccaatgagtcctgactttttatttagcttgccattctgtctcttttcttggtgcatttaactcatttacatttaaggttaatatagttttgtgtgaatttgatccttttcatcattctagctggttattttgcagacttgttgatgtttcacagtgtcattagtctttgtacttcagtgtatttttgcagtggctggtaattctttttcttttctatatttagtccttctttcaggagttctttcaaggcaggtctggtggtgacaaatttcttcagcatttgt

SEQ ID NO: 890539 - DNA, 675 bp, Homo sapiens
gattataggattgaacttgatgctcaaaaattaaggacatactgtgagatagataggcctactttcaaagtggggtggccccctgaaggtacaatagacaggaaattaattggctatgtgtttaaggtggtcactggagttggaggacaaccaggatacccaggccagtttccctatgtagactcttggcttaatgtgccacaaactcaccccaagtggctacagccctgcctatgatattgcaaggcattagtggcttggggcagcccaaccaaaggaagcagaggaacctaaagtccctagcatctcccaggaaaaggaatccccaaagcctcagctgaaaccagttcttcaggccccacctgaggaaatgggatrtctgccccccatatgtgccagtctacctgtttttggcaagaatacacaggaggcagagttgggagcatctgaagagtcgggctcggaggaaagtgaggctcagtctccccaccaagtggaacagaagcccccattagaaaaaaacaaagaagatggaaagggtgatgcagctaggcacctctgctctggccaaccatgggctttgcagatgccactttgagagaccaggacacaagtttttgatgaccaggggcagatagaaggtggtcctaggcattatgttcatcagcctttctc

SEQ ID NO: 890540 - DNA, 635 bp, Homo sapiens
acagtacataatcttgattgtgcttcattggtatttattgcacatggaccaattcctcacacagtagttagttgcaccagagtataaatacttggtaaaacacacaagaggaagtagaatttacacacaagtgctaactttcaccagcaaattcacgtgggcacttggacataaaaaaaaataaaaaatccttaagataattatatttataatatggatacagttacagtaccatgataaaggagtataaaaaggtattttcccaatgaatcattagctcaataacatactagacaacagaagtagagtttgaattttatttaagatctgcccagcccctctccctttaaaaaatatttaatttctttttgtgcaagtaacatcttctgtggattttgtaattcctaacactgtgcaaaaatggcattttgaaccactccttttttttgkttttgtttttatccacatgtgcagtaatctgaactgtttctctctctcgctctcttttaatgtcctgtcttcaattgacagagtcacatgtcacagagagaggctctgcgcctggtccttccaactaatattgatacataaataagctgtttaatataaacaagtctttctatctgctgtgcaaa

SEQ ID NO: 890541 - DNA, 662 bp, Homo sapiens
tgttcagattagacagcctatgcctaaatgttatctctttataaggcagaaatattaagcagcaacatgtcatggataaaaacaatggattaggaactgagaaacagacattagttctggctaaattattaggtacctgtgtaaccttaaggaaattagacaatttcactgggaaatcagcttccccatttgtaaaataatctttaaagtattatccctcaaaaatccaagattctatgtttataatacctatggtatttttagtcaagaccatttttgttcccaaacagaatgattaacaatttttcttgtaagatcataagaaaacataggttatatttggtaagtaattgatatggtttggctctgtccgcaccaaaatctcatcttgaattgtagctcccataatttccacgtgttatgagagggaaccagtgggaagtaattgaatcatcmgggcagtttcccccataccgttcttgtggtagtaaataagtcacatttgatctgatggctttataagagtttgccctttttggttggctctcattctctcttgtctgccaccatgtaagacatgtctttcaccttctgccatgattgtgaggcctctccagctccatggaactgtgagtccattaaacctctttttcttcataaat

SEQ ID NO: 890542 - DNA, 568 bp, Homo sapiens
ttagtctgatgggtttccctttgtgggtaacccgacctatctctctggctgcccttaacattttttcgttcattccaactttggtgaatctgacaattatgtgtcttggggttgctcttctcaaggagtatctttgtggtgttctctgtatttcctgaatttgaatgttggtctgccttgctatgttgtgggagttctcctggataatatcctgaaragtgttttccaacttggttccattctcctcttcactttaggtacaccaatcaaatgtagatttggtctttcacatagtcccatatttcttggaggctttgttcatttctttttactcctttttctctaaccttgttttcttgctttatttcattaatttgatcttcaatctctgataccctttcttccacttcatcgaatcagctattgaagcttgtgcatgcatcacgtagttcttgtgccatggttttcagctccatcaggtcatttaaggtcttctctacactgtttattctagttagccatttgtctaatcttttttcaaggtttttagcttcttgcaatgggttcg

SEQ ID NO: 890543 - DNA, 568 bp, Homo sapiens
ttagtctgatgggtttccctttgtgggtaacccgacctatctctctggctgcccttaacattttttcgttcattccaactttggtgaatctgacaattatgtgtcttggggttgctcttctcaaggagtatctttgtggtgttctctgtatttcctgaatttgaatgttggtctgccttgctatgttgtgggagttctcctggataatatcctgaaaagtgttttccaacttggttccattctcctcttcactttaggtacaccaatcaaatgtagatttggtctttcacatagtcccatatttcttggaggctttgttcatttctttttactcctttttctctaaccttgttttcttgctttatttcattaatttgatcttcaatctctgataccctttcttccacttsatcgaatcagctattgaagcttgtgcatgcatcacgtagttcttgtgccatggttttcagctccatcaggtcatttaaggtcttctctacactgtttattctagttagccatttgtctaatcttttttcaaggtttttagcttcttgcaatgggttcg

SEQ ID NO: 890544 - DNA, 612 bp, Homo sapiens
tactgtccatatcaataccagcattttggtcatagcaatttaacaagtctctagaaagttccaaattttccctcatcttcctgtcttcttttgagccctccacactcctccaccttctgtctattacccagttccaaagctgcttccacatttcaggtatctttatagcaatgccccactacttggtgcccattttctgtattattcctctcttgcactgctataaagaaataatgtagactgggtaatttataaagaaaagaggtttaattggttcacarttttgccagctgtacaggaagcatagtggcttctaggggagcctcaggaaacagtcaatcattttagaaagtgaaaggaaagcatgcatatcttatatggcagagcgtgaggaagaggagagaatggggaggtgccacacacttttaaacaaccagatctcatgagacttctatcacaaaaacagcaccaaagggggaaatctacccccatgatccaatcacctctcatccggcccagtcttcaacattggggattacaatttgacatgagatttgggtggggacacagatccaaacatgtcagacagtaagagggctttagagtaagaca

SEQ ID NO: 890545 - DNA, 625 bp, Homo sapiens
atcataataaatgtaatgaccatagctagctgaaattttaattcttatttaattgaaaatccatgaaaaatgaaactactccatgttatgcactattcctatttgtaaggtgattatatctcacacgcaaagttccttctttgatttcaatttgatagttatgccttctgtgatatttataagcaattaacatcttgaatatatggttaaatattttaaaataataaaaataactgatcttgaaataaatttagaaatgtttccctgatcaatattgctgagtcttcaaatatattattgggttgtcctttaatggcttcagaaamtactagactttttcctcattagaatttaggattgcagaagttgtgtaaataaacacttttcagttacccaaaacagtgaggcataaatatgaacaaagggatggcgtattaagtctcatgaatactagaacctaaatatctgatttgccccctaaataaccatatgaccatgatacaatgaaaacattagggaaagatttaatttgttattacatttgtgaactattgttgattagttctatttaacacatgatttagtgatttttgtgtctattaaatgtaaaactttattgtttatt

SEQ ID NO: 890546 - DNA, 583 bp, Homo sapiens
aaaatcacaagcattactatataccaacaatggacaagcagagagccaaatcataagctaccattcacaattgttataaagagaataaaataactaggaatacaacttacaaggaatgtgaagtacctcttcaaggagaactacaaaccactgttcaaggaaatgagaggacaaaaacaaatggaaaaacattccatgctcatggataggaagaatcaatcagtatcgtaaaaatggccataccrtccaaagtaatttatagattcaatgatattcccatcaagctaccattgactttcttcacagaattagaaaaatactactttaaatttcatatggaaccaatgaaaagcccatatagccaagacaattccaagcaaaaagaacaaagctggaggcatcatactacctgacttcaaactatactacaaggctacagtaaccaaaacagcatggtacatatatagaccaaaggaacagaacagagtcctcagaaatagcaccacacatctacaacaatctgatctttgacaaacctgacaaaaataagcaatggggaaaggattccctatttaataaatgg

SEQ ID NO: 890547 - DNA, 559 bp, Homo sapiens
ggtggtgcacacctgtagtcccagctactctggaagctgaggtgagaggatggcttcagcccaaaaggtggaggctgcagtgagccgggatcacgccactgcactgcagcgtgggtgacagaggagtgagattctgtctcaaacaaaacaaaacaaaaactggagatagacccatccaacgagaaacctcctagatagtaggaaaccagaaagaattctgagacagtggttagagcacctgcttagacatttatttactattatgattctaagcaagtcaactgaacatgtckgtaaatactgaaatacttctactgacattactatatgaaactttgttttttgttcttttgttgtttgctacataaaactttgataaactttgtttaactttatctggccatcctccatctccctccaggtgaagcttctgttttttaggaaaccactcccccaactcttggtcaaatttcatgtgaagatgaccccaaccacccctggatgtagcagtggtcagatgatccagtattggaaaatccacatattcaatagatcccca

SEQ ID NO: 890548 - DNA, 539 bp, Homo sapiens
ccaccatgcctggctaatttttgtatttttagtagagatgttgtttcaccatattggccaggctggtctcgaactcctgatctcggtgatctgcgtgcctcggtctcccaaagtgctgggattacaggtgtgagccacagtgctctgccaaattaatttttaaaatgtgcaacagtttctgggtgatgctttccagactgtggattggtagcaggttctgttgctcttagactgtttttggtggggacagtgacatcaaaactgtgatgtatgtatggaagcctcaatttttggatgatcactarcagcagctgctgaaagtttacgacatttgataattgatgagagtgatacatagcataagatgatggtaatgttgaatttaataaaaacattactatttcaacattttcataattaacctttctggtgctctttgttgtaagtttgtagatttatacttctgaaataataaaagcttaaacttgtgccagcctttcaggcatcctgtatttatgttactcaccatcgaggtggta

SEQ ID NO: 890549 - DNA, 630 bp, Homo sapiens
taataacatttctctccacattttagttaaatgatgttgtactcttcacaaagaacacttaaagggcaatgcaccattgggcatgggttctattaatgcccctccaataaacaatcttttaactgtgtttctatgtatacctcattgctacgtcctgtaacagaagggatgcccttcttactgtgmaagcatctcctctctcatcttaggtgagtacactacatactttttgtttagtgtgtgtttattaactactgtctcttaactggaccctgtccattgcctttaagggtttcacatgcctttctgcataaggaaacaataaacaagcacccatccctaacccctagacaccaatttctatctctttcttatgctctctcaaggaaacctggaaataattgtctcttcttactctttatttcatcacttctcattcactgcttaattcacttcagtttggcttctgacaaattttgctctcataaaagtatcaattttttttctttgactcataggcagaattcactgatgttttctttttgagaatgatttattcacttaactttagtgacactacaccccctcggtatcctcacacctctcagttattatttatctttctctctt

SEQ ID NO: 890550 - DNA, 596 bp, Homo sapiens
gtgatctgggtactgttaaaagcattccattttaaaaggggaacagagcataaaagttcagaaaatttgtagcctgatgatgcagtagaaaagaaaaacccatttttctggggagaaattcaagccggctgtagaaatttgcgtaagtagtaaggagcctaatgttaatccccaagaccatggggaaatgtctccaggccatgtcagagagcttcacagcagcctctcccatcacaggccaggaggcccaggaggaaaaattggtttcgtggaccaggcccagggtccctgtgctatgggcatcctaggaacttgatgccctgtgtcccagctgctccaaccatgtctgaaaggggccaatgtacagcttgggctgtggcttcaaagggtggaagccccaagscttgggagcttccatgtggtgttgagcctgcaggtgcacagaaaccaagaattgaggtttgggaacctctgcctagatttcagaagatgtatggaaatgcctggttgcccaagaaaaagtttgctgcaggtagggaaacctcatggataacatcttctagtccagtgcaaaagggaaatgtggggtcaaagcc

SEQ ID NO: 890551 - DNA, 636 bp, Homo sapiens
gcatctcctagaacgctgaggaagaaagacagggatttgtccattaggcccatttatgtctgaggacacaatacagaccacacaataactaactcaaacttaattagataattcataaaaataattcctgagtaaaaagaaactgattcagggatgcctgaactggaaaggaagacagggacttggggccagggctgaggcaggaagaagccaatgtacccaaaccctgcttgctggcctcccragaggagcagaaccctggaggtggtagactcaggccagaggccttctactggcaaacctcatggataagaagtgttgttagctgtggaactttgatagcaaagaattccatttggacatggcacagaagggaagagggaccacatagctgtccatcaaagcagggatgcacaggatagagggccaagcatactcagccattgcccctatgtggaccctaagacactgctcgctccttaagtcagtcacagcatctgaagacatcaaaaccagattgggcagggctgagtcacagctgcctaagggtaagcgaagagagaaaaacagccctttgacccagaccagccagaggatcccaaggagggagaaaccaacacccaaagtctgactctt

SEQ ID NO: 890552 - DNA, 679 bp, Homo sapiens
gtttttttttctttttttaagttattgacaggcagattcaaaaatatatatggaagtacaaagcatatcaatttgccaaaacaatttttttaagtaataacaaggtacaaatacttttactttccaacttcaatacataccataaagctacagttatcaaaacagtgtaatactagcataagggtagtatataaataacagacaaaaatgaaaagtataaaactaagttttatttgtctactcaattaattattggcaaaactgcctggcaatttattatgggaaacacagtgtgttcagcagatggtgcagaggacattcagtatacacacgcagaaagattaacttagactctcactttacaccatacacacacacacwcacacacacacaccttaaaatagatcttaggctgaaatgtaatagctaaacaatagagcatttaaaagaaaacacagaagaaaatttttgagagctaggggctatacagagacattttagctcagacaccaaaagcatgatccataaaagaaaaaacattgaaaaattaggcctcatcaaaattcaaatatgttttgtactgcaaagacaccataaagaaaatgaaaagataattaaaactcatatctaataaaagacttgtatccagaatttgcaaatctacaagcactattgcaac

SEQ ID NO: 890553 - DNA, 635 bp, Homo sapiens
tgaaacagatgaggaaccagccctgcccccttgacctgtggtaagagtggcagctctgatgctctccaaattgcctttgggattattcttcccttttcttgaaagataaagcatgttcacagccaaatggccccatcatcctatcctgacaatgtacgaagcccaatatcctgtttttttttttttttgcttttyaataattttttctaattttgttactttaatttccccatagcaccttggcgatggcccaacatccttctttcagtcactcctgtttatttctgccccctttagtcccagctggcaacatttctcttggtataatcccatccccattcccggcttctgttgaaatagctgatcaaatccttcattcacatccatactatctccttatcaaatagtgttcagccacacccttagtgttcttttcagaataatctttctcattctttgcaatatggatagcctaagaatttgccaaatcttcaagttctggttcctttttgcataggaattccttcttaaattcatttctcttttctccattttactagaagcagtcaggaagaaccaaggtactccttcaatactttgcttagacatttcctcagctaaatatcaacttcact

SEQ ID NO: 890554 - DNA, 635 bp, Homo sapiens
tgaaacagatgaggaaccagccctgcccccttgacctgtggtaagagtggcagctctgatgctctccaaattgcctttgggattattcttcccttttcttgaaagataaagcatgttcacagccaaatggccccatcatcctatcctgacaatgtacgaagcccaatatcctgtttttttttttttttgctttttaataattttttctaattttgttactttaatttccccatagcaccttggcgatggcccaacatccttctttcagtcactcctgtttatttctgccccctttagtcccagctggcaacatttctcttggtataatcccatccccattcccggctyctgttgaaatagctgatcaaatccttcattcacatccatactatctccttatcaaatagtgttcagccacacccttagtgttcttttcagaataatctttctcattctttgcaatatggatagcctaagaatttgccaaatcttcaagttctggttcctttttgcataggaattccttcttaaattcatttctcttttctccattttactagaagcagtcaggaagaaccaaggtactccttcaatactttgcttagacatttcctcagctaaatatcaacttcact

SEQ ID NO: 890555 - DNA, 637 bp, Homo sapiens
  misc_feature 617: n = A,T,C or G
cagcaattctacctttgtttagtcaagagaagtaaaatgcatgtccatacaactatttgtgcaagaatatttataaaagctttgttcataatagcaccatactggagacagtctaaaagtgcattagtaacagaatacataaacagattgcagtatatccacatagtgaatatgttcaacaataaaaaggaatgaagtactgatatatgcaatagaatatatgaatatccataatgttatgctgaaataaagaaaccaaacacaaaagagtgcgtactatatgattccatttatatgaaattctagagaaaagcaaaactaatctatggtaacagaaagcagaccagcagttgactgaggccagggatgggggtgatgggggagatgactacaaagaggcatgaggcaatttcttggggtcatggaaaggtcttgattgagatagtgttcccatagtcatatacatttgcagaatgtcatcawaatgaaccttttaaataggtacattttactgcaaattaattatacattaaagtcgacttaaaagcaaaacatcctaaagatgggcctttcccaattcttattactgtaaagacaataattgactttaaagtgancattgttatttacataaacg

SEQ ID NO: 890556 - DNA, 686 bp, Homo sapiens
taattaaactaaaattcttatattttctatatttggcaagagatgtgcttccatacgtgggacttatttagtgataaaaatgcatgtccttcaaatcttactataggttcatttttgattccatagtaattttggattcaaaataacaaaagtacctaatgcagctttacatttatacaattaccacatacatgagaatggctataattgtgattatgtgtctttatacaaccatggtctaraacttaatatttggctcctattaccccaaaacaacaaaaattgaatagcttccatagtaatacagaagtaacattttaaaaattataaaatatacaagatttgggggttaatgtggcagcagatgctatgctgtaccccaatacatcctctccaaaattcccatagaatacacctgaaaatgtccaaaaaaaaaaaaaaattaaaaggggttacaggtctaaaaaccaagggcaaagaggacaagttcccaaagtcttagtggtgattctactcacagcttggtagatcttatccaataaagaagtaccttttaaataaaacaccacaggcctcattctctgaaccagaataagatctaaaccccccacacataacaaggaaagattttcattcatactcctcctcattggggtcttctaactctgagacccatagctttttgc

SEQ ID NO: 890557 - DNA, 603 bp, Homo sapiens
atcgttctagcccaggagtttgagaccagcctgggcaacatggcaaagccctgtctttacaaagaaaaaaaaaatttaaaaagaaattagtcaggtgtagtcccacgtgcctgaagtcccagctacttggtaggctaaggtgggaggatcgcttgagcctaagaggtcaaggctacagtgaaccatgatcatgccactgtactgaagcctgggtgacatgagtaacatagcgagaccctatcacacacacatatatatatgatatatatataygtcaccctatcacacatacatatgcgtgtgatatatatatatatatgatttctttctcatttgagagggctgaatatatatattcacatatctatcatatataccatatatgtatctattgatatatatggatatatatgatatatattattcagatcaactcagatcaatatcatatatatcatatatcatatatatttattatatatggtatatgacatatatgatatatatgatattgatatatatggatagatgatatacatatcatctatgatatacagatgatatatatgatatatatatcaatagatatatagatgatataga

SEQ ID NO: 890558 - DNA, 606 bp, Homo sapiens
ggctgtgggaaatgttttaggttggagggtcctatgaaggagttctttagagggacattgtctgttacctcacagagagaggtagacagaaacatttctttttgtaccagttttctcacctgccacttcatcaacaataagaagaggctatggattcttgaaggctttggacctggcactctactgagtttggggaattaaattcctcaggaaaatagttgcttttggtggggagattttatatmtacttccttcaaacaaaccaagccaacctggagaaaacgaagtagaagatagagaattttatcaaagaatgttattaggtggatagccaacctgaagaaaatgaagtagaagattgataattttatcaaagaatatgattagatagatagtgacaaaggttctttgtctgaccaaattttgtcaggctcctaaacttttcccaaggcacatctgtgtacttccttgtaaaatacagttttagcaagaattctgctaagtcaacgtagcaagaatatcctccccttgatacctggttgcccttaatatctgatcaggtttctcaccctccatcatccctcagatgacgtgtgatcaccctgg

SEQ ID NO: 890559 - DNA, 628 bp, Homo sapiens
ctaaatgccccaattaaaagacacagactggcaaattgaatacccattggtgtgctgtattcaggagacacatcttacgtgcaaagacacacacaggctcaaaataaagggatggaagaaaatttactgagcaaatggaaagaaggaaaaaaaaatcaggggttgcaatcctagtctctgacaaacagactttaaaccaacaaagacccaataagacaaagaagggcattacataatggtaaagggaacaattcaacaagaagagctaactattctmaatatatgtgcacccaatacaggagcacccagattaataaaacaagtttctaaaggcctacaaagagacttagactcccacacaataatagtgggagactttaataccccactgtcagtattagacagattaacaagacagaaaattaaaaagaatattcaggacttgaactcagctctggatcaagtggacctagtagacatctacagaactctgttccccaaatcaactgaatatacattcttttcagtgccacatggcacttattctaaaatcgaccacataatttgaagcaaaacactcctcagcaaaagaactgaaatcataacaaacagtctctcagaccacaga

SEQ ID NO: 890560 - DNA, 629 bp, Homo sapiens
ggcaaaagctggaagcattctctttggaaactggtacaagacaagatgccctctctcaccactcctattcaacatagtattggaagttctggccaaggcaatcaggcaagagaaaggaataaagggtattcaggtaggaagagaggaagacaagttgtctctgtttgcagatgacatgattttatatttagaaaactccatcatctcagcccaaaaacyccttgaactgataagcagcctcagcaaagtcacaggatacaaaatcaatgtgcaaaaatcacaagcattcctttacacaaacaatagacaagcagagagccaaatcatgaatgaactctcattcacaatcactacaaagagaataaaatacctaggaatacagctgacaagggatgtgaaggacctcttcaaggagaactacaaaccacagctcaaggaaataagagaggacagaaaacaaatggaaaatcattccatcctcatggataggaagaattaatatcacaaaaatagccatactgcccaaagtaatttatagattcaatgctatccccatcaagctaccattgacactcttcacagacttagaagaaactattttaaatttcatatggaatcaaagaagaccc

SEQ ID NO: 890561 - DNA, 601 bp, Homo sapiens
aagagcaatatatgtttttctacattcataattaaggacactgactgagtttcagggagttaaaatgacttattcaagatcccagagctggtcaacagtggaggcaaaactaagatctgacttctgccctattctgcccaccctcttgcacccctgttttaaaaacaaatagtacatcaccattacgcctttttaaggatgtttcatatggccagcaatttaaagtacatgggtcatattttttaatagagcaaagtgaatgacatcaagaatacacacaaactctccatatatttccaatcagtggatctaagacctataaaattgttcttttttgtattagtctgaaacgtatggaaaggaaattctttagggaaacattaacatcctttgcttctatcatctagcacttcctctagaattaagcaaacaacaacacaaacacactggcrtgcgcgcgcacacacacacacacacacaccacaaacaaaaccaatacattgtctggccttacttactcatcttagttaaagagcagtgcttgcttaattgctattctgaagcaaaaaatgtggacgtttctggtactgtgattacttca

SEQ ID NO: 890562 - DNA, 649 bp, Homo sapiens
tctttttatgtgaacattatttttgcttgttttttttcagtacaaaaggttttaattttgatgaggtacaatttatcaatttttctttttatggaccatacttttggtgtcaggtctaataactcttgtctagtcctaaatcccaaagatgttttcttttcttattattttgccaataggtgtatagttgtccgattactacaactccattcgttgagaagtctagcacccattcttcttccattgaattacttttgcattttgtcaaaatcagttgggtatatttgtggggtctatttcttgcttctctgtttttttctattgacctatgtgtttatccttctgccaataccacactgtcttgattactgtatctatgtagtaagccttactagtaggaggagtgatttttccctcatctttttgtaagaaaaaaattcctcttttttcaccctttttttcctcattaaattcctattcaagagtacattcaagagtaaactcgtyggcaattttcctatccataaattagctatggctaagagttcattctatctagtctaaatagagtaagtgccttttgggaggagacaaaggaacctgtttactgtgggggattgccaagtgcacaacttagattttgtagggt

SEQ ID NO: 890563 - DNA, 631 bp, Homo sapiens
tttctggtatctgaaaatgtccttaatccacaacacaaagttgtcactttaagccagagaattcaactctgaattcagcagctgttgaaacttgcttgaaacatatgatggtgagggatctagtatgggggcaatgtaattaaccagcccttggagcagggcttcccaaccttggcaatattgacatttggggctacaaaatcctttgttgtggccgtcctgtgcattataaggtgtttagcaacatccctgccctttatctactggatgccagtagtgacccccacttaaaggaaaaaaamcaaaagtgtctccaaagagacattgccaaatcaccccacagttgagaacaactgctctaggttctttatttctatagcagactgtagtaaagagcactgaacttggagtcattaggacaagtaataatctataatctgccacttcatctgtgtgaccctggacctgatatctgatgtctttgaatctcagtttctttatctgtaaaatgtgtttgctaaaacccccttcacaaggccatttagaagactcaaagagactctgtacatgaagtaccagatacacatagatgctccataaatggttattgtttaataccatcattattctg

SEQ ID NO: 890564 - DNA, 503 bp, Homo sapiens
cgtgtttgacagttccttcttcacaagggttcactttgctgccaccttgtgaagaaggtgcctgtttcgccttctgccataattggaagtttcctgaggcctcctcagccttgcaaaactgtgagttaattaaatctcttttctttgtaaattacccagtctcaggtagtatctttatagcagtgtgaaaatrgactaatacagagaattggtaccagcacagcggggtactgctataaagataactgaaaatatggaaaagactttggaactgggtagagattggaacagtttggagggctcagaagaagacagaaatatgtggaaaagtatgaaacttcctagagacttgttgaatggttttgaccaaaatgctgatagtaatatggacaatgaagtccaggctgaggtggtctcatatggagatgaagaacttactgggaactgaagcaaaggtcactcttgctatgccttagcaaagagactggtggcattttgccctt

SEQ ID NO: 890565 - DNA, 503 bp, Homo sapiens
cgtgtttgacagttccttcttcacaagggttcactttgctgccaccttgtgaagaaggtgcctgtttcgccttctgccataattggaagtttcctgaggcctcctcagccttgcaaaactgtgagttaattaaatctcttttctttgtaaattacccagtctcaggtagtatctttatagcagtgtgaaaatagactaatacagagaattggtaccagcacagcggggtactgctataaagataactgaaaatatggaaaagactttggaactgggtagagattggaacagtttggagggctcagaagaagacagaaatatgtggaaaagtatgaaacttcstagagacttgttgaatggttttgaccaaaatgctgatagtaatatggacaatgaagtccaggctgaggtggtctcatatggagatgaagaacttactgggaactgaagcaaaggtcactcttgctatgccttagcaaagagactggtggcattttgccctt

SEQ ID NO: 890566 - DNA, 568 bp, Homo sapiens
taaatgatgagttaatgggtgcagcacaccaacatggcacatgtatacatatgtaacaaacctgcacattgtgcacatgtaccttagaacttaaagtataataataataataataataataataataataaaagaagtggtctatggttatattattacaaatcttgaaaagcagtgagtagtgtrgctgattgttaaggtgcctgaaaggagaaaaattacataatcaatgaggaagtctgggaaacatgtatatggatctacaggagggggcacaacctgtgaaggtctttgcattgcatgtttacacccaccagagattatcctcacaaaaggggcaccaaacaccaagaagacagaatggcctatgccgttgatatgagccagcctctggcattagcctttaaagttgctaggactatgggatcatgaacagagtagccatagtggcagggcaggatgctatgcatgggcccaacagccagcatgggctgttatgcaccatgaatgttacagctacatgttgctgatgctgtatgtccaaactgccatcaacagagaccaacac

SEQ ID NO: 890567 - DNA, 623 bp, Homo sapiens
gcctgagcaacagagataatgtacaatcatgcattgcttaatgacagggatacattctaaacaatgcaacattaggcaacttcatcattatgggaacatcatagagtgtacttacgcaaacctaggtagtatagcttactacacacctaggccacacacctattgctcttaggctacaaacctacatagcttgtaactggactgcatactgttagcagctgtaacacaatggttaagtatttgtgtatctaaacatatctacataatgaaggggtccartaaaatacagtattataatcttatttggaccgccaatgtaaatttctgttgttcaccaaaatgtcattctgtggcatatgacaatacttgccatggattatgaagcagaaagttgcaagaatgacaggttttgctgcatttagggtgttgagtataattcagtaatttaactttggacagtctgagtttgaggcactagttagaaatctaggtagagatgtggaataagctattggaaaactgaggctgaagttcaagggtgaggtctatgcttgagatagaaatttgagagttgtcaaaatatatgttacttaaggttgtgataggcagaataatagcatcca

SEQ ID NO: 890568 - DNA, 615 bp, Homo sapiens
ttatttcagtttcaaggatgggtactgggggaggctgggggtggacggggaacctgagggtgcagagtggggtttgtcatgcctgtcttcatctcagcggccccactctgagtggccctatctttgcccatcttgattcttctcagtctttcaagccaggctgaaccgagcctttcctgactcccccagttagaaggaatcagccctgtctctatgtttctgcagatttttgaaaaggaacaactgtcyttgtacaaagcccaacagacctccttgccttttccaccagaccctcgggctctttatttactttgcctccttctgcccttagcggggtgtgtatgtggaggaaggcagcgttggggagtgggcaatgcaaggaatggagcatggagaaggggaaggaagctgtgcatggattgatggacacgcaaagaactaactaacacagggctattttacgcatatacacatcgtatcttactatacacagcctgtgtatgtgtacacagtggctattaggtattacacacacgtatgcatataaaacacatatagcatacagtgtctattgtaagatggagaacatagcaaagggtgctatacagcataaga

SEQ ID NO: 890569 - DNA, 689 bp, Homo sapiens
caattacctcccaccaggtcactgtcacaacatgtgggaattcaggatgagattcgggtggggacacagccaaaccacattattccaccccagcccctttcaaatctcatgtgctcacatttcaaaaccaatcacaccttcccaacagtcccccaaagtcttaactcatttcagcattaaatcaaaagcccacagtccaacatctcatctgagacagggcaagtcccttccacctataagcctgtaaaatcaaaagcaagttagttacttcctagatacaatggagatacaggcattaggtaaatgcagccattccaagtgggagacattggccaaaacaaaggaactccaggactcatgcaagtctgaaatccwgcagagcaggcaaatcttaaagctccaaaatgatctcatttgactccatgtctcatatccaggtaatgctgatgcaagaggtgggctcccatggccttgggcagctctacccctgtaactttgctgggtatagcccccctcctggctgcgttcatggactagtgttgagtgtctggagcttttccaggctcatggtgcagactgttggtggatctaccattctgggttctggaggacagtggttctcttctcacagctccactaggcagtgctccagtagggactctggatcgaggctccaaccccacatttcc

SEQ ID NO: 890570 - DNA, 666 bp, Homo sapiens
tttattgacttgcatatgttaaaccctccctgcattcctggtatgaaactcacttgatcatggtggatttttttttatatgttgttgaatttggttcactagtattttgttgaggatttttgcacctgtgttcatcagagatactggtctgtagttttcttctcttttcttttttgttttgtcctttcctggttgtggtattacggtgatactagcttcatagaatggtttagggaggatttcctctttctctatcttttgaatagtgtcartaggattggtaccaattcttctttgaatgtctgatagaattcagctgtgaatctgtccggtgctgactttttttattggcaatttttaaattaccattttaattttgctgcttgttattaatctgttcagtttctatttcttcctggtttaatccaggagggttgtatagttccaggaatttagccatctcctctaggttttctagcttgggcgtgtaaagatgttcatagtagccttgaatggtcctctgtatttctgtggtatcagttgtgataactcccatttcatttctgattgaggttgcttggatcttttttccttggttaatcttgctaatgatctatcaattttgtttatcttttcaaagaaccagctttttgtttcatttatctt

SEQ ID NO: 890571 - DNA, 667 bp, Homo sapiens
cttgggtgctgttaaaagcattccactttaaaagggaaacagcataacagttcagaaaatttgcagcctgatgatgcagtggaaaagaaaaacccatttttttgaagagaaattcaagctggctgcagaaattcacataagtagcaaagagcctagtgttaatccccaagaccatggggaaaacatctccaggacatgccagagaccttcacagcagcccctcctatcasaggcccagaggcccaggaggaaacagtggtttgtgggctgggcccagggtccttgtgctgtgtgcagcctagggacttggtgcctgtgtcccagcctctccagcgtggctgaaaggggccaatgtacagctcagcctgtggctttagagggttgaagccccaaggcttggcagcttccacatggtgtttagcctgcaggtgcacagaaggcaagaattgaggtttgggaacctctgcctagatttcagaagacgtgtggaaacgccttgaagcccaggcaaaagtttgctgcaggggcagggccctcatggagaacctctgctatgggagtgtggaagagaaacgtggggttggagcccccacagagcatccctacttgggtactgcctagtatagctgtgagaagagggccaccatccttcagaccccagaatgga

SEQ ID NO: 890572 - DNA, 667 bp, Homo sapiens
cttgggtgctgttaaaagcattccactttaaaagggaaacagcataacagttcagaaaatttgcagcctgatgatgcagtggaaaagaaaaacccatttttttgaagagaaattcaagctggctgcagaaattcacataagtagcaaagagcctagtgttaatccccaagaccatggggaaaacatctccaggacatgccagagaccttcacagcagcccctcctatcacaggcccagaggcccaggaggaaacagtggtttgtgggctgggcccagggtccttgtgctgtgtgcagcctagggacttggtgcctgtgtcccagcctctccagcgtgrctgaaaggggccaatgtacagctcagcctgtggctttagagggttgaagccccaaggcttggcagcttccacatggtgtttagcctgcaggtgcacagaaggcaagaattgaggtttgggaacctctgcctagatttcagaagacgtgtggaaacgccttgaagcccaggcaaaagtttgctgcaggggcagggccctcatggagaacctctgctatgggagtgtggaagagaaacgtggggttggagcccccacagagcatccctacttgggtactgcctagtatagctgtgagaagagggccaccatccttcagaccccagaatgga

SEQ ID NO: 890573 - DNA, 650 bp, Homo sapiens
cagacctgacatgtaaaatgcaatgagtcaggaaagcatggcaccatgcagtgtgatgtgtgaggaggaaaaatgaaacctgtaaaacccagtgaccaaacagagcctagaagaataaacatacttgacattaagtccaacagctatttgcagaaagatgggagaggcaaggcttaaaggaatacctttatatgatgaattaatcccyagggtcagacgctggcctaaatccattgcttatgggaatcatatcatggtccactagccccaagcaacattcttacctcttagcctttgttcagaccatgtcacctgcctgaaatgccttaatcttttcttctgcatacatggatgttacccatcattcaaaacccagctgaagtgaccctctaagagcccagttcaaaatgccctctccctctcctgagccctcaactcccctggcaggcttctacttccttccctgacttcacgaacttcacccatccctaattctcatgacttttgctagatcataagagtcttctggaccaggaattgcttttatctcctctgtgtcctttttggtagctcagcaatttttgcaacagcaggagcctgacaaatattgactgatacaagattaaaatagaaacccaagtaaagaggac

SEQ ID NO: 890574 - DNA, 621 bp, Homo sapiens
ttccttaattcttttgaaatttaaaatgtgcacagttgtgaggaaatggatattttgttttaccgaaggctcatgagaaattgggattctgtattacatataattaatgtaagggtgctcatttcatatatattaagacgagactgaatatcaacccgtaagtcaaaatrtaagcatctcctaagattataaataacttaaaaatgttatcagcatttatttaagatcaaaatcaagtccgggtgtggtggctcacacctgtaatcccagcactttcagaggccaaggcgggtggatcatctgaggtcaggagttcaagaccagcctggccaacatggcgaaaccatgtctctactaaaagtataaaaattagctaggcatggtggtgggcacctgtaaatccagctactcaggaggctgaggcaggagaactgcttgaacccgggaggtggaagttgcagtgagccgagatcgcaccactgcactccagcctgggcgacaagaacaagactccatctcaaaaaaataataataataatcagagatatatatttaaatgggaaaatattttttatctatcttaaaaccttatcaactcaggcaggagctggggatgtattt

SEQ ID NO: 890575 - DNA, 595 bp, Homo sapiens
cacagactgtgtagctcaggagggcataaatcccagatcaagttgtcagtggaggtggttctttcagaagcctctatccttggcttgcaagatgaccatcttttccatgtgccttcacacagtcttccctctgcgtgtgtctacatcctattctcctcttcttataaggaccccagtcatattggaggagggccctaacctaatgaccccattttagcttaattagctcttcagagggattggatttccacacatgaatttagggggaggcgggtagacacctgtgaaaaccaacattggcttatcmtcctgtatgtaaggctgaagttaaattactcattgagcaaaacattgctacttagagcaaaaagatttgaaagggtgcttcacgactaacaacctgtgagagtgggaaaactaagactgagtttagaaagtcagaaagggagaaacttttagtttaattccaggaataggagcagaaagtaaaaacccattaggaattatactataaattaaaaatataaatactgcaagactgacagaagagtctagagaagattacaaatacttcacattttctgtgaaattataa

SEQ ID NO: 890576 - DNA, 601 bp, Homo sapiens
cagttccacatggctaaggaggactcacaatcatggcagaaggcaaggatgagcaagtcacgtcttacatggatggcagcaggcaaaaagagagcttttgcagggaaactccccttttttaaaaccaccagatctcatgagacttagtccttatcactagaaaagcatgggaaagacctgccaccatgatttagttacctcccactgggttcttcccacaacatgtgagaattcaagatgagattcaggcagggacacaaccaaaccacatcattctgcccctggcccctcccaaatctcatgtcctcacatttcaagcaaatcttgccttcccaacagtctcccaaagccttrattcatttcagagttatctcaaaggtccacagtccaatgtccgaagtctcattcaagacaatgcaagtcacttctgcctatgagcctataaaatcaaaagcaagttagttacttcctagatacaatgaaggtacaggcattgggtaaatacagccactccgaatgggagaaattggccaaaacaaaggggctacaggccccatgcaagtccaaaatccagcagggcagtcaaatcttaaaggtccaa

SEQ ID NO: 890577 - DNA, 669 bp, Homo sapiens
tatttaatcgcaagaacattaagtttttcaattcatggaataggatgtcctccagttatttagatatttcttaattacttttagtaatattttgtggtttttaatgctaaaattttatactttgtcaaatttattcttaaatatattatcattttgataattctgtgaataagttgctttcttaattttagttttcaattgttaattgctaaygtgtgtctgcaaaattgactttttatagtgatcttggacctgcaaccttgattagctattttttaattttaactttttaaatgtgtgaattacttagggttttttaatataaataatcatttcatctgtggagaaaaaaatttactttttccttttttatcagaatgccaattataattttttatcttaactaattgctctggctagaactcctagtgcaatgttgaatagaaataaaaaacagtagatgtatttgttttgtttctgatataaggagaaagcattgtcttcattaaatatgatgttagctgtgagtttttcatagatatacttaagatgatgagatcatttctttctacttctagtatgttgagtgtttttatcataaacacataatggattttattaagtaattttttttacatctattcagatgatcatatgcttttgttcttt

SEQ ID NO: 890578 - DNA, 669 bp, Homo sapiens
tatttaatcgcaagaacattaagtttttcaattcatggaataggatgtcctccagttatttagatatttcttaattacttttagtaatattttgtggtttttaatgctaaaattttatactttgtcaaatttattcttaaatatattatcattttgataattctgtgaataagttgctttcttaattttagttttcaattgttaattgctaatgtgtgtctgcaaaattgactttttatagtgatcttggacctgcaamcttgattagctattttttaattttaactttttaaatgtgtgaattacttagggttttttaatataaataatcatttcatctgtggagaaaaaaatttactttttccttttttatcagaatgccaattataattttttatcttaactaattgctctggctagaactcctagtgcaatgttgaatagaaataaaaaacagtagatgtatttgttttgtttctgatataaggagaaagcattgtcttcattaaatatgatgttagctgtgagtttttcatagatatacttaagatgatgagatcatttctttctacttctagtatgttgagtgtttttatcataaacacataatggattttattaagtaattttttttacatctattcagatgatcatatgcttttgttcttt

SEQ ID NO: 890579 - DNA, 669 bp, Homo sapiens
tatttaatcgcaagaacattaagtttttcaattcatggaataggatgtcctccagttatttagatatttcttaattacttttagtaatattttgtggtttttaatgctaaaattttatactttgtcaaatttattcttaaatatattatcattttgataattctgtgaataagttgctttcttaattttagttttcaattgttaattgctaatgtgtgtctgcaaaattgactttttatagtgatcttggacctgcaaccttgattagctattttttaattttaactttttaaatgtgtgaattacttagggttttttaatataaataatcatttcatctgtggagaaaaaaatttactttktccttttttatcagaatgccaattataattttttatcttaactaattgctctggctagaactcctagtgcaatgttgaatagaaataaaaaacagtagatgtatttgttttgtttctgatataaggagaaagcattgtcttcattaaatatgatgttagctgtgagtttttcatagatatacttaagatgatgagatcatttctttctacttctagtatgttgagtgtttttatcataaacacataatggattttattaagtaattttttttacatctattcagatgatcatatgcttttgttcttt

SEQ ID NO: 890580 - DNA, 669 bp, Homo sapiens
tatttaatcgcaagaacattaagtttttcaattcatggaataggatgtcctccagttatttagatatttcttaattacttttagtaatattttgtggtttttaatgctaaaattttatactttgtcaaatttattcttaaatatattatcattttgataattctgtgaataagttgctttcttaattttagttttcaattgttaattgctaatgtgtgtctgcaaaattgactttttatagtgatcttggacctgcaaccttgattagctattttttaattttaactttttaaatgtgtgaattacttagggttttttaatataaataatcatttcatctgtggagaaaaaaatttactttttccttttttatcagaatgccaattataattttttatcttaactaattgctctggctagaactcctagtgcawtgttgaatagaaataaaaaacagtagatgtatttgttttgtttctgatataaggagaaagcattgtcttcattaaatatgatgttagctgtgagtttttcatagatatacttaagatgatgagatcatttctttctacttctagtatgttgagtgtttttatcataaacacataatggattttattaagtaattttttttacatctattcagatgatcatatgcttttgttcttt

SEQ ID NO: 890581 - DNA, 554 bp, Homo sapiens
ctccttgtatcttatgcaaatttctgcagccagcttgtattttttcccagaatatgggtttttgttttccatcacattgtcaggctgcaaattttccaatcttttatgctctgcttcccctttaaatataagttccaatttcagaacatatctctcaaagttccacagatctctaggacaggggcaaaatgcctccagtctctttgctaaaacatagcaagagtgacctttctattccagttcccaacaagtttcttatctccatctgagaccacctcagcctggacttcattcttcatatcactatcagcatgttggtcaaaaccattcaataatctctaggaagttccaaactttctcacatcttcctgtcttcctctgagccctccaaactgttccaacctctgccygtttcccagttccaaagtcacttccacgttttgggtatatttatagcagcaccccactctactggtaccagtttactatattagtcctttcttgctgctataaagaactccctgagactgggcagtttataaagagatttaatt

SEQ ID NO: 890582 - DNA, 591 bp, Homo sapiens
agatctcatgagaaatcactcactattatgagaacagcatgagggaaactgccctcatgatccaatcacctcacaccaagttcttccctcaacacctggggattacaattcaatatgagatttgggtggagacatagagcctaaccatatcattccaccctttggccctcccaaatcccatgtccctttttcttttttcttcttcttttttttttttttttttgagatagagtctcactctgtcacccaggctggagtgcagtggtacaatcttggctcactgcaacctcttcctcctgggttcaagtgattctcctgcctcagcctcctgagtagctgagattacagggacacaccactatgcctggctwattttttgtatttttagtagagacgagatttcactgtgttggccaggctgctggtcttgaactcctgacctcgtgatccagctacctcaacctcccaaagtgctgggattacaggcatgagccaccacacccggccccatgttccttttacatttcaagcctcctcaacagtcccccaaagtcttaattcattccaacattaacccaaaagtccaagtcc

SEQ ID NO: 890583 - DNA, 644 bp, Homo sapiens; identical to SEQ ID NO: 871943

SEQ ID NO: 890584 - DNA, 610 bp, Homo sapiens
atttgtcatgtagttctcatgctgtggttttcagctccatgaggttctttaaggacttctctgcatcggttattctagttagccattcgtctaattttttttcaaggtttttaacttctttgtcattggtttgaacttcctcctttagctcagagtagtttggtcttctgaaaccttcttctctcaactcctcaaagtcattctccatccagctttgttccattgctgstgaggagctgcgttcctttgcaggaggagaggcactctgatttttagagtttctggtttttctgctctgttttttccccatctttgtggttttctctacctttggtctttgaagatggtgacgtacagatgggttgttggtgtggatgtcctttctgtttcttagatttccttctaacggtcaggaccttcagctgcaggtctgttggagtttgctggaagtccactccagaccctatttgcctcagtatcagcagcggtggctgcagtacagcagatattggtgaaccgcaaatgctgctgcctgatcattcctctggaagttttgtgtcagaggagtacccagtcgtgtgaagtgtcagtctgcccctactgggcagtg

SEQ ID NO: 890585 - DNA, 631 bp, Homo sapiens
cttccaattatgtggtcaattttgaataagtgtgatgtgatgctgattagagtgtatattctgttgattttgggtggagagttctgtaaatgtctattaggtctgctttgtgcagagctgagttcaggtcctggatatccttgttaaacttctgtctcattgatctgtctaatgttgacagtggggtgttaaagtctcccactattattstgtgtgagtctaaggctgtttctaggtctctaagagcttgctttatgaatctgggtgctcctgtattggttgcatgtatatttaggatagttagctcttcttgttgaattgatcccttcaccattatgtaatggccttctttgtctcttttgatctttgttggtttaagatctgttttatcagagactaggattgcaaccccttcttttttttgctttccattttcttggtagatcttcctccatccccttattttgaacctatgtgcatctttgcacgtgagatgggtctcctgaatacagcacactgatgggtcttgagtctttatccaatttgccagtctgtgtcttttaattgggtcatttaacccattacatttaacgttaatattgttatgtgtgaatttgatcctgtcattgtg

SEQ ID NO: 890586 - DNA, 639 bp, Homo sapiens
aaatttcccgctacacactgctttaaatgtgtcccagagattctggtacgttgtgtcttgttctctttgctttcaaagaacatctttatttctgccttaatttcgttatttacccggtggtcactcaggagcaagttgttcagttttcatgtagttgtgtgtggttttgagtgagtttcttgatcgtgagttctaatttgatatcactgtggtctgagagacagtttgttgtgatttctgttcttttacatttgctgaggagtgctttacttccaattatgtggtcaattttgaataagtgtgatgtgatgctgattagagtgtatattctgttgattttgggtggagagttctgtaaatgtctattaggtctgctttgtgcagagctgagttcaggtcctggatatccttgttaaacttctgtctcattgatctgtctaatgttgacagtggggtgttaaagtctcccactattattgtgtgtgagtctaaggctstttctaggtctctaagagcttgctttatgaatctgggtgctcctgtattggttgcatgtatatttaggatagttagctcttcttgttgaattgatcccttcaccattatgtaatggccttctttgtctcttttgatctttgt

SEQ ID NO: 890587 - DNA, 586 bp, Homo sapiens
ttgagaatccaaagacattttatgcttgtaactgagaggtgttcaatataaccatagctgtgaggtgagaggaggtaaaagttatggatggagaaaaataaggcaggcaggataaacaggccatgacttctagaactatatcaaacagtgttaactttttttaaggcaatcaaaaattttgacaacatttaaagaaaaaaaaaaaagacaagtgctttttgcattttagaagtctcactctggtttcaagccagaaggagaatcctcacaccttctaaatgtttctttttccctgaaagcttttattggacaagtcatctttccaccctrctactttatttgacaatatatattgcaattcaaccataaaaattaagtatttttggataataattttgattttcatatcaaagcctatgcttgataaattccaatcaaagcatattctacaatgagaaaaatatatattttaaataccatcagaatttcaagcatgaaaacactttgatataattagctacaaaatcattgagttgagtttaaaaacaacttgaagaatgtataaattaccaaattacttttaaag

SEQ ID NO: 890588 - DNA, 619 bp, Homo sapiens
tctcgtttataaataggttaagtttatgaattgaagttgcccgcaagattttttctcccaacccggttggtatctgtgatgttgataatcagaatggcaatgtatagaagattaatgctgaggaaatgtcacctctaacacctttggctcatattacaactagctctgcctatttagaagtttgtttttctgcagtcctgaactgatgacacagctatcaraatactatggtgcagataaggaggtcaaagctatgctaacctcagaaccactaaaatagcatttactctgtactgggttttgacattcagatcatttgggcagttgcttttaacttgaaaataaattgaatacataagttaaagctttccacaagcagtattatcttacatgatcagcactttcttagaaaatcacctcagggctgactgatcttagcaatatgtttgcagtattcccacgtgggtgaattgttcttttgtactattgctaaattagaagtaaacacaaatttctcttctatggtaggcaaggtaagtttaaatatctatacctcggcctctcttttttctctgtgtgtgtgtgtgtgtgtgtgtgtgcttttacatttatatgtata

SEQ ID NO: 890589 - DNA, 611 bp, Homo sapiens
tttagcagggcatcagctagaccagcccctaccttcattgagatgacattctggtagactgacacatctgcctgttgcatagtaatcactactgttactgtaattgttgttttattcctaaatgtatattactttaatccaaaattaaacrttaaaaatactattaaatattttaaaggcacaacaataaataagtaccttgcccatgttgacatctcccatatccacgtgcagctcttctgaactcagctcttatgcgaaggaactaaccctgagctagccaagcaggacggacattccatcaaaaggaataatttaaaatgagctttaagttcgacttgtattgaaattgcctaaaacagcagtataggatgatgcttaagaacatgaactctgttgccatttgattgggtttgaattcaaactctgatacttgctagcttaatgactttgagtaagttacttaatctatttccacctcaattttctcatatgtaatataggaatattgatagttcctaccccaaagagttgttgtaaatattaaattacatgaattaactcatttaatatttacaacaactctttgaggtaggaactatcattattcc

SEQ ID NO: 890590 - DNA, 611 bp, Homo sapiens
tttagcagggcatcagctagaccagcccctaccttcattgagatgacattctggtagactgacacatctgcctgttgcatagtaatcactactgttactgtaattgttgttttattcctaaatgtatattactttaatccaaaattaaacattaaaaatactattaaatattttaaaggcacaacaataaataagtaccttgcccatgttgacatctcccatatccacgtgcagctcttctgaactcagctcttatgcgaaggaactaaccctgagctagmcaagcaggacggacattccatcaaaaggaataatttaaaatgagctttaagttcgacttgtattgaaattgcctaaaacagcagtataggatgatgcttaagaacatgaactctgttgccatttgattgggtttgaattcaaactctgatacttgctagcttaatgactttgagtaagttacttaatctatttccacctcaattttctcatatgtaatataggaatattgatagttcctaccccaaagagttgttgtaaatattaaattacatgaattaactcatttaatatttacaacaactctttgaggtaggaactatcattattcc

SEQ ID NO: 890591 - DNA, 611 bp, Homo sapiens
tttagcagggcatcagctagaccagcccctaccttcattgagatgacattctggtagactgacacatctgcctgttgcatagtaatcactactgttactgtaattgttgttttattcctaaatgtatattactttaatccaaaattaaacattaaaaatactattaaatattttaaaggcacaacaataaataagtaccttgcccatgttgacatctcccatatccacgtgcagctcttctgaactcagctcttatgcgaaggaactaaccctgagctagccaagcaggacggacattccatcaaaaggartaatttaaaatgagctttaagttcgacttgtattgaaattgcctaaaacagcagtataggatgatgcttaagaacatgaactctgttgccatttgattgggtttgaattcaaactctgatacttgctagcttaatgactttgagtaagttacttaatctatttccacctcaattttctcatatgtaatataggaatattgatagttcctaccccaaagagttgttgtaaatattaaattacatgaattaactcatttaatatttacaacaactctttgaggtaggaactatcattattcc

SEQ ID NO: 890592 - DNA, 611 bp, Homo sapiens
tttagcagggcatcagctagaccagcccctaccttcattgagatgacattctggtagactgacacatctgcctgttgcatagtaatcactactgttactgtaattgttgttttattcctaaatgtatattactttaatccaaaattaaacattaaaaatactattaaatattttaaaggcacaacaataaataagtaccttgcccatgttgacatctcccatatccacgtgcagctcttctgaactcagctcttatgcgaaggaactaaccctgagctagccaagcaggacggacattccatcaaaaggaataatttaaaatgagctttaagttcgacttgtattgaaattgcctaaaacagcagtataggatgatgcttaagaacatgaactctgttgccatttgattrggtttgaattcaaactctgatacttgctagcttaatgactttgagtaagttacttaatctatttccacctcaattttctcatatgtaatataggaatattgatagttcctaccccaaagagttgttgtaaatattaaattacatgaattaactcatttaatatttacaacaactctttgaggtaggaactatcattattcc

SEQ ID NO: 890593 - DNA, 566 bp, Homo sapiens
tttcctgaaatttgaatttgactatgaagaaagtattgattgtggggagaaataatgttaattccctaaaacacagggtgagaactttttaatggagtacacattactcatcaaaatatagtcccaaactatattatcaaacatgtctaacccactttacacacatacacacacacacacacacacacacaccaccctacgatgcagttatatgaatctttattgtttamtaaacataatacatttcctccttccccacttacgtgcctttgcacattgtattctttgtatcctcttcctagaatgctcttctttaaattgataaacttatccttcaaaatgcaacaaaaataccaccttttcaatgaagtccttcagaatccccccagtgtcccatagaaatttgcatatcctcttaattcaatgtcctgcaaccttctttgcacattagcacccctgggatttggcatgatcctatcagtaatgctgtctcagtggggttttatatgagaaggggctttctatgggtgaggcaacaatggttctctcttgtgaggttgaaattt

SEQ ID NO: 890594 - DNA, 621 bp, Homo sapiens
cactaactccagagcaataacagtgccttctcttccaccttctcgtgcaagtgtctctcgttagaagaccctaaatcagagcactacttacaaggagtctagaaaacatagcctttatgtttctgggccttgcttccagggagagtgaagaaggccccatgctgagacaccaacagacaatcctgctccaagttgaaaccagtggaaacagcgtacttttcctctgttttctgcaaatggactcaatccatttaggctgaggcaggcgaattctagcatgacccagtataccaaactgttcttatgaaagaaccagccactcccagaaccaccagtgggtttaacaacctttttttttttacggcgttttcattctcttaataagacaatcccagtcttcttttcactcacattcactgattcctttaaagagttaattctgctgaaaggtcttgctctatgtgtacatttcttaaytggcatccctactaagaatagggagcaatgaggaaaggttgtggaaacaagggaaaattagtttatgcaaataaggcagaatgatattttaccaggctgacactaaatttatcttagtaagattggtattacagtatagtctag

SEQ ID NO: 890595 - DNA, 498 bp, Homo sapiens
gtgagaaagagctaagcttctttgaaacccatgtggatggagcagagagaaggggaggccggctcttgaagaacagggacaggagtgggaaacatgaagcagttccacctgcagagtgccattgtctgctgtccttttttttcttcttttttctttttttttttgaggtggagtctcactctcttgcccaggctgaagtacgatggcatgatcttggctcactacaacctccactgcctgggttccaatgattctcccacctcagcctcccgagtagttgggattacaggtgtacaccmccatgcccggctaatattttgtatttttagtagagacggggtttcaccatgttggccaggctggtctcgaactcctgatctctgcccacctcggcctcccaaagtgctgcgattacaggtgtgagccacactgtccatttttgaaagatcatgcaggctatagcttggacaatgaattagaggaaataaaactgaaagt

SEQ ID NO: 890596 - DNA, 550 bp, Homo sapiens
tacctagaacagaacctcagcaactacaactgtgccatagcccctagaagagtcccttgcatgcaatataggcactcaatatttggtgactgaatgaatgagtgaatgtggtaaacatgtctactgctctgactcctgcacccagggcagacattactaatcaactgtgactgtttttcatgcaaaaagtagatgcagtgtcagaattctgcttagcataactctccagacaggcacaaccaatctattagagatcacatgtgaaatgttatctatttgccrttcctgaatgagctctagtatttttccacattaaactttcctagtaagggaaatactaaaagatagatggattgtcactcagagaaaataaacacaattgaatatttcgatcttgtttgtctgcataagaatcgatattttttcatcctgactagtgcagaaaatgcatttgttcagtgaagactccataatatcaggctacttggagttcttgcagccaaacccacattcctagagccctgtgggagccattcaatttctcacccca

SEQ ID NO: 890597 - DNA, 694 bp, Homo sapiens
tgttttcacctccctcattttacagaggaagacaatgaagtctaaagactcactcaagattacaccatgaatctgtgtcagtaccagatttagaattcaggtctctgtgactcccagtccaatgccgcttctagtacacttcattagtatccaatttcatggatggccacttgacacctgtatctggttagatacctagaggctagaaaaataattttccagtgcctttatccatacatcatacatcatcaactttgaattttgaattgtttacacttcaattcatccctttctatttatagagttaaaagacaatctcaaatcaatgttgacaaaattaccatctgacaaagaccartctaaaaggaaagacccagggctaggtagattctctaaaatgcatgtgcagatgtgatggacacctggcttgaggatgtcaatttggaaactatcccattaaaaatgagaaactatagtgcaaataatatgaaaataaaattagttctttccacatagctgggagaaaaaaacaacccactgcatcaaacagattgataactcccatcctcccctttgaacattagatcatgtcatcttgcctgggagagctccaattgctggagatctgtggctcctccaatcactggttgccaattatctcacagctgcttctctttcaaaggaaacacccaaa

SEQ ID NO: 890598 - DNA, 682 bp, Homo sapiens
tacaatcgcggctcactgcaacctctgcctcccaggtttgagtgattatcctgcctcagcctcctgaatagttgggactacaggtgcacaccaccacacccagttaatttttgtattttcagtagagatagggttttgtcacgttgaccaggctggtctcaaactcctggcctcaagtgacccacctgcctcagcctcccatagtgttgggattacacgcacactttaaacctgatggccaaattacatgaaagaaaattcagaactcaaatagttactatttttaaaaaccctaaaatgaaaaattctcagttcttttgcctatctattttttttccctgcctactttgaatctgctgatttgtctactggtgttgagataagacttactgtctgtggtgttaccaattcaaggttatttggctgaagaaaaacaaaagaatgaaacaattctttatttttttttctctttttgagataaggtctcactctaaggtctcactctgttccccagactggagtgyagtagtgggatcatagctcactgttatctcaacctcccaggctcaagcaatcctcctgcctcatcctctctagtagttggtacaataggcatgcactaccatgcctggcaattttttatctgattcttagtagagattaggtctcactatgttgccca

SEQ ID NO: 890599 - DNA, 503 bp, Homo sapiens
gaatactacaaagactaaacaaggaagaagtgaaattcctgaatagaccgataacaagttctgaaaatgaggcattaattatagcctaccaaccaaaaaaattccaggaccagacggattcacagccgaattctatgagaggtacaaagaggagctggtaccattccttctgaaactattccaaacaayagaaaaagagagaatcctccctaactcactttatgaggtcagcatcaccttgataccaaaacctcacagggacacaacaaaaaaaagaaaattttaggccaatatccctgatgagcatcgatgcagaaatcctggataaaatactggaaaactgaatccagcagcacatcaaaaagcttgtccaccatgatcaagtcagcttcacccctgggatgcaaggatggttcaacatatgcaaatcaataaatgtaatccatcacataaagggaacaaatgacaaaaactgcatgattatctcaatagatgcagaaagg

SEQ ID NO: 890600 - DNA, 631 bp, Homo sapiens
actgacaaggatgtgaaggacctcttcaaggagaactacaaaccactcctcaaggaaataagagaggacacaaacaaatggaaaatcattccatgctcatagataggaagaatcagtatcatgaaagtggccatactgcccaaagtaatttatagattcactgctatccccattaaactaccattgactttctccacggaattggaaaaatatactttaaatttcatatggaatcaaaaaagagcccraatagccaagataatcctaaccaaaaagaacaaagctggaagcatcatggtacctgacttcaaaatatactacaagctacagtaaccaaaacagcatggtgctgttaccaaaacaaatatatagatcaaaggaacagaacagaggcctcagaattaacaccacacatctacagccatctgatctttgacaaacctcagaaaaacaatcactggggaaaggattccctatttaataaatggtgttgggaaaactggctagccataggcagaaagctgaaactggatcctttccttacaccttatacaaaaattaactcaagatgggttaaagacttaaacataagacctaaagccataaaaaccgtagaggaaaacctaggcaa

SEQ ID NO: 890601 - DNA, 631 bp, Homo sapiens
actgacaaggatgtgaaggacctcttcaaggagaactacaaaccactcctcaaggaaataagagaggacacaaacaaatggaaaatcattccatgctcatagataggaagaatcagtatcatgaaagtggccatactgcccaaagtaatttatagattcactgctatccccattaaactaccattgactttctccacggaattggaaaaatatactttaaatttcatatggaatcaaaaaagagcccgaatagccaagataatcctaaccaaaaagaacaaagctggaagcatcatggtacctgacttcaaawtatactacaagctacagtaaccaaaacagcatggtgctgttaccaaaacaaatatatagatcaaaggaacagaacagaggcctcagaattaacaccacacatctacagccatctgatctttgacaaacctcagaaaaacaatcactggggaaaggattccctatttaataaatggtgttgggaaaactggctagccataggcagaaagctgaaactggatcctttccttacaccttatacaaaaattaactcaagatgggttaaagacttaaacataagacctaaagccataaaaaccgtagaggaaaacctaggcaa

SEQ ID NO: 890602 - DNA, 667 bp, Homo sapiens
atactgcccaaagtaatttatagattcactgctatccccattaaactaccattgactttctccacggaattggaaaaatatactttaaatttcatatggaatcaaaaaagagcccgaatagccaagataatcctaaccaaaaagaacaaagctggaagcatcatggtacctgacttcaaaatatactacaagctacagtaaccaaaasagcatggtgctgttaccaaaacaaatatatagatcaaaggaacagaacagaggcctcagaattaacaccacacatctacagccatctgatctttgacaaacctcagaaaaacaatcactggggaaaggattccctatttaataaatggtgttgggaaaactggctagccataggcagaaagctgaaactggatcctttccttacaccttatacaaaaattaactcaagatgggttaaagacttaaacataagacctaaagccataaaaaccgtagaggaaaacctaggcaataccattcaggacataagcatgggcaaagacttcctgactaaaacaccaaaaacaaaggcaacaaaagccaaaattgacaaatgggacctaattaaactaaagagcttctggacagaaaaagaaactatcagaatgaatgggcaacctacaaaatgggagaaaatttt

SEQ ID NO: 890603 - DNA, 631 bp, Homo sapiens
actgacaaggatgtgaaggacctcttcaaggagaactacaaaccactcctcaaggaaataagagaggacacaaacaaatggaaaatcattccatgctcatagataggaagaatcagtatcatgaaagtggccatactgcccaaagtaatttatagattcactgctatccccattaaactaccattgactttctccacggaattggaaaaatatactttaaatttcatatggaatcaaaaaagagcccgaatagccaagataatcctaaccaaaaagaacaaagctggaagcatcatggtacctgacttcaaaatatactacaagctacagtaaccaaaacagcatggtgctgttaccaaaacaaatatatagatcaaaggaacagaacagaggcctcagaattaacaccacacatctacarccatctgatctttgacaaacctcagaaaaacaatcactggggaaaggattccctatttaataaatggtgttgggaaaactggctagccataggcagaaagctgaaactggatcctttccttacaccttatacaaaaattaactcaagatgggttaaagacttaaacataagacctaaagccataaaaaccgtagaggaaaacctaggcaa

SEQ ID NO: 890604 - DNA, 541 bp, Homo sapiens
ttgacaaacctcagaaaaacaatcactggggaaaggattccctatttaataaatggtgttgggaaaactggctagccataggcagaaagctgaaactggatcctttccttacaccttatacaaaaattaactcaagatgggttaaagacttaaacataagacctaaagccataaaaaccgtagaggaaaacctaggcaataccattcaggacataagcatgggcaaagacttcctgactaaaacaccaaaaacaaaggcaacaaaagccaaaattgacaaatgggacctaattaaactaaagagcttctggacagaaaaagaaactatcagaatgaatgggcaacctacaaaatgggagaaaatttttgcaatctatccatctgacaaagggctaatatccagamtctacaaagaacttaaacaaatttacaagataaaacaaccccattgaaaagtgggcgaaggatgtgaacagacacttctcaaaagaggacaattatgcaaccaacaaacttatgaaaaaaaaagctcaacatcact

SEQ ID NO: 890605 - DNA, 585 bp, Homo sapiens
aaaaaccgtagaggaaaacctaggcaataccattcaggacataagcatgggcaaagacttcctgactaaaacaccaaaaacaaaggcaacaaaagccaaaattgacaaatgggacctaattaaactaaagagcttctggacagaaaaagaaactatcagaatgaatgggcaacctacaaaatgggagaaaatttttgcaatctatccatctgacaaagggctaatatccagaatctacaaagaacttaaayaaatttacaagataaaacaaccccattgaaaagtgggcgaaggatgtgaacagacacttctcaaaagaggacaattatgcaaccaacaaacttatgaaaaaaaaagctcaacatcactagtcattagagaaatgcaaatcaaaaccacaatgagataccatctcatgccagttagagtggcgatcattaaagagtcaggaaactacaggtactgaagagggtgtggagaaataggaaggcttttacactgttggtgggagtgtaaattagttcaaccattgtggaagacagtgtggctattcctcaaggatctagaactagaaataccatttgg

SEQ ID NO: 890606 - DNA, 693 bp, Homo sapiens
aaaaattcttccaaaacatttttaaattattagggtcaagagagtcattacctttcaagataactgtgaaaatttgggggatggtgcactggagaattaagcttgaaactcagtgtcttagtctatttgggctgctgtaacaaaataccatagactggtgtatccatctgttctcacactgctgtaaagaactacctgagactgggtaatttatgaagaaaagaggtttaagggactcatagtttcacaggcttaacaggaagcataactgagaggcctcaggaaacttacaatcatgatggaaggtgaaggggaagcaagcagcttcttcacatggcagcaggtgagagagtgaggtggtgtgatggttaatattgagtgtcaasgtgattggattgaaggatgcaaagtattgctcctgggtgtgtctgtgaaggtgtcgccaaaggagattaacatttgagtcagtggactgggagatgcagacccaccctcaatctgggtgggcacaaactaatcagctgccagcatggctaggatacaagcaggcagaagaacgtgcaaagactagactggcttagtcttctggcctccatctttctgctgtcctggatgcttcctgccctcgaacatcagactccaagttctacagctttaagactcttggacatttgaccacagactaaaggctgt

SEQ ID NO: 890607 - DNA, 619 bp, Homo sapiens
cactcctatactatatcattcaatatactattgaaagtcctggccagagcaatcaggcaagagaaagaaataaaaggcatccaactaggaaaagaagtcaaactctctctcttcactgacaacatgattctataatggaaagcccgaaagactctgccaaagggctaacagaactgataaatgattttagcaaggtttcaggagaaaaaagttaacgtagacaaatcaatagtatttctatacactaatagtgcccaggctgagagtcaaatcaagaacacaattccatttacaataaccacaaagaaaatgaaatactaaaaatatacctaacaaaggaggtgaaagatctctacaaaaactacaaaactctsctgaaataaatcagagataatacaaataaatggaaagccattccatgcctatggattggaagaatcaatatcattaaaatggccatactgcccaaagcaatttacaaattcaatgctatttctgtcaaactaccaatgttattctttgtagaattagagaaaaaatattctaaaatttatatgagaccaaaaaagacacaaaacagtcaaagcaatcctaagcaaaaagaacaaagatggaggta

SEQ ID NO: 890608 - DNA, 699 bp, Homo sapiens
attcctgcaatacattcagacagggacagacaaaataagccaattcacctacacccgtaacagtccactgtctaatccccacacagggatctcaggctcctcagcaagagaacaggacaatgtgagagatatacttcaggaggcctgaaagctggtcatgatattctttggtttgcatctcagaaccaagggtgaaatatccctattctggtagatcgttatcccaaaatcatttatcccaagtttgtgcaaacagttatgcctkattgttcccatcagttcaaagacaatgccctagatgatttctaggaggaaaactgcagtattcagccctgtctcatcaaatgcccagctcgttcatggatgcaagaattttagacactgaaattagaatgagggaggaaatctacaaacccttgagtccaaatcatagttctgtgaattttttacatctgcctgggtccaatgtgctgagagcgggctcaggttgccacaggcatggctggagactaggaatagagccttgctcactgacccatttcatgtctaggcttccagcggagactacagtttcattacaacctatatgcgcccataggtcctgcctgcggcaatgacatctctcgggtcagtaagggccactgggaacaggaatatcacccctatctggaagaccaggtggaggcttatcaccttcat

SEQ ID NO: 890609 - DNA, 534 bp, Homo sapiens
aaacttttaatacatagatattctttgcttatctctactttgagaaggatgcttttgtctgtgatgaaaacttatctacattttaaaataaaccatttcctaaacctgttctagcacccagtgtttctattccccattggataaaacgtatgtaagcatatagaggtgacaaggttaaagtcgtaccttctctaacattcaataatcagtctcctgagacatgtgaaattcatcatattctaatcaacttgtatattatcagccctgaaacacaaatattatatcagctctgactgcctcaaaccacatcttarcagtcagagactggctctccaggctattccatctcatttgagaagaaaaccaagaaccaaaacaaattttggtcaagtaacttaggaaatatttaaaatggaatacatatttccagtaacaaatggatgatattaaaataattttatatgaaacttaatctttagaaaaatataacatttcaaaggaaggctttgaactcagtcatgaagtctgatgata

SEQ ID NO: 890610 - DNA, 629 bp, Homo sapiens
cattcctccaacaaaaattgttaaagacatttcttgctggaaggactttctgcttcagtttctctccccagctgtgcatccagcatgtaacttccagagtgaactattcaaacacaaatcagattgtaccactctcagatgaaaatcctccatgcatctttactgaccacagaacaaagtcagaactccttgcagagcctgctgggccctccatgatgcagccaggtctagtttcacaaactcctctccagctgcctcctgtgcacagcccatctgccacttctgactactttgagctcggcatgtaccttgstgttccactcctttgtgcctcatattccttttctttctccgtgagatcccttacttctatcttacttccatcacccctgccacagaccacacttactcatccttcaaggcattgtttcacgttcctctttcttcaagacttctctgatatccccaagcagacagttttggtccttttcttttttatgcctgcctcccccatagcttttacagaccactattaaagccctttcataaaaaaaaagaaggtccctctctatgtagattctcattatactaatatttgctatttatatctgcaaaaaatgtttgcccca

SEQ ID NO: 890611 - DNA, 629 bp, Homo sapiens
cattcctccaacaaaaattgttaaagacatttcttgctggaaggactttctgcttcagtttctctccccagctgtgcatccagcatgtaacttccagagtgaactattcaaacacaaatcagattgtaccactctcagatgaaaatcctccatgcatctttactgaccacagaacaaagtcagaactccttgcagagcctgctgggccctccatgatgcagccaggtctagtttcacaaactcctctccagctgcctcctgtgcacagcccatctgccacttctgactactttgagctcggcatgtaccttgctgttccactcctttgtgcctcatattccttttctttctccgtgagatcccttacttctatcttacttccatcacccctgccacagaccacacttaytcatccttcaaggcattgtttcacgttcctctttcttcaagacttctctgatatccccaagcagacagttttggtccttttcttttttatgcctgcctcccccatagcttttacagaccactattaaagccctttcataaaaaaaaagaaggtccctctctatgtagattctcattatactaatatttgctatttatatctgcaaaaaatgtttgcccca

SEQ ID NO: 890612 - DNA, 647 bp, Homo sapiens
tcccacgaacagtgtacgagttctctttttcctgccagccttgccagcatctgttgttttttgactttttaataatagctattttgactggtgtgagatggtatctcattgtggttttgatttgcattttgatgatgattagtgatgagcattttttcatatgtttgttgatcacatatatatcttcttttgagaagtgtctgttcatgtcttttgcccactttttaatggggttatttgttttwtgcttgttaatttgtttaagtttcctatagattctcgatatgagacctttgttggacacataatttgtgaatattttctcccattctgtatgttgtctgtttagtctgttgatgatttcttttgctgtgcagaagaagctctttagtttaattagatctcacttgtcaatttttgtttttgttgcaattgcttttagggagttggccataaatcctttaccaagcttgatgtcgatgaggatatttcctagattttcttctaggaactttatagtttgaggtcttacattcaattttcctaatttattgttttctttcttagaataatcattctcttctactccaatttgaaaaaaaagaaaacttcaggagtagaaagagagatgactttaatttgcagaa

SEQ ID NO: 890613 - DNA, 584 bp, Homo sapiens
aaacgtagacaaatatttttatgtaaagatgctcatcatgcagtgtttatagtaaactggaaagaaactaaatgtacaacttttggtgaattgatcgtattacaaatgtgtataaaatacataaagccctggcaaaatgttaggtamtgaggatacagtattgaaagacaaagttcttgcttttatggagcttacattctagtagtggagacagccaagagacataaataaataattacagattgccactaatgctacaaagaaaataaactgggtaataaggtagagtaagtgggagaggtaagctgtgagtcagtgagcagataaagtctctcgtctcatcagagttgacttttgaactcagatttgaaatatgtcaataggttagttgtagagccagctgcagaaagagaggtccagacaaaagaaaactacaaaaatacacaagaaaaggtttggtgccttaaaaactacattcccatactcccttgcgagcaatgccctatgtacaatctaagttttatgaatgcaacttggaaagagaacaggataaatgtgaagttatttccaaaagctatcttgaa

SEQ ID NO: 890614 - DNA, 436 bp, Homo sapiens
ggaatgtggaatgttataatgggggaagcatttgttgttgttgttgttgttgttgttgttgttgacacctgagccttttttatttccttgacttgattggtgaaggcatgataaagtcaagaaaatgccctactatgggtttctaaaccagacaagtttcagccttttctccagtactccagggcccaaacaggtccatagtactcttaagctggagaaacaagacatcgctgtagcaacarcagcatggttggctggtattaatcagagggcttgctcaggactggaacagccctggcactggtctccctgtgccagcaccaccctttccagtgcaccctctgcctggataccaaaatggtctttctaaaatgcaaataggagcataccacttcctctgcataaaacccttcagcagtgctctattgtttgcaga

SEQ ID NO: 890615 - DNA, 615 bp, Homo sapiens
tgctcaggattcgatgtcctagccatctgcctctcaagttataaatatctattggcacttggagatataactatgtatgtatacatacaatttaaagttggaatttgtaaacagaataattttacacttcttaggcagccctggaatcaaccacataatacagagacctttctctcttttttttttttcttctcttttttttctgagatagggtcttgctctgtcacccaggctggaatatagtcacatgatcataattcactgcagtytccaactcctaggctcaactgatcctcctgcctcagcctcccaagcagctgagactacagccacgtgccaccatgctggctaattttttgatttttttgagacagggtcttgttatgttgcccaggctggtctcgaactcctggcctcaggcaatcctcctgcctcagcctcccaaatgctgggattacaggcatgagccactgcatcaggcttagacctttctttttacctgaattttgaatatgtatcatatcactaatcaatgtcttccccatcctcccccccagctccctgatttggtttctcttggggtgccaatcctcctgtcccttacttccatattcc

SEQ ID NO: 890616 - DNA, 498 bp, Homo sapiens
ctggacttttttgagttggtagtctattaattactgcctcaatttcagaacttgttattggtctcttcagggattcaacttcttcctggtttagacttgggagggtgtatgtgtccagaagtttatccatttcttctagattttctagtgtttatagttttctctgatagtagttttttatttctgtrgggtcggtggtgatatcccctttatcattttttattgtgcctgtttgattcttctctcttttcttctttattagtctggctagtggtctatctattttgttgatcttttcaaaaaactgctcctggattcattgattttttgaagggtttttcatgtctctatctccttcagttctgctctgatcttagttatttcttgtcttctgctagcttttgaatgtgtttgctcttgcttctctagttcttttaattgtgatgttagggtgtcgattttagacctttcctgctttctgttgtgggcatttagtgc

SEQ ID NO: 890617 - DNA, 595 bp, Homo sapiens
aatttatcagaagaaatgaaataataggctgggcacggtggctcacacctataatcccagcactttgagaggctgaggcagcagatcacttgaggtcaggagttcaagaccagcctggccaacatggcaaaactctgtctctactaaaaatacaaaaattagcctggcatggtggcaagcacctataatcccagctactcaggaggctgaggcatgcacaagaatcgcttgaaaccaggaggcagaggttgcagtgagctgagatcatgccacattaacagcctggacgacagagtaagactccatctcaaaaaaaaaaaaaaaaaaaaaraaaaaagaaaaaggaaaataaaactggggaataaaaaggatcagaacataaatcaaatagagaacagaaaaataaaacaaaaaaatcaataaaaccaagagttgtttctttgaaaaagtaaacaaaatcaaaaaacatctaactagactaagaaaaaaagagtgaagactcaagtacataaaatagaaatgaaagtgaagaccttataacagatgcctcagaaataaaaaagaaggatcataatcggctattgtgaacaattat

SEQ ID NO: 890618 - DNA, 573 bp, Homo sapiens
cccaggaggtcgaggctgcaatgaactatgatcacatcagtatattccagcctgggtgatagagtgagaccatctcaaaaaaaaaaaaaaaaaaaaagatatggaagcaaactggaaaccatgggtaatactttaaaaggaagacgttgccatttgttacgacatggatgaccccagaagaccttatgttaagtgaaataagccaaacacagamagaaaacatattgcatgatctcaattatatgtggaatatttggaaaaaaaagatgacaaatatacagagatatagaataaaacagtggttattaagggcacaagggagtggggaaaggggagatacaggaaaggacacaaagtgacagatatataggattaagcaagtctagagatctaatgtgcaacatgacaactatgattaataaaattgtattgtactaagaattctcattaaatgagtagattatgaatgaatgaatgaatgaatgaatgaatgaatgaaaagtaactatatgttttctgactcctagaagcagataaacagagtaactatgttagatgatagatctgctaatc

SEQ ID NO: 890619 - DNA, 573 bp, Homo sapiens
cccaggaggtcgaggctgcaatgaactatgatcacatcagtatattccagcctgggtgatagagtgagaccatctcaaaaaaaaaaaaaaaaaaaaagatatggaagcaaactggaaaccatgggtaatactttaaaaggaagacgttgccatttgttacgacatggatgaccccagaagaccttatgttaagtgaaataagccaaacacagacagaaaacatattgcatgatctcaattatatgtggaatatttggaaaaaaaagatgacaaatatacagagatatagaataaaacagtggttattaagggcacaagggagtggggaaaggggagatacaggaaaggacacaaagtgrcagatatataggattaagcaagtctagagatctaatgtgcaacatgacaactatgattaataaaattgtattgtactaagaattctcattaaatgagtagattatgaatgaatgaatgaatgaatgaatgaatgaatgaaaagtaactatatgttttctgactcctagaagcagataaacagagtaactatgttagatgatagatctgctaatc

SEQ ID NO: 890620 - DNA, 681 bp, Homo sapiens
tgtacaagaagcatggcactaacatctgctgctggtgaggccacaggtagctaccactcaggtggaaggtgaagggggataagtcatgtcacatggcgagagagaaagcaagagagagaggggtagatgccaggttctttttatttttattttttattttttgagatggagtctagcagtgtcgcccaggctggagtgcagtggcattatctcagctcactgcgrgctctgcttcccgggttcaagcgattctcctgcctcagcctcccgagtagctgggaatacaggtgcctgccaccacacctggttaattttgtatttttagtagagatggggtttctccatgttgatcaggctggtctcgaactcctgacctcaggtgatctgctcacctcagcctcccaaagtgctgggattacaggcgtgagccactgcacctggccgatgccagagtctttttaacaaacagatctcatggtaactaatagagtgagaactcattcatcaccacaaggacagtgccaagccattcatgagggatctatccccatgaccctaacaccacccaccaggcttcacctccagcattgagagtcacatttcaacctgggacttggaggggacaaatactcaaactgtatcatcttctttccgcagatcagggcattctgctacaatcat

SEQ ID NO: 890621 - DNA, 643 bp, Homo sapiens
ctgcactccagcctgggatatagagtgagaccttgtctctaaatgaaatgaaatgaaatgaaatgaaatgaaatgaaataaaataaaataaaataaaataaaataagggaatctccagaatttcagtattttagcagcaaatatcaggagtattagccaaatcaatgaaaactaggataaataacatatgtttaaattttaagacaaagttttgattatgggaattaagaagtctgtgctactaacatatcctctgtgattataggaaggsacattaaggtacaaactcatatcaaaggaggaaatagacaagtatggaacagacataaagacagttacatagatgaaggaaatattgggatgttgatgtaggaaaagaacatggtccaggccttcttgatgtattttgcaaaggttcataacaagcatgctaagcctttctatcatttgtggttacttaataaatggtacatagttcattctatacatggttcagttcttctaaactaattttttgttctttatttaaaaacaaaattgtaagtttgaaaaaaaaaaagtacaagtcttccaggggtgcagaaatgggttgaggcaaatgatttttgtagctgagaatctggaccctcaagttggcaaacaa

SEQ ID NO: 890622 - DNA, 554 bp, Homo sapiens
tctccagagttatttctttattcaatttccctctctggtattctgtcctacacactctagctaagttggtatcccagactttccactccatctcttcaactcaggagtcttctgggctgcagctgggtctctttctctgtgtcacagcctggaatctgttacaaggcaataaactggaacatttgtaggattcatcaattttattatctgtgtctgaggcatcactgctcttgttgtttaatgcccattgtcttggaaatcattgtttgctattgtttgatttttttttcatttgtttcacayagaagagttaatcaagtcacgattactccatctcaatcagaagcaaaatctcactagcatttcttttacttctttttcatagtttctatttctatactaaaactctcatctgttttcctacaatgtttaccttttccactacatcctttaagcatatttattgatattttaaaattcctgtctacactatctctaggtgtgttttattgactctttcttctcttgactatggttaatgtttattttcatct

SEQ ID NO: 890623 - DNA, 554 bp, Homo sapiens
tctccagagttatttctttattcaatttccctctctggtattctgtcctacacactctagctaagttggtatcccagactttccactccatctcttcaactcaggagtcttctgggctgcagctgggtctctttctctgtgtcacagcctggaatctgttacaaggcaataaactggaacatttgtaggattcatcaattttattatctgtgtctgaggcatcactgctcttgttgtttaatgcccattgtcttggaaatcattgtttgctattgtttgatttttttttcatttgtttcacacagaagagttaatcaagtcaygattactccatctcaatcagaagcaaaatctcactagcatttcttttacttctttttcatagtttctatttctatactaaaactctcatctgttttcctacaatgtttaccttttccactacatcctttaagcatatttattgatattttaaaattcctgtctacactatctctaggtgtgttttattgactctttcttctcttgactatggttaatgtttattttcatct

SEQ ID NO: 890624 - DNA, 605 bp, Homo sapiens
aaattatttttattccagatgacatgatagaaaacacagaggaagccatttcttatatatagaaaaccattaaaaatttcatggaaagctattaggtttaataaatgaaggtagcaaattgcaggatacaagaccaatttacaaaagcacttgtaattaagttcactagcaataaacaacccacaaataaaattaagaaaacaaaatcatttgcaatagcatcaaaaaaaaaagcctargatacgtaggaataaatcaagatttgtatactgaaaagtacaaaaagtcattgttgaaagacattaaataaatgtcttttatttaaaaagtgaatggaaacacattctatgtttgtgaatgaaaagactttgtattgttaagatggtaaaagactccaagttgatctgtaaattcgatgcagtatttattaaaatgtcaattgccttttttaacagaaatgggaaaactgatccaaaacttcatatgagatagtaaacatacctgaatagtcaaaatgatcttgaaaaaaagaacaaagttgtaggactcacatttactgatttcaaacctgttaaaaagtgagattaatcaagccagtgtggtac

SEQ ID NO: 890625 - DNA, 654 bp, Homo sapiens
cagaaacgaggaccagcttggcctcattacagtcaagtgaaggtagaagtctaagctccctactcagcattttctgagggagggcgtggggctgatgtcttttttcatagtgtttgactggaatacggtggtagttgtctagaagtttcctgccttgcttgactgccgctctccaggtcctttggctagagaaaatgagcaggcttttcttggggcttttgtttgtctgcatctgttggtatttttggtttgctggcttctccagcacytaaactggtatatattaagcaaaaagaaaatccacataattaaccaactgttgtgttgttttttggatcccaagaaagtctaccttcttctttccacatttcagtcttcttatgcttgatttacaaataatgcccagggtttcaagctgtatcccgttggaataataggaagaagtgtgtttatacgatcttttcctggaaagagagagcatgcctggtaatttttgaatggatactagacaataagaatttagtgttctttactgttgattttttatattccatcaactattactgggattgattctgggatgaaattaagtaactttgaactagttttattctttgtggtctagcttttaagctttgttaggactgtgccaga

SEQ ID NO: 890626 - DNA, 606 bp, Homo sapiens
agaacaatcaagttcagaggcaataaatatgaagtcagaatatcgatctctctaagtacaataagagataaacctgtcaacttggtattttgtcatatcaataacaggaaatgtataatgcaaattcagctataattagaacaatggcttattaattttaaaaataacactgcccaaaagcytacacttgtataccatctggttgatacaatctctctctgtgtgcatgctgcatgggaagtcgaatgttcattggagctatttcaatatgctctgagaactagcagtgtaagtcatggtgcgctgttttatgaaatctggcccaggcagcctcacacatctatctccacattatccacacatctgcctttgcagcataaaagtctttgttcttaggcaaggcacattctctcctttgaatgtctgcatagacacacttgatatttccctgtgttgttccaatttccctttccatgggaagagaaacctcttctctaaatgagatggttttatttattttttaaataatacataatgtttgtatatatttatgcggtgcatatgatatttcattacatgcataaaatgtgtaatcatcaagacagg

SEQ ID NO: 890627 - DNA, 590 bp, Homo sapiens
acgtaagaataccaaatttcagaatgtacttttaaaagaatattactctttatattgctatcctaacctgttaatctttacaaaaatcagactacccatttctgtggatcatctgtaccgtagacttagggaagaaacaaaccagaagacagacatatactaaggaaccaatataaaaaccttaagtttttggcttgaggtaattaaatcttaaaaaacaaagtattattgctattcttgaataattttccatgwccagtcttccagttaatctttcactttgttcctgcaggcctcaggcacacaatctgttttccctcctcactagctcccaacacatacttctcccacctggcttccttttttgctcaagcctgcagcgtactaggatgctgtgtcttcaacttttctgaattttatcagttcataaatataacacaaagacaattttaatttaaaccagtttcctattaatttccaagaggagataaaaaagagaaacaaaaataaaccaatttaaaatataagaaacatagaaggaaaatgtaaattttccaatatctaaaaaactctcattttttttttgtata

SEQ ID NO: 890628 - DNA, 590 bp, Homo sapiens
acgtaagaataccaaatttcagaatgtacttttaaaagaatattactctttatattgctatcctaacctgttaatctttacaaaaatcagactacccatttctgtggatcatctgtaccgtagacttagggaagaaacaaaccagaagacagacatatactaaggaaccaatataaaaaccttaagtttttggcttgaggtaattaaatcttaaaaaacaaagtattattgctattcttgaataattttccatgamcagtcttccagttaatctttcactttgttcctgcaggcctcaggcacacaatctgttttccctcctcactagctcccaacacatacttctcccacctggcttccttttttgctcaagcctgcagcgtactaggatgctgtgtcttcaacttttctgaattttatcagttcataaatataacacaaagacaattttaatttaaaccagtttcctattaatttccaagaggagataaaaaagagaaacaaaaataaaccaatttaaaatataagaaacatagaaggaaaatgtaaattttccaatatctaaaaaactctcattttttttttgtata

SEQ ID NO: 890629 - DNA, 596 bp, Homo sapiens
atatcagggagaacataatgcatgatttagtttgtagttttaaaatctaggatattattgaaattcaattgatgaatttttgaattcatcatttgagttttgaatgttagatattggattatcatacaaatttttgttaagttttctgttaaatactttttttttagatgaagtctgagagaaagtgagtgatgtgtacatttgatttttttttttttggagacggagtcttgctctgtcacccaggctggagtgcaatggcgtgatctcagctcacygcaacctccgcctcccaggctcaagccattctcctgccttagcctcctaagtagctgggattacaggcacctgccaccatacccagctaatttttgtatttttagtagagatggagttttgccatgttggccaggctggtcttgaactcctgaccttaagtgatccgcccaccttggcctcccaaagtgctgagattacaggcatgagccactgggcatggccacatttgataaattttaataaactgattagtaatcagaaagtaaggggtaaggcattagaagtggctatagtggtttttataattatcttaatat

SEQ ID NO: 890630 - DNA, 627 bp, Homo sapiens
accctaaacctatgagctacttgatagcaaggtagccatttctctcaagtaaagaagaaatttccacagtacctggaggccctaagctattccaggatgatccatgacattattctcagttaccttgctctcttgctttgatttgggtcttgctagaggactggagtgtaaatcacctaagtgacttaggttgatacaaatatctgttataagatttaagggaaaaataaaattatcccaaggatgtagctgactgggagttgtcagaggtacatcgggacttcaaggttttgttcaactgtcatcctcttggggcagaaacgaaaatgtcagtagtttgagacttcctttttgctttaggataaccacaaattgcaatcttgtggtgacatcaattgtagaagtaggacrgagaaatgctggtagctcaagaagaggtgagatacctgcaaaccctgtttgaactctgcacttatctgttttaaagcaggaaaatgatcacatcattctctggctcaaaaatttcaaatggctctccattgtcagtagggtcaagctagactttttagcctagtctataaggtctgccacaaatcagcctcaatttacttttctggctttatgact

SEQ ID NO: 890631 - DNA, 659 bp, Homo sapiens
accattgtaatgacctcattttactttattatttcttttaaaaccctgtctctaaatgcagtcacattttggagaactcaggggtaaaacttcaatacatgaatagtgggtgacacaatttagcttgtaacagttacctagmattgttatttaaaatctcctttccaacttaaaattcatatggaaccaaaaaaaagcctgtatagcccagacaatcctaagcaaaaagaacaaagctggaagcatcacgctacctaacttcaaaccatactacaaggctacagtaaccaaaacagcatggtaatggtatgaaaacagacacatagaccaatggaacagaacagagatcttggaaataagaccacacatctacaaccatctgatcttcaacaaacctgacaaaaacaagcaatggggaaaggattctctgtttaataaatggtgctgggaaaactggctagccatatgcagaatattgaaactggatcacttccttacatcttttacgaaaattaactcaagatgaattaaagacttaaatgtaaaacccaaaactataaaaaccctagaagaaaatctaggcaataccattcaggacataggcatgggtaaaggtttcatgacaaaaacagcaatagcatttgcaacaaaagcaaaaa

SEQ ID NO: 890632 - DNA, 574 bp, Homo sapiens
ggcttccccagccacgtggaactgtaagtccaattaaacctctttcttttgtaagttgctcagtcttgggtatgtctttatcagtagcatgaaaactagtacattaaattggtaccagtagagtggggcgctgctgtaaagataccccaaaatgtggaagtgactttggagctgggtaataggcagaggttggaacagtttggagggctcaaaagaagacaggaaaatgtggaaaagtttggaacctcctagagacttgttgaatggctttstccaaaatgctgatagtgatgtggacagtaaagtccagattgagatggtctcagatggagatgaataacttgttgggaaccggagtaaaggttactcttgctatcttttagcaaagagactggcagcattttgcccctgccctagaaatttgtggtaatttaaacttgagagagtatctggcagaagaaatttcttgagagaggtatctggcagaagaaatttctaagcagcaaagcactcaagatgtgacttgggtgctgctaaaggcattcatttttacaagggaagtagagcattaaag

SEQ ID NO: 890633 - DNA, 611 bp, Homo sapiens
tacttcatttataaaaatagatgcaaaattccaaataagctactagctaattaaccctactgtgtagtttaaaaataatctagttggatttattctaggagggtaagaacaatttgacattagaaattctatgaatttatctaccatattatcggactaacagagcaaagtaactcttgacagatgccgaaaaggatttgatgaagttcaacgtctctttctgattttttaaatttctcagaaaactctgaatggaactgaatatccttaatgcaataaagctttgcatattaaaaactttgtagaaaacctactactctgcagatgaactttaattcattctctttaatgttggaaacaggacaagcggaagcaccgcagctattcaacctaacacgagaggctcyggctagtgccataagatgagaaaatgaaaagataggaagagaagagggagggaagagacgcagctgtcatcacacgcagattatatatcatctacatagaaacccaacagaatgaacagaaaattgattggaactaataatagagtttagcaagattgctgaatacaagatcaacttactaaaattagtggctttccctacacc

SEQ ID NO: 890634 - DNA, 582 bp, Homo sapiens
taaggcactagacaaatacctgatggtgtctgtgtctggaagggctgttacctctcacaacatatataaactaaatgcttaaaaagatcccagctcttgcttcccagggagcctctcctcctacaccccattccagaccccagtcgtggcaaactctgagacttctgcctgtagacagcctgcatttcagctcacatcaaagcatgaaacaaaggacttcacaacacccctagcccccttcargctccagagctcttcaagggcaccctgtttaaacaggaggtacagtatatttttgggaaatgatgaagcaacttcccataagaggaaagtaaaaattccccaagtgaaaaaaaaaaaaaaaaaaaaaaaaggcttcttggaaaacagaacagcttccctgccagggcagacagaaaggatttgacattcaggcttttcatccttggcaaagcctgttctaggagagacagggctgcaggggaaaaaagggaggcaacttcttatgatcagatgtggaactcagcatagttttcagagttgcagtctcaaccaaacacttcatctgatattgcccaaggt

SEQ ID NO: 890635 - DNA, 600 bp, Homo sapiens
tactcagaaggctgaggtgggaagactgctttagcccaggaggtggaggctgcaatgagccgtgattacccaccacactccaatctgggaaacagagcaagaacctgtctcaaaaaggaaaaaaaaaaaaagaaaaagcacagtaaagttggaggagcatcaccccagaggatactggttttctaagtctgaagaaggaaacaaaccttaccaccttctttgtatccccgagtctgaggtagtcatataggaaccaaaactcctcctcacctctctcttggtttgagtattgcctttccaccatgcccaattcaagtcttggctcttctggggaagcctccctagacagacatcagggttaattctcttctttctaatagcattcagtacctgaatcactcaagggcaactaagatgaattgtcttatcttttccccccattagaytgtgagaccctgacttccttgtacaagacccaatgcatacataataggttcttaacacttaagtggttgaagtcatactaaagacaatagcatgggaagtcagcgttaaaaacaaaaccaaaccatcaaacaaaacaacatagtacaaaaagca

SEQ ID NO: 890636 - DNA, 582 bp, Homo sapiens
ttggccactggacagtctaacaatgtgatgtatgatgaaggccacctcgtatccattctgattgctgaaggtattagccaacaacctctacaaggggatggagactacagatcagtcacacaggcaatatgtgatagagcccaaataaaaactctgaactggctcacgcctgtaatcccagcactttgggaggccaaggtgggtggatcacaaggtcaggagatggagaccatcctggctaacatggtgaaaccccgtctctactaaaaatacaaaaaaatagctaggcgtggtggcatacacccgtagtcccagatactcaggaggctgaggcaggagaatcacttgaacctgggaggcagaggttgcaatgagccgagatcacgccactgcactccagcctgggcaacagagcaagaytgggtctcaaaataaacaaacaaaaaaaaaaactctggatgccaaggcttgagtgagcttctctggatggcaatacttcaagtatattgccacacatcatggccagaaggagtaaacactgtccataactttatgggaagagaacatttagaagttctgtat

SEQ ID NO: 890637 - DNA, 628 bp, Homo sapiens
cggtggactccacccagtttgagcttccaggcctctttatttacctacgcaagcctcagcaatggcaggtacccctcccccagcttcgctgccaccttgcagttcgatctcagactgctgtgctagcaatgagcaaggctccgtggacatgggaccctccgagccaggcgcgggatataatctcccggtgtgccatttgcttaagaccattggaaaagtgcagtatcagggtgggagtgacccgattttccagtgtcatctgtcacagcttcccttggctaggaaaggggatttcctgaccccttgagcttcccaggtgaagcgatgcctcaccctacttcagctcacgcttggtgggctgcacccactgtcctgcatccactgtctgacaatccccagtgagatgaacctggtacctcagttggaaatgcagaaatcacctgtcttctgcgtcrctcaggctgggagctatagactggagctgctcctatttggccatcttggaaccattgaggatcaaaataaaattgataagatacacagaagactggttaactttctgtatgacaatgaagccatataacttaagggaaactgaagttatatggcttcattggaaacttggatg

SEQ ID NO: 890638 - DNA, 648 bp, Homo sapiens
gtttgtgtggtgagaacatttaaaatctcctttctggctgggagcagtggctcatgcctgtaatcccaacactttgggaggttgaggcaggcggatcatgaggtcaggagtttgagaccagcctggccaacataatgaaaccccatctctattaagaatacaaaaaattagctgggtgtggtggcgggcccctgtaatcctaggtatttgggagtctgaggcaggagaattgcttgaacctgaaagacggaggttgcagtgagctgagatcacgccactgcactccagcctgggtgacagtgcaagactctgtctcaaaaaaaaaaaaaatctactttcttagcasatttagtgtgtacaataaatattattaactgtggtcaccatgctgtacgttagatctctcgaacttactcatcctgaataaccctttggccaacatctccccatttcctcctcaccccagcccttggcaaccaccattctgttctctgcttctatgagttcaccttttttagattccatatataagtaagatcatgtagtacgtgtatttgtctttttctgccagtcctattttacttagcctaatgtccttcgggttcatccatgttatttgcagataacagtgtaaaggggaggcaaact

SEQ ID NO: 890639 - DNA, 562 bp, Homo sapiens
taaaggaaatcagcattgctctttgctgtttatccacttggaatttgtcagaaataaaaccgtggtgaaggagagtccaagtgactaacacaatggatttctgtatcctgtccactaccatccctgagtaaactttgaaatctgacattccataaactatgtcactttattcaactgattttcaaaggttcctctccygtgaatgccatatgtagacatttacatgggattcaaatatctcacagtctttgtccattttgagaggtgcatccacatggatcttcgcatacttccttgccatcatcatatagctcttcttaaatttttgatgaaccaggcaaaccattttaaactatgtgttcatcacttctaagcatctgtttatctggataaaggggaaaacaaaatgagctgctaaaatcctacccactagaagattttcttcactattgctctgaggctcacacatgaatgggactgtgatattatagctgtgaacttccaagttgtaccaacatatattataagtagaaccaattgtaaagtagcacaaagttttttt

SEQ ID NO: 890640 - DNA, 608 bp, Homo sapiens
tcacatttaactcttttacctgtttctctggcatccgctttcatatttgtagctagtattcttattctgcttttatttattagtgaggtttggccattacctttttatttgaagacagacaatttaacttgaaatccagtctcttccttgcactgcttctttcccataaagggtaaatsaaatattctatgtttaaattactatgattatgtgaatgttgttcttactctgccaaatactgcacaataatttcttttcttgtacaaatttttgataatcctgaagttaataattagcttgttttgtcatttgatgagttttatttgtaaagattactaattctttccacaactttcttacaacttcttagtgcaatttgccatatagtcttatgtttcatttttaaattttttctagagactttcctcccagagctctgattcctccagttcagtccagattggcggctctcaaggcctgcttgcagacgccatcttggaacttccctgcaccagcatccagagacttccttttgcctcttttctgtgtggagtctcctgatagcaggacccccatgccttcccctttcttggttaacttcttggtgt

SEQ ID NO: 890641 - DNA, 639 bp, Homo sapiens
tgattccaggcagtgggaaagcagggctgacaacttgatccaggctacctagttcccagctgcaaaagaaaagggctttatttcttcccctgcctattgagcctgcataccagattcacaccctccccaaagttctggccaggaagcttctcaactggttcaaattgttacaaagtttagctggagacttccttctccctgtgacattttgcccacacctctggccacccacccaaacgatctgtgcgatgccaggcaggaatggccccctcggagacccagcaagctcccaggccctttctgcctccttcatgtagccctatatttcactcagctctctaaattgactcagttccaggtaaggtcagagtcttctcccacaaactagaccttcagtttcccccatgcggatctgtttggggctggaggatctccctttgccacttcygcagtttggggactcacagtatttggggtgtctcctgagtcctgggggagcagtcctcttcctttagagggtctgtgggtcctctcaggattgaaggaggaaaaattcacaatgcaagcctctgcaccctgctctgtccatctgagttggaactttaatctagtcctgcctcccatctgccatgatgatcc

SEQ ID NO: 890642 - DNA, 639 bp, Homo sapiens
tgattccaggcagtgggaaagcagggctgacaacttgatccaggctacctagttcccagctgcaaaagaaaagggctttatttcttcccctgcctattgagcctgcataccagattcacaccctccccaaagttctggccaggaagcttctcaactggttcaaattgttacaaagtttagctggagacttccttctccctgtgacattttgcccacacctctggccacccacccaaacgatctgtgcgatgccaggcaggaatggccccctcggagacccagcaagctcccaggccctttctgcctccttcatgtagccctatatttcactcagctctctaaattgactcagttccaggtaaggtcagagtcttctcccacaaactagaccttcagtttcccccatgcggatctgtttggggctggaggatctccctttgccacttccgcagtwtggggactcacagtatttggggtgtctcctgagtcctgggggagcagtcctcttcctttagagggtctgtgggtcctctcaggattgaaggaggaaaaattcacaatgcaagcctctgcaccctgctctgtccatctgagttggaactttaatctagtcctgcctcccatctgccatgatgatcc

SEQ ID NO: 890643 - DNA, 644 bp, Homo sapiens
ataaattaggtattgatgggacatatctcaaaataataagagcaatctatgacaaacccacagccaatatcatactgaatgggcgaaaactggaagcattccctttaaaaactggcacaagacagggatgccctctctcaccactcctattcaacatagtgttggaagttctggcgagggcaatcacgcaggagaaggaaataaagggtattcaattaggaaaagaggaagtcaaattgtccctgtttgcagatgacatgattgtattctagaaaaccccatcgtttcagcccaaaatctccttaagctgataggcaacttcggcaaagtctcaggatacaaaatcaatgtacaaaaatcacaagcattcttatacaccaataacagacatacagagagccaaatcatgagtgaactcccattcacaattgcttcaaagagaataaaatacctaggaatccaacttacaaaggatgtgaaggacctcttcaaggagaactacaaagcactgctcaacgaaataaaagaggatacaaacaaatggaggaacattccatactcatgaatacgaagaatcaatatcatgaaaatggycatactgcccaaggtaatttatagattcaatgccatccccaacaagttac

SEQ ID NO: 890644 - DNA, 644 bp, Homo sapiens
ctgacgcctgtagtcccagcactttgagaggccaagtcaggagaatcacttgaacccaggagttcgagcccagcctgggcaacatggcaaaaccccatctctacaaaaaaaaaaaaaaaaaaaactcaaaaccaaaaaaatgaagcaggcttgccagtagtcccagctactcaggaggctgaggtgggaggatccctggaacctgggaggcagaggttgcagtgagctgaratcatgcccctgcactcctgcttaggtgacagagtgagactctgtctcaaaaataaaaataaaataaataaaaataagaataaataaataaaattgttaaaaatttgccttagtaatttaacttttagaaatttatcctaagaaaacaaccagacaggtattagatagatgatagatagataaatagatagatagatagaaagacagactaagtccagtggctcacgcctctaatcccaatactttgggaggctgaggcgggaggatcatttgaggtcaggagttcgagagcagcctggccaatatggtgaaaccctgtctctactaaaaatacaaaaattaggcgggtgtggtggtgtgtaatcccagctactcaggaggttgaggcaggagaatagcttgaacccaggagg

SEQ ID NO: 890645 - DNA, 684 bp, Homo sapiens
tcatctatatcaagtgccaatgtggcttttctgaacttagagttatatgaattagatagacacgttgtcttctgcatacatgtcctgtgaaaacagggacaagataaacacaacaaacacactcatcagaaaagggaagaagggaaggcacatagcactgacttgtagcagttttgaaatctcacttagaaagtgttgccagggcttcctgctctcagtcaggaatgttccctgatgagacygagctctgcttccttcctcttcctttggtagtcatggctcttggttccccattctaggatgccttttcatttccatcatctttcttgaccattttggaagagagcattagaaacgtcctgttttggtggctgagctgttttttaagactaccatcttttccagagaaggtgagagactttaatttggataagtcttggtccctttttaatcctttagctctttcctttagatctttattcatatatagctaaatgtaaccatttcataattttaacacttcaaaaaattaccttgcccaagtccataaattcattaagtaccctgtgtatcttccaagttatcataggttttaccaattttttttttaccatcgcatacaataggtcagcattgtttcagccctttataatactttgataaccatcttccagatgcctataa

SEQ ID NO: 890646 - DNA, 684 bp, Homo sapiens
tcatctatatcaagtgccaatgtggcttttctgaacttagagttatatgaattagatagacacgttgtcttctgcatacatgtcctgtgaaaacagggacaagataaacacaacaaacacactcatcagaaaagggaagaagggaaggcacatagcactgacttgtagcagttttgaaatctcacttagaaagtgttgccagggcttcctgctctcagtcaggaatgttccctgatgagactragctctgcttccttcctcttcctttggtagtcatggctcttggttccccattctaggatgccttttcatttccatcatctttcttgaccattttggaagagagcattagaaacgtcctgttttggtggctgagctgttttttaagactaccatcttttccagagaaggtgagagactttaatttggataagtcttggtccctttttaatcctttagctctttcctttagatctttattcatatatagctaaatgtaaccatttcataattttaacacttcaaaaaattaccttgcccaagtccataaattcattaagtaccctgtgtatcttccaagttatcataggttttaccaattttttttttaccatcgcatacaataggtcagcattgtttcagccctttataatactttgataaccatcttccagatgcctataa

SEQ ID NO: 890647 - DNA, 602 bp, Homo sapiens
gacctcgtgacccgcccgcctcagcctcccaaagtgctgggattacaggagtgagccaccgcgcctggcgccctctctctctctctctttctctgtctctctaactgtcattcatttagccctttccatacgcttttgaggttaaattggttctgtgattttacaattacatataatgctctagtcattcttgtacgggcattgtcatccactggtgtataagtatttctataggatagaggtgcaattactatagaaagagcaattactctatcatagtgtccacgctgtttttatatcattccattctctctcctcttttggcttattagctataactctttcatttgttattttagtaattgccttagggcttatagccaacctttttaacttatcacagtcaaccttcaagtgatgttatacctcgccttctggccttgaygctattgctgacatgcactttacctttgggcatgttataaaccccacaacccattgttgcttttgtttaaatggtcaaattttcacaaaagaaatttacaaaataagaaaatacctattatagttacccatttctggtgttcttcatttcctctgga

SEQ ID NO: 890648 - DNA, 655 bp, Homo sapiens
tcatgtatatctagatataggatttctgggtcatataaaattatatttaaaaattttttagaagctgccatactgttttctacagtgactacatcatttgacattccctccagcaatacacagggttccaatttctccacattcttaccaacacttgttattttctgcttttttctttgtttttatatatatataatagccattctaatgtgtatggagtctcattgtggttttgacttgcatttccctaatgactagtgatattaagcatcttttcatgtcctcattggccatttgtatatcatttttggagaaatatctattcaagttctttgtccatttttgaactgggttgcttattattttgctgttgagttgtagaagttcttttatgttctggatatgaattccttatctggcatatgatttggaaatattttcttcyatcatgtgggctgtcttttcactctcttggtagtgttctttgttgaataaatgtttttaaatttgatgaagttcaatttatttttcttttgttgcctatgctttgggtgtactatctaagaaataatcaccaaatccaatgtcatgaagctttcatcttatgttttcttctaagagttttatagtttttgtgcttttgtttaggtctttg

SEQ ID NO: 890649 - DNA, 704 bp, Homo sapiens
ccattccaacttgcctgagatggtatctaattgtggttttgatttgcatttccccagtgatcagtgatgatgagctttttttcatgtttgtggtttgcataaatgtcttcttttgagaagtttctcttcatattctttgcccactttttgatggggttgtttgtttttttctcataaatttgtttaagttctttgtagatcctggatattagccctttatcagatgggtagattgcaaaaattttctcccattccttaggttgcctgttcactctggtgatagtttcttttgcygtgcagaaactctttagtttaattagatcccatttgtcaattctggcttttgttgccattgcttttggtgttttagtcacgaagtctttgcccatgtttatgttctgaatggtattacctaggttttcttctagggtttttatggctttaggttttacatgtaagtctttaatccatcttgagttaatttttgtataaggtgtaaggaaggagtccagtttcagtcttctgcatatggctagccagttttcccagcaccatttattaaatagggaatccattccccattgcttgtttttgtcaggtttgtcaaagatcacatggttttagatgtgtggtgttatttctgtggcctctgttctgttctattggtccatatatctcttttggtaacagtaccatgctatttt

SEQ ID NO: 890650 - DNA, 578 bp, Homo sapiens
ggaagggaggcgattgccattccatttccaaaaactcccaggttgcagaacggcaggaggaggggcaggtctggcagagatagatttccaggctgagagtagattcgggccgagagtagagaggagacttacccaaggccatgcggcttgtaagttggacccaggagtagaactggcaagccagggttttgaatcagtatttgtggggtggggtggactctgtgtgctctcttgtggacctcccgacactctgccatggcctggtccagctgtgggctctgcaccgccayggagggagagaaggccatgctgcccctccctccccacccacataagcgtgcacactccattctgctccagctgttggagagtctggggcgggccgcatgaggcacctgttagtgagatgatggatgtgctgtttgcttccaggagaaggagccacaaaaggggatccagggaagggacagcaccagggctgtgtgctgggagagggggtcctgctatggtgcccagcagccttttttggagtcactgacagatggggagtgcagaggagggcaggggcggagggaagg

SEQ ID NO: 890651 - DNA, 565 bp, Homo sapiens
tgtgaatgatggctgctgggaagggcccctgcccgaaatatttccatcgctcatccactgccaatgtgcttggagtctgccattccagagccatgccttcaccaagttcctatttcaaaatgcaagcacctcaaggcggcctaagagattatgtcctttatttctgggggaagggaacttttattttgatggatgccaaaactggtttgcatttcctgagtttaaagtaattctcttgcaggtgagagtagcctgctcagtgccaactgggagagcagaaccttccttccattcagtagttgggagggaactggggaggctgctggaggatgcctgctgctttatggagcatcctckgctttggctccaggtagacgtgggcttgaatcctggcagccgggtgaccttttgggatacactctgacttcctccttcctggagccaagtctctcatttccctgggacttagcacacacaggctgctggaatggcttcttccggaagaggagggatccagccccactgagtgggtatgtttcccaggagaggcctggaggctgatgcc

SEQ ID NO: 890652 - DNA, 634 bp, Homo sapiens
gagcatgacaggtggtgaatttgcttatttctgtctgtcttgcccatgaaatgagagctctttggaccaggaactctttcctctgcacctagaacagagtggtatttgtggaatcatttctttcttttttttctttcttcttttctttttttttttttttttgagatgaagtcttgctgtgttgcccaggctggagtgcagtggcacgatctccgctcactgcaagctccgcctccygggttcacgcctttcttctgcctcagcctcctgagtagctgggagtacaggtgcccaccacgatgcctagctaatattttatatttttagtagagatggggtttcaccatgttagcccggatggtcttgatctccttaccttgtgatctgcccaccttggcctcccaaagtgctgggattacaggcgtgagccaccatgcccagccagaatcatttcaataataactatttgtggaattattataacgttggtggttacctactatgtgtcagtgactattctaagcactttgacatcaatactcatagtaactctgtaatataggaactgtgattatctcatttttatagatgagaaaacagacacagagagattgtggtcatttatccaaggtta

SEQ ID NO: 890653 - DNA, 608 bp, Homo sapiens
aagactaaaatttgcatcacaactgaatttgtattgactttaccacattttttcctcctctagtatcccctggcttggacttaatacagctgcaatcccagatatgaccattcatttggagagaatgtcaggagaatcctagttttctccctattaaaagacttgaattcctacttaagagtctttcatctaaatgcccacaagagaaagcgggaaagatctacaattgacacmctaacatcacaattaaaagaactagagaagcaagagcaaacaaattaaaaagctagcagaagacaagaaataactgagatcagagcagaactgaaggagatagagacacaaaaaaacccttcaaaaaatcaaataatccagaagcctggttttttgaaaagatcaacaaaattgatagactgctgaccagactaataaagaagaaaagagagaagaataaaatagatgcaataaaaaatgataaagggggtatcactaccaatcccacagaaatacaaactagcatcaaagaatactaaaaacacctctacgcaaataaactagaaaacgtagaagaaatggataaattcctggacacatacaccctcccaaga

SEQ ID NO: 890654 - DNA, 637 bp, Homo sapiens
aaacatttaccattttgcttccatgtctgtggtaggcagaatattggctcccccaaaaaaaaatctcatccctatccccagaacctatgaatgttactttacatgacaaaaaggaccttgtattaatgttactttacatgacaaaaaggaccttgtattaatgytactttacatgacaaaatggaccttgtattaagattaaggttcaaagattgtggaggtagagcaagatggccaaatagaactctccagtgaatgaccccttgcaggaacaccaaattaaacaactaattaaagcaccttcataggaacaaaaaaacagggtagcaatcacagtacctagttttaacataataacaaagaaagagatattgagtggataggaaagatagcctcacattgtctacactgtcccttccccaactgcaggcagtgcagcccagagagaatctacatggttagggaagggagagcaaagtgagtgttgaactttgcattggaactaagtgctgccctgtcacaacaaaacataacatagggcagaattctgccagtgtccacaaagggaatatttatagcagccgtggacccaaggggaattctccactccagtgggagaaacccacatcctggtcag

SEQ ID NO: 890655 - DNA, 637 bp, Homo sapiens
atctgccggttgacttctgattggccctagccccatgaatgtctcctggtttctgttttattttctgtccctagtgcaagaacatgtactcctacttttagatcaaagcaaccttgatgttatcacataaattagaggytgtgacgcacacaggattcgtgctggttttggagggttgcctttaactgttttgctggagcacataagaccctttccttataccttgggtttgggaggaacagtgaggagatctacctgtcttgaggctgccaagaccacgcttctgcctgtaagcgcccctaataaatcacccaatactgacaaactggatttgtctgcctccttcttggatttctgggctcctttggcatttggggactgctttgcacacatggccctttcacagaacaaacacatttacatatctccttagaggcttggctataaaggaaacaaagaaataatgaggcaattcctgaagatttccttagatggggttagggagcatattaagtttttgttgttattatttttaatgaaaaatgtactagcaatgagggagagatgaaaagtacagacagtgagataaaagtctgcaaagtgagatcttaaggggtattttaaggcggattagaaa

SEQ ID NO: 890656 - DNA, 619 bp, Homo sapiens
tacatcaggattttggcattcatccaagagcaatgaggagacacaaaagggttttaagccaagatataacatggttggactttaattttcaatgcatcacttggaactggaggaatatagtcatctctgctattttttccctctaaaaacactttttaaattgtcaaaaacaaaaacgaaatgccctgtaatctcaccttgagacatttatttctagattttttacttacctaaataaacatgtcagttttacataacaggcatgcgcacatacacatatgtattttaaaacccctctagttgatttttgtccttaactgttgctgagcgcytactatatgccaggcacagtccctgggacccagcagtgaacaaggctaatgaaggcccactgtgctcagcagctcccaagtcctcagcaggagtcctggtgcccacaagcagccacaagcagccagacacagcgtgggcttcccagggagacacgcctggggtggaatccagctctgctcggccacacacatgctgggtgaacttgggcagggggctttacttctctgtaccctatgttcccagctattaaatgaggactataatccccaccaaacagaaacagaat

SEQ ID NO: 890657 - DNA, 619 bp, Homo sapiens
ttattgtaagacagaagttggagaggaggtttgtcacttcttttaatttgctaattctccatgcattgcacaagattctggcattacctgaaaatagagcccaagagatggggccagggcctcaattttagttgtctctcagaagtcagactgaagttagatctaggtccatgttagggacaaagccaagaattttccatttaaatttcaacaagtgtggcaaaaacattaaatgtggcagcagaacatagatattgtataattgtataatatgttatacaatataatattgtataatatagtatacaatataatattgtataataatatagtatacaatataatattgtataatatatagtatacaatataatattgtataatattatattataatatattattgtataatatatattrtacaatattgtacaatattgtacaatattattatgtataattctcttccattaaaacatttatttaaaattaaagacttcaagcctaacacttgtcagaatgaaattaagccaaacttaacttactgtgttaatttgatacaggatatttgttttctgatgatgtgattattaccaagtagggaacaaaaaaataagga

SEQ ID NO: 890658 - DNA, 694 bp, Homo sapiens
aaaggctaaaggttggcctgcccatattttaatcaaaaggcaagctaaactcatttagaattctactacaacagaaaacttcagtcggctaaattctagataatcagctttggacagattatttagctttattgcgcctacgttttctggtatatgaaatgggaagataaaaatagtaatatattaattccttcaaaggaaagatgagaaatgatacatgtgtcagcattttgtacactataaaatactgtgcattttagaaaactttattttaaaagtatttcatacaaagaatggtaagtaaaatgaataagtgatatgcttctgaaattttacaagattttgaatatcactactcatttctttcctacctagaaaaatkagaacatgctgacctagttttcttcaatttacaatattcttaaatgttaagtcaattcttttatatctttacctcattttttatactgtggagtgaccacaaacaaacagtaatttggaagtcaaaaattcttagaagatgtattagtttatgaaatcatagtgaaataaaaaatcacagaagagttaacctgagaagaaagctacagaaaatacgatatgtattggaagaaagaaacattaaaatgagctcatttttataagaaaatggttcttattttataacagatgcatgtcctttcacaattacaga

SEQ ID NO: 890659 - DNA, 597 bp, Homo sapiens
accagcctgagcaatgtagtgagaccctcatctccccaagaaaaaccaaaaattagcttgatttggtggctcacaccagtagccaggagttggaggctgcagtgaaccataatcatgctactgcactacaatctgtgggacacagtgaagcctgtctctaaaatcaaatgaaatcaaatcaaataataatagcaacaatatattttatgtagacttatgtatctatcttttgtgtgtgtaaatatatatatgtatatatctcagcttatgcacacttatatataaatgaaatgaatgaaaacaataatacatgggagaggatgggaaaattaggattgtattgttattataaggtttagtaagtcttcatttaatgtcattgatargttattagagaatattagttttaataaaatgacatataatgaaataatttttccccattaatgttataacaaactgacgttgaaggaaatgatactatttgaggatctgctttttatattgtttcactttaagtcacagctttcaataacctattgacaatattgaggactcactgtactcacactatccatgaagtcatatttgtgttat

SEQ ID NO: 890660 - DNA, 586 bp, Homo sapiens
aagaagaaaagagaagaatcaaacagaaacagtaaaaaatgatgaaagggatatcaccactgatgccacagaaatacaaactaccatcagagaatactataaacacaactacacaaatgaactggaaaatctagaagaaatggataaattcctggacacatacaccctcccaagactaaaccaaaaagaattcgaatccctgaatagaccaataacamgttctgaaattgaggcagtaattaatatcctaccagccaaaaaaagcccaggaccagatagattcacagccaaattctaccagaggtacaaagaggagctggcaccattccttctgaaactattccaaacaatagaaaaagaaagactactccataactcattttatgaggccagcatgatcctgataccaaaaccaggcaaagacacaacaacaaaaaagaaaatttcaggccaatatccctgatgaacattgatgtgaaaatcctcagtagaatactggcaaactggatccagcagcacatcaaaaagcttatccaccacgatcaagttggcttcatccctgggacacaaggctggttcaacatac

SEQ ID NO: 890661 - DNA, 586 bp, Homo sapiens
aagaagaaaagagaagaatcaaacagaaacagtaaaaaatgatgaaagggatatcaccactgatgccacagaaatacaaactaccatcagagaatactataaacacaactacacaaatgaactggaaaatctagaagaaatggataaattcctggacacatacaccctcccaagactaaaccaaaaagaattcgaatccctgaatagaccaataacacgttctgaaattgaggcagtaattaatatcctaccagccaaaaaaagcccaggaccagatagattcacagccaaattctaccagaggtacraagaggagctggcaccattccttctgaaactattccaaacaatagaaaaagaaagactactccataactcattttatgaggccagcatgatcctgataccaaaaccaggcaaagacacaacaacaaaaaagaaaatttcaggccaatatccctgatgaacattgatgtgaaaatcctcagtagaatactggcaaactggatccagcagcacatcaaaaagcttatccaccacgatcaagttggcttcatccctgggacacaaggctggttcaacatac

SEQ ID NO: 890662 - DNA, 659 bp, Homo sapiens
taggccctaaaaacagggagagatggattgctccatcctcgtacactgggactgtgcaatgataggagtcatagtttttgctctatgagctcaagatttcttagtttcttttattctcagtcaggacttaggaactagcaaatataaatcaatgttgctacagtagggaaatgaaaaatgacagaatggggttttacttttctacctttagagaagcataaccaaagcccagttaatttgtaatctgatgaaaggtgagtttttgtgaggagcttggaggtagaatgttgtgcaatctgatttgggattaaaacccagttgttgctcttctcactatttcctcacagaataccatgccctctgtcttagttcagaatgctacatggactatcatatacttggtgcattataaacaacagaaatctatttcttacagttatgaaggctggaagtctgggattagtaggccagtgtaktccggttctgttgagagcccttctctgggttgcagagggccgacttcctgatgcatcttcatgtgacaggaagagagctagggagctcatttttataacggcactaatcctattcatgaaaacactacccccattacctaatcttcttccaagggtcccacttcctaataccatcacattgag

SEQ ID NO: 890663 - DNA, 640 bp, Homo sapiens
cctcgactctacctctttctttttatgaaaacagaatacatggcacaaagcacagctgcccctgagacatgcttcagaggtaaagcgctttgtaacagattcacttcctttcccagtgccacagaacaaagattacactcagccttcctggacataaaaacttcagtttttcccattcctcctgccaaagctgaaatgccgagaaatgctgggaacctggcctgtgattatacacacttmatattttacattctgaaaccccaaggaataagctgttgagaacagagtcctatttcttaaatggcagttgaacagatacaacgctcaagctctgttgagcgtggcttagtatttgcataggcagaaacagacaaagactgcacagattctgccagtctgtgggcaccttcccggcatatgtggcagacctcagttaacttttctcacttatttctgtttggttgttttttaaccttctgaattactcaaccagattcttacaggaaaaaaaaaaaaaaaaccactaacacacatacaaatcagtcacagggaaactcagttacggcctctgacgggtttgaacctgtctatttgcaaatgagaaaacaaaatttcagtgttctttaggccaaaatagtat

SEQ ID NO: 890664 - DNA, 640 bp, Homo sapiens
cctcgactctacctctttctttttatgaaaacagaatacatggcacaaagcacagctgcccctgagacatgcttcagaggtaaagcgctttgtaacagattcacttcctttcccagtgccacagaacaaagattacactcagccttcctggacataaaaacttcagtttttcccattcctcctgccaaagctgaaatgccgagaaatgctgggaacctggcctgtgattatacacacttcatattttacattctgaaaccccaaggaataagctgttgagaacagagtcctatttcttaaatggcagttgaacagatacaacgctcaagctctgttgagcgtggcttagtatttgcataggcagaaacagacaaagactgcacagattctgccagtctgtgggcaccttcccggcatatgtggcagacctcagttaacttttctcacttatttctgtttkgttgttttttaaccttctgaattactcaaccagattcttacaggaaaaaaaaaaaaaaaaccactaacacacatacaaatcagtcacagggaaactcagttacggcctctgacgggtttgaacctgtctatttgcaaatgagaaaacaaaatttcagtgttctttaggccaaaatagtat

SEQ ID NO: 890665 - DNA, 549 bp, Homo sapiens
ttcctcatccccaggaatgtaaataaataaatataaatattgtaagtcagtgattttttcctaggaagacagtaaaattactttacacgccttctcattgtaaacctaaataacaaacagagaaaggttctctaaaggaaaaagacacatcttagggaggaggacactgcaatgggaatatgcatgacaaagcaaactgtgtagattcaaatggtaaaggaagacaaggtctttaaaagaaaagtgatcaacctggaattatgggggagtagaaaaaaataaataaaggaaaaatgaagaggcttatataattgttttgttatagttatctttgactataaagatcaacaacaaggtcgatgtcagytgaagtttgagcaggtggttgctggatagatgtcctcacagaagtgtattttgtgtaaggttgctatggcctttgtgcaaggttgtggattttgtgacagtttgtatcaggcctagaagcatgagaaccctctcttcaaggccttctctgaatctatttgtccaggttttttcttttctttt

SEQ ID NO: 890666 - DNA, 569 bp, Homo sapiens
taaaagaactagagaagcaagaacaaacacattcaaaagataacagaaggcaagaagtaacttagatcagagcagaactgaaggaaatagagacacaaaaaacccttcaaaaaatcaatgaatccaggagctggttttttgaaaagatcaacaaaattgatagaccactagcaagactaataaagaagaaaagagagaagaatcaaatagatgcaataaaaattgacaaaggggatatcaccaccaatcccacagaaatacacactaccatcagagaatactataaacacctctacacaaataaactagaaaatctagaagaaatggataaattcctcgacacatacatcctcccaagactaaaccaggaagtwgaatctctgaatagaccaataacaggctctgaaattgaggcaataattaacagcttaccaaccaaaaaaagtccaggaccagatggattcacagccaaattctaccagtggcacaaggaggagctggtaccattccttctgaaactattccaatcaatagaaaaagagggaatcctccctaactcattttatgag

SEQ ID NO: 890667 - DNA, 569 bp, Homo sapiens
tagaaaaatggcagacctaaatccaaccttagcaatgattagttacaatgtaactggacaaatactctacttaagacagagactgccagacctgagaggaaagcaagacccaacaatacggcatccacagagacacaatttaaatacaaagacacaaagtatgagaaaaaatatgctatgcagacactaatcataaaaatatgctatccagacactaatcataaaaagcttcaacggagaygttaacactagatgaaagaggctccagaaaaaaatatatcaccagaaataaacaaggtaatttaataaaaataaaagaatcagagaggatgatgttacaattataaattgggccttaaaggcacacaaagtacacacacacacagagccttaaattatgtgaatcaaatacaacagaacataagcaggaaattgacaatccaaaattataactggggaatcaatactgctctcttattaactgaccgtatcagccagatgaaaatataggtaaaaatacggatctaaatgacaaaatcctgacccaaatggtacttgtgagttccaat

SEQ ID NO: 890668 - DNA, 639 bp, Homo sapiens
  misc_feature 552: n = A,T,C or G
tttccttttccccaagggtcttctttaggtttttctttcccatacattgctttttgtaaggctggacatcaagtaataccacttgctctttcttttgaattaaaacaaagtctaatcctgattttgatcattgtattcgagtaacagcattgcttyttttgacttcgatgttgaggagaactgaagatgcagatcacttacacttgaatagtgcctgcaggagtaccacctttccccatctctgatgcagcaataaccagcccttctgggtagagcccccagagagcaccaatgtgtggctcatttgaggcctgggcttagtagtgttcactgttcgagagattacatgaataacaagttgaatctatgttgttttcatagggactagagttcattggacagtctgcagctttgtggcagtagcacactcttgtcattcagccagtgccataatctcacaaagaattaaagaagataaaaatagcaggtggtcccatctatgatgtcgtttatctttacaagaaacatacgaatctagaaggtttgagaaanaattaaagggcagctctcactcatacccaaagatcctccattgcccacaggatggactttcattcccccagagtaatcgtgataaat

SEQ ID NO: 890669 - DNA, 584 bp, Homo sapiens
ggtcccattctccccgtcactttcaggtacaccaattagatgtagatttggtcctttcacatagtcccctgtttcttggaggctttgtttgtttcttgttattctttcttctctaatcttctcttctcccttcatttcatttatttgaacttccatcacttataccctttcttcccattgatcgaatcagctactgaggtttgtgcattcatcacgtagttctcatgccatggttttcagctccatcaggcctttaasgacttctctgcattggttattctagctagccattcatctaatcttttttcaaggtttttaacttctttgccgtgggttggaacttcctcctttaggtcggagtagtttgatcgtctgaagccttcttctctcaacttgtcaaagtcattctccctccagctttgttcagttgctggtgaggagctgtgttcctttggaggaggagaggcactctgatttttagatttttcagtgtttctgctctgttttttccccatcttctttgtgttttttatctacctttggtctttgatgatggtgacgtacagatggggtttttgtgtcaa

SEQ ID NO: 890670 - DNA, 584 bp, Homo sapiens
ggtcccattctccccgtcactttcaggtacaccaattagatgtagatttggtcctttcacatagtcccctgtttcttggaggctttgtttgtttcttgttattctttcttctctaatcttctcttctcccttcatttcatttatttgaacttccatcacttataccctttcttcccattgatcgaatcagctactgaggtttgtgcattcatcacgtagttctcatgccatggttttcagctccatcaggcctttaaggacttctctgcattggttattctagctagccattcatctaatcttttttcaaggtttttaacttctttgccrtgggttggaacttcctcctttaggtcggagtagtttgatcgtctgaagccttcttctctcaacttgtcaaagtcattctccctccagctttgttcagttgctggtgaggagctgtgttcctttggaggaggagaggcactctgatttttagatttttcagtgtttctgctctgttttttccccatcttctttgtgttttttatctacctttggtctttgatgatggtgacgtacagatggggtttttgtgtcaa

SEQ ID NO: 890671 - DNA, 624 bp, Homo sapiens
aggaagaggtccagtttcaattttctgcataagtctagccagttttcccaacaccatttattaaataggaaatcctttccccattgcttgtttgtgtcaggtttgtcaaagatcagatggttgtagatgtgtgttgttatttctcaggcctctgttctgttccactggtctatacagctgttttggtaccagaccatgctgttttggttactgttgccttgtagtrtagtttgaagtcaggtagcatgatgcctccaactttgttctttttgcttaggattgacctggctatgcaggctcttttctggttccatataaagtttaaagtagtttattctaattctgtgaagaaagtcattgctagtatgatggacatagcattgaatctataaattaccttgggcagtatggtcattttcacgatattcattcttcctatccatgagcatggaatgattttccatttgtttttgtcctctcttatttccttgagtactggtttgtagttctccttgaagaggtctttaaattcccttgtaagttgtattgtaggtattttgatctcttagtagcaattgtgaatgggagtccattcatgatttggctctctgtgtattattggtg

SEQ ID NO: 890672 - DNA, 631 bp, Homo sapiens
tttcctatttgaatatggtttatttctttctcttgccctggcctgaacttccaatactatgttgaataagagtggtgagagggggcatccatgacttgtgccagttttcaaagggaatgcttccagttttgtccgtttagtatgatattagctgtgggcttgtcataaatagctgttattatttkgagataccttccatcaatacctagtttgagagtttacagcatgaagcgctgttgaatttggtcatttctgcatctattgagataatcatgtgtttttttgtcattggttctgcttatgtgatggattacgtttattgatttgcgtatgttgaaccggccttccatccccgggatgaagccaacttgatcatggtggatgagctttttgatgtgctgctggattctatttgccagtattttattgaggatttttgcatcaatcttcattagagacattggactgaaattttcttttttgttgtgtctctgccaggttttggtatcaggatgatgctggcctcagaaaatgagttagggaggattccctctttctctattgtttggaatagtttcagaaggaatggtgccagctcctctttgtacctctggtaaaattcggctgttta

SEQ ID NO: 890673 - DNA, 631 bp, Homo sapiens
tttcctatttgaatatggtttatttctttctcttgccctggcctgaacttccaatactatgttgaataagagtggtgagagggggcatccatgacttgtgccagttttcaaagggaatgcttccagttttgtccgtttagtatgatattagctgtgggcttgtcataaatagctgttattatttggagataccttccatcaatacctagtttgagagtttacagcatgaagcgctgttgaatttggtcatttctgcatctattgagataatcatgtgtttttttgtcattggttctgcttatgtgatggattacgtttattgatttgcgtatgttgaaccggccttccatccccgggatgaagccaacttgatcatggtggatgagctttttgatgtgctgctggattctatttgccagtattttattgaggatttttgcatcaatcttcattagagacattggactgaaattttcktttttgttgtgtctctgccaggttttggtatcaggatgatgctggcctcagaaaatgagttagggaggattccctctttctctattgtttggaatagtttcagaaggaatggtgccagctcctctttgtacctctggtaaaattcggctgttta

SEQ ID NO: 890674 - DNA, 607 bp, Homo sapiens
tttaattggcttatttgctttcttattgtggagttttaagagtttttatatattttggataagctgccttatcagatatgtcttttgcaaatattttatttcagtcagtggcttgtcttctaaatttcttgacagtgtctttcaaagaagagaaagttttaattttaatgaaatccagtttattctttctttcatggatcattcctttggcattgtatccaaaaagtaattgtcaaacccaaagcccaaagtcatctacattttcttctgttattttctatgaaattttttttttttttgacatagtctcactctgtcacccaggctggagtgcagtggcacgatctctgttcactgcaagctccgcctcccaggttcacaccattgtcctgcctcagyctcccaagtaggtgggacaacaggcgcccaccaccatgcctggctaactttttgtatttttagtagagacggggtttcactgtgttagccaggttggtctcaatctcctgacctcgtgatctgcccgcctcggcctcccaaagtgctgggattacaggcgtgagccaccatgcccggcttctatgaattttaaagttctgctttttac

SEQ ID NO: 890675 - DNA, 681 bp, Homo sapiens
atattaaatgctcaattaatatttgttaaatccatcagtgaaatttcctgtgctactcttgtctactaaaagatacctaactcttaattttaccattcaggaacaaaggtatattcgtgaacttttcaatgaggaaagtataagttgccattttaaagacataggggagaaaatgggtttgatgttttaatggagcaattgggcttcactgagctcggtatcacaagagatgaggggttgagaaaatacctggatttgtctctttaccatttagcacagcccagagatgggttcaaggattattgactttcccgcaggcactcgggctgaacttgcctcatgggaatgcttggagctatggatgatgtaggtttgtctgggtcttctggagctgcccagatccacaaggaacaacctcccagaaccaggccagagagtgtaataagcattgatttctatgctctgctgtccatgctgmtaaggactgggagtcctgcactgaacaatggtgtaactgcctaacaagttcaccttgcctgctgcctagacagagacaatttattaagacaggggaattgcaatagagaaagagtaatccatgcagagctggatgtgtgagagaccagagttttattgttactcaaatcaatctctgtgagcattctgggattagcattttaa

SEQ ID NO: 890676 - DNA, 573 bp, Homo sapiens
tctagagacataactagagtaatactaagagccagaactcagctgattgtggtggcttacgcatgtaatcccaacactttgggaagccaaggcgggtggatcatttgaggtcaagagttcgagactagcctggccaatatggtaaaaccctgtctctactaaaaatataaaaattagctgggtgtggtggcacacatctgtagtcccagctactcaggaggctgaggcagaatcacttgaacccaggagatagaggttgcagtgagccaagatcatgccactgcactccagcctgggtgacagagggagactccatctaaaaaaaaaaaaaaaaaaraaaaccgagctggaactcatagctttcactgtacatggttgtttattttttaaatgttcttatgtttttcatagattaccctgattagttttaggatttctcttagagatttttacttttttacaaagaaatgttaacatttaaaaaatactctaatttttgctttcttgttttttgtcctattttattttattttgattttatttacgacttgattctttagtttttaaagtgat

SEQ ID NO: 890677 - DNA, 659 bp, Homo sapiens
ccttttggttgtggaacaagaacccagtattcaccaaactgtgggagcaaaagagctgtaacacttctgctcactgagctgtgggtggtgggagtaaaagagctctaacccttcctcccactcgacaaacacattctaagcccataaaaaccccacactcagcctcagagacaacaacccacttttgggtcccctctctgtgctgagagctttctttctrccactcaataatattctactctgccttactcactcttcagtgtctgcgtaccttagtccttttggttgtggaacaagaacccagtattcaccaaactgtgggagcaaaagagctgtaacacttctgctcactgagctgtgggtggtgggagtaaaagagctctaacctttcctcccacttgacaaacaacaggagtgaagaagtcaatgggtgtcaggcccttctacttgctgagctataggagtgaagaagtgaagcagctgggcaccactctctcctgcttgctgaactatgggagtgaaaaagctgcaacaacaccatgtaggtacgagaagaaaatgttggaaaaacactccaggaagttggtctgggcaaagattttttgggtaagactttaaaagcacaggtaacaaaagcaaaaataggcaaatatgttgac

SEQ ID NO: 890678 - DNA, 614 bp, Homo sapiens
gaaaatagtatttgtaacactaaaccacgtgagaggacaaagtgacctgcccatccacctgttctaattaatatacttttaaacctttcaaggaaaaccatttctcctcctttctttacaccacacaaagatttagccataaaatttcggcttagagtaatcacatcctgaatcaatggcttcttttttgagttaaaaaaattcctctaacrtgttcattttaattttaaaaatgctattttaaatggtagggagccttttaattctccactctgggttataaaaaaataatagatagggagaaatgtgttattaaagctatttttcttggcgttctggtaatttaataaactgctgaagctaagccttaagactttataatgcagcaagaagaggacttgtctgttgattaatagtttttgatcgtcccccacccaacctccctgcttcctggggtgattcctgaaggacaacaggcaatttctgaagaatgaagaggatttggagaaacattgtacaaaaatgttttgtccagggaatgttaatatccaggaacatacacacactcttctctaaggcttggtatgcttgtgaactggtggagatgagtctca

SEQ ID NO: 890679 - DNA, 632 bp, Homo sapiens
attctatataccaagatacatgtcttttataataggaaaagaaagctatttttaaaaaaatttataaatgcacgactatgaatgacccctttgaacagtgttttcagtggtcactcctctccccacaggtaaagtacccctgttatgttacacaaatactgatccaccttaggcatccatcaagacgccaaaagcaaaagatagccctcagttcccattttatataggccttctttgttagtcttcctctctctgctgtgatcaaccaaactagggaggaggctaagttagcctattctttcattgctcacaattactgttgtgagccaatcagtaaatcccaagggtgttctttgggggtgrctgggacagccaagggctcacaagttttaaaagatgacaactgatgatagagatgaagagaaaaataaaatggacccatcacgctacaccagtgggaaaataaaagaatattctacatgggtggcatccactcagagcggcaccaaggaggaaaagctgttcatggttcgagtacagatggaatgaatgaactctgaactacaaatgaggaagcctgaggcttcgattctgattctgcctctaatgaccttggagaagtcaataaactt

SEQ ID NO: 890680 - DNA, 632 bp, Homo sapiens
attctatataccaagatacatgtcttttataataggaaaagaaagctatttttaaaaaaatttataaatgcacgactatgaatgacccctttgaacagtgttttcagtggtcactcctctccccacaggtaaagtacccctgttatgttacacaaatactgatccaccttaggcatccatcaagacgccaaaagcaaaagatagccctcagttcccattttatataggccttctttgttagtcttcctctctctgctgtgatcaaccaaactagggaggaggctaagttagcctattctttcattgctcacaattactgttgtgagccaatcagtaaatcccaagggtgttctttgggggtgactgggacagccaagggctcacaagttttaaaagatgacamctgatgatagagatgaagagaaaaataaaatggacccatcacgctacaccagtgggaaaataaaagaatattctacatgggtggcatccactcagagcggcaccaaggaggaaaagctgttcatggttcgagtacagatggaatgaatgaactctgaactacaaatgaggaagcctgaggcttcgattctgattctgcctctaatgaccttggagaagtcaataaactt

SEQ ID NO: 890681 - DNA, 632 bp, Homo sapiens
attctatataccaagatacatgtcttttataataggaaaagaaagctatttttaaaaaaatttataaatgcacgactatgaatgacccctttgaacagtgttttcagtggtcactcctctccccacaggtaaagtacccctgttatgttacacaaatactgatccaccttaggcatccatcaagacgccaaaagcaaaagatagccctcagttcccattttatataggccttctttgttagtcttcctctctctgctgtgatcaaccaaactagggaggaggctaagttagcctattctttcattgctcacaattactgttgtgagccaatcagtaaatcccaagggtgttctttgggggtgactgggacagccaagggctcacaagttttaaaagatgacaactgatgatagagatgaagagaaaaataaaatggacycatcacgctacaccagtgggaaaataaaagaatattctacatgggtggcatccactcagagcggcaccaaggaggaaaagctgttcatggttcgagtacagatggaatgaatgaactctgaactacaaatgaggaagcctgaggcttcgattctgattctgcctctaatgaccttggagaagtcaataaactt

SEQ ID NO: 890682 - DNA, 691 bp, Homo sapiens
tcccagctacttgggaggctgaggcaggagaattgcttgaacccaggaggtggaggctgtagtgagccaagatcgtgccactacactccagcctgggtaatccgagaccctatctcaaagaaaaaaaaatttttttgaatgagtatggctttgcttaaccagagtctgtggtgagagtgtggggagcccattgtttccagagttgatgtcctaggaggatttgtgatttctgagcctcaaatgaaatttggtatatattcccagatgagaagcagcagtgatgggtcagcctaaggaccagccccagaccaaagaacagattggatggaatttagacctctaggttctgggatcctaaagaactgaagtaattagccagacatggtggtgttcacctgtagtcccagctacaggttgaggtgggaggatcacttgaacccaggagttttaraggctgcagtgagctatgatcacaccactgcactccagccccagggccacagtgagaccctgtctcaaaaaaaaaaaaaaaaaaaggaactgaagtgaagtcagaatatcttcttttcaggccttagagaaagatcgttatgagcatagtcccaaatctggatttctctgaagccaggtcctcccttggcttaccattctgtcttccactgataacttgaggcacgtagccattaactgg

SEQ ID NO: 890683 - DNA, 605 bp, Homo sapiens
ttccccaaggtataggctctgggtctggggggttgcagtgtggagatctacctgtcttgcacccacccaagaccacgactctgtctataagttgccctaataaatcatccaaaactgtcaaactagatttgtctgccttcttctttggtttctcagctccttctgcatttgggggttgctttgtgataaatggccctttcacaaaacagcctgacttcttcttccactcctcacatataatcaatcaccaagcactgctgattctatcccctaaatctctgtcaagactttcaacttctcttcatctttactgccattgcctggtccagactactgtcatcatttgcctggattcctgtacctgcttttaattggtctctctccctctagttttatccacaaaatctatccttcatacggtagatgggaaaaaaaagagacttttttwaaatttttaaatttttttaaagatggtctcattctgtcacccaggctgctggagtgcagtggtgttatcatggctcactgcagctttgacctcctgggctcaagtaatcctcccacctcagcctcctaagtagctgggactacaggcatgtgccacc

SEQ ID NO: 890684 - DNA, 582 bp, Homo sapiens
tggccaggacctatagccatatcacaaacttcaggcttgtcctcaaggtacacacaccattgtgttacacttgccaggtgtgggaataactaactggtagtggccaaatgaactacaaataagctataacaaccaggatgagatgactaggtttgctgtaaaactgcctgcatatacagacaccaaaagccacaatcctctttgatagtattaagaaagcactgtcagttttttgaaggtgtgataatgatattaaggtatttatttaaaaaaagcctctctctctctctctmtatatatatatatgtacatatacataaaatatatatctattttaaatatccttatcctggaagcgtccttatattttaactatacatgctgaaatatatttacagatgaaattatatcaaaatatttacagatgaaattatatcaaaatgccttgctttaaaacaatttagggtaatggggggagagaaacggtggcatatataaaacaaaattgacaatgagttgataattgttgaaactgtgtgatggatacatgggagttcattattttctttacttttgcattta

SEQ ID NO: 890685 - DNA, 624 bp, Homo sapiens
caaagagtatgtaaaccctagctgtgccagcacatgttcatctttacaatttatattgtaaatgatttgtatcgtatgattaaggatctaaggcacaatatttgtcactgttctattagactttttactgaaaatgaataatggtgtaatggttctcctggggctgtcacattttataggtcagagtgtgacttcttaatatggtgctgatgtttttgtgtcaatggcttgaaactggcaagattaacaaaattaggccgggcatggtggctcacgcctgtaatcccagcactttgggaggcccaggtgggcggatcacctgaggttagaagtttgagaccagcctggccaacatggtgaaacctggcctctactaaaaatacaaaaattasccgggtgtggtggtgggtacctataatcccagctacttgggaggctgaggcaggagaatcgcttgaacctgggaggtggaggttgcagtgagctgagatcgtgctattgcactccagcctgggcgacagagcaagacgccatctcaaaaacaaaaaaacaaaattcatgttactaaaagacaggtagccatatacagacagtatatgccctattttttttaactgactctta

SEQ ID NO: 890686 - DNA, 602 bp, Homo sapiens
aacttaagttggtcttcagcaccaccaagcaatccttttgtgttttagctccctcctttctccaatgcagaattcacatttgccattcttcaagcctttactctatcctttgtccctctgtgccctgcagatggcactgccttctacttcccagagaaaactgaaattggctcagttctgctccttacctgcaaactcagctacagctgcatccatccttactctccttggasgaaggtgcttccatctcctatcctacagtcatcatcacctggagctacaaccttttctttatggctcaatgcctgcttctatgcagtaagcccctgagatcccacaccttatttcttcaggcacaccatctactacatagcaaatatagtactgattttaactgcggcataaaaatggaggccccttgaatggtctctcccagatggaactgcatacataccagttcctgtgactccttcaagctcagtgctcctacgtgaattatcacctgatccagcctgcaaaagaaaaaacactgctgcatcgcttagagtttagaggcatgcagaagggctgcactatcctggtttgtgctgattttagcagtt

SEQ ID NO: 890687 - DNA, 705 bp, Homo sapiens
gctggctggtagaaattaacatggtatatagcataactgttatcatttttatcttaattaattttatgagacatttaacatgttcacacatcaagccaaacatctggggctatatggatggtggcatttatccaactgtttacacaccctgctttccaagtatcagccatgctcactgggtcccatccacttgcaagcttagtaaggcagaggccatacaacccccatctccaagctctgtgcttatgggtagaggagtgtccttatagtctgagacatcaacttgaattttcctcagaraggaatcagatgtaatgaaaagagcatccttttagaagtcagcaaaagaggcattagccctggttttaaaatggactgttctatgatattgagcaggttcttaaccccattggccttgcttcctcatctgggatattggtggtggcggcagccatagcaaaagtaataatttctgccctgcttagctctcagggctgcagaaagaataagataagactgtgtagcaaagctctagaaactgagtgtgtttcacaaattgttcatccaaaaatattaagtgtgtagatgttccaggcattgtgcttagctgtttatataatagtgaacaagataccccctttctcaccaaggaatctagtttgggtgataaaaaagcattttttaatattgtggacttaatgctgt

SEQ ID NO: 890688 - DNA, 622 bp, Homo sapiens
aaggcaatctgctattcaaatgctactaaacccctgaactaaagacagctcctcaaaatttccatgtatcccgctagtactggatgctgtgactagataggatttcacaacttttttaaccgaactgtgaagaaatatggcaggtcttcctatcttcacttaacatatgaagacactaaaggtcaaaaataaaacaaagttacttactcaatgtcacatagctcctcagaatatagtagtaagaacatagcaccccagaatacagcattaggaacattctaattaaaattctatagcataatattatttgttgatgagtaatggataaagtaatagctagttgttcttcagttttgtarctaaaggttgcttccctgcaggaaccagttttccttcagagagactcaaccagcagaggaaatggttcccagaacagagagagtatgtcattagccaaggtcagtgtttccctgagatttaacaatcaagagaggaaatgaggaaaagcattcaactgcacaaactgaattaagagaattgctttaccaactggttctacttagggacatcagaaaggatatttggtatcaataagatttctattttaaaatgttttacgtct

SEQ ID NO: 890689 - DNA, 637 bp, Homo sapiens
ttatgaaactagcaagtgcagagtcccgacacatatttagcaagtacagagtccagacacatatttagcctctctagttccaatgccttagtcaagagcacaatctagagaatgttctaaggcaagaatctcaatcttaaaaattattgaggatgctacatcgcacttattctacaattgaccacataattggacgtaaaacactcctcagcaaatgcaaaagaacagaaatcacatcaaactgtctctcagaccacagtgtaatcaaattagaatccagggttaagaatctcactcaaaactgcacaactacatggaaactgaacaaagtgctcytaaatgactactgggtaaataatgaaatgaaggcagaagtaaagatgttatttgaaaccaatgagaacaaagacacaatgtaccagaatttctgggacacatttaaagctgggtgtagagggaaatctatagcactaaatgcccacaagagaaagcaggaaagatctaaaatcaacaccctaacatcacaactaaaaaaactagagaagcaagagcaaacaaattcaaaagctaacagaagataagaaataactaagatcagagcagaactgaaggagatagagacacgaaaaaccattca

SEQ ID NO: 890690 - DNA, 499 bp, Homo sapiens
ctttttagtctccagcaagatgttaacccaccaagccctctctctccgttcttctcatacaagtcaatttctttcagtattacctcatcagaatgatgactagaatgttgagtttagtcccccatgaatccattcattccttgatyccttgattctagattttaatatgtactatgtatatttatacatattacatttagttacggggcatcgtattagataccacacacaaattatactcaagacttggtttataaaaatacacctaataatttttcaaactagaagttacattctcctggaacacccctcctttaaaggaatatctttttgttctgaagaatggaaacattctgaactcagtgactcatgggcttttgcttttgcttgtggggtatggataattctgtaagaggagagtcctgccaccttaggtctcagtggggacggctaggtgtgcatgtgcttcatgtgcagtgtgttccagggctcctgaaaa

SEQ ID NO: 890691 - DNA, 682 bp, Homo sapiens
ttgaaagtattatataaagagttatcaagttccttgcctcttataagtggttgattaagagtatcaaatacatgctggctcacacctgtgatcccagcactttgggaggccaaggtgggcagatcacttgaggtcaggagtttgagaccagcctggccaacatgttgaaaccctgtctttaccaaaatataaaaaatacaaatacaaaaattagccaggtgtggtggctcacacctgtagtcctagctacttgggaggctgaggcacaagaatcacttgaacccagaaaacggaggtttcagtgagctgagattgtgccactgcactcccacctgggcaacagagtgagaccctctctctctctcaaaaaaaaaaaagcagtatcaaatacagttattttgtgtagctctataatagctcacaccgcggactattagtgttttctgtactattaggagtagagttcttagcgttttgaggtctaatcagattagagaactagtcccagaaactccaaaaccaatgtaggaaactcatccttawaattctgttcctccagaaccacaatctatgtttgtcagtgttctctagagaaagagaaccaatagaataggttatctacatctatataggtatagatatagatatagtcataggtatagatataggcacaggggaagag

SEQ ID NO: 890692 - DNA, 628 bp, Homo sapiens
cctgggctggaagggaatccgctgccttgatgggaaggataaagtcctgaaaggatctatcacatgctgacaaaggagaccttggcctctgaataaccagcagcaacaaatagaagaaagaacttcagagcttgaagacaaggttttcaaattaatcaaattcamtaaacacaaagaaaaaagaatttaaaaaaaataaacaaagcctccaagaagtttgggattatgttaaacaaccaaatataaaaataactgagctgtgtggggtggctcatgcctgtaatcccagcactttgggaggctgaggcaggtggatcacgaggtcaggagatcgagaccatcctggctaacacagtgaaaccccgtctctactaaaaatacaaaaaaattagccaggcgtggtggcgggtgcctgtagtcccagctgcttgggaggctgaggcaggagaatggcatgaacctgggaggcagagctctcagtgagccgagatcatgccactgcgctccagcctgggcaacagagcgagactctgtctcaaaaaaaaaaaaaaaattggggttcccaaggaagaagagaaatctaaacatttggaaaacatatttgagggaataattgaggaaagcttcc

SEQ ID NO: 890693 - DNA, 633 bp, Homo sapiens
ctgaccactacagagagtttctgttatcctttttaaatgtttaaaatttccctatccaataataataataacaataatagtaataaacagaacccacatttacccacatttaattgtctattacagctaagagaaattggctttacctgttggcctcattatagtcacccaattccatttattcaaatgtgtacaatgtgcttattacgcaccaggcactgtgctaggcatgagacaataccagagcattctttccagggctcactgtcacagtcaggccggtacacaggaaaataattacagccgtataatgcttgcattttaataaaagcatgggctagaccctagaaggagtataagaaagaaaactgaactctttctggagaggtcraagaaggaacttgggcatcactgtgttgagttgcgaaggtgtctgtgcatgaagaagatggaaggatatttcagtcacagagaacagctgtggcagaaaagcaggaaaaagcaggatttggaactgtgttttctaacatgtgttatgtaacttaattaaaataaaataaaatttcaaatgctgctactcaggtaccctagctgtatttcaaatgcttcccagtcacatgttgtcagtgacta

SEQ ID NO: 890694 - DNA, 657 bp, Homo sapiens
agtaaaacagttatattttgttcatttaagttagcacattgctttaaaacattttgcataattttcttctctaagaagaggtaacattggtcagtaaattgaatagaaatgctattcttgtcatttgacctgcattctgcttccatatccttaatttcagagattcaagtgattggaatcaagtttgaaatgtaacttctaagccacataaaacaacataatgctctgtaaggtatctgcaattacaatctcttttaagaatatccaattctggctgggagcagtggctcacgcctgtaatcccaacactttgggaggacgagacgggcagatcacttgaggtcaggagttcaagaccagcctggccaatatggtgaaaccctgtctttactaaaaatacaaaacttagccaggcatggtggcacatgcctgtaatcccagctactcgggagactgaagcaagagaatcgcttgaacccaggaggcagtttgccatgagccgagatcattccmctgcacttcagcctgggcaacagagcgaggctccatctcaaagagaaaaaaaagaatatccagttctatttaaataattttcagcatgtatactgaaggattggtagagtcttacctcaggaacttgaagatgaaacaaatttc

SEQ ID NO: 890695 - DNA, 599 bp, Homo sapiens
ggtttttttcattccattaatagcaaaaaccacaattacttttgtaccaatctaatactaatataagaaattttcaaaatcataaaacctaagatgagttattatataaaattttctttaaaaaagccaagatatcttgtaaaaaatgtatggaatcccacaaaatatctatgccaaactctaccctcagataaactgattggataagttttaaaagatatattataaataaatgttaagaatagtcttactataaaaatgtatttgagatkaaaacaaacctaaaattcagtaaaaatttaaccagcatttgtagaaatttggttgctttctgaaactgtggcaaaacgtcaattctaacagaaagaaattaaacaaaaccatcattttacattttcataattaaaagaaaatatatttttaaatgcctgtaaaatgataacacattatttttatttcctgtcagcaatctttatacatatgtagttctgatccttcaaaagcctcatagaatttactgagctagtaataaattggactttcacaagttaatagatatttttcctcatgaaagatcaactcatacaaagattcacaac

SEQ ID NO: 890696 - DNA, 701 bp, Homo sapiens
gtacccactagaatcttgtctccccagtcaactatattggattctgacttgaatgagaaacaaacttttattttctcgaactattgatatttggaaaatgtttgttgaatagttaacctactctgactaacacaacttttgtggtgaaggtacctgtttttttagcatacactcccacccaattctgatgttccactgttggagatagagttaaactcacaaaatggaaatatttacaagaaatttagagtttcccattgtgttaactccttgaagtgacataaagctaaagtatgtgaagacgayaggtgcctgcgttattattgccttaaaattcctgtgcaattgcaactgagttttgttgtgaatataattaataacattaaatatttttctattgtgaggagaaaatgaattcagaaatcaggagaaatggggtacatgaatgcttggcagagtgtaagagatcatttagactagaaaatgagagaagcaaaaaagagatgagaaattgaaggggagcttccttgatttcagagttgcaacacactgtgatagctcttcataaatacttgaaaaggatatttatttatccagtataactccagagagcatagtaaagagtcatagatatatttcatagagggagattcccatgtaataccagaagaaattattgctaattatagcaatttcaatga

SEQ ID NO: 890697 - DNA, 666 bp, Homo sapiens
ttgtgtcttttactcaaaagaaggacacccttttatatgatcacaatatagccacccagttcagcaaatcaacattgttacaacactcaacattatcattaatatggagaaccccattaaattttgccaacagtaaaaacaatgacactatttttctttctcatccaggatctgaaccacagtatcacactgaatttaatcgtgatatctccttaaattgaatggttctgtagtcttttctctaccttttattactttggcagtttaagagagtgtaggcctttccttctatctgctgtccctcaacacgcacccattcaggacttcctcatgcttcccaggctatttatgtttggcagaaagaccaccaaatatgcactgctcttttctgtacatcacgtcaggaagcacagaatgttaactgcccatttcttctgatgtttactctgatcaagtgggtgtcataaggtttctccatatttagtcaccatctttttcctgaataatsggtgagtattttgtgggacaaagctctaccattattcctcgttccttatcaaaccttcacctcctaatcttaatatccattcttgactcccacctggaacaaattgttgaatgaaatttcagagagaatgtcagattgaactgaaaatgaaacagtcc

SEQ ID NO: 890698 - DNA, 638 bp, Homo sapiens
tatacaaaaattaactcaagatgcattaaagacttaaatataagacctaaatccataaaaacgctagaagaaaacctaggaaatgcaattcagaacacaggcatgggcaatgacttcaggactaaaacaccaaaagcaattgccacaaaatccaaaattgacaaatgggatataattaaactaaagagcttctgcacagcaamagcaactatcatcagcgtgaacaggcaacatacagaatgagagaaaatttttgcaatctatccatctgacaaagggctaatatccagaatctacaaggaacttaaagaaatttacaagaagaaaacaaacaaccccatcaaaaagtgggcaaaggatatgaacagatgcttcccaaaataagacatttatgtggccaacaaacacatgaaaaaatgctcatcatgactagccattagagaaatgcaaatcaaaaccacaatgagatatcatctcacaccagttagaatggcaatcattaaaaagtcaggaaacaacagatgctggagaggatgtggaaaaataggaatgcttttacactgctggtgagaacataaattagctcaaccattgtggacgacagtgtggtgattcctcaaggatctagaaccagaaat

SEQ ID NO: 890699 - DNA, 638 bp, Homo sapiens
tatacaaaaattaactcaagatgcattaaagacttaaatataagacctaaatccataaaaacgctagaagaaaacctaggaaatgcaattcagaacacaggcatgggcaatgacttcaggactaaaacaccaaaagcaattgccacaaaatccaaaattgacaaatgggatataattaaactaaagagcttctgcacagcaaaagcaactatcatcagcgtgaacaggcaacatacagaatgagagaaaatttttgcaatctatccatctgacaaagggctaatatccagaatctacaaggaacttaaagaaatttacaagaagaaaacaaacaaccccatcaaaaagtgggcaaaggatatgaacagatgcttcccaaaataagacatktatgtggccaacaaacacatgaaaaaatgctcatcatgactagccattagagaaatgcaaatcaaaaccacaatgagatatcatctcacaccagttagaatggcaatcattaaaaagtcaggaaacaacagatgctggagaggatgtggaaaaataggaatgcttttacactgctggtgagaacataaattagctcaaccattgtggacgacagtgtggtgattcctcaaggatctagaaccagaaat

SEQ ID NO: 890700 - DNA, 638 bp, Homo sapiens
tatacaaaaattaactcaagatgcattaaagacttaaatataagacctaaatccataaaaacgctagaagaaaacctaggaaatgcaattcagaacacaggcatgggcaatgacttcaggactaaaacaccaaaagcaattgccacaaaatccaaaattgacaaatgggatataattaaactaaagagcttctgcacagcaaaagcaactatcatcagcgtgaacaggcaacatacagaatgagagaaaatttttgcaatctatccatctgacaaagggctaatatccagaatctacaaggaacttaaagaaatttacaagaagaaaacaaacaaccccatcaaaaagtgggcaaaggatatgaacagatgcttcccaaaataagacatttatgtggccaacaaacacatgaaaaaatgctcatcatgactagccattagagaaatgcaaatcaaaaccacaatgagatatcatctcacaccagttagaatgrcaatcattaaaaagtcaggaaacaacagatgctggagaggatgtggaaaaataggaatgcttttacactgctggtgagaacataaattagctcaaccattgtggacgacagtgtggtgattcctcaaggatctagaaccagaaat

SEQ ID NO: 890701 - DNA, 587 bp, Homo sapiens
aattaaatattgcaagatatgtaatctgtccgaaatcttttctttttttttcttcttttttttttttttttgagatggagtcttgctctgttgcccaggctggagtgcagtggcgtgatctctactcacagcaacctcygcctcccgggttcaagcgattctcctgcctcagcctcccaagtagctgggattacaggcatgcgccaccatgcccagctaatttttgtatttttagtagagacggggtttcactgtgttggccaggcttgtctcaaactcctgacctcaggtgatctgcctgccttgcctcccaaagtgctgggattacaggcgtgagccaccacgcccagcctgcaatctttatatgccataggatgttatattcacaagactattgtatttgataataatttatgattctgaaatttctaaatcaatacagctaaaagaatcaaaatgcaaccttgtccagagataggaggcagttccaaatttgaaaaatcctcaaaaagtagacaaatgtgcttctcagtctgaaatttagataagacatattgaggcaggcaaatagggtcttcaggcaggga

SEQ ID NO: 890702 - DNA, 668 bp, Homo sapiens
taaaaatctccagaggtggtagaatatctagcttaaggctgcactttctatctttaggcagctttttaaaatgcctcattatatagtcataaaatggttctgcacaatttccaatcattggtagatgttcagtcacctgaggcctgttctgttttcctttctctcaaccaaatgttgccaatctttccactattcaatatgtgacataatattgagtcaagttcttaacatcttcttggtctcccatgaatgttttctagttagagtattatagcccagaagaaatgaacattctagtacagagtggggcaggataggcacctccctcacacttctattagcacaacccagctgttccatttagttatcacattgaccttaccttagctacagctgaatgtctctttgcaatcattttacattttcttctttcccatttcacaatgcacactagtcaaagtctttaacattctatttaagtcccacctccaatcsctttctcttagctgagggcacggttttcacaatctgtggagaaaatacatgtatcccaatccaccaaattaaaataccctatcctaatccacccagttaacatctgagcaccacaatgagtatcaaattacaaaatcagaaacacacatatgagagaccttacctaacagcaa

SEQ ID NO: 890703 - DNA, 587 bp, Homo sapiens
aattaaatattgcaagatatgtaatctgtccgaaatcttttctttttttttcttcttttttttttttttttgagatggagtcttgctctgttgcccaggctggagtgcagtggcgtgatctctactcacagcaacctctgcctcccgggttcaagcgattctcctgcctcagcctcccaagtagctgggattacaggcatgcgccaccatgcccagctaatttttgtatttttagtagagacggggtttcactgtgttggccaggcttgtctcaaactcctgacctcaggtgatctgcctgccttgcctcccaaagtgctgggattacaggcgtgagccaccacgcccagcctgcaatctttatatgccataggatgttatattcacaagactattgtatttgataataatttatgattctgaaatttctaaatcaayacagctaaaagaatcaaaatgcaaccttgtccagagataggaggcagttccaaatttgaaaaatcctcaaaaagtagacaaatgtgcttctcagtctgaaatttagataagacatattgaggcaggcaaatagggtcttcaggcaggga

SEQ ID NO: 890704 - DNA, 631 bp, Homo sapiens
tgaaactaaacatgtcaatggcagtgggggaaacaggtcagatttaagaaataattataattaaggccaggcgtggtggctcacgcctgtgatcccagcacttagggagtccaaggcaggcaaatcacctgaggtcaggagtttaaaaccagcctggccaacatggtgaaaccccacctctattaaaactgtacaacaattggccagacgagatgacgcatgcctgtaatcccagctactcaggaggctgaggcaggagggtcgcttgaacccgggagactgaggttgcagtgagctgagatcacgctactgcattcccacatgggtggcagagcgaggctccayctccacaaaataaataaatgaataaataaataaataaatgattaaaaatcaaactcttttttttaattttattattattatactttaagttttagggtacatgtgcactatgtgcaggtttgttacatatgtatacatgtgccatgttggtgtgctgcacccattaactcgtcatttagcattaggcatatcacctaatgctatccctccccactcccaccaccccacaacagtccccggagtgtgatgttacccttcctgtgtccatgtgttctcattgttcaat

SEQ ID NO: 890705 - DNA, 631 bp, Homo sapiens
tgaaactaaacatgtcaatggcagtgggggaaacaggtcagatttaagaaataattataattaaggccaggcgtggtggctcacgcctgtgatcccagcacttagggagtccaaggcaggcaaatcacctgaggtcaggagtttaaaaccagcctggccaacatggtgaaaccccacctctattaaaactgtacaacaattggccagacgagatgacgcatgcctgtaatcccagctactcaggaggctgaggcaggagggtcgcttgaacccgggagactgaggttgcagtgagctgagatcacgctactgcattcccacatgggtggcagagcgaggctccatctccacaaaataaataaatgaataaataaataaataaatgattaaaaatcaaacycttttttttaattttattattattatactttaagttttagggtacatgtgcactatgtgcaggtttgttacatatgtatacatgtgccatgttggtgtgctgcacccattaactcgtcatttagcattaggcatatcacctaatgctatccctccccactcccaccaccccacaacagtccccggagtgtgatgttacccttcctgtgtccatgtgttctcattgttcaat

SEQ ID NO: 890706 - DNA, 527 bp, Homo sapiens
tgtaccctggattataataattttgatcagaaaatacaactctttatttagtgctatggaaatcaaattaatgcttggatgtagagaatttattaaatgattgattaattcactcagttattcctagaattaatttttattgatatatttctatatgtttttgttctgctattctagaatctaggattaaaataacaaataaaacasaaaatgtctttgtgtttaaggagtttacattctagaaaagaagatagatatcaaatatataactctattaaaaaacaagatatcataaataataaagcatagtttacaggaaataagcagaaagattagctaaagagaggtgagtgttcctttggaaaatagtagtcacatttgtactgaaatttactagtagaattatacattgtctcaccaggatatattcttttcttttgtccttccttacccaacaccagcttggttctggttcctccttgcttatacagtgtaagttgagccaccccagattcaggaattcatct

SEQ ID NO: 890707 - DNA, 527 bp, Homo sapiens
tgtaccctggattataataattttgatcagaaaatacaactctttatttagtgctatggaaatcaaattaatgcttggatgtagagaatttattaaatgattgattaattcactcagttattcctagaattaatttttattgatatatttctatatgtttttgttctgctattctagaatctaggattaaaataacaaataaaacagaaaatgtctttgwgtttaaggagtttacattctagaaaagaagatagatatcaaatatataactctattaaaaaacaagatatcataaataataaagcatagtttacaggaaataagcagaaagattagctaaagagaggtgagtgttcctttggaaaatagtagtcacatttgtactgaaatttactagtagaattatacattgtctcaccaggatatattcttttcttttgtccttccttacccaacaccagcttggttctggttcctccttgcttatacagtgtaagttgagccaccccagattcaggaattcatct

SEQ ID NO: 890708 - DNA, 602 bp, Homo sapiens
aggaagatgtgggaaagtttggaacttcctggagacttgttaaatggctttggccaaaatgctgatagtgatatggacaatgaagtccagcctgaggtggtctcagatggagatgaagaagttgttcggaactggaataaaggtgactcttgcaatactttagcaaagagactggtagcattttgcccctgccctacagatctgtggaattttgaacttgagagagatgatttatggtatctggcagaagaaatttctaagcagcaaagtgttcaagaggaagcagaacataaaagtttgaaaaatttgcagcctgatgatgcaatacaaaagaaaaacccattttctggggagaaattcaagcctgctgcagaaatttccataagtaaygaggagctaatgttaatcaccaagacaatggggaaaatgtctccaagtcatgtcagagaccttcacagcagcccctcccatcacaggcccagaggcctaggaggaaaaaatggtttcctggatcaggcccaggttcccctgctctgtgcagcctcaggacatggtgccctacatcccagctgcttcacctccagccattcctgaaatagacc

SEQ ID NO: 890709 - DNA, 630 bp, Homo sapiens
agagaaacataaagaaaaaggaatgaagcaaattaacagagcctcagaaattggtacaacaccatccaagtgtaccaacatacacataatgggcattccagaagaagaaaagaggaagagaagaaaaaacttttttaataaatagtgaatgaaaagttccaaaattttgttaaagcattaatcttcacatcaagaagttccataaattcaaaaataaactcatagaaatccacacatacatgtatcatagtcaaattgtgatatgaaattkttttctagaaattgcaacatttgtaatttgagatgggcttttgagtttaaaatttatattcaggtgtaagatttttcctttggctgaaaaaacctcacccattttctcagctataagaagaaaggctttgagatagaatcaccagagcaagatggaggaagaaccctatccatccacaggaacatcaaattgaatgactatccatgcaagaatacaccttcacaagaactaaaggaatcaggtgagaggtcatggtacctggttttagcataataactagaaaatattcattgaagagagcagaaagtacagtctcacacccctcccccaaaccgaagtggcacagtgtgtagaaaaat

SEQ ID NO: 890710 - DNA, 680 bp, Homo sapiens
  misc_feature 404, 407, 436, 442, 443, 444, 445, 446, 447, 448, 449, 450,451, 452, 453, 454, 455, 456, 457, 458, 459, 460, 461, 462,463, 464, 465, 466, 467, 468, 469, 470, 471, 472, 473, 474,475, 476, 477, 478, 479, 480, 481, 482, 483, 484, 485: n = A,T,C or G
  misc_feature 486, 487, 488, 489, 490, 491, 492, 493, 494, 495, 496, 497,498, 499, 500, 501, 502, 503, 504, 505, 506, 507, 508, 509,510, 511, 512, 513, 514, 515, 516, 517, 518, 519, 520, 521,522, 523, 524, 525, 526, 527, 528, 529, 530, 531, 532: n = A,T,C or G
  misc_feature 533, 534, 535, 536, 537, 538, 539, 540, 541: n = A,T,C or G
tggattgtctgaaatgacagacatggaattcagaatcttgacggcaaagaagctcattgagatcacagagaaagttgaaaatcaatccaagaaagccaagcaatccactaaaacaaagagctgaacaacaaaattccctttttaagaagaamcaaactgaacttcctgagctgaaaagctcactacaagaatttcataatacaatcagaagtattaacagcagaatagaccaagttgaggaaagaatctcagagtttgaagactggttctatgaatcaactcagtcagacaaaaataaagaaaacaattaagaaaaatgaacaaaacatcccagaaatatgggattatgtaagaaggcaaaattaacaattcattggcattcctgagagaggagagaggggatnctntgagagtaaacgcgggaggcatgcaagtncaaaannnnnnnnnnnnnnnnnnnnnnnnnnnnnnnnnnnnnnnnnnnnnnnnnnnnnnnnnnnnnnnnnnnnnnnnnnnnnnnnnnnnnnnnnnnnnnnnnnnnagggattgcaaaagaaaaatccttagagccagctagagagaaggtgcccgtcacttagagaaggaattccatcagcctagcagcagacctctcagcagaaacattacaagacagaaaagatggggggccaattttcttt

SEQ ID NO: 890711 - DNA, 309 bp, Homo sapiens
cagttttcaatacttttagtaccatttgaaactgtttatcaatccctcttttctgaaacattccgcttttttgactctgtgagaccaccatattggaattcttttgtacttaagacagatatgtattggattattccttcaatcactcacataacaaacactmaacattacgtgctgggcattatgctaggccctgggaattcaaaacaataatagagagctttaaggagcttaatttctgagaggaaaaacaaactgacaattgtaaaaagtgacaggaggccaggagccttggctcacgcctgtaat

SEQ ID NO: 890712 - DNA, 609 bp, Homo sapiens
ggggttgaccgatttctagttgtgtgaccttgggcgagttgccgaacctcttccagctttagttttctcatctgtaaaattggaattgaaatcccgtggcattgacagccatttcttatgtcctcttccttcaaccagtctcccattataggactgaaaaggtcagatactcactttcttggtctccttgaaaccagcatggctgtgtgtgggtctsgccagtgagcaacaaggtatggagggtcagtgtgccggaggctttctgataagatgagggatgtgagtgaggaaataaacactttccctatcagattcctttccttcttttcctgcctttgaacttggtgttagaagacaccaagccatctcgaaacttgaaggtggcagagcaggtgacacatccaaggaacctggatcttagatgatgatgttgagctgccaagtcaaatctgaggctacccaaccacaaatgtcttgctaagtaacaccatttctccccattccaaggaaggccttttttttttcacattctgacaccactgtcacttctcatatctgatttgatagtaaagaatggcttcatggtttggcagcaagttttgcttatac

SEQ ID NO: 890713 - DNA, 609 bp, Homo sapiens
ggggttgaccgatttctagttgtgtgaccttgggcgagttgccgaacctcttccagctttagttttctcatctgtaaaattggaattgaaatcccgtggcattgacagccatttcttatgtcctcttccttcaaccagtctcccattataggactgaaaaggtcagatactcactttcttggtctccttgaaaccagcatggctgtgtgtgggtctcgccagtgagcaacaaggtatggagggtcagtgtgcyggaggctttctgataagatgagggatgtgagtgaggaaataaacactttccctatcagattcctttccttcttttcctgcctttgaacttggtgttagaagacaccaagccatctcgaaacttgaaggtggcagagcaggtgacacatccaaggaacctggatcttagatgatgatgttgagctgccaagtcaaatctgaggctacccaaccacaaatgtcttgctaagtaacaccatttctccccattccaaggaaggccttttttttttcacattctgacaccactgtcacttctcatatctgatttgatagtaaagaatggcttcatggtttggcagcaagttttgcttatac

SEQ ID NO: 890714 - DNA, 564 bp, Homo sapiens
gttcagatgctccctccatgagcaagcatcagctgaatttggtcaaattttcctttctgctctaacaggccagcactgacttaaatgcctcacaattgcagtgtttgttgtctcccaatacccagagatgctctccgcaccaggccactgctgcggatggtggggcagggggccatgggggagtggtgtctgggattgagaactgttttttctatctcttcagtgtctctttctgtgatatgaaattaaatccaggtactatgactgctcagctaattttgggttcttatgaagtgtttgtttgcttttttctgtgtagatagttcttaacttggtgtccttgcatarggtgggggccaaaatctggagccttctattatcccatcttgctctgcctcctaataacctctattctactctccagcgccatgaatttttttttttttagcttccgcatatgagtgagaacgtatgatacttatcttcctgtgcctgacttatttcacttaatataatgtcccctgggctgatccatgttgccataaattacaggatttcattctt

SEQ ID NO: 890715 - DNA, 676 bp, Homo sapiens
gctgttttggttactgtagccttgtagtatagtatagttggaattcaggtagcatgaagcctccaactttgttctttttgcttaggattgtcttggctcttcaggctccttttcggttctatatgaatttaaaaatttttttttctaatactgtgaagaatgtcaatagtagtttaatgggaatagtactgaatctaaaaattacattggtcagtatggccatttttatgatattgactcttcctatccatgagcatgggatgtttctccatttgtttgtgttctgatttatttaagcaggagtttgtagttctccttgaggaggcctttcacttcctttactagctgcattccttggtattttattctttttgtagcaactgtgaatggaaattcattcataatttggcacattcataatttggctgtgagtttgtcatatatgactcttaayatcttgagatatgttccttcaatacctagtttattgagggtgtttaacatgaagggatgttgaattttattgaaggccttctttgcatctattgagatagatgcaaacagcttgcctgttgtttgtgtataagaatgctagtgatttttgaacattgattttgcaacctgagactttgctgaaattgcttaatagcttaagaaacttttcagctgagacaat

SEQ ID NO: 890716 - DNA, 638 bp, Homo sapiens
agtctgtgtcttttaattgaggcatttagcccatttatatttaagtttgtgtgtgaatttgatcctgccattattatattcactggttattttgccccttaattgatgcagtttcttcatagcactgatgttctttacaatttggcatgcttttgcagtggctggtactgktcgtttctttccatgttcagtgcttccttcaggagctcttgttaggcaggcctggtggtgacaaaatctctcagcatttgcttgtctgtaaaggagttcatctgtccttcacttatgaagcttagtttggctggatataaaatccagggttgaagattattttctttaagaatgttgaatattggcccacactctcttctggcttgtagggtttctgccaagtgccgctgtttttctgatgggcttccctttgcgcctttgtgggtaactcgacctttctgtctggatgcccttaacactttttccttcatttcaaccttggtgaacttgacaattatgtgtcttgggtttgctcttctcgaggagtatctttgtggtgttctctgtatttcctgaatttgaatgttggcttgccttgttagcttggggaagttctcctggataatatcctgaagaatgttttccaa

SEQ ID NO: 890717 - DNA, 606 bp, Homo sapiens
ttggtcattatttctttttaaatgctttgagtgcctttgctacaacttatgatcttttctgaaattctattaaaagtacaattgtttctatttcacttatactcaaagacaaaaccaaaacaatgataaagttgttttaaattcartctttacattcatatactaagcagttacatggagttaatttgaattttttattcatttagttgaaataggcaacgatgctatagggggaaaaagtttattagtcagaatgtcctttctgtatatccttagtagtcactcacacagattgatattgatacaacttaatttcctaattctgaaaattattaattaaagcaacttggcctggttttcagatctaaatgtttctccttgaaccattttctgatccctttgcaatattcgtcctaaacattagaaatcctagtttattctggctctgattcaatcttccaaaatttcctctgtgtttactttggtcttttggaagaggtccaagtttgtctccagtctctgaaaggagatgaatgaaactgaaattgcatttactgttcttttgactctcatgtttgtgctcaaagacagatctaatttctctgg

SEQ ID NO: 890718 - DNA, 600 bp, Homo sapiens
cacaacacgagaacttcacaatgcaagcacaagtataaacagccaaatagaccaagtgaaagaaaggatatcagagcttgagtactatcttgttgaaaaaaggcaggcagacaagattggagaaaaataatgaaaaggaacaaacaaaatcttcaagaactatgggattatgtaaaaagactgaacctatgactgattggggtacctaaagagatggggaaaacagaaccaagttgaaaaacacacttcaggatatsattcaggagaacttccccaacctagcaagacaggccaacattcaaattcaggaaatccagagaaccccagtaagatactccatgagaagtccaaccccaagacatataatcatcagattctccaagtttgaaatgaagggaaaaaaatgttaagggcagccagagagaaaagccaggtcacctataaagggaaacccatcaaactaacagcacacctctcagtggaaacaatacaagccagaagagattaggagccaatattcaacattcttaaagaaaagaatttcaacctaaaatttcttatctggccatctttttcagacaagcaaatgctgagggaatt

SEQ ID NO: 890719 - DNA, 600 bp, Homo sapiens
cacaacacgagaacttcacaatgcaagcacaagtataaacagccaaatagaccaagtgaaagaaaggatatcagagcttgagtactatcttgttgaaaaaaggcaggcagacaagattggagaaaaataatgaaaaggaacaaacaaaatcttcaagaactatgggattatgtaaaaagactgaacctatgactgattggggtacctaaagagatggggaaaacagaaccaagttgaaaaacacacttcaggatatgattcaggagaacttccccaacctagcaagacaggccaacattcaaattcaggaaatccagagaaccccagtaagatactccatgagaagtccaaccccaagacatataatcatcagattctccaagtttgaaatgaagggaaaaaaatgttaagggmagccagagagaaaagccaggtcacctataaagggaaacccatcaaactaacagcacacctctcagtggaaacaatacaagccagaagagattaggagccaatattcaacattcttaaagaaaagaatttcaacctaaaatttcttatctggccatctttttcagacaagcaaatgctgagggaatt

SEQ ID NO: 890720 - DNA, 637 bp, Homo sapiens
tcaaagaaccatctcctggttttgttgactttccctattgatttcctattttcaagttcattgatttctgctctaatttttattatgtcttttcttctgcttagtgtgaattaaatttgctctttctccagtttctatgctctgcctatttgcaataaatatttattatttatagtaaaataaaattttaccttaaagtaaaaagattagtggttgccattagaggttggagagaggagaaggatgaagagatggaggacttattttaatattgccttgcaaggcaggtctactgccaacaaattctctcaatttttatttgtttgaggaagtatttctcgcttcacttttcaaagataatytcacagagtagagaattctaaatagatagtttttttttttctctcaacactttaaatatttcactttactctcttcttcttttttctccactctcttcttgcttgcttttttcttgggagagattgatacaattcttatctttttcccctcagaggtaagactttctttttcctttcttttttcaagattttttctatatctttgattttatgaaatttgaatataatatgtctatgtgtagtttttaagggatttatcctacttggtagtctct

SEQ ID NO: 890721 - DNA, 637 bp, Homo sapiens
tcaaagaaccatctcctggttttgttgactttccctattgatttcctattttcaagttcattgatttctgctctaatttttattatgtcttttcttctgcttagtgtgaattaaatttgctctttctccagtttctatgctctgcctatttgcaataaatatttattatttatagtaaaataaaattttaccttaaagtaaaaagattagtggttgccattagaggttggagagaggagaaggatgaagagatggaggacttattttaatattgccttgcaaggcaggtctactgccaacaaattctctcaatttttatttgtttgaggaagtatttctcgcttcacttttcaaagataatttcacagagtagagaattctaaatagatagtttttttttttctctcaacactttaaatatttcaytttactctcttcttcttttttctccactctcttcttgcttgcttttttcttgggagagattgatacaattcttatctttttcccctcagaggtaagactttctttttcctttcttttttcaagattttttctatatctttgattttatgaaatttgaatataatatgtctatgtgtagtttttaagggatttatcctacttggtagtctct

SEQ ID NO: 890722 - DNA, 633 bp, Homo sapiens
tttctgaaacaaccctgagatgaggatatcatatcaattttaaatgaagaataaacaggatcagaaaggttaagtgatttgctcaattccacattgtcagtacatagtagaaccaattttcaaatatgattttgggtccatctgattgcaaaaacaagagacagagagagacagagagagagagagagaaaagtaacttcacattttaaatccttggtgatgatawaagtcttaaagaataccatttacagagtagaaaaattgggagaaaaaaataaaataggaggaaagatgaatttattgttattgtttctgaagcaatgctagggcatataaatataaatgtccaataaacagagaccattttttaaaattccaatttaaaaatatattgagggccaaccacggtggctcatgcatgtagttccagtactttgagagaccaaggtgggagaatcacttgaacccaagaatttgagaccagcctaggcaacacagtgagaccctgtctctcaaaaaaaaaaaaaaaagaaaaaaagaaaaaaaaaagaaaagaaaagaaaagaaaaaaagaaaaagaatttaaattagccaagtatggtggcacacgcctgtattctctctcagcttccc

SEQ ID NO: 890723 - DNA, 627 bp, Homo sapiens
cattccttcggaggggaataggcactctgatatttagaattttcagcttctctgctctggtttctccccatctttgtggttttatctacctctggtctttgatgatggtgatgtacagatggggttttgatgtggatgtcatttctgtttattagttttccttctaacaatcaggaccctcagctgctggtctgttggagtttgctggaggtccactccagaccctgtttgcctgggtatcaccagcagaggctgcagaacagcaaatgttgctgtctgatccttcctctggaagcttcatctcagaggggcacccagctgtatgaggtgtcagtcagcccctactggaaggtgtctcccagttaggctactcaggggtcagggacccacttgaggaggcagtctgtccrctctcagatttcaaactccatgctgggagaaccactactctcttcaaagctgtcagacagggacgtttaagtctgcagaagtttctgctgccttttgttctgctatgccctgcccccagaggtggagtctgcagaggcatgtaggcctccttgagctgccatgggctctacccagttcgagcttcctggtggctttgtttacctactcaagcctcag

SEQ ID NO: 890724 - DNA, 628 bp, Homo sapiens
gcgtcagagaatattttataactaattggtttatacaccataaaatgtcattattaaagtacagtttaatattattacttttgtctggatttgtaccagtaaaacaggtatagaaggaaagaactaatgtatttgcctctggaaaactagtttgttactcaaagctactaaaattctacttgtgggtattggtttattatttttaactcaaatttcagggtgataataaaaaatgcaaatctaagttttattcttcatgattacaaaatatgcagggagatagggtattatgaacataaattcaatccctcattgggcatgtcttatcctccaaaatttcctgtattcattttgaagcagaaragaagtgtaatatgtgagaaatattaaaaagtagtgtggtaaagttctacattaaaatatttttaaacttaaaaaaactgtaaatttacaagaattaaaaatggaaaaattgctatcacatgaaatgtagagattattcaaatactcagactcactagtaatatgaagttaatgtaaaaataacccttcctttgcctatggatctattattctacagattttgcagttaaagtttcacagagacatgctacatttaaacaactca

SEQ ID NO: 890725 - DNA, 607 bp, Homo sapiens
gtttgtggctctgcattctttatctgttcagtagcagcaactgggcccctcctcctggcattcagcattgggacaggcactgagaggggaatggcaagggaaatggaaggcatgctcttcccaaatgaacagtggacatggagctcactatctcactcaagtcctagcatccaggcgtggaatgtggccagagacgagaaatccaaattcctcagggctgagtataatagtcagctattgatacaataatgctgcataacaaaccaacccaaacctcagtggcatgcaacaacaagcacttgtaactatgttcatgttcargctgaagtggttcagctgatctaatctgggctcagctgggcagttctgcttcaggcagcaggtcaactgggctggactccaagctgtgggttgggttcaggcctcctccatgggttggtttgctccatgggtgtttatctggggcccacactaaagaagtgactacctgacatttgatcctcttatggtagaccacaaaagctcaagaagaaactcaaaccattcaagtatgtttaaggcctctgcctgtgtcatgtccatgaacactcctttagccaaagcaagt

SEQ ID NO: 890726 - DNA, 643 bp, Homo sapiens
taattatacttaaaaaaaaatccactccatctgaaattcaaatttaaatggatgtgctgtatttttatctgaaaactctgtttttttgtgtgtgttttgtgtgtttttttaagatggagtttcactctgtggccagactggagtgcagtggtgcgatcttggctcactgcaacctccaactcccgggttcaagtgattctcctgcctcagcctccagagtagctgggattacaggcacgcaccactacacycagctaatttttttttttctgtttttagtagagacggggtttcaccatgttggccaggatggtctggatctcctgacttcctgatcctctcgcctcggcctcccaaagtgctggaattacaggtgtgagtcaccacgcctggccgacattcttaatttgaaaagacatgttcccacagtgcacagaggacaaggtaagatcaaaataaattgtattatggggtagagataaatagtagcccattcttggatttgaattgagcacgctgaactgtgacaagaggagggaactgaacacctctataataaattacatagttttctctaaaaaagaaacaggaaagaaacataagggctatgaaattactgttctccccatttccaactaaacac

SEQ ID NO: 890727 - DNA, 643 bp, Homo sapiens
taattatacttaaaaaaaaatccactccatctgaaattcaaatttaaatggatgtgctgtatttttatctgaaaactctgtttttttgtgtgtgttttgtgtgtttttttaagatggagtttcactctgtggccagactggagtgcagtggtgcgatcttggctcactgcaacctccaactcccgggttcaagtgattctcctgcctcagcctccagagtagctgggattacaggcacgcaccactacacccagctaatttttttttttctgtttttagtagagacggggtttcaccatgttggccaggatggtctggatctcctgrcttcctgatcctctcgcctcggcctcccaaagtgctggaattacaggtgtgagtcaccacgcctggccgacattcttaatttgaaaagacatgttcccacagtgcacagaggacaaggtaagatcaaaataaattgtattatggggtagagataaatagtagcccattcttggatttgaattgagcacgctgaactgtgacaagaggagggaactgaacacctctataataaattacatagttttctctaaaaaagaaacaggaaagaaacataagggctatgaaattactgttctccccatttccaactaaacac

SEQ ID NO: 890728 - DNA, 657 bp, Homo sapiens
ttaagaggtcttaagaggaaagtggagtcactatattcacagctcattttaggattttccacactgcctgtcagaaagttctatctgctgctggattcttagccttccagttgtgatgtggatgagttccattcttatcttaacaatactgttcctaagattccatttcctctcaagagcagacaggcttgtgcttaaaggggcctttttactgataggcaggacccgctccttggcctgccgtgcttggctactgagtgtctctggggtttgatgagatgctgatgactgggtgttgcggtgtcgagtcctgcagtgcatcagcccaagacagctggcacctctgacccctagctgccccakgatggtcaccccacctccatgctgtggccctgttgggctggttttctgatattattagtaatctacatcctgctctgcttctaggaccacaggaggcctggaaatgtctgcagagctcttaatagcacagcaggttgctgcaatgaggagctaaatgtctcggtctccattcattgtgcccaaactgccagatgatccaaaatggagctcatctcctagggtcctgagggttttgtctgcagggttagaaaacatactgcccactgatcccttattgaattcaccctccagaat

SEQ ID NO: 890729 - DNA, 630 bp, Homo sapiens
gtctacacacctcttcggcttcttttactctgatggggagaagacacatgtatttaaacaaaacctacttagatcacctcattctaccttatagtaagtgagcaaacctcaactcaataaagatttgaattactgcagaaaataatacaatacacagaagaatgttatctgacatttgaattgaaagcctcaactgttacagctacagasgctaatttatctaggagttcttaacttggaatcatagtatgattgaatggagtaatatacaaacacataagaatttctatgcagagtgtgtatgcatttcatcctatataaaaggaatcttatatacaagtaaaaaatgaaatacccctcattgtcagctgagagtatgagattgattctattatataaataggattggcaccatgacgtaagttagaagcattagaataattaaagagtatcacagccagggcggagtagctcatgcctgcaatcccagcactttgggatgccaaggcgggtgaattgcttgagcccaggagttccagaccagcatgggcaacagagtgagaccctgactccacaaaaaatacaaaaacttagccgggcatggtggtgcgtgccctgcagtgagctgtg

SEQ ID NO: 890730 - DNA, 630 bp, Homo sapiens
gtctacacacctcttcggcttcttttactctgatggggagaagacacatgtatttaaacaaaacctacttagatcacctcattctaccttatagtaagtgagcaaacctcaactcaataaagatttgaattactgcagaaaataatacaatacacagaagaatgttatctgacatttgaattgaaagcctcaactgttacagctacagacgctaatttatctaggagttcttaacttggaatcatagtatgattgaatggagtaatatacaaacacataagaatttctatgcagagtgtgtatgcatttcatcctatataaaaggaatcttatatacaagtaaawaatgaaatacccctcattgtcagctgagagtatgagattgattctattatataaataggattggcaccatgacgtaagttagaagcattagaataattaaagagtatcacagccagggcggagtagctcatgcctgcaatcccagcactttgggatgccaaggcgggtgaattgcttgagcccaggagttccagaccagcatgggcaacagagtgagaccctgactccacaaaaaatacaaaaacttagccgggcatggtggtgcgtgccctgcagtgagctgtg

SEQ ID NO: 890731 - DNA, 596 bp, Homo sapiens
ctctttctgtgtttagtcacaaaaagccaccagtcctcctttaactggcaaatctacttgttgatttctagtctttactcttcaccatgctaacaattctgaaatggttaactagtccctaatccctaatttttaatttttttttttcaatggagtatccctctgtcacccagactggagtacagtagcatgatctcagctcactacaacctctgcctcgtaggttcaaatgattctcatgcctcagcctcccgagtagctgggagcacaggcgtgccccaccatgcctggctaatttttgtgttttaactagagacggggcttcaccaygttggccaggctggtctcgaactcctggcctcagatgatccacccacctcagcctcccagagtcctgggattataggcatgagccaccaggcctggccactggtccctaattcttgacaactcacttatccttcagttttcagagaacttctgagttttccaactatctttctggacatgtttccttaatctcttctgttgcttatttattaagcttcctttcaaatgtcatgctttccctccaggactctaatctggcctccata

SEQ ID NO: 890732 - DNA, 591 bp, Homo sapiens
aaaacagcttgctttgtctagtaaagtagggtcatccattgtgtaagttaactgtgaagttagagrgatcagtgcacacgaggccagccttatttctgataccagttgcaaattcaggggattcccaaaaccacttcaggtttgataacttgtgaaaagggctcacagaactcactaaaagctgttatgctcacagttatagtttttggaagggaaaagaaacagattaaaatcagccaaaggaagagacacatagggaatgtataggagtacatcaaagagggagcttccagttgtcccctgtggttgactcaggacagcattatttcactagtgtcaatgagtgactatgcatggaatactgccagtcagggaggtttacctgatgtccagagtttttattggggcttcatcctataggcatgactgattgctcatatagctgatcttagtctcctgtctctccagaggtcaatcgataccatatgacccaaagtccccaccctaatgacattgttattattaactcaatcagtagcctaataaggctacctggtgtttccagcccccactctaaatcaaattgtcagg

SEQ ID NO: 890733 - DNA, 599 bp, Homo sapiens
gattaaacacattgctgtcctccttttttgccattttctctccccatccctgtttcattttcttcatatcccttatcatcatttgactctaattatttattcaattttggcggtttattttttatctcttttaataaaatttctattcattgttatatttacattactctctccttaaaacacctctatttcttggcatctgggacaccgctttcttggtattgcttatctctttcccaacctgacttcagacttcctgttgcataactccaacagaatggtgtggggccaaggaatagggagctgctaggctggaaaaattgggaaatatttaggctgctcagggaaartaagaggggctatcagaaaatttcaaggtctagacagctagtctggagccaacctaaggtcagagttgcccttgggagttcttctagagaaacaacaaaactgaacattagtggtggttttaaaatggagtggctcaggctttcccagtcatactctggagcaatctttcttgatcttaaagataacaagctctggtgggtagatgaggttctcatgtaaagcttttacttttattttccacctctttt

SEQ ID NO: 890734 - DNA, 443 bp, Homo sapiens
atctagcactctgtcagcaacaaaatttcttatatcctcatatcctcatatactctttagggttgcttaatttctctactcaaaaccaagttgtcaggctgggcatggtggctcacacatgtaatctcagaactttgagaggctggggtagctatacatacatatatgtatgtatgtatgtttgtctctctctctctttctctctctcgctatstatctatgtatctatctatctatctatctatccatctatctatcaatcatctatagataaagatatagaccatttcttactgtatacttactgcaatcacttttagttccaggaagcatctctcctctggattatatctttttatctgccctcttcacaagcattcttgcctttctacagtctcacttttgcatatggaatccagtgtatctccactcaaatcttatca

SEQ ID NO: 890735 - DNA, 443 bp, Homo sapiens
atctagcactctgtcagcaacaaaatttcttatatcctcatatcctcatatactctttagggttgcttaatttctctactcaaaaccaagttgtcaggctgggcatggtggctcacacatgtaatctcagaactttgagaggctggggtagctatacatacatatatgtatgtatgtatgtttgtctctctctctctttctctctctcgctatgtatctatstatctatctatctatctatctatccatctatctatcaatcatctatagataaagatatagaccatttcttactgtatacttactgcaatcacttttagttccaggaagcatctctcctctggattatatctttttatctgccctcttcacaagcattcttgcctttctacagtctcacttttgcatatggaatccagtgtatctccactcaaatcttatca

SEQ ID NO: 890736 - DNA, 443 bp, Homo sapiens
atctagcactctgtcagcaacaaaatttcttatatcctcatatcctcatatactctttagggttgcttaatttctctactcaaaaccaagttgtcaggctgggcatggtggctcacacatgtaatctcagaactttgagaggctggggtagctatacatacatatatgtatgtatgtatgtttgtctctctctctctttctctctctcgctatgtatctatgtatctmtctatctatctatctatccatctatctatcaatcatctatagataaagatatagaccatttcttactgtatacttactgcaatcacttttagttccaggaagcatctctcctctggattatatctttttatctgccctcttcacaagcattcttgcctttctacagtctcacttttgcatatggaatccagtgtatctccactcaaatcttatca

SEQ ID NO: 890737 - DNA, 443 bp, Homo sapiens
atctagcactctgtcagcaacaaaatttcttatatcctcatatcctcatatactctttagggttgcttaatttctctactcaaaaccaagttgtcaggctgggcatggtggctcacacatgtaatctcagaactttgagaggctggggtagctatacatacatatatgtatgtatgtatgtttgtctctctctctctttctctctctcgctatgtatctatgtatctatctatctatctatctatccatctatctatcaatcatctatagataaagatatagaccatttcttactstatacttactgcaatcacttttagttccaggaagcatctctcctctggattatatctttttatctgccctcttcacaagcattcttgcctttctacagtctcacttttgcatatggaatccagtgtatctccactcaaatcttatca

SEQ ID NO: 890738 - DNA, 485 bp, Homo sapiens
tcacattatcagcattcaaaagatatgttatcaacacttccttaatgctgttttactgatatgttgcaatgacttgaagtatcagaggaaagatatcatttttgtttgaaacgttaaatgatagattatctcaatggtacacacagctattcaatgaaactcttctgagtatttgttcaggtctattaagtatgtgaatagcctgagttgtgacagcaagcagcctcttacccttttagcagatgtaattaccacatggcaagggaagtgaccattaaataaacctaaaacattgctaaatagagtgttgccatgctgtcaagtactgaaattgtagtcccttatawacaggtgatcatatatactggttttcccaaagcaatccggtttatgcctgctgcattattattaacaataccgctctcaccctcaaaagtattctggtttgaaccataaattactgcatatggccatcttccttccag

SEQ ID NO: 890739 - DNA, 650 bp, Homo sapiens
tttaatatagtttttcagcatctgcaacaataacgtcttcttctttaccaaatttaaagcttgtttttgatagatcaatttttgatgtacaaatcagaaaattaagatataccctactgaggtacttgattggcaaaattaccccttctctgattaacttcaaaggtagtaaacaagtctatggaagcacctaatgttatatagtaagaataaatagagtactgattataatcagatgtctaaaaaatgcaaatgcctgtctacacagaaacaaagacttgctctttgggagatattgtagattatagtgcaggaygattatactgcaaaaattggttataaatattttattatgtagaggaaagatggaagaaactaatgttttttatataatctagcttatttttgacatagtgttgagcaattttattaactctatgtattttaatcttcattttttaaatgagaaaaattgtgttcagtgagtgtaatataatacaagtagtgacacagtctcaccataaaggatctcatttctcacaaaaataatataaagaaggaaaagttgaatattcacttatttttatgagatgaaaaaaatacatgacaaaattttagcaaatgtcaacagaacacattgcagagtattg

SEQ ID NO: 890740 - DNA, 613 bp, Homo sapiens
cacttaaataaatatgtatatgtgcacatgtgtatacatgtatttacatatgtgcacatgtgtgtatgtgtattgtataataatagaaaattttctggtctttgtcccagattcctgggatagaacttctaaaccccagacatttcttargggagaggagtatttgtgttgttcatgatagtctctgggtttatgcttataaggtcacttatggtggacttttagatagcttatgttaacaagatagctcagcatgaaggcagactatgccagaaaaaccaaccatgtaattagaaggttggtgctttgaaccagatgatatcagttcaacctctgggcaagagagatggattggagattgagttaaatcctgtgcaatcgcactgcatagcaagactccagtaaaaactctggacactggggctcagatgagcttcttggttggggacacatcaatgtgctgggagggtgacatggtcctgattccatggagagagggccttcaagaccctcctagacctcttcctctggcatctaaaatgagagcagtcttgttggggactatgcccttgatctgtgggatctgcactaactctgggaagttactgacata

SEQ ID NO: 890741 - DNA, 684 bp, Homo sapiens
ggagaaagcttttgtaatctacccatctgacaaaggttaatatccataatctacaaggaacttaaactaatttacaagaaaaaggcaaacaaccccatcaaaaagtgggcaaagtatatgaacagacacttctcaaaagaagacatttatgcggccaacaaacatatgaaaaaaagctcatcatcacggatcattagagaaacgcaaatcaaacgcacaatgagataccatctccaccagtcagaatggtgattattaaaaagtcaggaaacagtagatgctggtgaggctgtggagaaataggaatgcttttacactgttggtgggcgtgtaaattagttcaaccattgtggaagacagtatggtgattccttaaggatgatgtagaaccagaaataccatttgacccagcaatcccattactgggtatacaaccaaaggattataatcattcttctawaaggacatatgtacctgtatgtttattgcagcattatttataatagcaaagacttggaaccaagccaaatgctcatgagtgatagactgtatagagaaaatgtggcacatatgcacaatggaataccatgcagccataaaaaagaatgagatcatgtcctttgtgaggacatctatgaagctggaagccatcattctcagcaaacacaggaacagacaaccaaa

SEQ ID NO: 890742 - DNA, 632 bp, Homo sapiens
gtgtgacagtcaaggtgggcatgagaagacaactttaagctatgttttagaagtgaaactgtaagtacaatgatgaattggattcaagaagtgaggacatagatatgtcaagggtaacactgatttctggcttgagtaaagtcgatagaggtgctatttatggaaatgggaaagattacacagggaatgcatattttgatgaagagtgggtggaaatccagagttaagcttcggatacatcacatttgagatgcctgaagaaattcaatgaaaaagtccaagtagacagtttagtattaggtctggagttaagaagaaaatgtcttatccctattatggccatacttaagatactgtgtgaagtatgtctttcactacattgtaatctctttaaatgcaaggactctttctttctcaatttyggatcttccacagcattttatacaaggcagagaatggttaaagtgaagaataaaaaagagttggcatgaattgaatctgtgtacaaggagtgagttaactgcctccaacttaatcctaatgaaaggttactgatttttacagatggtcaaagtgaacagcaattaaatgacttgccaaagttcacaaagtaaatggaaaactagtcctgg

SEQ ID NO: 890743 - DNA, 578 bp, Homo sapiens
ggcctgatcttgtctgaaagtttttgaagtgaaacttatttataggatagaatataattgtatagtatataacatatatatagtatatatataattgtatagtataattgtaattgaatataattgtatagaaaagtatatttagactaataccaaagggaaaaaaattacaaaagaaactatactgtgttattcaatcatttatgtatccattcatctacccattaattcattatacaaataatcattgacctttaactatgtgccaagtagagctcaaggacctggagaagcaacttgaatgtaacacacaataaattcaatgtaaatataaatagacaggagatgcgattaaaaataattacaaattcttatatgttaaaggaaattagcagggtgccaacatacaraataatgtttggaaacgacttcagattaaaataaaataaaataaaaaacagtgaggtctctctatttcttcttagaaataacatttaatactgtgacctgaaagatgagatgaatgcatgagataaacatgtaaacggtagagagaatgactatgtcaggaaatgaca

SEQ ID NO: 890744 - DNA, 637 bp, Homo sapiens
ccccttaggttgtagggctttgtaacagcagccccaggaaaccaatacaaatgtgtttaaaattatatgcttggtctgattagttttatgtatttataattttgttatattttttattagaaaatttagccaataaaatctttactattcaatatttaagttttcttcgtagctaagataatggtctttttttttttttttttttaaatgagacagggtttcattctgttactcaggctggattacagtgatgagatcacagctcactgtagccttgacctccaggactcaagccatcctcccacytcagcctcctgagtagctgagactacaggcatgcaccaccatgcctggccaattttctttgtctcgtcttgtctcttgtctcttctctcttttctttttattctcttctctcttttccttttctttctttttttgagacatagtcttgctgtgttgcccaggctggagtgcagtggcatgatctcggctcactgcaacctctgcctcccgcattcaagtgattctcatgcctcagcctcctgagtagccgggattacagacatgcaccaccatgtccagctcatttttgtatttttggtagagatggggttttattgttttggctgggcta

SEQ ID NO: 890745 - DNA, 642 bp, Homo sapiens
gagatggtatctcattgtggttttgatttgcatttctctgatggccagtggtgatgagcattttttaatgtgtcttttggctgcataaatgtcttctttgagaagtgtctgttcttatcctttgcccactttttgatggggttgtttgtttttttcttgtaaatttgtttgagttcattgtagattctggatattagccctttgtcagatgagtagattgcaaaaattttctcccattctgtaggttgcctgttcactctgatggtagtttcttttgctgtgcagaagctctttagtttaattagatcccatttgtcaattttggcttttgttgccattgcttttggtgttttagacatgamgtccttgctcatgcctatgtcctgaatggtattgcctaggttttcttctagggtttttatggttttaggtctaacatttgaattaattaactttggttgtttgctcactccctttgtttaactagatagcttaaaaggaggcaggtgaacagcactggagggaggggagtagtgttactttgctacctctttcttctgcttcctttagcttggcttatgacagttgaattttccaacctggcagggcagggttagaaaatcagaatggaatcccagaact

SEQ ID NO: 890746 - DNA, 620 bp, Homo sapiens
tgggctttacatttaagtctgtaatgcatcttgagttagtttttgtataaggtgtaaggaagtggtccagtttcagttttctgcatatggctagccagttttcccagcaccatttactgaataggacatcctttccccattgcttgtttttgtcaggtttgttgaagatcagatggttgtagatgtgaggtgttatctctgagatctctgttctgttcccttggtctctatgtctgttttgataccagtactatgctgtttttgttactgtaaccttgcactatagtttgaagtctggtagcgtgatgcctccagtttcgttttttttttttttttttttttttttgcttcarattgtcttggctatacagggtcttctttgatttcatataaaatttaaaatattttttctaattctgtgaagaatgttaatggtagtttgatgggaatagcattgaatctataaattactttggacagtatggccatttccacaatattgattcttcctatccattagcatggaaggtttttccatttgtttgtgtcctcttatttccttgagcagtggtttgtagttctccttgaagaggtccttcacatcccttgttatctatatt

SEQ ID NO: 890747 - DNA, 608 bp, Homo sapiens
ttgcacaagataacatcctatatctggactctctaataagtacagtcgtatcaatgaattcagccttactgattgttacattctggcctctttagtctagtacccttcagatctattcttacaatgttccccagatttcagaatatatgtaatagcaaagtcttgcacattatttttgtakgtaaactatctacccctgggttatagtctgtacctgttaccctggagtatgctgaaatttccccccttgcaatgggtctaggaacaacctgaactgcctgtcttaactcatgagaagaatgagcatccattttcaaagcccctgctcctggtgaggttatcacaaaattttcaagcaaagatggggtagtcacctcagacacaggaggaggcagttttgttcaagtggtaaggaaggctcagaatgacttaggggttcaatacagccagtttcatgtgggtccaagtatatgtacacattccaagttcattcaggattctattctttcccaattagtaacctaactttcaaacaaaaatttggcaagaagtgaattaattggcaataaaattcaaaaaccaaaagcaatttaattttgtttttagtt

SEQ ID NO: 890748 - DNA, 608 bp, Homo sapiens
ttgcacaagataacatcctatatctggactctctaataagtacagtcgtatcaatgaattcagccttactgattgttacattctggcctctttagtctagtacccttcagatctattcttacaatgttccccagatttcagaatatatgtaatagcaaagtcttgcacattatttttgtatgtaaactatctacccctgggttatagtctgtacctgttaccctggagtatgctgaaatttccccccttgcaatgggtctaggaacaacctgaactgcctgtcttaactcrtgagaagaatgagcatccattttcaaagcccctgctcctggtgaggttatcacaaaattttcaagcaaagatggggtagtcacctcagacacaggaggaggcagttttgttcaagtggtaaggaaggctcagaatgacttaggggttcaatacagccagtttcatgtgggtccaagtatatgtacacattccaagttcattcaggattctattctttcccaattagtaacctaactttcaaacaaaaatttggcaagaagtgaattaattggcaataaaattcaaaaaccaaaagcaatttaattttgtttttagtt

SEQ ID NO: 890749 - DNA, 654 bp, Homo sapiens
tactctaaaattgatcacataatcggaagtaaaacactcctcaacaaatgcgtaaaaactgaaatcataatcaacagtctttcagaccacagtgcaatcaaattagaactcaagattaagaaattcagtcaaaaccacacaactacatggaaattaaacaacttgatcctgaatgaaacttagttaaataatgaaattaaggcagaaatcaagaagttctttcaaaattatgagaacaaagagacagtgtaccagaatctctgggatacagtgaaagcagtaytaagagggaaatttatagtactaaatgctcacatcagaaagttagaaatacctccgattaacagcctaatatgtcaactaaaagaacaagagaaccaaaagcaaacaaaccccaaagctagcaggaaacgagagataaccaagatcagagctgactgaaggatatagagacatgaataacccttcaaaaaatcaatgaatccaggagctgtttttttaaaaaaattaacaaaattgttagaccactagctagactaataaagaagaaaagagaaaagaatcaaacacaatcagaaatgataagggatatgtcaccactgaccccacagaaatataaccagccaccacagaatactataaacacctctatgc

SEQ ID NO: 890750 - DNA, 598 bp, Homo sapiens
gtgtagattctttattgaaaggcaatgcatgggacagccagaacaaccctgtctactccaaaggggagaacagtcagacgtgcctgcagccagccccagcagctgcagctggaatgccggagagccaaccaagggtctagaacatggataaagctgagataatctcarggtgtgtgtgttactttgaatgtatcagagtacttaatttctcaaaaaaacatatcacaagacaggctgtctgttcatataggtaatagtctgcaccctagatctgtatttggaagaagcttttctacaactgcaggccaattgctattcctggtgggtatttactaactcacttctgcttcaccttggccgcttttccccctggcctatcaactcagttggagagaatcagaactggacattttgaacaatggaaaaaattgatttcctcctaaatatactactagggtttttgctgcctttgtgcactcagaatgcagtgtagtaatattccagcaaccaccccaaaaacacacacacacacacacacacacacacacacacaccacccacgttcttctggatgccccactaacatatacaggcacac

SEQ ID NO: 890751 - DNA, 626 bp, Homo sapiens
ctggtagaattcggctgtcagtccatctgggcctggactttttatggttggtaagccattgattatttccacaattggagatcctgttattcgtctatcagagattcaacatctccctggtttagtcttgggagagtgtatgtgtcgaggaatttatccatttcttctagattttctagtttatttgcgtagargtgttggtagtattctctgatggtagtttggatttctctgggatcggtggtgatatcccctttatcattttttattgtgtctatctgattcttctctcttttttaatttattagtctagctagcagtctatcaattttgttgatcctttcaaaaaaccagctcctggattcattaattttttgaagggtttttttgtgtctctatctccttcagttctgcctgattttagttattttttgccttctgctagcttttgaatgtgtttgctcttgcttttctagttcttttaattatgatgttagggtgtcaattttggatctttcctgctttctcttgtgggcatttagtgctacaaatttccctctacacactgctttgaatgcatcccagagattctggtatgttgtgtctttgttctcgttggtttcaaa

SEQ ID NO: 890752 - DNA, 610 bp, Homo sapiens
taaagacatacttgacattgggtaatttataaagaaaaagaaattcgatgaactcacagttccacgtggatggggaggcctcacaatcactgtggaaggcaaaaccatgtcttatatggcagcaggcaagagagaatgaaagccaagtgaaargggaaaccccttataaaaccatcagatcttgtgagacttattcactaccataagaactaaatcattatcacaagaacaggatgagaaactggccccagcattcaattatctctacctggtccccgccacaacacatagggattatgggaactacaactcaaggtgagatttgtgtgggaacacagccaaatcatatcattccacccctggcccttcccaaatctcaggtcttcacaattcaaaacacaaccacgcctttcccatggtcccccaaagtcttaactcactccagcattaactcaaaagtccaagtctaaagtcccatctgagacaaagctagttacttccacctatcagcctgtaaaattgaaagcaagttagttacttcctagatacagtggggttacaggcattaggtaaatacacccattccaaatgtgaaaaattgtccaaaatg

SEQ ID NO: 890753 - DNA, 646 bp, Homo sapiens
ttagagatgtaagtccttagagatgtgattgatgtggtaacagtaagcgggtgataggacaaccatcttggcatcacaatattcggcacatagtaaaccctcaataaacagtacttattactattatcatattaaaggtgggagagttctgagaaaatagaaaacagagatgtgagctgatggtcaaattcctgcagacttttatggcaatatagctttcacacacacacaaaatgaagatagggaaaagtataatgaggaattcaaatcttatcaaggccagttggaagtacggrttggctggagaggggctaagacttgtatgagggacatgcagggatcacaggcaggcagtgaggaggtaaataaaaccaacctgtaggaaaaactgagttcaaactactctgaagcttcaaggcaaaacctacaggatcagaggaagagggagataagcatgaaaggagaaaaggatttagggtacaaggactgtttgggtacctacatatgtggctgaggggttggggctttttggcagtgagaggcaatccctacttggagctacgatagatgatacagtttcagagcttaaatgaactgaaattcatgtaagatgatctcatcctgtctccccattctacaagatgag

SEQ ID NO: 890754 - DNA, 531 bp, Homo sapiens
agctcctcgttgtacctcttgtaggatttggctttgaatccatctggtcttcggctttttttttggttggtaggctattaattatggcctcaatttcagaactttttattggtgtattcagggatttgacttcttccttgtttagtcttgggagggtgtatgtgaccaggaatttatccatttctgctagattttctagtttatttgtgtagaggtgtttatagtattctttgatggtagtttgtatttctgtgggatcaatgatgatatctccttatcatttttattgtatctatttgaatcttctctcctttcttctttattaatctggctagtggtctattttgttaatcttttcagaaaaccagcctctggattcattgatkttttgaagggtttttcatgtctctatctccttcagttctactctgatcttagttacttcttgtcttctgctagcttttgaatttgtttgctcttgcttctctggttcttttaatcgtgatgttagggtgtcgattttagatcttt

SEQ ID NO: 890755 - DNA, 640 bp, Homo sapiens
tctttgtaggtctctaagaacttgcttcatgaatctaggtgctcctgtattaggtgtctatatatttaggatagttagctcttcttgttgcattgatccctttaccattacgtgatacctttctttgtgttttttgatttttgttggtttaacatctgttttacctgagactaggattgcaaccactcttttttttcttctttccatttgcttggtagatcttcctccatccctttattttgagcctatgtgtgtctttgcattaagatgggtctcctgaatacagcacaccaatgggtcttggccctttatccaatttgccagtctgtgtcttttagctggggcatttagtccatttacatttaaggtttagggttaatcttattatgtgtgaatctgatcctgtcattatgatgctagctagttgttttgcyccttagttgaggcagtttcttcatagtgtcgatgttctttacaatttaatatgtgtttgcaacagctctaaacagtttttcctttctatatgtagtgtgtcctttaggagctcttgtaaggcaggcctggtggtgacaaaatgtctcagcatttgcttatctgtaaagggttttatttctcctttgcttgtgaagtttagtttggc

SEQ ID NO: 890756 - DNA, 676 bp, Homo sapiens
gtttttgcagtggctggtaccggttgttccattccatgttcagtgcttccttcaggagctcttgtagggcaggtctggtggttacaaaatctctcagcatttgcttgtctgtaaagaattttatttctccttcacttatgaagctcggtttggctggatatgaaattctgggttgaaaattcttttctttaagaatgttgaatattggcccccaacaggtgcagagagatcacctgttagtctgatgggcttccccttatgggtaacctgacctttctctctggctgcccttaacattttttccttcatttcaactttggtgaatctgasaattgtatgtcttggagttgctctgtggttgttctctgtatttcctgaatttgaatgttggcctgccttgctagattggggaagttcccctgaataatatcctgcagagtgttttccaacttggttccattctccctgtctctttcaggtacaccaatcagacgtagatttggtcttttcacatagtcccatatttcttggaggctttattctttttcaccataggcctaaattcactcccaaatatccctttgcagattctacaaaaagtgtttccaaactgctgctggcaaagtaaggttttactctgtgcggtgaatgcacacatcaaaaaggagtttctcag

SEQ ID NO: 890757 - DNA, 676 bp, Homo sapiens
gtttttgcagtggctggtaccggttgttccattccatgttcagtgcttccttcaggagctcttgtagggcaggtctggtggttacaaaatctctcagcatttgcttgtctgtaaagaattttatttctccttcacttatgaagctcggtttggctggatatgaaattctgggttgaaaattcttttctttaagaatgttgaatattggcccccaacaggtgcagagagatcacctgttagtctgatgggcttccccttatgggtaacctgacctttctctctggctgcccttaacattttttccttcatttcaactttggtgaatctgagaattgtatgtcttggagttgctctgtggttgttctctgtatttcctgaatttgaatgttggcctgccttgctagattggggaagttcccctgaataatatcctgcagagtgttttccaacttggttccattytccctgtctctttcaggtacaccaatcagacgtagatttggtcttttcacatagtcccatatttcttggaggctttattctttttcaccataggcctaaattcactcccaaatatccctttgcagattctacaaaaagtgtttccaaactgctgctggcaaagtaaggttttactctgtgcggtgaatgcacacatcaaaaaggagtttctcag

SEQ ID NO: 890758 - DNA, 655 bp, Homo sapiens
ttatttgaagatacatgtttttcaccaaaggcctcaatgcactatgaaatatcctttgcagattctacaaaaacagcatttccaaactgctggaacaaaagaaatgttgaattctgtgaggtgaatgcaaccatcacagagtactttctcagaaagcttctttctactttttatcttaaaatattttctttttcaccataggtctcaatgcattcccaaatatttcttcacagattctacagaaacagtgtttccaaactgctgaatgtaaagaaaggtttatctgtgcaagatgaatgcacacatccaaaagcagtttctcagatagattccttacagtttttatcctgggatattcactttttctccattgacctcaatgagmtccaaaatgtccatttgcagaatggagaaaagcagtgtttccaaactgctgaaacaaaagaaatttttactctgtgagatgaatgcacacatcacaaagcagtttctcagaaagcttctttttagatttatgtgaagatatttacatttccaccagaggcctcaatgggctcccaaatatccctttgcagattctacaaaaacagtgtttccaaacttctgaaagaaaacataaggtaaactctatgagatgaatgcccacatcacacag

SEQ ID NO: 890759 - DNA, 717 bp, Homo sapiens
gggaaaggtggcaatgacgtgtggctatagcctaggaatagtcagggaagcagacaatttagttaaaatgtcttgacctaataagggagctgggcaggtggggataactaaaaaggagtgcttaaaagagtattgtctaagttggcaccagagttggggagttttaagaggtttagaagcctggccatcaatacccacaacagttatggaggcaaaggaaacaggcccttgaaaagaaggtaatgtggagtgggtagcctctgtattgattaagaagggtacggacttaccctccactgtgagagttacctgaagcttggcgtcagtgatggtgtagggggcttctgaggcgatcgggcagtgtcagtgttcagccactaaactgagaagatctgggaaggagtcagtcagagagccttgggccagagttccaggggctctgggagtggctgccaggtgagttgaacagtccaattttccgtgggatcctgcacagatgggacacagcttaggaggaatcctgggctrcaggcattccttggcccagcagccagatttctggcactcgtagcaagatcctggggtaggcggtcctggaggaatgcctggccactgcggttcaagcctttggaagttcttgtgtcctggagatttggctggggtttgtctcacagtggaggcaaggaactgcaactcaaaaatacattgctacttggg

SEQ ID NO: 890760 - DNA, 661 bp, Homo sapiens
actgcctactggagctgtgagaagtaggccaccgtcctctggacaccagaatggtagatacaccaacagcttgaccatgcacacaggaaggccacagacaatgccagctcatgaaagcaaccaggaggggggatatgtcctgcaaagccacaggggtggagctgcccaaggccgtgggagcccacctcttgcataagtgtgacctggatgtgagacatggagtcaagggagtgcattttggcactttaagatttgactggactrctgagttttggatttggggcctgtagcctctttgttttggccaatttcaaccatttggaacaggtatatttaccccctccctgtacctccattgtatctggaaagtaactgacttgcttttgactttatgggctcatagctggaagggacttgccttgtctcagataagactttggagagtggacttttgagttaatgctgaaatgagttaagatgttgggggactgttgggaaggcgtaatttgctttcaaatgtgaagacatgggatttgggaggagccagggcagaatgatatgatttggctgtgtccctacccaaatctcatcttgaattgtagttcccataattcccacatgttgtgggagggacctggcagaagacaattgaatcatgggg

SEQ ID NO: 890761 - DNA, 515 bp, Homo sapiens
cggtatttttgaacaaataggatttgccagggggcaagggtttttctgaaatgctggactttcagtctgaaaccagtgagaggtctgggtttgtagaaataagttggttatcctacaaagaaaagaaaaggaaggaaggaaggaaggagggagggagggaaggaaggagggagggagtcctctccttccaaatgagaaaatgatgggacagagaatgtattgaacttktctctgactccaccactaacaagcagccgagcaaggattcaatactggtcttaatcaccaagtcataatgggaactggagaagtcagcaaagtgttaacactttgctctgtcacattgccaaattcctgcccgacttggtctcagtttcctcacctgtgagatgagagactttgacagtgcaaagtggccctggaccaatgaggggtgcatgcctgagaatgttcccaggcccgtcagctgctatgggcaaaccccaagcaccaattccattgttaatcattttcag

SEQ ID NO: 890762 - DNA, 581 bp, Homo sapiens
aacccctgttcatgtaacttaggctatggctaacctcagtatggctactttaatttataatttataaaaatcagcctaataccaagatacaactttcttaggtcattagattcttagtctccagtaaatccaaaatcctattataaactttgcaaaaagggaggtgcctccatggggaaaaaaaaatcataagctggttcaactatgaatactggactctaggggctggaaaccgaagagctggctgaggatccttgcttaagtaacccaaacaacgttcctggaatcatcaygcacccctaagaaaacctttattttagcttcatacaccatcttgtcccaaatcccactaatttatgagcaaacagaaacagtgctattcaatagaatgccttaggtaggattgaaagctcaataaagtcttgaatacaattccactgagtgatacgagatttcaatggctaccatctcctgggattgcagctcctacaatgctaaggctgttttgcaatcacgttcttccacctccatgcatgtgaagctcatactcagagttccctccagttttcctactggtcttc

SEQ ID NO: 890763 - DNA, 633 bp, Homo sapiens
tagaaatctaatttatcttggtatatgttatcagtcataattttaattattatgttttattgttgtagaccacagaaataaccaaatttccttgtcagttgcattattattataatgaactcccatccaatctctaatcatggccattgtaaatctttttgaccataagtgattgctttattctaatgcttttttatttccctgaaagctctttgcaaatcctacagtgttgtgtcctcaaggagatatgtggaaaaaataaaaagagctctaccattccttctgaaactatgccaatcaatagaaaaagagggaatcatccctaactcrttttatgaggccagcatcatcctgataccaaagcctgacagagacacaacaaaaaaagagaattttagaccaatatgtctgatgaacatcgatgcaaaaatcctcaataaaatactggcaaaccgaatccagcagcacatcaaaaagcttatccaccatgatcaagtgggcttcatccctgggattcaaggctgattcaacatatgcaaatcaataaacgtaatccagcatataaacagaaccaatgacaaaaaccacatgattatctcaatagatgcagaaaaggcctttgacaaaattcaa

SEQ ID NO: 890764 - DNA, 633 bp, Homo sapiens
tagaaatctaatttatcttggtatatgttatcagtcataattttaattattatgttttattgttgtagaccacagaaataaccaaatttccttgtcagttgcattattattataatgaactcccatccaatctctaatcatggccattgtaaatctttttgaccataagtgattgctttattctaatgcttttttatttccctgaaagctctttgcaaatcctacagtgttgtgtcctcaaggagatatgtggaaaaaataaaaagagctctaccattccttctgaaactatgccaatcaatagaaaaagagggaatcatccctaactcgttttatgaggccarcatcatcctgataccaaagcctgacagagacacaacaaaaaaagagaattttagaccaatatgtctgatgaacatcgatgcaaaaatcctcaataaaatactggcaaaccgaatccagcagcacatcaaaaagcttatccaccatgatcaagtgggcttcatccctgggattcaaggctgattcaacatatgcaaatcaataaacgtaatccagcatataaacagaaccaatgacaaaaaccacatgattatctcaatagatgcagaaaaggcctttgacaaaattcaa

SEQ ID NO: 890765 - DNA, 633 bp, Homo sapiens
tagaaatctaatttatcttggtatatgttatcagtcataattttaattattatgttttattgttgtagaccacagaaataaccaaatttccttgtcagttgcattattattataatgaactcccatccaatctctaatcatggccattgtaaatctttttgaccataagtgattgctttattctaatgcttttttatttccctgaaagctctttgcaaatcctacagtgttgtgtcctcaaggagatatgtggaaaaaataaaaagagctctaccattccttctgaaactatgccaatcaatagaaaaagagggaatcatccctaactcgttttatgaggccagcatcatcctgataccaaagcctgacaragacacaacaaaaaaagagaattttagaccaatatgtctgatgaacatcgatgcaaaaatcctcaataaaatactggcaaaccgaatccagcagcacatcaaaaagcttatccaccatgatcaagtgggcttcatccctgggattcaaggctgattcaacatatgcaaatcaataaacgtaatccagcatataaacagaaccaatgacaaaaaccacatgattatctcaatagatgcagaaaaggcctttgacaaaattcaa

SEQ ID NO: 890766 - DNA, 669 bp, Homo sapiens
tcataaactgctctttaccagttggacaaccttgtgcaagtgactttacccttacaagattttatttttctgtaaaatggagataaatatcttttttttacaaaattgttctaaatatttaatgagattattaaataacacagttccaagaatatattaaagattaatgactactaaccaacatggaatcaatgttttcctcagctttacacattttaaacaggcttcttctacctttaggctcctgatccccctttacttacagcatttactgtagaaaacttgccaattgtatactctttttctgttcctttgaaatggctgtaaatagcctctttccagyttacaacccagaaaacgtctgtctcaaagggctgggaaccatctctttgaaatgtaaacatgaagaaaataacacttctatcctccatcctctataggagagtagtagcttaatttctgtgggtatgctgatttgctaacacagatggcctaatcacaaggaaaagcatttgcaaactcaggaacgactcaatatgctcaaaacatcccattgattaatcttcaccataacttctttttcactggatcaaccaagtgcctcaaaaccttctcaccttttgcttctacttagttgaacttagtctctctccctattgtagtagtctc

SEQ ID NO: 890767 - DNA, 701 bp, Homo sapiens
ccttcaccttctgccatgattgtaagtttccgagacctccgcagctatgttgaactgtgagtaaattacacctctttccattataaattacccaatatcacgcagttctttatagcagcatgaaaatggactaatacagtaaattggtaccaggagtgtgctgctgatataaagatatttgaaaataatctggaagtgactttggaggtgggtaacaggcagaggtttaaacaatttggagtgctcagaagaagakagaaaaatgtgggaaagtttggaacttcctagagacttgttgaatggctttggccaaaatgctgacggtgatatagacaataaagtccaggctgaggtggtctcagatggagatgaagaacttattggtaactagaataaaggtgactctggctatgctttagcaaagagactggtggcatttggcccctaccctagagatctgtggaactttgaacttgagagagatgatttaggatatctggcgagaagaaatttcttagcagcaaagcattcaagaggtgacatgggtgctcttaaaaccattcagttttatgcactcacaaagagatgatttggaattggaacttatgtataaaaggaaagcagggcataaaagttgggaaaatttgcaacctgatgatgtgatagaaaagaaaaacccattttctggggagaaattcaag

SEQ ID NO: 890768 - DNA, 701 bp, Homo sapiens
ccttcaccttctgccatgattgtaagtttccgagacctccgcagctatgttgaactgtgagtaaattacacctctttccattataaattacccaatatcacgcagttctttatagcagcatgaaaatggactaatacagtaaattggtaccaggagtgtgctgctgatataaagatatttgaaaataatctggaagtgactttggaggtgggtaacaggcagaggtttaaacaatttggagtgctcagaagaagatagaaaaatgtgggaaagtttggaacttcctagagacttgttgaatggctttggccaaaatgctgacggtgatatagacaataaagtccaggctgaggtggtctcagatggagatgaagaacttattggtaactagaataaaggtgactctggctatgctttagcaaagagactggtggcatttkgcccctaccctagagatctgtggaactttgaacttgagagagatgatttaggatatctggcgagaagaaatttcttagcagcaaagcattcaagaggtgacatgggtgctcttaaaaccattcagttttatgcactcacaaagagatgatttggaattggaacttatgtataaaaggaaagcagggcataaaagttgggaaaatttgcaacctgatgatgtgatagaaaagaaaaacccattttctggggagaaattcaag

SEQ ID NO: 890769 - DNA, 615 bp, Homo sapiens
aatatattccattcaaatagtaaccaaaagatagcagggtagctatactaatatcagacaaaacagactttaaatcaaaaacttggggaaccaatggcaagacggctgactagaagcagctactgtgcgtcactcttacagaaaggagacagagtgaccagtaaacaccagctcttcaactggatagttctggaggacccattgagattcattaaagaagcaacatgactcacagagagtggagaggagcaagacaggacacccacccacctgggattggcatrgagtcaacggtgtcttcccacctcctttggtaagtgagagtccccggggacctacacttctaccatggactgttgcaattctgggcacaggagatctcccctgacctcttctccctgggacctccagactgacactctgcatgcagtctgggcagagtcactactcaggcccatggggagccacaagggccttggactcctgagggccctggtgccagctgccacagctccaccaacaaaggaggtgaggatctctcatgtggccctaggataggagccatgtccacgatgctgaggagcagacgaactgtagacctcacctccgctacac

SEQ ID NO: 890770 - DNA, 619 bp, Homo sapiens
tcttttgccgtgcagaagctctttagtttaattagatcccatttgtcaattttggcttttgttgtcattgcttttggtgttttagacatgaagcccttgcccatgcctatgtcctgaacagtactgcctaggttttcttctagggtccttatggttttaggtgtaacatttaagtctttactccatcttgaattaacttttgtataagatgtaaggaagtgatccagtttcagttttctacacatggctagccagttttcccagcaccatttattaaatagggaatcctttccctatttcttgtttttgtcaggtttgtcraagatcagatggctgtagatgtgtggtattatttctgagggctctgttctgttctattcgtctgtatctctgttttggtaccagtaccatgctgttttggttactgtagccctgtattatagcttgaagtcagggggtatatacccaaaggattataaatcatgctgctataaagacacatgcacacgtacacataagtttattgcagcactattcacaatagcaaagacttggaaccaacccaaatgcccatcagtgatagactggattaagaaaacgtggcacatatacaccatgg

SEQ ID NO: 890771 - DNA, 667 bp, Homo sapiens
gttttggttactgtagccctgtattatagcttgaagtcagggggtatatacccaaaggattataaatcatgctgctataaagacacatgcacacgtacacataagtttattgcagcactattcacaatagcaaagacttggaaccaacccaaatgcccatcagtgatagactggattaagaaaacgtggcacatatacaccatggaatactatgcagccatgaaaaaggatgggttcatgtcctttgtggggtcatggatgaagctggaaaccatcattctcagcaaactatcacaaggacagaaaactaaacactgcacattctcactcataggtgggaattgaacaatgagaacgcttggacacaggaaggggaacatcacacaccggggcctgtcgtggggtgtggtgargggggagggatagcattaggagaggtacctaatgtaaatcatgagttaatgggtgcagcacaccatcatggcacatgtatacatatgtaacaagcctgcgcattgtgcacatgtaccctagaacttaaagtgtattattaaaaaatttaaaaattaaaataaatattttttcccaaaaaagtcatccctaaacccaaaatgaaccaagtagttctctctgtgctcaaacagtatctttgcctacttttatctct

SEQ ID NO: 890772 - DNA, 598 bp, Homo sapiens
tacagtcccaccaacagtgtaatagtgttcctatttctccacatcctctccagcacctgttgtttcctgactttttaatgattgccattctaactggtgtgagatggtatctcattgtggttttgatttgcatttctctgatggccagtgatggttagcattttttcatgtgttttttggctgcataaatgtcttcttttgagaagtgcctgttcatgtcctttgcccactttttgatggggttgtttgtttttttcttgtaaatttgtttgagttcattgtagattctggatattagccctttgtcagaaaccacatgattatctcaatagatgcagaaaaggcctttgacaaaattcaayaatgctttatgctaaaaactctcaataaattaggtattgatgggacatatctcaaaataataagagctatctatgacaaacccacagccaatatcatactgtatgggcaaaaactggaagcattccctttgaaaacgggcacaagacagggatgccctctctcaccactcctattcaacatagtgttggaagttctggccagagaagtcaggcaagagaaagaaagaaagggtatt

SEQ ID NO: 890773 - DNA, 604 bp, Homo sapiens
accgcctaggttttcttctatggtttttgtggttttaggtctaacatgtaagtctttaatccatcttgaattaatttttgtataaggtgtaaggaagagatccagtttcagctttctacatatggctagccagttttcccaacaccatttattaaatagggaatcgtttcctcatttcttgtttttgtcaggtttgtcaaagatcagattagatgtgtggtattatttctgagggctctgttctgttccattggtctatatctctgttttggtaccagtaccatgctgttttgattactgtagscttgtagtatagtctgaagtcaagtagcgtgatgtctccagctttgttcttttggcttaggattgtcttggcaatgcgggttctttttcagttccatatgaactttaaagtagttttttccaattctgtgaagaaagtcattggtagcgggatggggttggcattgaatctataaatgacctagggcagtatggccattttcacaatattgattcttcctatccatgagcatggaatgttcctctatttgtttgtgtcttcttttatttcactgagcagtggtttgtagttctccttgaa

SEQ ID NO: 890774 - DNA, 604 bp, Homo sapiens
accgcctaggttttcttctatggtttttgtggttttaggtctaacatgtaagtctttaatccatcttgaattaatttttgtataaggtgtaaggaagagatccagtttcagctttctacatatggctagccagttttcccaacaccatttattaaatagggaatcgtttcctcatttcttgtttttgtcaggtttgtcaaagatcagattagatgtgtggtattatttctgagggctctgttctgttccattggtctatatctctgttttggtaccagtaccatgctgttttgattactgtaggcttgtagtatagtctgaagtcaagtagcgtgatgtctccagctttgttcttttggcttaggattgtcttggcaatgcgggttctttttcagttccatatgaactttaaagtagttttttccaattctgtgaagaaagtcattggtagcgkgatggggttggcattgaatctataaatgacctagggcagtatggccattttcacaatattgattcttcctatccatgagcatggaatgttcctctatttgtttgtgtcttcttttatttcactgagcagtggtttgtagttctccttgaa

SEQ ID NO: 890775 - DNA, 641 bp, Homo sapiens
aacagcccagtacatatataggacagctatgattattcccactttacagatgagaaaactgatgccagagaggttctgtcatttgccctacactacgcagctaataaaaggtagagacagtagagacaggtcttcaacccttttaatgcctagtccaggaaatttttaatatcaatattgcatttaactcagtaatttctgaggatgagtaacaggaagatgtattcctttctgttgctcttcttccaatttagttaggttaygtatttgagtcagttagtctttctggataccagtttgctaatctgtatcatggggaataaacaccatccatcagtgagtatgcatgaagcagaggagactgggagggttcagaacttaaaaaacaatttctgagtgaagctgtttggaagagactgtgatgactcttacctattatccataaaacaaattaaatggcacctcccttggcaaccctacctaaaatggcacccctgttacctcattaccatgtttcatttttcttcacagcatttattgccatttattatatgtctatattacctgtctgaatcctcccaccagagtgcaataaccaagaaggcagggacctgaaaccctaagaggtggaatagtgcctg

SEQ ID NO: 890776 - DNA, 565 bp, Homo sapiens
ctttggaaacaaaaaggatttttaacctccagagggaaccaaattaaaaatggaacttttgtcaataatttattaaattcaattcaacttccctctgccttggctataatcaaaatttctgggcactctaaattagaaaggctaagaaaaacgacttggctaatcatgcagcaaaagcaactacctrgagttccactaagactaaaaaccttatagctgatatggattgttttccaaaaaaggatttaaatgatgttgtgaaaggtgctcagtcttgggcatcatataaaaaatcatattgagttgataacaattgcattttttgcccaacaacaaatttacggtatggtcccaataataaactgctattaccagaatctatatgtcttttaaaaaccttactcaaaatgacatatcagatgactaactgggcaactgataaattttataaagcagtattattagtggggaaacatttcaagggctgccaaatagttacaactgtcttgtactgtttgtccaaaattcaacccaggaaagacaattcagatagttccaggtcatt

SEQ ID NO: 890777 - DNA, 643 bp, Homo sapiens
gcttttggagttttcatcatgaaatctttgccagggcatatgtccagaatgctatatcctaggtctttttctagggtttttatagttctacattttacatttacatctttaacccatcttgagttgattttttatatggtggaaggaaggggttcagtttcaatcttctgcatatggctagccagttatcccaacaccagttattgaataggcagtcttttcctcattgcttgtttttgtcaaggttgttgaaaattggatggttgtagatgtgcagctttatttctcagtattgtaaccattccattggcctatttgtcagtttttgtaccagtacygtgctgttttggtttttgtagccttgtagcataattcaaagtcaggtaatgtgatgcctctggctttgttctttttgtttaggattgctttggctatttgggttctttcttgttccatatgaattttaaaatatttttttctaattctgtggaaaatgtcattggtagtttgataggaatagcactggatctgtaaattgctttgggcagtatggccattttaacaatattgattcttactatccatgtgcatgaaatgtttttccacttattaatatttgtgttgtctctaatttctctcagca

SEQ ID NO: 890778 - DNA, 449 bp, Homo sapiens
cactaacctccactgtctgatgggtttctgtactcctaaatttggagtattgcaggggctattgcatgcttttactaggccttgggcttttaggtccttaaaaatcttttggagtcattgttggggctcgggtctaagggggtactgcttttgttagggaaaggaggcggaatcctttagtttaacttgaacaggatgggcattctttgctcgtccatattgtccttctgttgccyagacttcaggattaattccttcctcaagcaggggacagcaaatgtgtgttccttctcctatgttcaggggtataatggcccctgcttttgctagaatgtctctccctaacaagggagtggggctttcaggcataattagaaaagcatgtgaaaagagtaaagttccccagtcacaacttagtggctgggagaagtatctagtgactgcctgtc

SEQ ID NO: 890779 - DNA, 449 bp, Homo sapiens
cactaacctccactgtctgatgggtttctgtactcctaaatttggagtattgcaggggctattgcatgcttttactaggccttgggcttttaggtccttaaaaatcttttggagtcattgttggggctcgggtctaagggggtactgcttttgttagggaaaggaggcggaatcctttagtttaacttgaacaggatgggcattctttgctcgtccatattgtccttctgttgcccagacttcaggattaattccttcctcaagcaggggacarcaaatgtgtgttccttctcctatgttcaggggtataatggcccctgcttttgctagaatgtctctccctaacaagggagtggggctttcaggcataattagaaaagcatgtgaaaagagtaaagttccccagtcacaacttagtggctgggagaagtatctagtgactgcctgtc

SEQ ID NO: 890780 - DNA, 685 bp, Homo sapiens
ctataactataccacagtgacacattctgtagcataattgtagctgctgggacttccttataatttgtagaaaaatctagaggattcagtttcttggctgggcaattagctctctaattaattttctcaaaatggccctgctgggactgcttttgtagtggttattgtacaggtccctttgcgctcakttctttctacctaatcatcccgctagaatgtactcaccacaattctgttctcatgttcctgattacacagattttttaaatgtatgtaagctctcttcctataagccactgaaaatgtaagcatagtctatgcatgtgccacaagcaagagtgggggcattgagtctgttgcttgaggcctttcttctcactctgcagctttagtgtgttggctctttgcatttattgcttcatggattaaaaatgttgcagctccaagcttcatgcaggtagaagggtagaaatgggcagctgcctgtatatctacccttcaatcaggaagcaaatgctttcccaaaatgccctctctcaactaagccaacttccacatacctctcataggccaaaaatacatcacgtgacctcttggcttcaaaagagactgaaaaatgcttagaatttctaatctccactagagtgggggaggcaaaggagaagggctgggaaagtgtgactgg

SEQ ID NO: 890781 - DNA, 651 bp, Homo sapiens
cttacaagtgggagctacacactgggtactcatggacacaaagatggtaacaacagacactgggagccattagaaaggggaaggagggagagagaatgattgaaaaagtaattatacagtactatgcctactacctgagtgagtggatcaatcaaaccccaaacctaagcaycaaacaatatacccatgtcacaaacttacacatgtaccccaaatctaaaataaaagttgaagttttttttaattactgaatttggaattagaagtcatggattcagctcctttttctatttattacatatgtgatttgggtgagttatttaacctctctgatcctagctatatcatctgtaaaaacaggaataatgcctgcattgccatgaaagttaaattagaaggctagaactcactagctgtattagtccattttcatggactaatgaagaaatatgaagaaacacctgagactggggaatctataaagaaaaagaagtttaactgactcacagttccacatggctggggaggcctcacaatcatggtggaaggcaaaggaggagcaaaggcacatcttacatggcagcaggcaagagaacgtgtgcaggggaactgccctttataaaaaccatcagatctcatgagacttatcct

SEQ ID NO: 890782 - DNA, 651 bp, Homo sapiens
cttacaagtgggagctacacactgggtactcatggacacaaagatggtaacaacagacactgggagccattagaaaggggaaggagggagagagaatgattgaaaaagtaattatacagtactatgcctactacctgagtgagtggatcaatcaaaccccaaacctaagcatcaaacaatatacccatgtcacaaacttacacatgtaccccaaatctaaaataaaagttgaagttttttttrattactgaatttggaattagaagtcatggattcagctcctttttctatttattacatatgtgatttgggtgagttatttaacctctctgatcctagctatatcatctgtaaaaacaggaataatgcctgcattgccatgaaagttaaattagaaggctagaactcactagctgtattagtccattttcatggactaatgaagaaatatgaagaaacacctgagactggggaatctataaagaaaaagaagtttaactgactcacagttccacatggctggggaggcctcacaatcatggtggaaggcaaaggaggagcaaaggcacatcttacatggcagcaggcaagagaacgtgtgcaggggaactgccctttataaaaaccatcagatctcatgagacttatcct

SEQ ID NO: 890783 - DNA, 588 bp, Homo sapiens
ttggatttatcctcggtgtgtctacttgaatattcaaaaagtcatcagctagtctaatttgtttttttttagccatgtaaaagactgatttgctttgacaggtggatcagaaacagaattggagctattttatctggacctaattaaacaaccttcattaccggcagatatatgtttgtgacttaaaattagcatgattggaattaaaactcaaaatataaggcattgaattcagatatggctggtttaaaaataaattccatacattttaaatgcagcaagtctggattttaaatatcctatagtgacaaattccatttaggsgtgtgtgtgtgtgtgtgtgtgtatgcatgcacacatggctgtggccatagataatagtaaagatatgacccatattttcagaacggttacagacgagcattctgaactatgaaactttaataaaatattttttaaatctcatttctcctctccccagcccaaagtactgaattcagctttgaggattttgtgtagctttctttgatttcaaaggttacattctctaatcaaattatttctattcatcattgtcgaatttctgag

SEQ ID NO: 890784 - DNA, 605 bp, Homo sapiens
tactcaggaggctgaaatgggaggattctttgaacctgggagttcaaggctagagtgagttatgaacatgccactgaactccagccttggtgtcagaatgagaccctgtttttaaaacataaaaatattttttgcccactttttgatgttttttgttcttgtaaatttgtttaagttccttgtagattctggatattattagccctttttcagatggatagattgcaaaaattttctcccattttgtatgttgcctgttcactctgatgatagtttcttttgctgtgcagaagctatttagtttaattagatctcatttgtcaattttggcttttgttgccattggtttttggtcttattaaagacttaagtctttaatccatcttgagttattttttgtataagttataaggaaggggtycagtttcagttttctgcatatggctagccagttttcccagcaccatttattaaatagggaatcctttccccattgcttttgtcaggttttctcaaaggagacatttatgaggccaaaaaacatatgcaaaaaagctcatcatcactgatcattagagaaatccaagtcaaaaccacaatgagat

SEQ ID NO: 890785 - DNA, 592 bp, Homo sapiens
ctagaattacaggtgtgcgtcaccacacctggctaactttttggatttttagtagagacagggtttcactgtgttggccaggctggtctcagacttctgacctcaagtgatccacctgccttggcctcccaaatggtgaaattataggcawcagccaccacgctcagccagctgtgcatttttatttttatgttttttcagtttgagaataagcttttagattggctacagaaaaacataatccataaaacaaattgataaattggacatcaccaaaatgtaaaacttctgctttgagagagaaaaatgaaactatcacagactaggcaaaaaatgcaaaaatatatatatatacatatatataatttatatatatgtattatttacttatattattatctaatatatattatgtatatgctatatatatatcctttagcatatatatgtatgttaaaggattgctatccaaaatatataaaaaactctcttagtaacaagtaaacaaaaatctagcaaaatttagacaaaatctaaatagatgaagataaatataaacagatggaggacaaacaaaaacataacatgctaa

SEQ ID NO: 890786 - DNA, 584 bp, Homo sapiens
catgacatttgaggtgattgttgtttaatatccaatatatttgtaaattattttctatttgttgcacttatttcttgtttcattttttctccacaatttttcttttttttatttcaattgagcattttaaatgacaaaattttctcttttcttagtmtatcaattatatacctagaaaaatagaatttgtcttagagtttgcaatgtacatttacaacgaatcctagcccactttccaaaaaaaaaaaaaaaaaaaaatacgagtttacaggtactgtgagcactttataataagaaaataatcctaattttttcaccccaaccctgtatcattgctgtcattcacttctcatatatgcacatatacatgcacacacacatacacacacatctgtgattgaatacatttttgcttttattattttgaacaaactgttatccattaggtaaatcaggataaaaataatgataattattaaccctaatagtcaattaacaataagaaaaataatctttctttatatagatcaaaatttctgactctatatcatttttcttttctctaagaaacttctaacatttat

SEQ ID NO: 890787 - DNA, 588 bp, Homo sapiens
gaaaatgatcatactgccaaaagcattctacagattcaatgcaattcccattaaagtaccatcatcattcttcacagaactagaaaaaataattctgaaattcttatggaatcagagaagaccttgcacagccaaagcaacactaagcaaaaataacaaatcaggaggcatcacattacttgacttcaaactatactacaaggctatagttaccaaaatagcatggtagtgttataaaaataggcacacagaccaatggaatagagaaccgagaaataaacccaaatacttacagccaactgatctttgacaaaccaaacaaaaacataaagtgggaaaaggacaccctattcaacaaatgrtactgggataactagcaagccatagtagaagaatgagactggatcctcatctctcaccttatacaaaaattaactcaagatagatgaaagacttaaatctaaggcctgaaatcatgagaattctggaagataacaatggaaaaaactattctggacatcagcttaggcaaaaagcttatgaccaagaacacctcccccctggaaaaaaaatgcaacagaaacaaag

SEQ ID NO: 890788 - DNA, 625 bp, Homo sapiens
  misc_feature 42, 43, 44, 45, 46, 47, 48, 49, 50, 51, 52, 53, 54, 55, 56,57, 58, 59, 60, 61, 62, 63, 64, 65, 66, 67, 68, 69, 70,71, 72, 73, 74, 75, 76, 77, 78, 79, 80, 81, 82, 83, 84,85, 86, 87, 88, 89, 90, 91, 92, 93, 94, 95, 96, 97, 98,99: n = A,T,C or G
  misc_feature 100, 101, 102, 103, 104, 105, 106, 107, 108, 109, 110, 111,112, 113, 114, 115, 116, 117, 118, 119, 120, 121, 122, 123,124, 125, 126, 127, 128, 129, 130, 131, 132, 133, 134, 135,136, 137, 138, 139, 140, 141: n = A,T,C or G
ttagaaattatggtttaagagtcatgcagctgaaagctgcannnnnnnnnnnnnnnnnnnnnnnnnnnnnnnnnnnnnnnnnnnnnnnnnnnnnnnnnnnnnnnnnnnnnnnnnnnnnnnnnnnnnnnnnnnnnnnnnnnnatggtatcagctggcagaaacccatatagataaactgggttatctgggcttgtggctcccacccaggaactgactcagtgcaagaggatagtatcaactccctatggtttcatctccaaccagactaatcagcactccccactttctgatcccctacgtgatccccacgttttcgggaagactgatttgagtaataataaaactccascctcctgtacagttggctttgcatacattacactctttctccattgcaatttgcctgtcttgataaaccagctcagtctaggcagtgggtaagaacctgtcgagtggtatactttcattcatatatatctactgcttgattcatatatatctactacttgatactatatatcaagtctcctcttcaaagaggcatcgacattcagtgcttccacttcctcaccttcctctaccactcttgtcaacaccagacttgcatatgtgtaatttttacttg

SEQ ID NO: 890789 - DNA, 592 bp, Homo sapiens; identical to SEQ ID NO: 890785

SEQ ID NO: 890790 - DNA, 660 bp, Homo sapiens
taggattatatttccacaccaaggcagaaagtacatctagcattcgtaaaagaagatcaaaatctagaactagaaataagacccaaggcagttaatttcttaggacctcttcagggtggcgtgctcttgtctcttttctctgcttttcaccataaacctgtgtgtcacttatatcttgttctctttcattcttttttttggttttgttttgttttgtttgagacggagtctcrctctgtcgcccaggctagagtgcagtggcacgatcctctttcattctttattctttatgtacacatgacttaatatgcttactccacaccatactgatcttcagttctagtcattaacgcagaccaatttcaaatttctggaagacattatccattgtttcagtcttggccaagtttttaaaccttggtctgtttgcattgtcccaagagctgcattaagtagagcatacatggctctgaagtctcagtcgtttgaaagagtggttctcaaagaatagttagtatggacatgaacacagtagtaagaggttcttaatatatttggtagtagaaatattggctagttttaattttatttttattatgaatttaaacatatcaaatgtgtgttacataaaataagtagttgaaataattttactttcaa

SEQ ID NO: 890791 - DNA, 584 bp, Homo sapiens; identical to SEQ ID NO: 890786

SEQ ID NO: 890792 - DNA, 567 bp, Homo sapiens
aggactccgggctgtttggaggcactcccaaggcccctgtgctgtgtcaggggcaggaggtgatggtggggggtgggtagtacgtccagagcttccccttcccaacaaatctgtggatgggcagggggtacactcatggggaaattaccaatttaaataggaaatgcaagcaatttggatagaaccccaggactgcagtttgagagctcattctctgccccgtgggggtttgattacaaccaacttggctgataacgtgcagagagggccagaaaaatggtttccaaggaaactcagatctttmtaagccccttctggctcaggtgggagccagggctggccgggaaagcagaggctgtgctgagtaccatggtgctcaattcccggtgagccctctgcccactctctgcctgcttctgtgcttatccctgcttccccaaacctggcctgcactttcattcctgtttacaacagttgtttctctctttgtctctgctccctttgtcttcttatttatctcagctgatgtctgcacttgggaaagttggcaaacattaaaaaaaaaaa

SEQ ID NO: 890793 - DNA, 563 bp, Homo sapiens
ctagaatggccttatctcttgaattggaagatcactgtcagtcctaatcaggactgtttgttttctgttctcagcagagagctcctctcccacagttattgaagacagatgcttttctttggtctgaatgaatcaacttatggccccaacaccaataaagacacaagggaataatatgtgcttattggcttagacttctactccaaccagttattagcaagggggattattacgggatgggttgtcatgattgggttacacgggtcaaggcccatcctggatctggagtgaytcctcacatcgcatttctgggacaggtggcagaaggcctgaatggatgttgtgcattgattacaatgtcaatgtcaatatcaaaatctaaattcatcctgtatgctcattccccacaacccagacctcctcttgtctcttctatttcagcacatgctcccaccatgaactcagctactttaaccagaaactagagtcagccttgaagttttctttttgaccctctcaatgattactcagttattcagtatttttctcatttgtagccccct

SEQ ID NO: 890794 - DNA, 704 bp, Homo sapiens
ggagggggagataagcacaccattaccccacaaggtagggcatcagattcagtgcttctgcagttaacagaataaaagggacagtgagccaacagctccaatgccatctttgcttcatcatttaaacaaaccactattttagataaggaaatttatgttggattctcaggacagccattgattattattcattctgacacagtctcgttaatatagtcatccgtgcatctttgtcaggacatctgtgatggagtgtttagttagttccttttgaaataaggcagatttggtgtagtatcaaaaatttgatggatgtcttatcctcattcattcaaacaacaaactatctaaatgacctaaaatatacttggtgctcacatagtctgcttttggagaatcaaaatcacaactctcgctgtccagtcaaatgccaaaaagcaacwattatgcacctactatgccaagactctttgtccagttgagttaaaatcatctgtttgtttttgtggtgctaaggactgcattcactgagattaatgcggcccgtccaacttgaacaggccacctcattaatctaaaaagaataaaacatgtgacatggactgctgttgtttgcaaacatttaaaagtagaaaagcaagtgatgaaattgaggctggcaaccctgcacgctcaggactggctgttttctggaggagggaatg

SEQ ID NO: 890795 - DNA, 600 bp, Homo sapiens
ggaccagtgccgatagttcacttgaatataaatgtagccaaatcctccagtctctcaaaacttgcattactagattgaggatcttcatgccactattttatgtaaatggatttaataactatcttccaaaaaaaagtctaagtaaatctgtgatgttctttctaaccagcaaaacaatagccactatgactaatctttgttaagcttctgtaagaraattacatggcatgcgtaagtgtgatttcttattaattagccttttttaaatagaaaaaaattatatttctacttatgtatatgtgcaagagatttttaaaatccagttttcttaaaattgaagtttttgtttagtacaatgaatgttcaaataaagatcactttcaaacatgccattttaatatcacattagatatacactaaaatacatgaaaatcatttatttatcaaatatttattgagtgcataatatgtgcagatattatgcaaggtgctaggagtaaaagagttttgcttttatacatgcgtcatttgattgtagcaatcttatttaagaaatcgaccaagattgtgtgaagtattagcagtcacaagatacgcggc

SEQ ID NO: 890796 - DNA, 659 bp, Homo sapiens
aacttaaatgaaaatatgaaggggcaactatagtcaaggaatcctgaataataaaactagaggatttatactgccagtaatcgagacctattctaaaccacagcaattaagacaaggtggtatcagtgcaatgataaacaaatagaccaatagaacaaaccagagagtccaaaaacagacctacagttacactattacctgatttatgataaagtggcactgtcctacaatgtaaaaagatcatcttttcacaaaatcgtgctgggtcaactgtataaatgttttaaaaagkgtagattgacccatacatcacactttacacaaaaattattcaagatttactgcaaatataaatgtaacaggtaaaataataaagctttctgaataaacataggaaaacatttgtatgaccttggtgtacaccacatttttaaaaacaagacaaataaccatgagggaaaaatataagtgataatgataatagcccctgtcaacaactcacagttaacagactggaaagacaactggcagagttagagaagttgtttgcaaaacatgtacctatcaagagaatcatatccagaatccataaagaactcttgcaaatcaatacagaaaatatagacaacccaatagaaaaatgggcaaaaggtttgaac

SEQ ID NO: 890797 - DNA, 601 bp, Homo sapiens
tattttgagttctgagtagaaggcagagaggaactcgctaacatgttcataggatttgggaggaaaaaaagtctagaagttttcacagtggtgctaggagaagcttaaaggagtgtattccttccccgtgtcaagaatgtgttctctattcaccagagtaaataaataactgcataggtgtaaattaaaatagatagatcaataaataacattttttagaaccagaaaaatcagcatccatcaagctgagagtccccacacaataccatactgtggggtgtgctatactgaagaaaccaaggaaagaatgttaaagacttgattggaataaaatcagaccctaagaataaggcygggaaaaaaatacagagctcagagcccagcagctacgtacacctgaaaggattcaacaggtcccaggaaggtgtctgcacctctgccctgactcctccaatgctctggtttttaccacctcaaaagggaggtggtatcacttattgtaggaccccaggccgaccctcctgcttgtccacatggtgcctgtggtgcctacttggacttaaagtataaaacttggaagcatttaaagggtaagagaaat

SEQ ID NO: 890798 - DNA, 600 bp, Homo sapiens
gactaaatgagttacaatagcacttagaacaatgtctggcacagagtaagctctgtgttaatgttctcaacttgaaaattgaagtgatttcattgtgaatgctattattcaaaatattttaaaatacctactttgatttgtttttctcccatcagtttgtggattactttactttaagtagttggtatgattattttaagttggccacccataggagtttaaaaccagaaagaaccataaaaatcatgttgtccaacttctacaggaggttcttcatcattatgattatcaccaggcatttgttcctcagttagttatacttctyatcgattctggtgccactggagcgcatttttatctaagctcggggcatggagatgttctcaaccgtatctacaaattcactttcgtctctgtccctctcatcaacatcttctgaacagtaaagatcatcactccaccatgcactgtgatatctaatggttcgtggtgtaggcaaagaggattcctagttactctagacttttccttgccccttagcagccttaagtttttttcttgtcctttgacttgtacggtactgtgtggtttgtgatacct

SEQ ID NO: 890799 - DNA, 623 bp, Homo sapiens
caagccaaaataactcgaatgatctttgactcctgtcaagtctacttccagcatatgtccagaatctgacctctctctactctctccaccaaaaccacccttgtccacccaaccattatcttgtgcctgcacaatctctagtatttcattctaaatctggcccctgccatctattcctacacaatagccagagtggtccttataaaacataagtcagatcctgccactccttcactcaaaacccttcagtgttttcctrtcccctaggagttaaaggcaaacccctcactatgtcctacaaagtcctaaatgagctgcccccagaagaacatcctgcttctctgacatcatctcctaccactttctccccgactcactctgctccacccaaagtggacttcttgatgttgcccaagccaggaatgctcccacctcggcatctctgcgctggctgctccctttgcctagactgtctgtgttccccagacacctgtatgctctttctgccactctttctgtcctctgggcaaatgtcagtgaggatttccttaaccatcctacacaaaacagcatctgctccacagtgaaagcacttgctctcctccttttctgttttattttct

SEQ ID NO: 890800 - DNA, 572 bp, Homo sapiens
ttagatgttcaaattaggggcaactgcatgaagtgtgtataggaactttccgtactacctttgcaaacgctttggaaatctaaaattattccaagatagaaagggtttcgagaagaaataacttgtgtaaccagcacttagataaaaaacaaacaaaataaaacagaacattacagcatcatgaaaaagcctttgtacctcattccagtcactatcctctggaggataaccacttacctaaaatcccacagcacagattgattaaactttttaaaaaaarttacataagtggaatcaaattgtatacactttcttatgtttggtttgtttcactgcatgtcatggaagttagacacaaccttattatttcatgttgcaaaatttatttattcttattaccagagtgactatatattttaaggtagcataaatgtatttattcattgtagtactgacagacatttagggttgttttcacattgttgctactaagaatagcatactatgcatgctatgactgatcttgagcatatatttctatatatgtatttctatagtgtataaaaatagga

SEQ ID NO: 890801 - DNA, 521 bp, Homo sapiens
ctttaattatttttcaggattagtgttgtttactatgtgagtttagtatattcctgctataatttagtatttaagtccctttgtatgaaaatttttaaaaataacaaacaaagcaccagccagtaagtaatagtcattgctctttctctagcttactaatgatacagaaaacaaacagaaaaaaaaccttaaaagcttagtttcttcaaaaattcttataatgtggagtggatagaacattcagtgatttaactagggggttcttcatggtaattttcacttcaaattaatgccttcactgtwtttctacaacttctacggatgtctctctaactctctctcctctctctgtatcaatatatttatttatgtctatgcctatatatgtatctctgaaaaagtaggacaaatttgtgtctgattataaaagagtatatgtatcacagttacaagatgcacatttcactttaatgaagaagaaaaatagcaatatcgacaattcactgagaaatacaaatggg

SEQ ID NO: 890802 - DNA, 643 bp, Homo sapiens
tctgttttatttttttactttctattaatagccagtctgactagtgtgagatgatatctcattgtggcttagatttgcatttctctaatgatcagtgatgctgagcatttttcatatgcttgttagccacatgtatatcttcttttgaaaatgtcctttgcccacttcttaatgaggttgtttgttttcttcctgtaaatttgtttaagttccttatagatgctggatgttagacgtttgttggttgcatagtttgtaaaaattttctcccattctgtaggttgcctgttcactcttttgacagttttccttgctttgyagaaggacttcagtttaattagatattatttgtcaatttttgcttttgttgcaattgcttttggcatttttgtcatgaaatctttgcccattcctgtgtccaaaatggtattgccttcattgtcttccatggatttatcgttttgtattttaaatttaagtctttattccatcttgagataatttttgtatatggtgcgaagaaggggtccagtttcagtcttctgcttacggctagccagttgtcccagcatgacttattgtacagagaatccttttcccaatgcttctacttgtcaggattgtagatctgatagttgtgggt

SEQ ID NO: 890803 - DNA, 643 bp, Homo sapiens
tctgttttatttttttactttctattaatagccagtctgactagtgtgagatgatatctcattgtggcttagatttgcatttctctaatgatcagtgatgctgagcatttttcatatgcttgttagccacatgtatatcttcttttgaaaatgtcctttgcccacttcttaatgaggttgtttgttttcttcctgtaaatttgtttaagttccttatagatgctggatgttagacgtttgttggttgcatagtttgtaaaaattttctcccattctgtaggttgcctgttcactcttttgacagttttccttgctttgcagaaggacttcagtttaattagatattatttgtcaatttttgcttttgttgcaattgcttttggcatttttgtcatgaaatctttgcccattcctgtgtccaaaatggtattgccttcattgtcttccatggatttatmgttttgtattttaaatttaagtctttattccatcttgagataatttttgtatatggtgcgaagaaggggtccagtttcagtcttctgcttacggctagccagttgtcccagcatgacttattgtacagagaatccttttcccaatgcttctacttgtcaggattgtagatctgatagttgtgggt

SEQ ID NO: 890804 - DNA, 633 bp, Homo sapiens
tttggtggacaggtggtgtaggcaaagaaaaactgtcctttctgtccccttcaattagccttttcttgttattgtgcaacaaccaggtacttgattctctcatgtgattattttgttcttatgaaggtgcttttctaggcggagagttgttctccttgataattccattgggggacaattggaagcttctatttggccgttttgctccacctcctcagaaaatcctatcttctaaacacttttgttaatttagaactattaaaataaagttttattaaaaacaaacacaaaaagaacaggttcagtggaaaaaatcttgcacaagcattgaaaacttttgtttgcaaattattcaatattttgtaattgataatgcatctgtgtggtgtctagggtgagtcatagctttattttaataagtattttagtcagttttattatgcaatatttmttttattatgtgctttattattttaaatagacaaataagcatttacaatgttaacattttaggtatatgtggtgtttgttaccatatggcattttaaagttgtttatattaagtttaatattttttagaaaatagtcacatatgtgactattttttgtataagatacaacttcagacaatag

SEQ ID NO: 890805 - DNA, 570 bp, Homo sapiens
tcattcaatactgtctacgttgtctttttttttttcttttttcttgttattttttaggtggagtcttgctctcttgctcaagctagaggtcaggggagtgatctcggctcactgcaacctccgcctcccaggttcaagcaattctcccacctcagcctctcgagtagctgggattacaagcatgcaccaccactcctggctaatttttgtatttttagtggagactggttttcaccatgttggccagcttggtcttgaactcctgacctcaagtgatctctctataggtactttttgtttgctttcttgcttgctctctgttattttctccaaaataattttacagaaatatatrtctaatgtagaaaacattttttaatattctaattttgttcattttcttaggcaggtccatttactgaatatctttaacaagaaatctatgttaaaaaaatcttttaaaatgtgtgtgggtggttttttttttttttttccatatcaagcagagtgttaggaaagtttttcttgcaaaagttgtgccatgattttatgacctggttgaaattatag

SEQ ID NO: 890806 - DNA, 619 bp, Homo sapiens
aagaaaataaaacagaaaaggaggagagcaagtgctttcactgtggagcagatgctgttttgtgtaggatggttaaggaaatcctcactgacatttgcccagaggacagaaagagtggcagaaagagcatacaggtgtctggggaacacagacagtctaggcaaagggagcagccagcgcagagatgccgaggtgggagcattcctggcttgggcaacatcaagaagtccactttgggtggagcagagtgagtcggggagaaagtggtaggagatgatgtcagagaagcaggatgttcttctgggggcagctcatttaggactttgtaggacatagtgaggggtttgcctttaactcctaggggayaggaaaacactgaagggttttgagtgaaggagtggcaggatctgacttatgttttataaggaccactctggctattgtgtaggaatagatggcaggggccagatttagaatgaaatactagagattgtgcaggcacaagataatggttgggtggacaagggtggttttggtggagagagtagagagaggtcagattctggacatatgctggaagtagacttgacaggagtcaaagatcattcgagttattttg

SEQ ID NO: 890807 - DNA, 598 bp, Homo sapiens
aggtatcacaaaccacacagtaccgtacaagtcaaaggacaagaaaaaaacttaaggctgctaaggggcaaggaaaagtctagagtaactaggaatcctctttgcctacaccacgaaccattagatatcacagtgcatggtggagtgatgatctttactgttcagaagatgttgatgagagggacagagacgaaagtgaatttgtagatacggttgagaacatctccatgccccgagcttagataaaaatgcgctccagtggcaccagaatcgatragaagtataactaactgaggaacaaatgcctggtgataatcataatgatgaagaacctcctgtagaagttggacaacatgatttttatggttctttctggttttaaactcctatgggtggccaacttaaaataatcataccaactacttaaagtaaagtaatccacaaactgatgggagaaaaacaaatcaaagtaggtattttaaaatattttgaataatagcattcacaatgaaatcacttcaattttcaagttgagaacattaacacagagcttactctgtgccagacattgttctaagtgctattgtaactcatttag

SEQ ID NO: 890808 - DNA, 600 bp, Homo sapiens
atttctcttaccctttaaatgcttccaagttttatactttaagtccaagtaggcaccacaggcaccatgtggacaagcaggagggtcggcctggggtcctacaataagtgataccacctcccttttgaggtggtaaaaaccagagcattggaggagtcagggcagaggtgcagacaccttcctgggacctgttgaatcctttcaggtgtacgtagctgctgggctctgagctctgtatttttttcccrgccttattcttagggtctgattttattccaatcaagtctttaacattctttccttggtttcttcagtatagcacaccccacagtatggtattgtgtggggactctcagcttgatggatgctgatttttctggttctaaaaaatgttatttattgatctatctattttaatttacacctatgcagttatttatttactctggtgaatagagaacacattcttgacacggggaaggaatacactcctttaagcttctcctagcaccactgtgaaaacttctagactttttttcctcccaaatcctatgaacatgttagcgagttcctctctgccttctactcagaactcaaaat

SEQ ID NO: 890809 - DNA, 606 bp, Homo sapiens
ttgaaaccagcctggccaacatggtgaaacccgtctgtactaaaaatacaaaaattagctgggcgtggtggtgcacacctgtaatcccagctactccagaggctgaggcaggagaatcacttgaaacctggaggcagaggttgcagtaasccgtggaggttgcagtgagccacagagatcatgccactgcactccagcctggagcaacagagcgagactctgtctcaaaaaaaaaaaaaaaaaaaaaaaagcatatactctatggatacaccagtaagtgaaccgtgaacaacaattgaacttgataaatatgcaaaaaaaattttcaggtttttcccaaatctgagccctccaaattatcaaaatggatagctggaacagatattctgtcaaaatatgtgggagagattaaagagagaatatgtgggagagattaaaagagagaacatgtacttaaacagaattttaaacagtaaaaatactgtgatgctattactgttgattaagcacatattttttctgtttaaaatggtataatctatttagtgaacagtaatacgatatttttcaattgtgacaggtttctacgtttgtaatttttataac

SEQ ID NO: 890810 - DNA, 606 bp, Homo sapiens
ttgaaaccagcctggccaacatggtgaaacccgtctgtactaaaaatacaaaaattagctgggcgtggtggtgcacacctgtaatcccagctactccagaggctgaggcaggagaatcacttgaaacctggaggcagaggttgcagtaagccgtggaggttgcagtgagccacagagatcatgccactgcactccagcctggagcaacagagcgagactctgtctcaaaaaaaaaaaaaaaaaaaaaaaagcatatactctatggatacaccagtaagtgaaccgtgaacaacaattgaacttgataaatatgcaaaaaaaattttcaggtttttcccaaatctgagccctccaaattatcaaaatggatagctggaacagatattctgtcaaaatatgtggsagagattaaagagagaatatgtgggagagattaaaagagagaacatgtacttaaacagaattttaaacagtaaaaatactgtgatgctattactgttgattaagcacatattttttctgtttaaaatggtataatctatttagtgaacagtaatacgatatttttcaattgtgacaggtttctacgtttgtaatttttataac

SEQ ID NO: 890811 - DNA, 626 bp, Homo sapiens
ccatgcccagctaatttttgtatttttagtagagatggggtttcaccatgttggccaggatggtttcgatctcctgaccttgtgatccacctgccttggcctcccaaagtgctgggattacaggcgtgagccatcatgcccggccaacttatttcttatagaaaaagaaatttttacataaatattggattaatggcattcgtgataaagctgtttcctaaatacaaagtctaataccacgggaattcatacaattcaaataaagcaaataggagagtaggtgtaggaaaagctttgatttatacaattttatgmcgaggaagtttaactgagagagaagttaaaaatatctttctagcattggttaatagttaaatagttttcttaagaaaataaccaagctagatgcaccatcattttaaaaggctggtgcatctgttcatgcactgagtattcttaatgtagaggaaggtcccacgtgggctttctgattcttctgtgcttgaacaatgccaggcaaattggtctgggattgtatttctcatgcttccacctcgctttaccaatcagtagtgtattaaccatctgtacagggataaaatttacacttgcatcttgcagtttta

SEQ ID NO: 890812 - DNA, 603 bp, Homo sapiens
aataactacaatgaatatcattgtgtatattatcttctgcagtcttacccctttatcttagctttctggaactgggggtactgagtcaaaatatacttatttatgttatttcttgttaactggctttctaaatgagctttaccatttccactgccacagcaatgtataacttatccaaccttcctacactgtacagtatccagcatttgggggttgttgttgctgcaaatttaatgactgcaaattgtacctctgtgtgcatttcctgaatgcatttattcattaatataagacatatttattgaatgccagctatgtgccaggcactctgctaggtttggaggataagcaacgggttttatgaagcttgcagacaagtaagcagcagctacaaagagtgtttgtgtattctataattctgacatttatccttttacccaataacattttcaagtttttttggccaatgaacatgaattmtttatatcatatctcaattatttgccttacttgctgcaaatatcctaatgcaacattagttgctattaaggttatgttattattgtaatacaaaattttttaagttttagatttaaaatctct

SEQ ID NO: 890813 - DNA, 583 bp, Homo sapiens
aggtttcctctaatttccatccagacagacagtggagtgatgggtatcacagggtgggactcctggaccttatgtgggacagaatgaatgcaagagaccagacttgctcctgagcaagttccaggtaggacccctgaatgtctccctggacactcttgttccattcaaggtgacagcaggatctgcttttcccacactgttccttagagcccaaagagccccttccacttggtagccagcattcaatgggcaagggaacaagtctccctttctttagattttgtcttggctcatgtgaagattctgtatatagaataaaatatttttcccattgacttccttcactgagcacagatttaactcagaaagagtgaaataaaattagctttatttcactctttatgattagaayagtaatacatgcatttttaaaaaatcaaaactaaatactaaatctagagcacgggttggcaaattatggcctgtgagctggccaacactgttttggtaaataaaatgttattggaacacagccatcctcattcgtttacatatggtctatggttgttttcctgctaccaca

SEQ ID NO: 890814 - DNA, 599 bp, Homo sapiens
cttaggaagatggagaagttccaggcctagaaagcatcaggagcatggtaagaggtcagggacccattcgggctgctcaggtatccacaggcactttagaatggcagatccaaaggtatgaggaagagcatcacaagaggtaaggcccaaaagtgggaaggkgggaaaatctttatattttcatagggtggaggagacacccactccattcccaggaaagaacaccactagataaaactcttttggtccttttaccattgtccttttattcctactatttgttcctctgcatgggagaagaggctcatctgattggtgagttgggttgaagatgtcagctcatgaccttgttctctctcttcacttgtcctcaaacagaaagtaatctcttcctgcttattttcttatgtgtaattatctcaatgagttatcacagaagccagggtcctctgctggctaaacacaactctcctaacagtaagtcccaaagcctattgatagaaaagtagagaaaatctccatttggctgaaatataagtcacatgatctagtctagtatggtcattattaaagctgatattttgtctccaatctgactt

SEQ ID NO: 890815 - DNA, 647 bp, Homo sapiens
acactttaacctttttgtttgacttttttggactttctagttatataattatatagtgataacagtctacatattatggatgtaccataatttatttaaccaattttccgctgatataatttatacagaaccaactttttctttattatcaacaatcttgggtagaattaaagggctaaagggatgcacatttargaatattgttgctgattgccaaaaaagacttagtaattactcttccacctgcagagtgagtaactgtctgtttcccaaaacttttgtcaacatagcactataagaaatcaaagtttgaatagataataataaatactgttcattatcaaccagaaataaccactttcaacagtttgatgagtatctaaatttatatttatagccacatctatatatttattcaaatcccttttaattttttttacaagaatggatcaatttatagaaactattccagaacacacctgtaataaattatgtgatgcaaagccattgatatagttttgctctcaaactcaagtctcatcttgaattgtaatccccataattcccatgtgtcaagggagggacctgttgggaggtgattggattatgcgggcagtttctcccatgctgttctcgtgatagtgagt

SEQ ID NO: 890816 - DNA, 638 bp, Homo sapiens
gggtggaaaattgagcagaaataacctagggaaatgcctgggaaagaatctgttcttcctcatccatttcctggaggtgggcagaagggtattataggggagaggtctcagtttcctggcatagcctcagaaaagctcaggagatgtgatttgccattgggcaaamactgcgaaggcctcagaatgtggctgatcctgaaattctcttgtcctatacatttctgtccagataaaggtgaacctgggatgtatatacctcagaagtagtttctagactccagaaaattacttcctacttgttaacacttaaaatgaataagattttctcacttgtattacttttatatctctcttagctttgaaagtctatggggaaggcaactttactctccatttaagttggacacagtaaacaatggagggatataaagaatttaaatggaggaggatgggttgcctgagaagtcagacttgtgtatggaattgcaactgactgacaggcatggaagtgaggtgtggcagtggcatgagctctttttggagatttataaggattctgctgtagcatcttcctccgtggatgggatctatttctatgtcctttgatagcagcactagcttggacattcagagggaga

SEQ ID NO: 890817 - DNA, 638 bp, Homo sapiens
gggtggaaaattgagcagaaataacctagggaaatgcctgggaaagaatctgttcttcctcatccatttcctggaggtgggcagaagggtattataggggagaggtctcagtttcctggcatagcctcagaaaagctcaggagatgtgatttgccattgggcaaaaactgcgaaggcctcagaatgtggctgatcctgaaattctcttgtcctatacatttctgtccagataaaggtgaacctgggatgtatatacctcagaagtagtttctagactccagaaaattacttcctacttgttaacacttaaaatgaataagattttctcacttgtattacttttatatctctcttagctttgaaagtctatggggaaggcaactttactctccatttaagttggacacagtaaacaatggagggatataaagaatttaaatggaggaggatgggttgcytgagaagtcagacttgtgtatggaattgcaactgactgacaggcatggaagtgaggtgtggcagtggcatgagctctttttggagatttataaggattctgctgtagcatcttcctccgtggatgggatctatttctatgtcctttgatagcagcactagcttggacattcagagggaga

SEQ ID NO: 890818 - DNA, 652 bp, Homo sapiens
gtgccaccacgcccagctaatttttgtattcttagtagatactgggtttcaccatgctggccaggatggtctcgatctcctgacctcatgatccacccactcggcctcccaaagtgcagggattacaggcatgagccaccgcacctggccccatgctaaacttaactccatgctcttccccctggatgcaactctactggcagaagggtttatgaacaagyatacgccttcccctgtgtggagatttaagtggggagggagtgagggagtctaaagttccagagcaaattttcagagacacaaacaattggggcatgggtttagatgtaaaagaactaaaaacaaaagaacaaatgtatgagagctatatatttacaaggagaggcttttggtgggaagagatcctgtcattctcagccttgggatttgtttagtaagagagacgggcattttccagattgtagaggcctattctgagccaccttttatacttaactactgagcctgggcaagatgcttgcagtcttagggcatatggttttgtgacacgacttgtggtggctttgttcataggtcagtggttgtttctatagaggcaggactgtacccatgaatgtcaataagcaaaaggcacaagaaacttgtgagggcc

SEQ ID NO: 890819 - DNA, 607 bp, Homo sapiens
ccattgtactgtttatggccatttgagtagtatcaagtttttgcattattacaatgatattatggatattgtgaacattttggtatatataagcacacacttatacagaaattgaatgttgggtcacagggtagtatatatgcatgtcagctttagtagatgatgccaaaaagttttccaaagtggttgaaccaatttacattcagcctagttctcattgctccacttaaatttagccattgctatcggtgtgtagtagtagctcatgattttattttgtatttctcttattattaatgaggttgaccatatttttacagattttttgtctttggattttcttttattgtaaagtgctcaagtcttgtggtgatttttctgttatttgtcttttctttatawatctgtagttctttatgacttgtagttttggattatgtaatgtaaatattttctctcaccctgaggccctgctttgcactttcttccttgtgtctttggataaacagaagttcttaatttcaatgtagtcaaacttaccaatcttttcatttatctttgctgttttgtttaagaaattttctctactctaacttataaagataca

SEQ ID NO: 890820 - DNA, 662 bp, Homo sapiens
tataactgaagtttatgcatatatatggatcagtttctgaattatctatgattacattgtttcatttatcattgtggctgtatcaccctttttatagcttcaaaatatattttattctgaaatcttttgtctttctcttttttttcaaaaatgtcttgctattctttgccctttgcatttgtatatgcataccaattttaaaattaactgttaaattccataaaatataaacaaataaaatctttctaggattaagattgagatttcattaaattaatacagcaatttgggaaaaattgaggttattatcatattaaacctttaactgctattatcatattaaaacctttaactgctaaatatgayatatttctctattttctaggtctcctttaattttttctaatgcttttataattacctttgtagaagcctaaaatgtctcttcttttccttattcttaggcatgctatcaaaaataatatatatatagtgcatttcatttttgttgatgtgataaagacacttactgatttttatatactaattgtttttattcagcaatttttctaaacttttgtgttaattccaacaatttatctatatattcttttggatttgctacatttgcattcatattatttgtgaataatacttgttct

SEQ ID NO: 890821 - DNA, 557 bp, Homo sapiens
cagtcttcttttgagccctccacactcttctaacctctgtcagttaccattagctgcttccaaatttccaggtatctttatagcaatgccccacttctcggtaccaattttctgtattagtccattcttgcattgctataaagaaatacttgatactgagtaatttataaagaaaagagatttaattggctcatggttctgcaggctgtacaggaagcatagcagcttctgcttctggggaggtctcgggaaactttcagtcatggaggaaggtgaagggaaagcaggcatattgtacttggccagagcaggaacaagaaaaagaggcagggaaggtgccaccacttttaaacaaccatatctcatgagaacttaytcactatatagtaccaaggggatattactgaaccattcataagcattttgtcccattatccgatcacctcccactaggccccacctccaacactagggattacaatccgacatgagattttgtggggacacagatctaaatcatatcagtcttgagttattggcttcatcacccttgctgc

SEQ ID NO: 890822 - DNA, 557 bp, Homo sapiens
cagtcttcttttgagccctccacactcttctaacctctgtcagttaccattagctgcttccaaatttccaggtatctttatagcaatgccccacttctcggtaccaattttctgtattagtccattcttgcattgctataaagaaatacttgatactgagtaatttataaagaaaagagatttaattggctcatggttctgcaggctgtacaggaagcatagcagcttctgcttctggggaggtctcgggaaactttcagtcatggaggaaggtgaagggaaagcaggcatattgtacttggccagagcaggaacaagaaaaagaggcagggaaggtgccaccacttttaaacaaccatatctcatgagaacttactcactatatagtaccaaggggatattactgaaccattcataagcatttygtcccattatccgatcacctcccactaggccccacctccaacactagggattacaatccgacatgagattttgtggggacacagatctaaatcatatcagtcttgagttattggcttcatcacccttgctgc

SEQ ID NO: 890823 - DNA, 672 bp, Homo sapiens
agtttcctcaactataaatgggggaataacccataaaataattatagagatttaataaatatttgtaagttgcctagcccctgacatataagtagcacaatataagtggttattacataaactatgcacaattattactcatacttcaaattcagtataagaagtttcaaaaagctgagaaatgaggatctctaatcaaataacttycagagacagcaatcagaattttaaccacaatgcctctttgcttaaccattgtataattccctctcctgacaaaggtagttcaccaatggtaatgacatagctgactgtgggcttgggtttgatatttaatttgcccagaaataatttagtatgctgtacaaactacatagaataaagttcatcagaaaaaaataaataatctagaatggatataattattgtaaatattaaaatttttatattgaaatgattctatacacataggaaattgcaaaataatgtacagagaggccctgtgtaagcttaactcagcatctttctatgagaacatcttgaataacagtacagctatatcaaaaccaaaaaattggtattgttaccatccacaaattttcttcaaatttttcacgtttttaaaacttgtgtgtgtgtgtgtaagtttgcatgtgtgtgtatgtgtagttt

SEQ ID NO: 890824 - DNA, 435 bp, Homo sapiens
gagccctccaactgttccaacttctggctgttacccaattccaaagttgcttccacattttgagtatctttacagcaacaccccactctcagtggtaccaatttattgtattagtccattctcacactgctataagacatacccgagactggattatttataaaggaaagagatttaactgactcacagttctgcagggctggggaggcctcaggaaacttacagtcgtggtggaaggggaagcaaacayatccttcttcacaaggtgtcaggagagagaagaatgagagctgggcaaattgggagccccttataaaatcatcagatcttgtgagaacttactagtatgagaatggcatagaggaactgccccatgattcaatttcctcacaccaggtccctcccacgacacatagggattatgggaattacaat

SEQ ID NO: 890825 - DNA, 510 bp, Homo sapiens
tgccatggtaagggatttatacttttgtcatcaagtcaatggggagccacagaaggattttcagaaggatcagatttgcattttagagggatcttcacattcttgttaaacgctcagttgtgattatataaatgataatctctttgctgaacctaaattcatggatttgcaaaagattaaagttaattagagaaaggacccatggaatagcctcattagcctaaaaatttacctgtcacatttctgtcatgtttgactaaatgctaaaggactggacattaagctccaagaactattaaaaatcagtaaacttccatacgattcctagggtaagctacatgatctacaccaaacttctgcatattttawcttctttcagtacttctaaaatatcaagctgtgagtcccttcacaaaaatcgacgttatgggactatcatagggtggaagaggacataaatgttggctaaaccaaagttggtagataaaaagtaagttttatggtgggtct

SEQ ID NO: 890826 - DNA, 636 bp, Homo sapiens
cagtttgagtgcaatccaagttctggcatttcagggttgtactctaattttcatcagaatttcccaggctatgcatgctctttacatagaaggggcagctctcaagtgaagccgtaagaacaatggattataggaaagttgcaaaacaaaacagccacagcatcaaacatccttagatccagacctaccagaattgagtctcaggcaagtcattttaatacaagcctcttttgagtacatttaatatctctgagcctcagtttcaccctctaaaaatgaatataaaaatgcctaacttawaaggtttttagaaaaactacattagaaagtgtatgtagtgccaaacacatagtaggtcttcaggacatagtagttgctgctgcatctatagttgttgtagacatatctaaggaaaatattaccccttatcacacccttagaatctctgtgaaggaagaaactttattttgttcaccaggaatgagtgaaattctaagacttaatgagttttctcaagttctctgttagaaagtggaaaagtgcttatgaatgaaagtaaaaggaaatatgaattctgtgctagtgttactgggtagactgccagtaaaacactctcttagtaaaagaagacacaag

SEQ ID NO: 890827 - DNA, 626 bp, Homo sapiens
aacagagattttggaagccagaaggaagtgggtctatatatttatagtgctcaaaatatatgacatcaaaggcataggcaagaacaacaacaaaaaaaataggcatattgaactttattaaaatttttaaaactgtgcttcaaaagatagtatcaacaaaagcaactcttacaacagtagaaaatattctcaaatcatgtatctgataaggaattaatttccagaatatataatcaattcttaaaactcaacaatataaaaacccacaatttaaaaaagggtaaaggatttgaatagacacttctccaaataagatataccaattgtcgataagcacatgaaaagatgttcaaagtaactaattatcaagaaaatgcaaaaaaatattagaaccacgacaatatcttagctctactagtattattaaaatcagtaaggcttacaatatcaagacttgaagaggatttagaacagcyagacagctaacatggtgaaaccctgtctttactaaaaacacaaaaagtagccaggtggggtggtaagtgcctgtagtcccagctacttgggaggctgaggcaggagaattgcttgaacctgggaggcgggggctacagtaagctaagatc

SEQ ID NO: 890828 - DNA, 639 bp, Homo sapiens
catagctaaataaaaggcagcagaaacttctgcagacttcaacgtccctgtctgacagctttgaagagagtagtgcttctcccagcatggagttggagatctgagaatggacagactgcctcctcaagtgggtccctgacccccaagtagcctaaatgggagacacttcccattaggggctgactgacacctcatacagatgggtgcccctctsagatgtaacttccagaggaaggatcaggcagcaacatttgctgttctgcaatgtttgcggttctgcagcctctgctggtgatacccaggaaaacagggtctggagtggacctccagcaaactccaacagacctgcagctgagggtcctgactgttagaaggaaaactaacaaacagaaaagacatccacaccaaaaccccacatgtacatcaccatcaccaaagaccaaaggtaaataaaaccacaaggatggggagaaaccagagcagaaaagctgaaaattctaaaaatcagagtgcctcttctcctccaaaggaacatagcctctcgccagcaacaaagctggacagggaatgactttgatgagttgagacaagaaggcttcagacgatcagtaataacaaacttctccgagctaaaggagg

SEQ ID NO: 890829 - DNA, 720 bp, Homo sapiens
tgtgtgtcaggtgagacacaaagaggaggtaaaaccaacatgcataaaacaaaataaatttattactcacaggtcctgaagaggttgggtgtgccggctggaacccagtgggaagtctggagggagaaaggagctcaatcagccagtggagakcaagtgagagagagagaggactatgcctttataacagtctgcaggtgtcattccttaggctttcctttaggggtgtggattggctagcttaaataaaacactaatgaagggggaaacccacttatacgactctggtgttgagcattaggttttatcatggtcagcagctgtgcaatgttttagttttgggttggtgacaagtgagctacatctcaaacaatcatatgggaaggggccaaaggagatggagtatgaccgggtttcaaataactttatgtcaggcctagaaatggatgtcaaagcagcaactatattaaacacatttctgtcagacgtctatgtctctgattcctggaatgtgctctgtgctcttgtgagcctagtgacttactgtggtggatgtcatattaaaacattttacattctatactaccattgtcattattttgcttacctggagcccatcacagtatcagatttgctcctactacagttcatatgatgattttgcttccccagtgagtttctctttattcctttgaactagatgtcctcatcaccccagga

SEQ ID NO: 890830 - DNA, 638 bp, Homo sapiens
aattttaggtagtactctattttctcccctgaaatctgagttttctttttcttttagcctttcttacacctaatttctccagcatctcaatgatttcttatttattacatatgaatttctcccctctatcttcttttagaatactgagttcaatttttataaatattgacttccaattccccaaaggtaccatgaaaaaaatacatttagtagtctaatgatcaaatatttwattgatataacaatttacagggaatattaattatattagttaaaatgtgttcactgtgtgattcctattgataaataatcaaagaatatgagtgagaatcatccaagtaattacaatccagatgaaaactcttagttttcagttgaacataaaatcatttgattactcattttgtttatgtgaaagatctatggccatctattttgaagattgtaactttaattaaagaggcaaataattgacatagtatttctgaaagcttttaaagtttgttacttacaaaataatttaatttgcattcacatttaatttgtccccaaaaccaaacttttattactgttatactgacctcttctggatacttcctataatgtcagccatatactatgatagctcaagtttttta

SEQ ID NO: 890831 - DNA, 664 bp, Homo sapiens
gcccaggctagagtgcagcagcacaatctcggctcatggcaacctccacctcccgggttcaagcaattctcctgcctcagcttcctgagtagctgggattacaggcgcccaccatgcccagctaatttttgtgtttttagtagcgacccggtttcaccattttgaccaggctggtctcaaactcctgacctcgtgatccacctgccttggcctcccaaagtgctgggattacaggcatgagccaccgcgcccagccagaaaaatgatattcttaatatrtgtatactaatactaaaactaggaaactagaatgatactccaaaaatgctagcagtgcttgaattaggttaatcaatgttgcaatttgttttcatatctctattttcaacatgctctataataagatcaagttatttatatgatttataaaataagtgtgcttatatattacatatgaaaattaagttctcaaagtaatggaatcaaaattccatatttttccatatgtatatacccatatatatacatacatatttagttagctagttagtatgttaagattttcttactagaatagtagaaatgcatgcaacattttctatattaacaaacagaataaataacctaattttaatgctatcattgatattgtcattttaatttt

SEQ ID NO: 890832 - DNA, 608 bp, Homo sapiens
taagtaaatatgctataatacattgtctagaaaaaaaacacctttagatctaggcattatttcttaaatttaatctttcctgctttttttaaaggtaatttctttctagactacaatcaatggaagtacaataatgccttttattagtcttatcaggttagcataatcacagaataactcttattttattcctactaatccgacacttgactgacttctcactacttttaatcaaaccgttggtaataccagaaaactagcactcagaaaaacagcagaaayacctgtttatatttgtatcacaccttacaaattctaaagaacttcatacccaatctactttgcaattaaaagaaataaaattaaactagcaaagcacttttacatattatattttattattgaaataatcttgtgtaatatgttcttagtaccttcgttttgcagaagaaaattgaaactaaaaactgaagagcattgaaagcttatataaacgatttttatgagtcaatcattagcatattgaagaggagaaatgggattatagcataaaattaaaatttactctggagtatcttacagttggaaaacttctaggtttcagacaa

SEQ ID NO: 890833 - DNA, 531 bp, Homo sapiens
cataaatgcagatagataaaagacagagtttggaaaagttatgtcaggagaataaaccaaacaataaaaaatgtgcaggtctatattaatgtctgataaagtagactttaagacaagaattatcactgtaaataagagagacattctattaaaataataaagtccgtctggaacggtggctcacgcttgtaatcccagcactttgggaggctgaggtgggtggttcacaaggtcaggagtttgagatcagcctggccaacatggtgtactaaaaatacaaaacttagccgggcatggtggcaggtgcctgtaatgccagctacttgggaggctgaggcaggaggctctgcctctaaataaataagtaaataaataaataartagtcataaagaattttattttttattacttcttttatttatttatttatttatttatttatttatttatttacttatttttgagacaggatctcacactgtctcccaggctgcatggctcactgcagcctcgacctcctgggctcaagt

SEQ ID NO: 890834 - DNA, 582 bp, Homo sapiens
gccttgtggaatagtgtcaaaaggattggtaccaattcttctttgaatgtctggtagaattctgctgtgaatccgtctggtcctgagcttttgtttcttggtaactttttcaattaccatttcaatctcactgcttgttattggtctgttcaggatgtctaattcttcctgatttaagctaggagggttgtatttttctaggaatttatccaccttttctaggtttcctagtttatgtgcataaaggtgctcacagtagccttgaatgatcttttgtatttcagtggtgtcaactgtaattttctctctgcttttcttggttaatcttgctaatgatctatcaattttatttatctcttcaaagaaccagctttttgtttcatttatcttttgtatttttttttgtttcaatttcatttagttctgctctgatcttggttatgtccyttcttctgctgggtttgggttcggtttgttcctgtttctctggttccttgaggtgtgaccttagaatgtcagtttgtgctcgttcagtctttttgatgtagggatttagggctatgaactttcctcttagcaccg

SEQ ID NO: 890835 - DNA, 610 bp, Homo sapiens
cttttgtgaagtacctcttaatgttctctgctcattttaaaaatattattaatttgtaaaatttccttttatatcttcgatgtaagatgttttattctatgtgcattgaaaatatctcctttaattatatgggttatattttcatttttaaatggtatctcctggtgaacaaaattacaagtttttaatttaattcagtgtttaaaaatgttgctttatgattggcagtttttgcctcatgtttgctaaaactttgtattttccagaatcacagagatgtttttacgtatctcttagatacaaatatattagtgttttgacatttatatttaaatctgcaatccattgagtttgaattttgtatatggtttagggacyaatatatatttttttcaatgttacccggagttatttaccaaaaagactataggttcacccattgaactgttgtgtcatctttgttatgaatagatgacggtatatagtttctattctattgccttagtttatttaactatgctttcagtaatacagttaattagcacgatttttaacagactgtcttatctggcaatgcaaattcttgagcatagtttttcttctttaaatt

SEQ ID NO: 890836 - DNA, 623 bp, Homo sapiens
cataataaatgtaatgaccatagctagctgaaattttaattcttatttaattgaaaatccatgaaaaatgaaactactccatgttatgcactattcctatttgtaaggtgattatatctcacacgcaaagttccttctttgatttcaatttgatagttatgccttctgtgatatttataagcaattaacatcttgaatatatggttaaatattttaaaataataaaaataactgatcttgaaataaatttagaaatgtttccctgatcaatattgctgagtcttcaaatatattattgggttgtcctttaatggcttcagaaamtactagactttttcctcattagaatttaggattgcagaagttgtgtaaataaacacttttcagttacccaaaacagtgaggcataaatatgaacaaagggatggcgtattaagtctcatgaatactagaacctaaatatctgatttgccccctaaataaccatatgaccatgatacaatgaaaacattagggaaagatttaatttgttattacatttgtgaactattgttgattagttctatttaacacatgatttagtgatttttgtgtctattaaatgtaaaactttattgtttatt

SEQ ID NO: 890837 - DNA, 522 bp, Homo sapiens
tgtccttgaggagctaatgtcctagaggggggatatatatatatataaacattacacagttattctacacatatataaacattacatagttatactgcacatgtataaacattacatatataaatgtatattacatatataatatatataaaaacatatctatctacacacacataaagatatttgtgtatagatatacacaaatatggtggaactcagtggctcatgcctgtaatcccagcactttgggaggccaaggtgggaggatygcttgaggccaggggttcaagaccagcctgggaacacagcaagacttgtctctacaaaaaattgtaaaaattagccgagcatggtggtgcatgcctgtacttccacctacttgaaaggctgatgtgggaggattgcttgagcccgggagttcagggttacagtgagctatgattgtgccactacactgcagcctgggtgacagagtgaaacattgtctcttaaaaaaaacaaaaaactaaatatattatgaac

SEQ ID NO: 890838 - DNA, 557 bp, Homo sapiens
atgctattcattcaccccagcagtcattcaacagatgatttctgaatacttacgtgccaggtgttgtgcgaggcaggtgggtacacaggagaacaagggaatgttcctgccctcctggagcttacagtcttgtttgggagtggaatccatatcagtggmatacatacattaaacaaatttttattttttatttttgtattttttgagacagagtctctgtttcctaggctggagtgcagtggtgcgatcttggctcactgcaacctctgcctcccagtttgagcaattcttgtgcctcagtctcccgagtagctgggattacaggtgtgcgacaccatgcctggctaatttttgtattttattattattattattatttttgagacggagtcttgctctgtcgcccaggctggagtgcagtggcatgatctcggctcactgcaagctccgcctcctgggttcacgccatgctcctgcctcagcctcccaagtagctgggactacaggcacccgctaccatgcccggctaattttttgtatttttagtagagacggga

SEQ ID NO: 890839 - DNA, 476 bp, Homo sapiens
tgtaatccaaattacaaatctgtgtttaaccagatgacaactaaggtcaagatctgaatcttctaacagcttgatccagacctttagtgagaccctgccagcctttgagacttccctcagcatctgagttgacacagagaagtattaaatatcctggacygtgtctgagagtctgctcctaaataaggctcatttcttttaaaaccatggattaatttcattaagcatgcaagagttctttagaaactttcttgtgtgggctgtagctcattttcattactgtgtttttctccccccgaccactgcatcacttaggacaattcattagaaaatccaacagaatttatttgaagtaaccaattaatcctttgagatgcaacaattaatatgcaaattgtatcacattaagaatctcaggaggaatgaattaaattgaaaaatacaacccttcagaaattaaaaaagatattgttttt

SEQ ID NO: 890840 - DNA, 655 bp, Homo sapiens
cataattctcatgtgttgtgggagggacctggtaggaggtaatttgaatcatggggacagtttcccccatactgttcttgtggtagtaaataagtctcacgaggtctgatggttatatcaggggtttccacttttgcatcctcctcattttctcttgccaccgtcatgtaagaagtgcctttcacctcccgccatgattctgaggtctccccagccaaggagaactgtaagtccaattaaatctctytttcttcccagtctcaggtatgtctttatcagcagtgtgaaaacggactaatacactatcattaaaaaccaagacaaagcccatttgctttgtttttagtactgaacaggaacagtcctgccatcaggagtctcactgacacgtgcttgggaaatgaattatcgtttctttcttcttctagctggggattcatgggcctcactatatgcaactaagctgtgtatccatggcctcactataagtaactaaaatgtacaggctcagagggccctgctttcaattcttttctgtaaatttacagaggaaagaagacagaattcttactctagctaactggaactagagctgagttaaaaaaaaaatgaattgtgacaaatgcaaactctaagtagcatggtactgtcagtg

SEQ ID NO: 890841 - DNA, 686 bp, Homo sapiens
tgtcttggacaattgttcttcatttgctaattcagtgtttgtaatgactttatagaatataactaccataaataataataatgaactctataaatattttatatataaccatctgtatctatattaaattaaacatgagttctttaccaggatcattctagtctactcccttgtttatctgtaaactcccattcctacagtgagaaaccaccattctttatttatttacttactttactttattatttgcttaattgttcaattcctgtccacatgtttagcagtatcagaactgatcattcatatcctcaggagaaataactttatcaactatagtacaatgcttatatacagcttatatgcttgtaaaccatatttcccttttaggtctctctgcctgtaacgggagcggctgctttggagacctctgacatgccctggatacatttccccrttgtcttggggattaacattcagctttttgttacttatgcaaatttttgcagccagctttagtctctcctcagaaactaagattttcttttctatcacattgtcaggctgcaaattttctgaacttttatgctctgcttcccttataaaactgaatgcctttaacagcacccaggtaacctcttgaatgctttgctggttagaaatttcttccaccagataccctaaatcat

SEQ ID NO: 890842 - DNA, 683 bp, Homo sapiens
cctctctgtagatgtgagctagcctttggcgtcaaccactccagagtttcaacagtcatggtggcagtgatggaggcaattggtaggccttaaagcatgagctccttctcacccagagttacctaactactgctgctaccraatgttcaatgtagcagcaacagaaaataatgctgatatcgtaccatcccttgaggaaaccaactagctccttagaggtaatttaatgacattataattcttatttcctataagatccaggattctaacctcacaggtattttgtacaaattggggatatgagttagccttctttgccctcatcgccttgcccaatccactgtttgtggggtaagactacctgaataccttcaaggagtccctcatatcatcacctgggactttgatgaaagaggttcaatatgggtgcatgattacggattcttcagtcctgtaatatactatatcacttgctgattgaatttctcaatagtctatttacaaatacagttaatatgacaacttgagaatgacagcttggggtgctgttcttcaaaatctgatatataattgaaccaatggacattatacatcactgtgttcctagttagccataaaacatggagaatcacagttatagaagtgagaagcccctctcatcgtcacccctagtgatgaactat

SEQ ID NO: 890843 - DNA, 683 bp, Homo sapiens
cctctctgtagatgtgagctagcctttggcgtcaaccactccagagtttcaacagtcatggtggcagtgatggaggcaattggtaggccttaaagcatgagctccttctcacccagagttacctaactactgctgctaccaaatgttcaatgtagcagcaacagaaaataatgctgatatcgtaccatcccttgaggaaaccaactagctccttagaggtaatttaatgacattataattcttatttcctataagatccaggattctaacctcacaggtattttgtacaaattggggatatgagttagccttctttgccctcatcgccttgcccaatccactgtttgtggggtaagactacctgaataccttcaaggagtccctcatatcatcacctgggactttgatgaaagaggttcaatatgggtgcatgattacggattcttcagtcctgtaatatactatatcacttgctgattgaatttctcaatagtctatttacaaatacagttaatatgacaacttgagaatgacagcttggggtgctrttcttcaaaatctgatatataattgaaccaatggacattatacatcactgtgttcctagttagccataaaacatggagaatcacagttatagaagtgagaagcccctctcatcgtcacccctagtgatgaactat

SEQ ID NO: 890844 - DNA, 646 bp, Homo sapiens
ctactgagtcatctacgttagaaacctagatagcaattttatatgtccttgttccttttatcatctgaatagtggctacattctggggaaaaaaaaaaaagcaatatatgttttttattctttgttaccactgttactggcctacttcagatttgtgttatttcttttaacctccctcttgaaagtatttaagttttatttgcataccatagttaaatttgttgtactattataatcaacttatattcaaacttgtcatttacacatcaayggtctccattaaaactggtagatcactgagggtagggcttttgacattttcattttttagcctctattatctaagacaatatatgagctgaatgaaattattttcagactcttatcttcagcattagctactattatgaacctttgaatgcaatgtaaaacctagtttaaatttattcactgtgttctacaaaagcaatttaattaacaatgggtatggtcccaataagtaccatgaaattttaaaaaactctagataatcggtactacagtcactattgaagttttatatatatatataagatatatacatattatatacataagatatatacatattatatatataagatatatacattttatatatataaaa

SEQ ID NO: 890845 - DNA, 650 bp, Homo sapiens
aagagctcagtcatgcaaagtatgggcttagtctggaagatgctgggttcccttcagaccactctggatgcagtcagccagaagctaaaatttggttctcaagactccttggggcaaaagttcaaatggcttattccttaagtcgttcctaggagtttctaggattgctttcagttgtaattaagggaactaaaattctgtaaaccaaatggaagaattcgtcaatgaagtgagacataattacctggtgagttcttaatttgtgcttcaatggcagagctgacatgcacagagttttgaagtcttgataagtggggtcagtaggaatgattaaaaggctaggactggaaactttccacttagtttctmttgtgcagtgacttacaaactagttacttccttagcaagaattaccttcaatagaaaccagaagagaattgtcaggagtaaagaatgaaagatctaaaccttctagtgactaacttatatcccatcaaaactactcatatgttcactttactgatacctagtaatcttggtgatgtagtaaaggattgtgtaaacaaatcagctaagagctcatatttcctgaactccttctttcctatgcttacaaagaaggaaaatttgcctttgatgttgtattggaa

SEQ ID NO: 890846 - DNA, 689 bp, Homo sapiens
aaccattctgactagtgtgagatagtatctcattgtggttttgattttcatttctctaatgaccagtgataatgaggtttttttcatatgtttgttggctgcataaatgtcttcttttgaaaagtgtctgttcatatccttatggggaaaggattcccygtttaataaatggtattgggaaaactggctagccatatgcagaaaactgaaactggaccccttccttataccttatacaaaaattaactcaagacagattaaagatttaaacataagacctaaaaccataaaaaccctagaagaaaacctaggcaataccattcaggacataagcataggcaaagacttcatgactaaaacacaaaagcaatggcaacaaaagccaaaattgacaaatgggatctaattaaactaaagagcttctgcacagcaaaagaaactatcatcagagtgaacaggcaacctacagaatgggagaaaaattttgtaatccatccatctgacaaagggtaatatccagaatctacaaggaacttaaataaattaacaagaaaaaaaaaacaggctttctttagcaatatacaattgctgctctgtatgctatgcacaaaacaagaccaaaggtgcttacccaggagaacttgcatgacagcgaaaacaaattttttggcaaaaaaagtatctttttt

SEQ ID NO: 890847 - DNA, 689 bp, Homo sapiens
aaccattctgactagtgtgagatagtatctcattgtggttttgattttcatttctctaatgaccagtgataatgaggtttttttcatatgtttgttggctgcataaatgtcttcttttgaaaagtgtctgttcatatccttatggggaaaggattccccgtttaataaatggtattgggaaaactggctagccatatgcagaaaactgaaactggaccccttccttayaccttatacaaaaattaactcaagacagattaaagatttaaacataagacctaaaaccataaaaaccctagaagaaaacctaggcaataccattcaggacataagcataggcaaagacttcatgactaaaacacaaaagcaatggcaacaaaagccaaaattgacaaatgggatctaattaaactaaagagcttctgcacagcaaaagaaactatcatcagagtgaacaggcaacctacagaatgggagaaaaattttgtaatccatccatctgacaaagggtaatatccagaatctacaaggaacttaaataaattaacaagaaaaaaaaaacaggctttctttagcaatatacaattgctgctctgtatgctatgcacaaaacaagaccaaaggtgcttacccaggagaacttgcatgacagcgaaaacaaattttttggcaaaaaaagtatctttttt

SEQ ID NO: 890848 - DNA, 616 bp, Homo sapiens
ataatgattttcatacataaaattatgttttattcagttcttgaactagggtgatggattggagagcacagagaatcccatttccagaaaatcaaagttgatacaaggagacttagtaactgaagagagaaacagaaataggagtcaaatattatgtgcaggtttctggtttgggtagttgaatccatgtgattttttgtttttttttktttgtttgtttgtttgttttgttttttgagacagagtctcgttctttcacccaggccggagtgcagtggtgctatcttggctcactgcaagctctgcctcccggattcacgccattctcctgcctcagcctcccgagtagctgggactacaggcgcccgccaccgtgcctggctaattttttgtatttttagcagagacagggtttcaccgtgttagccaggatagtcttgatctccagacctcgtgatccccccgcctcggcctcccaaagtgctgggattacaggcgtgagccaccgcgcccggcctgaatccatgtgatttttgtaagcaacgtaaggtggtagaagataagaaacacaggagttgaaaggttttgtttgggtgaagggtagtgtagaaaatga

SEQ ID NO: 890849 - DNA, 616 bp, Homo sapiens
ataatgattttcatacataaaattatgttttattcagttcttgaactagggtgatggattggagagcacagagaatcccatttccagaaaatcaaagttgatacaaggagacttagtaactgaagagagaaacagaaataggagtcaaatattatgtgcaggtttctggtttgggtagttgaatccatgtgattttttgtttttttttgtttgtttgtttgtttgttttgttttttgagacagagtctcgytctttcacccaggccggagtgcagtggtgctatcttggctcactgcaagctctgcctcccggattcacgccattctcctgcctcagcctcccgagtagctgggactacaggcgcccgccaccgtgcctggctaattttttgtatttttagcagagacagggtttcaccgtgttagccaggatagtcttgatctccagacctcgtgatccccccgcctcggcctcccaaagtgctgggattacaggcgtgagccaccgcgcccggcctgaatccatgtgatttttgtaagcaacgtaaggtggtagaagataagaaacacaggagttgaaaggttttgtttgggtgaagggtagtgtagaaaatga

SEQ ID NO: 890850 - DNA, 574 bp, Homo sapiens
atagtgaaataaggtgatgttagaaaggatgtttcattttttttggccgggcgcggtggctcacacctgtaatcccagcactttgggaggccaagacaggtggatcacgaggtcaggagttcaagaccagcctagccaagatgctgaaaccctgtctctactaaaaacacaaaaattaacccggcatcatggcacgtgcctgtaatcccagctactccagaggctaaggcaggagaattgcttgaacccgggcagcagaggttgcagtgagccaagattgcgccactgcaccccagcctgggtgactccagagcaagactacgtctcaaaaaataaaawaaaaataaataaataaataaatatgtatgtgtatatatatatataaaaagaaaagatgtttcattttaaaaaaaatgtggtttgctctgacttcatatatctgcatttttctttgtaaacaagcatattcgtatctcaaattttgttgtataacaatatttttgccccacaacactctcatatctgaatgaggtataatgaggtatatctgaaagctattgaaatgccttctcta

SEQ ID NO: 890851 - DNA, 574 bp, Homo sapiens
atagtgaaataaggtgatgttagaaaggatgtttcattttttttggccgggcgcggtggctcacacctgtaatcccagcactttgggaggccaagacaggtggatcacgaggtcaggagttcaagaccagcctagccaagatgctgaaaccctgtctctactaaaaacacaaaaattaacccggcatcatggcacgtgcctgtaatcccagctactccagaggctaaggcaggagaattgcttgaacccgggcagcagaggttgcagtgagccaagattgcgccactgcaccccagcctgggtgactccagagcaagactacgtctcaaaaaataaaatawaaataaataaataaataaatatgtatgtgtatatatatatataaaaagaaaagatgtttcattttaaaaaaaatgtggtttgctctgacttcatatatctgcatttttctttgtaaacaagcatattcgtatctcaaattttgttgtataacaatatttttgccccacaacactctcatatctgaatgaggtataatgaggtatatctgaaagctattgaaatgccttctcta

SEQ ID NO: 890852 - DNA, 605 bp, Homo sapiens
gtgctgatttcacagagttaatgattaggcaggtaaaatatatgttgaatgccattcatgtaagtctgttcataatgtattttataacatttctgtatacaagagcaaaaacaaaatggccatggcacaaataataattcatattaagtcaataaaaatagaaaacaagcgataatgttatatatattgtatatacatgctagcaatgaaaaaattatttactcatttcatgcaaattatttttatctaactcaagcattcatttgaaagtaggtgtgaacattattttctgtagctgtaagctgtaytaggatggtaatatgaagacacttcatttccaatatatagttgtcgaatctcaaagcattgtctggaaccaattatccatgctgctctagccttaaatatcagatatcatgattctgatacccttgatgtggaaaaatcttttgacaaaatgcaacatcttttcatgataaaaaccctcaacagactaagcatttaagggacatggctgaaaataataacagccatctatgacaaacccacagccaacatcatactgaatgggcaaaagttagaagcagtcaccttccgagaattag

SEQ ID NO: 890853 - DNA, 605 bp, Homo sapiens
gtgctgatttcacagagttaatgattaggcaggtaaaatatatgttgaatgccattcatgtaagtctgttcataatgtattttataacatttctgtatacaagagcaaaaacaaaatggccatggcacaaataataattcatattaagtcaataaaaatagaaaacaagcgataatgttatatatattgtatatacatgctagcaatgaaaaaattatttactcatttcatgcaaattatttttatctaactcaagcattcatttgaaagtaggtgtgaacattattttctgtagctgtaagctgtattaggatggtaatatgaagacacttcatttccaatatatagttgtcgaatctcaaarcattgtctggaaccaattatccatgctgctctagccttaaatatcagatatcatgattctgatacccttgatgtggaaaaatcttttgacaaaatgcaacatcttttcatgataaaaaccctcaacagactaagcatttaagggacatggctgaaaataataacagccatctatgacaaacccacagccaacatcatactgaatgggcaaaagttagaagcagtcaccttccgagaattag

SEQ ID NO: 890854 - DNA, 626 bp, Homo sapiens
tcaccacccacgctgtaccttagatactcagaacttgttcatcttataactgaaaggttataccgtttgactaatatctttctatttcccccatttcccagtgggggacatatcttgacaatgtcactatgtttccacatcttggcaacatcactattacttcaatgaaaatgagaggtgcagggggtgcagatatttctctgatacatttatttcgcttcccttgactgggtatccaaaagtgagactgctagaacatacrgcacttctatttttaatgtaagaaaaatcttccttactgttttcataatggctatgccaatatacattctcaccaagggtgtacagggttccctattctctattcaagcctttgctcattttttaattggagtgtgtgtgtgtgtgtgtgtgtgtgtctgtgtgtttgctattgagttgtgggagttccttacatattttgaatattaacacattatcagatatacaatttgcaagttttttacccgttccataagctgcctttttattttgtgtattttttccctttgcttgcaaaagctttttagtttgatgtggtctcagttcatttttccttttgttccatgtgcttttgatgtaacatc

SEQ ID NO: 890855 - DNA, 616 bp, Homo sapiens
gggaggactgcttgaggccaggagttcaagaccagcctgggcaacatagtgagacccccatctctacaaagaaattaaacaactagccagatgtggtggcatgcacctgtagtcccagatactcagggagctgaggcaggaggatcacctgagcacaggaggtcaaggctgcagtcaaccatgattgtggcattgcactgcagcctgggtgacagagcaggaccctgtctcaaaaaaagaaaaggaaagaaaagaaacccaaatcttataaaatggccctacccctatctcccttcgctgactctcttttcggactcagcccgcctgcacccaggtgaaataaacagccttgttgctcmccaaaaaaaaaaaaaaaaaaaaaaaagagaggtttaaaataaaatagatcaatgaaacaaagagttgtttttttgaaaagataaacaaaattgagatgcctttagctggcctaagaaaaaacagagaagattcaagtaaaattagataccaaaaaaagagacactacaactgatgctacagaaataaaaagcatcacaagacagtatcaggaacaattctatgccagaaaacccagataacctataaaaaatggata

SEQ ID NO: 890856 - DNA, 562 bp, Homo sapiens
  misc_feature 1, 2, 3, 4, 5, 6, 7, 8, 9, 10: n = A,T,C or G
nnnnnnnnnncaattttgcctaggaagtatgagaagaaagcagagatgctattactgcacctagagtgaaatcttcctcttggcctttagtgtcttgttggcactgactccaggtgaaagctcagtttcctcaatcccccttacccccagcacagtcactagctttcagaaggccaaatcttaactacttcaggtaagctaggccccttatctcccttttatctctcctgacctccctttcctttctgcctttcttccttcctctctccctsctttcttctctcctgctatcatgttaatgttgtacttcccaaattcaaatgttggaacctaatctccagtgtgacagtattaggtggtgaggcctttgggaagtgattaaatcatgaaggctccagtttcatgaatgggattagtgaccttataaaagaggccccaaagacatccctcacccctttcaccatgtgaggacacagcaagaagatgctgttaataaactagaaagtgggccctcaccggacaccaaatctgctggcaccttgatcttggactttccagcccc

SEQ ID NO: 890857 - DNA, 594 bp, Homo sapiens
caaaatggccattttaagaaacaacgaaattgatctgatagagctgaaaaactccaagaatttcagaatacaattgcaagtattaacagcaagaacagatcaagctgaggaacaaatctcagagctcgaagactggttctacaaaataactcagacaacaaccaccacaacaaaaagtaaacacaagaatgaacgaaagctctgagaaatatggtattatgtagacaccaaatctatgaatcattggtgtccctgggagagaggaagaaatagcaagcaatgtgggcaacatacttaaggatatcattcaagaaaatttacccaacattgctacagaggccaacattcaaattcagaaaatgcagagaaccyttcaagatactatacaagatgaccatccccaagacacatagattttccaaggtcaaaattaaagaaaacatattaaaggcatccaaagagaagggacaggtcacttacaaagggaaccccgttaggaaaacaaaggacatttcagcaaaaaccctataagtcagaagagaattagtgcctatatacagcatctttaatgaaaagaaatttcaatcaagaata

SEQ ID NO: 890858 - DNA, 635 bp, Homo sapiens
tatgagcataaccacaataatagtaattataatttattgagcttttatttgactgtgctctgcgactgcatatattagttttacaaggtatgtattataccccctttacagttgagtaaacaggatcaaaaccaagatccaactgtctctaatgcccatttccttaaatatatgtatgtcaagtaagatgtwagaaaatattcagtgatagagtatctttattgttggttgagatattggcacatatctgtgactgtaaaccgaactcagagacagactcgatgcatgaccggagcccctttctttgtccctagagaatcttgacctggatagaggattctgaaagtatcaccagtataaagtcaagaaggaacttccagtgaaatataattttcatatgacacagtttgaatttagatttcctactttagaaaacaatctgaccagatttgtgtcaggtaaatgaagagtttctgaaggcttgattgtttgtcttctctgaaatctagattaacaagacacataacaatttaaaaacccagacataatcaaaagacaaagcactttccattttaacttgaggatggaaattgtgtttgggtagatttacaacacatcatcttgtgtggttatta

SEQ ID NO: 890859 - DNA, 620 bp, Homo sapiens
gtgccaaggcccaaggaaaagaacagagcagttgtggatggactctcctggctgtggctgccgtatgctcctttctgtcctaatcaaagtttcccctccacactccacacaattagcacataaatgaacaatgtcaagaataaaagaaagtcatcactgcagatctacataaaattatagcatgatgacatgcatagctttatgttaatgactttaactaaaatgaaacggatattaaactscatctgcattatgatttctcttatataaaaagtgtgcatatatatttatgtgcacatatatatttattcaattatttatgactgaattgttctcaatgattctaaaaaatggctatgtcaatttacatgctcggaagcaatgtatgtgagtactcttgtctcctccctccaacttcagaaataatcttgggaagcatacactttgcctcaccatttaaacttccaagattgtctcctaatggaccatttgcagatgatgatgatgatgatgatgtgtgtgtgtgtgtgtgtatagaggtagagcgcacgagagatgagagagtgagttcaggtgtcagagttagcatgtgctgggaggataggaccacaggaaatcgt

SEQ ID NO: 890860 - DNA, 614 bp, Homo sapiens
attttcagtgactgggactggctttccggtaagtttgaattagtaagtctgaattaatatcaatttacttttgagtacctcctgagtgattaggacacagaatgtggagtgagactgaccaaagacaaatcatcgtttcactatatacaagctcggtgaccacttagccaagtgacctctgtgcttcaactgtcctcatctgtaaaattggaataataatagcacaaatgtcataaagttatgacaattaaatgtgctaaccttttaaagtacctggaacattttaatcattatactttttatcaacataataattaaaacagacttaattggtttgctttaatttcctttaagcctgcattaaatcaacagtacttaatctgtaccaaataccatgcctaggttcttgcagcactccctatrttatgactgtggttatagttttatgaaggacctattttactgttatgtgttaatttgttatgtattaaatttaatgtgttagtagaaaacagcatattaaatgatcacaataaaaagggatggggtagctaaaggcgaagttcatgtgctgtgaaggccacctggaggcaccaccttcactgtggagccca

SEQ ID NO: 890861 - DNA, 619 bp, Homo sapiens
ccctggaaaaagcctggtggtcgcagcattctgaaagagcaccgtgcacctggctcaccctctctgagcaacagaagtttgattgctacactctggtggggcccattggatctagaatgatccataacactatctggaggagtttctctcctcargaaactataaaaatgttataaggactaattgaaagtaactgaatgcacatcaacaaatgagtctaaagtagaattggttatatctagttaagcataaaataaatactgaacatttgattcttttatattaacttcaaattctcccttatgaggtaagtgggaaaaaatctgtaactgcacaggcctaagaggttatgtctgttctggtacaatctggatttcccttttcttgcattattgaggcttggccaatcgtcttcaagtgacctatgctgctcttgctccatacgagtctgtgctgggagggagtcatctattcatcagtgactttcttaccttacacatgaccattttttagcctctgtctgaaatcacttttatcatttgaacgtcaaggtctttaacaacgaaaatgataataagatttttctttcttacaatatactctgcaaaatgcctcctgt

SEQ ID NO: 890862 - DNA, 625 bp, Homo sapiens
gaaggggcattctggtttttgagtttctgtgtttttgcattgattgtttctcatctttatgggcctatctaccttagatttttgaggttgctgacctttgaatagggtttttgaggggtcttttttgttggtggtgttgttttctgtttgtttttcttttaacagtcaggccattctcctgtagcactgctgcagtttgctgggggtccactccagaccctagttgccttggtttttctgtacccagaggtatcaccagtgaaggctgtgaaacagcaaagatggcaggctgctccttcctctggaagctctgtcctaggagggcattgacctgttgctgttctgcacacacctgtaggaggtggctggagacccctgttgggagatctcacccagtcaggaggaatgggatcagggacccrcccaaagaagcagtctggctgccctttggtagagcaggtatgctgcattaggggggtaccattcctcattcagatcatttgtatactacaaagccagcaggctggaacagctaagtctaccaaactgcagagatggtggccgcctctccccctgggagctttgtagtagggagagatcagagctctctctgtagaacccttgc

SEQ ID NO: 890863 - DNA, 613 bp, Homo sapiens
ccaccacactcagctaatttattttttgtttttaattttttgtagagatggggtcttgttatggtgcccaggctggtctcgagctcctggccttaagcattcctcctgccttggcctcccagagtggcaggattacaggcatgagccactgtgcctggcyttaacataattttgaaataaaaaacatataatccctgagaaaaccaaataaatctaagtgtgtattgagctggttagcataacccacagagaggaacagacaggaactcagccaactggctttaaaacacagggatttgattgtatatccctatcggcgtgtatcataaaggtacccaaagtgcagaaaacactgtaggctgtttttaaattatcattactggtgttggtattctgagattcttacgtgtattgtgagatagaataaacaacgaattatatttataggaggaaggaaacattgacatttgaacaataaaattaggaaaaattcttgcattcttgaatttgagttggacatacaatatgaactcaaagcattttagtattttttagaaacatggtctacctctgtccacagagaagggccagaaactatggccggcccagtaac

SEQ ID NO: 890864 - DNA, 748 bp, Homo sapiens
gcttcatttaaatattggtaaatgcttagcataagctaggggtcagcaaactataacccagggtctggccctactgcttgtttttataaataaagtatcactggaaaacaggcatgcccattcatagacttcttgtctatagctacattcacaatacgatggcaaaattgcgtagtagttgccccagaaaccgtatagcccccaaaaccaaaaatactgactatctgacctttttcagaaaacatttgctgacccttggataagccataactttttcttttcaataaggttatcttcattccggaacagagaaaaatatctcttaaaagacaaaataatctcttytgaatgggcttaggttaaatatatctctaaaggtatgtgcattattctgcataataaaatcagttctccacatttacttcctctctgatggaagtcgtctattctaccatattggagcaagggcaaagtcatgaaggcattcagtctttgtatactgtaaattaaattggactctacaatagcttttgtttgaagaatgtttaaagacaccatcatagcttgttctcatggtcatgcgtttttcttcagaaataagtagaagttttattgaatcattttcattgattaagaaatcatctgaagattgtggagaggccacgatgatttttaattgggttttttttttttatttcacacagtcttcatgatgagggaatgtaaaaagaattatactctagctctc

SEQ ID NO: 890865 - DNA, 748 bp, Homo sapiens
gcttcatttaaatattggtaaatgcttagcataagctaggggtcagcaaactataacccagggtctggccctactgcttgtttttataaataaagtatcactggaaaacaggcatgcccattcatagacttcttgtctatagctacattcacaatacgatggcaaaattgcgtagtagttgccccagaaaccgtatagcccccaaaaccaaaaatactgactatctgacctttttcagaaaacatttgctgacccttggataagccataactttttcttttcaataaggttatcttcattccggaacagagaaaaatatctcttaaaagacaaaataatctcttctgaatgggcttaggttaaatatatctctaaaggtatgtgcattattctgcataataaaatcagttctccacatttacttcctctctgatggaagtcgkctattctaccatattggagcaagggcaaagtcatgaaggcattcagtctttgtatactgtaaattaaattggactctacaatagcttttgtttgaagaatgtttaaagacaccatcatagcttgttctcatggtcatgcgtttttcttcagaaataagtagaagttttattgaatcattttcattgattaagaaatcatctgaagattgtggagaggccacgatgatttttaattgggttttttttttttatttcacacagtcttcatgatgagggaatgtaaaaagaattatactctagctctc

SEQ ID NO: 890866 - DNA, 592 bp, Homo sapiens
ctcagaaataacaccacacatctacaaccatctgctctttgacaaacctgacaaaaacaaaaaatgggaaaaagattccctatttaataaatgatgctgggaaaactggctagctatatgtagaaagctgaaactggatcccttcctcacaccttatacaaaaattaattcaagatggattaaagacttaaatgttagacctaaaaccataaaaaccctagaagaaaacctaggcagtaccattcaggacataggcatgggcaaagacttcatgactaaaacaccaaaagcaatggcaacaaaagccaaaattgacaaatgggatctaaytaaactaaagagcttctgcacagcagaagaaactatcaccagagtgaacaggcaacctaaagaatgggagaaaatctttgcaatctacccatctgacaaagggctaatatccagcatctacaaagaacttaaacaaatttacaagaaaaagacaactccatcaaaaagtgggccaaggatatgaacaaatacttctcaaaagaagacatttatgcagccaacagacatgtgataaaatgctcatcaccactggtcatcacag

SEQ ID NO: 890867 - DNA, 661 bp, Homo sapiens
agtagtctccagtgtctattgttccaatctttatgtccatgaatacccagtgttttgctcctgcttataaatgagaacatgtagaatgtagttttctgttcctttgttaattcgcttaggataatggcttccagctgcatatgtgttgctgcaaaggatattatttcactcatttttatggctgcatagtatttcatgttatatatgtaccacatttttttaaatccaatccaccattgatggacacctggattgattccatgactttgctattgtgaatagtactgtgatgatcacacacgtacgtgggtctttttggtaaaacaattgattttcacttggatatatacccagtaatgggattgctgggtggaatggyagttctgttttaagttctttgataaatttcccaatagttttccatagtggcttaagtaatttacattcttacattcaaaaatgctcagtcactcccactattgaacaaaatgcaaaacaagcaaagcaaacacaccctcccaccacccggcgtctccctctaggtagtaacctacttctctgtacagcagcacttgtagattctagttggagatgtctagaatctaggaagagtactttatacaatgttgtcttccaatactcaattaacattacttccaca

SEQ ID NO: 890868 - DNA, 644 bp, Homo sapiens
ttgaattcccacctatgagtgagaacatgtggtgtttggtttcttgtccttgcgatagtttgctgagaatgatggtttccagtttcatccatgtccctacaaaggacatgaactcatcattttttatggctgcatagtattccacggtgtatatgtgccacaaccccatcaaaaagtgggcgaaggatatgaacagacacttctcaaaagaagacatttatgcagccaaaaaacacatgaaaaaatgctcatcatcactggccatcagagaaatgcaaatcaaaaccacaatgagataccatctcacaccagttagaatggcgaccattaaaaagtcaggaaacaacaggtgctggagaggatgtggagaagtaggaacacttttacgctgttggtgggactgtaaactagttcaaccattgtggaagtcagtgtggcgatctctggaagtcttgagtcaatawcttctatagtatattgaccagaatctagtatctggtattgaaaatgctcacttatttattcaatacatcttttttgtaaaccttggaatttttctcaataagtttcttgaaatattaatgaaaaatttattctgagtggtgtttttacatttgtatatttgtatattatagttgataact

SEQ ID NO: 890869 - DNA, 618 bp, Homo sapiens
ctgtcaggttaagggcggggtgggctaggagagggatagcattaggagaaatacctaatgtagatgacgggttgatgggtgcagcaaaccatcatggcacatgtgtacctatgtaacaaacccgtacattctgcacatgtatcccagagcttaaagtataatttaaaaaaaaaagaaaakaagaaaaagaatgtgtaattattgtttaatatgtgaaaaatcttgactattttggtgttaaagattgtacaatatacagaatgtaattagtaccactaagttttacacttaaaattgtaaaaatcagatgttttatgttccatacagtttactgcaactgcaacaaaataaaaaagaaagttctcaaatttataaccttactttacatcttctaaaactagaaaaaggagtgcacactaaaaccaaaagaagcataaggaattaaataataaataataaaatgaagaaaaataaaacagaataaatcaaaacagcaatacagagaatcagtgaaaacaagattggttctattaaaagatcaacaaaattgagaaatctttataagaactttggactgagaaaagatagatgacttaaattaataaaatcagaagtgaa

SEQ ID NO: 890870 - DNA, 618 bp, Homo sapiens
ctgtcaggttaagggcggggtgggctaggagagggatagcattaggagaaatacctaatgtagatgacgggttgatgggtgcagcaaaccatcatggcacatgtgtacctatgtaacaaacccgtacattctgcacatgtatcccagagcttaaagtataatttaaaaaaaaaagaaaagaagaaaaagaatgtgtaattattgtttaatatgtgaaaaatcttgactattttggtgttaaagattgtacaatatacagaatgtaattagtaccactaagttttacacttaaaattgtaaaaatcagatgttttatgttccatacagtttactgcaactgcaacaaaataaaaaagaaagttctcaaatttataaccttactttacatcttctaaaactmgaaaaaggagtgcacactaaaaccaaaagaagcataaggaattaaataataaataataaaatgaagaaaaataaaacagaataaatcaaaacagcaatacagagaatcagtgaaaacaagattggttctattaaaagatcaacaaaattgagaaatctttataagaactttggactgagaaaagatagatgacttaaattaataaaatcagaagtgaa

SEQ ID NO: 890871 - DNA, 702 bp, Homo sapiens
tacatatatatacatgtgccatgttggtgtgctgcacccattaactcgtcatttaacattaggtatattgcctaatgctatccctcccctccaccaccccacaacaggccccagtgtgtgatgttccccttcctgtgtycatgtgttctcattgttcaattcccacctatgagtgacaacatgaggtgtttggttttttgtccttgcgatagtttgctgagaatgatggtttctagcttcacccatgtccctacaaaggacatgaactcatcctttttttatggctgcatagtattccatggtgtatatgtgccacattttcttaatccagtctgtcattgatggatatttgtgttggttccaagtctttgctgttgtgaatagtgcagcagtaaacatacgtctgcatgtgtctttatagcagcatgatttataatcctttgggtatatactcagtaatgggatggctgggtcaaatggtatttctagttctagatctctgaggaattgccacactgtcttccacaatggttgaactagtttacagtcccaccgacagtgtaaaagagctcctgtttctccacatcctctccagcacctgttgtttcctgactttttaatgatcaccattctaactggtgtgagatggtatctcattgtggttttgatttgcattactctgatggccagtgatgatgagca

SEQ ID NO: 890872 - DNA, 607 bp, Homo sapiens
agaaagacttcaaataaaatggctgataattttccaaaattgttgacagatattaaaccacagactcaaaaaactcaaaacaccacaacttggctaattattaaaaaaaaaaaatgcacccaccccagacatacaaygtaaaatctactgaaaaccaaagacattcagaaaatcttaaaaaaacagagaaaataaaatgaaatatagaaagaaaagttatagcaattttttcatcagaagccacagaagccagaagttaatgttacaaaaatcttttacatgctgaaagaaaaaatagtttactcagaattctgtacactgaaaataaaaagaaaacacaaacaacattttcagaaagaaaagtctatgaggattcattccctacatacctatactacaaaaaatgttaaataaattacttcaggatgaacatccccaatacacatagtcatcagatcctgcaaggtcaacataaaagaaaaaatattacaccaggcccagtggatcatgcctgtaatcccagcattttgggaggccaaggcaggcagattgcttgaggtcaggagtttgcaataagcctggccaacttggagaaaccccatctcta

SEQ ID NO: 890873 - DNA, 633 bp, Homo sapiens
gaggataacaggtttttgaaataaagtgtattagagcactgaaaggatgggaggttgttgttagattttagatttctgagatgtaacaattcttgataacaaggttaatgtgaccatgggagtggttggtagaattggagtagacatcaaagttattggagttaaaagggctagaaactgtgaggcttgagtatttgatgrgtcagcacccatggttggaattgagggagaggaagactgagccaggtactaaagacttccataaatgaagagaactgctagctaacaataacaagaaatgattgtagttctagccaaataatatgagcctcaaaagagatatgtttttacaaaaagaggaggaacaatgatctcaaagaagtattgagatgatgtaaatgaagtatggtcctcagagaagaactcagctttattaaatcaaggagaggaagaagtgttctgagaagatgttgaatgtgtagagaagtaggtttcacaaggagcagggatttcctgaaggaagtgtggcaaatggttggaaatagagcaataatggggatagaggaagtgccaagaaatatttaaataatagcagaggggtgatttacattttggactccaagcctgttctct

SEQ ID NO: 890874 - DNA, 633 bp, Homo sapiens
gaggataacaggtttttgaaataaagtgtattagagcactgaaaggatgggaggttgttgttagattttagatttctgagatgtaacaattcttgataacaaggttaatgtgaccatgggagtggttggtagaattggagtagacatcaaagttattggagttaaaagggctagaaactgtgaggcttgagtatttgatgggtcagcacccatggttggaattgagggagaggaagactgagccaggtactaaagacttccataaatgaagagaactgctagctaacaataacaakaaatgattgtagttctagccaaataatatgagcctcaaaagagatatgtttttacaaaaagaggaggaacaatgatctcaaagaagtattgagatgatgtaaatgaagtatggtcctcagagaagaactcagctttattaaatcaaggagaggaagaagtgttctgagaagatgttgaatgtgtagagaagtaggtttcacaaggagcagggatttcctgaaggaagtgtggcaaatggttggaaatagagcaataatggggatagaggaagtgccaagaaatatttaaataatagcagaggggtgatttacattttggactccaagcctgttctct

SEQ ID NO: 890875 - DNA, 499 bp, Homo sapiens
ttaccacaagatcttccttcagcttaatctctcccactctacgttcccacgccgcccctaatcccgcttgaagcagccctgagaaccatcacccattctctctccataccacccccagagaagggagagattgaagtgtggctccaagattgaaaggagaaagaggttgagggatagtgaggaaggttggagaagagagtaaaaagaggccgcttactggatttgaaattggtgagatgtttcttgggctggtcggtctgagtacctgaggtcgtaggtggatctttctcatggagcaaagggcaggaggacgggggattgatctcccaagggaggtcccccgatccgagtcatgrcaccaaatttcatgcgcgtccgtgtgaagagaccaccaaacaggctttgtgtgagcaataaagctgtttatttcacctgggtgcaggtgggctgagtccgaaaagagagtccgcgaagggagataagggtggggctgttttat

SEQ ID NO: 890876 - DNA, 642 bp, Homo sapiens
ttaatgtatgagagaaacttgttttgaggaggaagaggaaagaaaaaatactatatttcaaatttttaaaaacacacacactcaaacacattttcaaggagtctcaagcatgattttggccttcagttatggtaaaatagttgcagcccagctagttcttctggacatttcagctcagaagaactagcaaggccagataaaatagaaaacagttttgtttaacttaaagtcattggtgatytgcaaaggcaataaaaatttggggagttaagatcctgaagtcaaaggaatctcagacagatgagttgatattcttcaaggtatatcccctaaggagcactggctgattctcagtatagaacaaaagcctaagaattcaagcaaaggggtgctgctaagacacagagaagacagcagtcttgagcaatattacaggaccagggagacaaatactacagtttgagcctaccaaggaaaccaggcattgagaggccaaaacctaatgagaagggagacacggggaatgacactctgttttttttttttttttttttcccctcaagacatttgctgaatccttatgctactctgggctagaagctaagtagctaaactgaaaaagatgataaaaaacagtgtttt

SEQ ID NO: 890877 - DNA, 580 bp, Homo sapiens
ccaaaggttatatagctaattatgtagcagaacaaggccttacatatctgactctgcagtgtagactgaccccgtgctagtgatgtggtctatgcccatttgttcatacaagctagtggctgtcacagatgcatatacagattatgaagcaaggggatttgtgttatgatggaggtaygagaatgttgctccttggtgcaaagagtaaagcagcatctagtgtggaggcggtaagcaagaattcccaaggagaggagagcactgtctgaaaaatcataagagttggagtggccgccatggagaatgcacaggcacatagtgctgggatggaacagaagcaactaactggagctagagataggttaggaccaactgggaagagcatgccccctcccagccttctcccaccacatgcacacacacacccctacctctttgcccatttaaataattaattcataaagcaaacaagaaacattctatttctctccttgaaattatcctaggaatttctaggaacccataaacagtagcaaaaagattctttgattgagaccaataaaaatctaccttgtcttag

SEQ ID NO: 890878 - DNA, 607 bp, Homo sapiens
cttaacaagtgatcgctgctgtctaggattttgtttcttttgcgggggaaccttgacttcctttcccaggcaatccctcctgtgctgaactccagaggaaccaggagtcttggggtcttctctggggcagccccaacccccacccccaggctccagccgcgaggactctgtgcacccctcgggccaggcaacagaacttgttccgtggatatttggagcctccacctgccaaacccgagtgattccttttaccaccccccgccccccacccaggatcattcttcccctcctccagctgttgcagcttgagggggaaaaacaagccagccggtggattttctttatttttatttttcgccccgccggggaacggtaagtatgataccttttttttttttttttttttttttgkatctttcctctaccttcttattttggctgttaagaaacagtggacatttgagggataaataatatcgggaatgtgacagaagggcatgaatggaaggcggttaaaaataaaccaggaggtgggagaagggaggtgcggatgctgcgcggcgctccggggggccaacagttgttattttcccaaacccggggatgc

SEQ ID NO: 890879 - DNA, 596 bp, Homo sapiens
tcaaaaattaattaaatgtgtatcagtgaactaaatgttaccactaaaagtataaaattcttgggagaaaacagaagtgcaagctctggttctgtgatcttagatttggcaatagtttattaaataggatgtataaagcaaaaactaccaaagaaggaaaaaaatagttaaatgggaccttatcaaaaattttcaaaatgtgcctcartgtgtgctatgagaaagtaaaacgataactcatataatgaaagagaatatttgcaaatatatctagtaaggatctagtattaaaaacatataacaaacacgactcaatacaaaacaaataatccaattaaaattagctataattttgaatagacttcttctaaaaagataaatggccaataaacacagaaaaagatgctcaaatttacacttttatagtatacttttacagtatatacttttatatatacttttatagcatagtcatcaaaatatatactttaatatataaaatatataatatatttatatattatatataattatatattatatatgagtaaatattttatataaacatatataaaatataaaaatatatactttta

SEQ ID NO: 890880 - DNA, 579 bp, Homo sapiens
atggttaattttatgccaacttcactgagttaggagtccacaggtatctgagaaaacattatttataagtgtgtctgtgagggtgtttctggaagtgattagcatttgaattggtagactgagtaaagacgatccctctttactaatgtgggcaggcatcatccaatctcatgaggacccaaataatacttaaaggcagaagaagggggtgaactcactctctgtggttaagtgggacttccatcttctcctgcccttgccctttctgtggttgagctgggacttccatcttctcctgcccttggacaccaatgatcctkgttctcaggtccttagactcagattgggacttacaccatcgtttcccctggttctcaggccctactttcctggtcatccagcttgcagacggaagattgtagaactgttcagcccccttaaccatgtaagccaatcccttatattaaatctctttttatatatctacatgtatatctatatggtacctatatctatattatatctgtatttatatgatatatctatctatatatttgttctgtttctctggagtatcct

SEQ ID NO: 890881 - DNA, 573 bp, Homo sapiens
ctttaacaccatcaagaaagcacattagctcaccagcaatggatccaaaccaagaagaaatccctgatttacctgaaaaagaattcagaaggttagttattaagctaatcatggaggcaacagagaaaggcaaggyccagtgtaaggaaatccaaaaaatgatacaagaagtgaagggagaaatatttaatgaaatagataatggacaaacttatagaaatgcaaaatgctctggaaagtctcagcaatagcatcgaacaagcagaagagaaaacttcagagctcaaagacaaggtttttgaattaacccaatctgacaaagaaaaaagaataagaaaatatgaaccaagcctccaagaaatctgggattaggttaaacaaccaaacttaagaataatcaacattcctgaggaagagaagaaacctaaaagtttggaaaatatgtttgggggagtaattgaggaaaactttcccagccttgctagagaactagatatccaaatacaagaagctgaaagaactcctgggaaattcatcgcaaaaaggtaatcacctaggcacattgtcatcagg

SEQ ID NO: 890882 - DNA, 657 bp, Homo sapiens
actcacacgtttcaagtgatgtaaaccttttcttatgctaaattcttcccttaaccaactcagttggctaaggacaaaagaaacctacccagcctccagttcctatcattagttcatggctattactagtggaatgggaagcatgggaaagcatggccttatcaaattataaggatgctggaagttgaggccttcatccaggggcaaaaggaaagctcatagtaggccattgcctctggagggaaagtggcactggtgcccaccaaaggtcagactggaccccaaagggggataccctggggcatcctccagacctcaacctttccaaaggggatgccctcagcagaggttctgtggtctcttactaagcccttcttagaattttctctcacagttgcmatactgtttggctccaatattgtttggaatctggagtttgctgttgagtgagaaagtcggatggagttgcatgtattcagacttttgtgctgctgttctcagcagggaacatggttaatgtgtgacgctctcctttggtgctgtttggttccagtgttctttggagtctggggaggtttgtcctttaaaaataaaactgccatggaaactgctttatgaaattttgattcacagccttcattgcattatctattggga

SEQ ID NO: 890883 - DNA, 657 bp, Homo sapiens
actcacacgtttcaagtgatgtaaaccttttcttatgctaaattcttcccttaaccaactcagttggctaaggacaaaagaaacctacccagcctccagttcctatcattagttcatggctattactagtggaatgggaagcatgggaaagcatggccttatcaaattataaggatgctggaagttgaggccttcatccaggggcaaaaggaaagctcatagtaggccattgcctctggagggaaagtggcactggtgcccaccaaaggtcagactggaccccaaagggggataccctggggcatcctccagacctcaacctttccaaaggggatgccctcagcagaggttctgtggtctcttactaagcccttcttagaattttctctcacagttgcaatactgtttggctccaatattgtttggaatctggagtttgctgttgagtgagaaagtcggatggagttgcatgtattcagacttttgtgctgctgttctcakcagggaacatggttaatgtgtgacgctctcctttggtgctgtttggttccagtgttctttggagtctggggaggtttgtcctttaaaaataaaactgccatggaaactgctttatgaaattttgattcacagccttcattgcattatctattggga

SEQ ID NO: 890884 - DNA, 591 bp, Homo sapiens
ttagacaagtgagtagcaggacataaggctagaggttgattctagccagacgctgtggcaagtgctaaatttacataagctatctatttaattctcacagtgtgtgaaatagatattatcatcctttcctcttatggaaaataatagatatcatcatcattttcctcttatggaaagtgttcattttacaaatggattccttacttttcaaaaatatgcactgtgtgtttcttttcatggcaagttcccatattaaaatttgactcttttaaataaatacttaattatagtgtatatataatgctatgtatacagcaggcatttaattcattatagtttgacatttttttcagatggttctgttatctccaaaaaagtttatctgacctgtcacccagttattttttgtcatcttccaacatacctcttactctacaacttttstactgtcattcctaatacaggataaaaaaatcacagctcaagaactcattctaaaaacacctacataatacatacttgtgtgaatttatgcttgaccagttagccaagcatgtctgtagttataagttgtaattatatagaattgga

SEQ ID NO: 890885 - DNA, 618 bp, Homo sapiens
tctctcatcactcctattcaacatagtattggaagttctggccggggcaatcaagcaagagaaagcaataaagtgtgttcaaataggaagagaggaagtcaaattttctctgtttgcagatgacatgattgcatatttagaaaaccccatcatctaagcccaaaatcttcttaagctgataaggagatcagcaaagagatctgagatcctgagaacttcagcaaagtttcaggattcaaaatcaatgtgcaaaaatcacaagcattcctatacaccaataacagaaaaacagagagccaaatcgtgagtgarctcccatttacaattgctactaagagaataaaatacctaggaatccaacttacaagggatgtgaaggaccttttcaaggagaactacaaaccaccgctcaaggaaataagagaggacacaaacaaatgaaaaaacattccatgctcatggataggaagaatcaatatcgtgaaaatggccttactgcctgaagtaacttgtagattcaatgttatccccatcaagctaccactgcctttcttcacagaattggaaaaaaactactttaaacttcatatgtaaccaaaaagagcccacatagccaag

SEQ ID NO: 890886 - DNA, 621 bp, Homo sapiens
gagcacagtgcttgcaaactacacagaagacggttctgctgggatccctgcctccctctcctgtgaaccaagcagccatcacagcatcatggagctggtaaatgctcacagctcaaaactaaacactgcagacaaaactaaaccaccagacaaaactaaacactgcagagctggcttccagttcacagcttctccttatcctgctcatttcccttgttttcawatcattcttcttgtctgcaatccatttttactagacattatgaaagcattttaggatattctattctggcaagcccatcctctcaattactccagatttaaagtgggttttccaatacatgcacggtagaaagccataaactaacgccaaatatgaaaaaaatgagagaacctttcatgtaacagttaaaattattattaaaatattaaggtactcaataaaaagcagtgccttttgatggtgtcttttatttaaattgtgaagcattttctccttcctcattactacctccttcttgctcaccaaatacttgtgtcatgctgcccttgttattaagaatccaactcccttcccacgtagcagctggactcactctacagcaaggctgtagccattct

SEQ ID NO: 890887 - DNA, 621 bp, Homo sapiens
gagcacagtgcttgcaaactacacagaagacggttctgctgggatccctgcctccctctcctgtgaaccaagcagccatcacagcatcatggagctggtaaatgctcacagctcaaaactaaacactgcagacaaaactaaaccaccagacaaaactaaacactgcagagctggcttccagttcacagcttctccttatcctgctcatttcccttgttttcaaatcattcttcttgtctgcaatccatttttactagacattatgaaagcattttaggatattctattctggcaagcccatcctctcaattactccagatttaaagtgggttttccawtacatgcacggtagaaagccataaactaacgccaaatatgaaaaaaatgagagaacctttcatgtaacagttaaaattattattaaaatattaaggtactcaataaaaagcagtgccttttgatggtgtcttttatttaaattgtgaagcattttctccttcctcattactacctccttcttgctcaccaaatacttgtgtcatgctgcccttgttattaagaatccaactcccttcccacgtagcagctggactcactctacagcaaggctgtagccattct

SEQ ID NO: 890888 - DNA, 664 bp, Homo sapiens
atactttcccctaaacacataaaaatgccaagttacgacaaaggagaattaagattgcagataaaattaaggttgctaattagttgaccttgagatgagaaggttatccctgattatcccagggcagccaacctaatgacaagtgcccttataggtggaaaaggaaggcagaaggggagtcaaagagagcacagcatgaataagtcttggccagatgttgctggctttgaagatggagcaaggagaccatgaagggaaccatacggaggaacctttgaagctggaagtggcagaaattgattcaagcccccaaaggctccagaaggtgctgacacctttttgttttgttttgatttagcccrgtgatacacatttctgacctccagaaatgtaagataaatttgtatgtgttttttaaaacactaagtttgtggcaattccttataaaaagaataggggactactaccctgtcaaattaacatctgtccctctaaggtgagaaaggcatacagaaatgatagtacatgcctgttacttttctcgacgctttcacttgtccctcatttcatctttgcaacccaactaagtagatactattatcactttaaagataagaatattattgcttagaaagctttggtcatttgtcaacattaagaaggt

SEQ ID NO: 890889 - DNA, 597 bp, Homo sapiens
tatccagccaaattaagcttcataagtaaaggagaaataaaatcctttacagacaagcaaatgctgagagattttgtcaccaccaggcctgccttacaagagctcctgaaggaagcactaaacatggaaaggaacaaccggtaccagccactgcaaaatcatgccaaaatgtaaagaccatcgaggctaggaagaagctgcatcaactaaygagcaaaataaccagctaacatcataatgacaggatcaaattcacacataacaatattaactttaaatgtaaatggactaaatgctccaattaaaagacacagactggcaaattggataaagagtcaagatccatcagtgtgctgtattcaggaaacccatctcacgtgcagagacacacataggctcaaaataaaaggatggaggaagatctaccaagcaaatggaaaacaaaaaaaggcaggagttgcaatccttgtctctgataaaacagactttaaaccaacaaagatcaaaagagacaaagaaggccattacataatgctaaagggatcaattcaacaagaagagctaactatcctaaatatatatgcacccaatacagga

SEQ ID NO: 890890 - DNA, 561 bp, Homo sapiens
atgtcataatcagccacagtcagccaaaagtaggcatttgccgtctcacacttctgagttcaggtcttctcagatgtttaactttgcagaaatacaagtagatcacgtttgacattcacccctcaatgttgtggasgttgtattcttgttgcagctcacttaggcctggatttccaaacttctgactaccccatactttaaccttcagttctgggccctgtatgtaactctaggaagaatggggcggaggggttgttgtgttttaaaaacattgttagagatagaggtctcactatgttgcctaggctggtctcaaactctaggccttaagtgatcctcccacctcagtctctcaagtagctgggattacagatgtgagccactatgcccagcaggttcttaattcttttcttggctaccttgtacctcctatatcacctttcagggctagtctctagaaacagtggccccttaactctttctggaacttaatcttgcctcttagggtatcaaatattctgtttcttccaataccagataaatgcgttatgggtcttgcag

SEQ ID NO: 890891 - DNA, 598 bp, Homo sapiens
gaacaaaatctctgagaaatatgggattatgtgaagagaccaaatctatgactcactagcatccctgaaagagagggagagaaagcaagtaactcggaaaatatatttcaggatatcgtccatgaaaatttccccaaccttgctagagaggccaacattcaaaggaaatgcagagaacccctgtgaaatactacacaagagtaccatcctcaagacaaatagtcatcagattctccaaggtcaaaaagaaaaaaaaataatgttaaaggcagctagagagaagaggcaggtcatctacaaagagaaccccattaggctaacagcagatctttyggcagatcctacaatccagaagagatgggggctcatattcagcatccttaaagaaaataatttccagtcaatagtttcatattcagcccaactaagcttcataaacaaaggagaaataagatccttttcagacaagcaaatgctaggggaatttgttaccatcagacctaccctacctcacaagagatcttgaaggcagtgttaacacggaaaggaaacatcactaccagctacaacaaaaacacacttgactacataaaccagc

SEQ ID NO: 890892 - DNA, 598 bp, Homo sapiens
gaacaaaatctctgagaaatatgggattatgtgaagagaccaaatctatgactcactagcatccctgaaagagagggagagaaagcaagtaactcggaaaatatatttcaggatatcgtccatgaaaatttccccaaccttgctagagaggccaacattcaaaggaaatgcagagaacccctgtgaaatactacacaagagtaccatcctcaagacaaatagtcatcagattctccaaggtcaaaaagaaaaaaaaataatgttaaaggcagctagagagaagaggcaggtcatctacaaagagaaccccattaggctaacagcagatcttttggcagatcytacaatccagaagagatgggggctcatattcagcatccttaaagaaaataatttccagtcaatagtttcatattcagcccaactaagcttcataaacaaaggagaaataagatccttttcagacaagcaaatgctaggggaatttgttaccatcagacctaccctacctcacaagagatcttgaaggcagtgttaacacggaaaggaaacatcactaccagctacaacaaaaacacacttgactacataaaccagc

SEQ ID NO: 890893 - DNA, 598 bp, Homo sapiens
gaacaaaatctctgagaaatatgggattatgtgaagagaccaaatctatgactcactagcatccctgaaagagagggagagaaagcaagtaactcggaaaatatatttcaggatatcgtccatgaaaatttccccaaccttgctagagaggccaacattcaaaggaaatgcagagaacccctgtgaaatactacacaagagtaccatcctcaagacaaatagtcatcagattctccaaggtcaaaaagaaaaaaaaataatgttaaaggcagctagagagaagaggcaggtcatctacaaagagaaccccattaggctaacagcagatcttttggcagatcctacaatccagaagagatgggggctcatattcagcatcyttaaagaaaataatttccagtcaatagtttcatattcagcccaactaagcttcataaacaaaggagaaataagatccttttcagacaagcaaatgctaggggaatttgttaccatcagacctaccctacctcacaagagatcttgaaggcagtgttaacacggaaaggaaacatcactaccagctacaacaaaaacacacttgactacataaaccagc

SEQ ID NO: 890894 - DNA, 600 bp, Homo sapiens
tcaagtaggctttatctgtgggataaaaggtaggtttgatatatgcaaattaataaatgtgatttaccacataaacagatctaaaaaaagaaacataatcttcccagtagatgcaggaaaggtttcaataaaattcagcatctcttcatgttaaaaaccctcaacaaaccaggcattgaaggaacatacttcaaaataataagagccatccatgaaaaacacacagccaacatcatattgaatgggcaaaagctggaagcattccccttgaaaattagaacaagataaagattcccactcccacctcccctattcaacacagtactagacgtcctagctagaactatcaggcaaggaaaggaaataaaaggcatccaaataggaagagaggaaataacagtatcccttttggtagaagatatgattctayacctagaaatccccataatctctgcctgaaagctccttaatctgataaacaacttcagcaaagtttcagtatacaaaatgaatgtgcatgcaaaaaccactagcattcctatacaccagcgacatccaagctaagagctaagtcaataatgcaatgccattcacaatagt

SEQ ID NO: 890895 - DNA, 641 bp, Homo sapiens
acaagccagaagagagtgggggccaatattcaacattcttaaagaaaataactttcaacccagaattttatatcgagacaaactaagcttgatcagtgaaggagaaataaaatcctttccagacaagcaaatgctgagggattttgtcaccaccagtcctgccttacaggaattcctgaaggaagcactaaatatggaaaggaaaaaatcagtaccagctactgcaaaaacatgccaaaatataaagaccaataacactatgaagaaactgcatcaactaatgtgcaaaataaccagctaacatcatgacaacaggatcagattcacacataacaatattaacaataaacgtaaatgggctaaatgccccaattgaaagacgcagactggcaaattggatagagtmaagacccatcggtgtgctgtattcaggagacccatttcatatgcaaagacacacatgggctcaaaataaagggatgaaggaatatttaccaagcaaatggaaagcaaaagaagcagggtttgcaatcctagtctctgataaaacagactttaagtccaggaccagatggattcacagccgaattctaccagaggtacaagaaggagctggtaccattccttctgaaactattcca

SEQ ID NO: 890896 - DNA, 639 bp, Homo sapiens
ccaacatctattattttttaatttttttattattaataaaaaatcaggtttttttttgttttttttttttttttgagacagagtctcgctctgtcgcccaggcgggactgcggactgcagtggcgcaatctcggctcactgcaagctccgcttcccgggttcacgccattctcctgcctcagcctcccgagtagctgggactacaggcgcccgccaccacacccggctaattttttttgtatttttagtagagacrgggtttcaccttgttagccaggatggtctcgatctcctgacctcatgatccacccgcctcggcctcccaaagtgctgggattacaggcgtgagccaccgcgcccggccaaaaaatcagtttttattaatttttttttctatcatcatttttagtttttttattatggccattctttcaggagtaaggtagttttgatttgcatttccctgatcattagtgatgttgagcattttttcatgtttgttggccatttgtatatgtccttttgagactgtctattcatgtcctttacccattttttgatgggatcattcatttttttcttgctaatttgtttgagttccttgtagattctggattttagtccattgtcagatgtata

SEQ ID NO: 890897 - DNA, 707 bp, Homo sapiens
atataaaatatagatgcacttaacaacatatccttaaaatagaaaagcaaaatttgtatcattttcaaaattgggaaacactattgtaagtgggaaatttttaaatatctttattggaacctgatagaatacatagacaaaaatagtaaacaaatttaaccagctttattatatatgtgtgtacatattcccttatatgcacactatattcaaaaattgatcatataatttttagaaaatacaaaaagtacacatatatttacaacatacatagacatttataatatatgcagtcatcaagaatataaaatattttaaagacwtgatattggctgggtgcggtggctcaggactgtaatcccagtactttgggaggccgaggcgggtgaatcatgaggtcaggagtttgagaccaggctggccaacatagtgaaatactaaaaatacaaaaattagccagtcatggtggcgcgctcctgtagtcccagttactcgggagactgaggcagcagaatcacttgaacccaggaggtggaggttgtggtgagccgaggtccgagccactgcactccagcctgggtgacagagcaagactccatctcaaaaaaaaaaaaaaaaaaaaaagagatttgatattaaatagactgcattttttatttacagtgcaattaatttagacattggcaataaaacagtataagtgtttt

SEQ ID NO: 890898 - DNA, 603 bp, Homo sapiens
tgaacatatgtagggcaggattgatgcccctgcccccatgagactcttttttaaaattattttgcaatctgaatctctgaccagagaccaattttggggcaactttttagactactggttgggatttgttttagtcttctttcatgaagcagagtttactttttcagtcacagttttatacagcgtctcaatttcaactttttattttgcctcatgtaaaaaaaggtatttttctcccctgaaaagatagtaaagccatattcttaatcacaaagaataaaagtttggattaaatattactactgtcctctttggtgttccygataaaatttgtcattgttctttgtgtctggaatttaagaatctccttttaattttagcctttttttcttagggtgtatgtggttttaactgccaatatgacagaactaaaaaaaatcatacatcagggcaaacattaaatggggcactatgtcaggtaagtaaggatggattggtggtgtagggcaaatctaaactcagcaagtaggtaaaaatagatgatatggtttgaatttgtgtccccaccaaatctcatgtcgaactgtaatccccagtattgga

SEQ ID NO: 890899 - DNA, 615 bp, Homo sapiens
atttcggtggggacacggccaagccatttctttccacccttggcccctcccaaatctcatgtcctcacgtttcaaaatcaaacatgcctttccaacagtcccccaaagccttaactaattttagcattaacttaaaagtccacagtccaaagtctcatctgagacaaggcaagtcccttctggctatgagtctgtaaaatcaaaagcaagataattacttcctatatacaatgggggtacaggcattyggtaaatacagccattccaaatgggagaaattggccaaaactaaggggctacaggccccatgcaagtccgaaatccaacagggcagtcaaatcttaaagctccaaaatgatctcctttgactccatgtctcacatccaggtcatgctgatgcaaaaggtgggttcccatggtcttgggcagctccacctttgtggctttgcaggatacagcctgcttcctggctactttcacaggctggcattgagtgtctgtggcttttccaggtgcacggtggaagctgtcagtgaatctaccattcaggggtctggaggacgttggccctcttctcatagcttcactaggtggtaccctagtctggactgtgtg

SEQ ID NO: 890900 - DNA, 603 bp, Homo sapiens
ttgcttgggacaatagacaacagttgggaaaaactatagagtagccaaaaaccttaaaggaaaagcttatgtgtgagatgtatataagagctttgaaaagctctgacttatacttgggaacgtagaagactgtgtgaatatgtagcactgtgccaagctcattagacatctgagaaggccctaagccctcatattctaagcggccttgagtctttgagcaaaggaagtggtgactaaggcagagttgtaaactgtctgtctgagtgttgaaagcatacttcatcatgtatataggaccccttagcaaagactgtgagatttattggttccagggcattaaggaaacctcttctaatgattagctaaccatcaaacttacygagtagagattacagtggccacaaatgagaaagaacagactttatagaattagttcagaagtcactaaacaaaccaacagcaacaattaaacaagtagctataaaaaaactctggggaacagggtgaatctgatttccagagttgccacattatattatttaaaatactcagtttttaacaacaacaacaacaacaaaatgagacttgccaaaaatgcaagaa

SEQ ID NO: 890901 - DNA, 601 bp, Homo sapiens
cctgtaatcccagctacttgggaagctgaggcaggagaatcgcttgaaactgggagtcagaggttgcagtcagtcgagatcaagccattagactccagcctgggcagcagagtgagactctgtctctaaataaataaataaataatgaaaagagtataatctgaatgtttgtaacacaaggaaatgatagatgtttgaggtgatatatatcccacttaccctgatgtaattgttacactttgtatgccttatcaaaatgtctcacttaccccataaattatacacctactatttacccataaacattaaaaayaaaagtaaaataaaaaaagaaaaattcaataaagggcttcagcagcatatttgatcaggcaaaagagtcagcgaatttaaatatagatcaattaagattatctagcataagaaacaacggcaacaacaaaaagaatggaaggtaaaaaggaagaacaaaaaggagggagcaataaagaaagagcagagcttcagagaactatgggacattatcaaaagtatgtaaatatacataatacacgtcccagaagaacagaaggagaaaaatgtttgaggtagtaaaggtcag

SEQ ID NO: 890902 - DNA, 643 bp, Homo sapiens
aaaaagaataaaactggatccatcatactaccagacttaaaaatatactacaaagttctattaactaaaacagcacagtactggcataaaaactgacacataccttcctctgcctctaggacttcaatcaagtgtttttagatcacttgatactgtcacacaggtcataaagtgctgtttatttgtaaattttctttcttttttcttcagtttgaatgctttctgtttaactcttttaaagttcactggtcctttcttcttcattttttaatctaacayaaattttatctatatatattgtattagttcattttcatgctgctgataaagacatacctgagactgggtaatttataaggaaaaagacttttaatggactcacagttccacatggctgaggaagcctcgcaatcatggcagaaggtgaaattcacatcttacattgcagcagacaggagaggagaatgagagccaagtgaaagggaattccctttataaagtcatcaggtcttgtgaggcttatttactaccacaagaatagtatgggggaaaccgccccctggattcaattatctcccactgggtccctcccatgacaggtgggaattatgggcgttacaattcaagatgagatttgggtggg

SEQ ID NO: 890903 - DNA, 565 bp, Homo sapiens
tgtttatgctgctctatttttcttattcagaatgctctttcacaaaatttccacagttgatgttctgctacacttcacttttcaccaactgcattaattattcttgaagtctatctagtttccattagttataacgaatttatctgtattctgtacttaaagcagtttgccttccagctacttccaccatagttgtaccctaattagtttgtgcatggcttattattttcytaggcaacaaactttatgagctcttacatctacatagttgtttgatcaattacagagttaatacatgatgtggctggcacagtggttcatgcctgtaatcccagcactttgggaagctgtgacaagaggattgcttgaggccaggagttccagaccagcctgggcaacaagcaagaccctatctctacaaaaaatttaaaagattaaccaggtgtggtggcacatgtgcctgtaatcattgctactcaggaggctgaagtgggaggatcacttgagcccaggagttggaggctgcagtgagctatgatatgtactccagccctattaacagagt

SEQ ID NO: 890904 - DNA, 613 bp, Homo sapiens
aagaaaagtcacaatgtggtgacagcttgcttcctattctcagagaaatgagaagcaaagtcagcctggagtagtgataagatatgtttgctgtttgtggagaagtgagaaagcgtatgcaattgaggataatccgtttattttaaaaaggtccccagtttgccatgattagacttaaagattttttaattttacagtgatgtaaaagcaatgtacattcagtagaaaccatactttgagaacctatataaccrttgtttttaacttcagtgtagtgttcaattaattacatgggatattcaacactttgatataaaataggccttgttttaggtgattttgcccaactgtagtaacacaggtgttctgagttaagctgatctataatgtacaatagactaggtatattaatgctattttgatttaagatatttttaatttaggatggttttgttgagatataactccattattaacccaaggagtatatttacttgtcacacatacatatttatacctacatgaaagtgtatatgcaaaactaaaagccaaagcgaatcacacatgtgtattccaaatactatcaattaactctgtattggtgcctatgttc

SEQ ID NO: 890905 - DNA, 530 bp, Homo sapiens
ctgaagtgggagatgggagactccagctctgccctcagcttgctgtgaccaagcagttaacattattcagcttttgggcctcagtctcactatgtgtgaagcaatagaactgcaacagattctcttcaagcatcctgtgcattctcaaagcaatgatgttgctgggttgcaggtggggaagggcattctttattttttcttttkctttttttttttttttttttttgagatggagtctagctctgttgcccaggctggagtgctgtggcgcaatctgcgctcactgcaagctccgccccccaggttcatgccattctcctgcctcagcctcctgagtagctgggactacaggcgcctgccaccatgcccggctaatttttttgtatttttagtagagacaaggtttcactgtgttcgccaggatgatctcgatctccatatgcaatcaatactttcttaattttctgtaaggagcaaagtaaacccaacaacgagttctccctgcaagatagccgccacttaattctttg

SEQ ID NO: 890906 - DNA, 648 bp, Homo sapiens
tgcgatacacaatcagttcaaggccagtccttgcctgcaactggtttcccattctgctggggaaggcaggctgccactgtaaaacaatcggagagacaaatttcctctaaggacatcagtggcctgcatgacctggcccctcttgtcctgtccagagtccctgtgtgctgatcttgccttgactccccaccaaatcctttccagtttgtcttagtctgggtcttctagaaacagcctctgagatgagtggttggaatgcataccactgatttggaggtaaccctagaaagcaacagtggtggagtgggaagtaggatagggaaggaagggaaaccagacaggctggtgtgtttcattagagcaggctgttgctgtgggcgagtggagcttgaccctgctgcaygtttccgagggtcccacaccatgggtgaggaagccggtgttttagcaccaactccaactggggatttgctgagaactgcttctgggggcattaacttcccagcacttctggcctgttcaaggcacttccaagagagagtacccaggcagagagacttgggtgcttgcagtagggcactgcaggtgtgccctgggaaggtgagttctcagggaatatgggagggactgctagaaggtctcagggcc

SEQ ID NO: 890907 - DNA, 616 bp, Homo sapiens
ctggctagatgtccttatttctgctgactgtcattgcttctaagccctttcagcagacagagcctggaaatatacgcatgtgtcccattctgggcatatgcatgtatttctctttctttcctaaaagacgcatgagtttacactagtacctcttattccaatccaacaccacagggttcatcttagcctttccccatttataactttctctgacatgaaaacctggaccctaaaagtagtttcagaatacctaattctttgccttgtggggaagaaaagcttactagctaaaatatggtatttgtgtacaattcttttgtttttagccttaaaatacctagtcaacatactgtgtttcggagtaatttggttagtccttttcttcctcactctcttcagtgtggttacatgattcatttgtaatatgggcagctttaattatcacacttagccytccattttcagtactttccacatcctaggttttgaaagttacataaagtaaaattcactctgtggcatacagttctatgaattttgacaaattcatggaattatgtacccaccaccctattaccatacagaacaagtcatcacacaattcccttctgtggcc

SEQ ID NO: 890908 - DNA, 549 bp, Homo sapiens
atagtttacccttccatcttagtcttttggtcaatgggttttctttaatttctccacatgttttgtagttttctctgtgtcttgtatatttttcacttttaggtatttggtgttttttgatatttttgttattttaaaagtattcgtttttaattgtttttctgttatgtagaaaaaaatttccttctttgtgtattgctcctacatctrgcagccttgctaaatttacttatattttctaatctcttatctgtagatttttctatgtatacaatctagtgttaaatgaataaagacagccctctatttttgaatactcacatctttatttttcttgtcctactattcttacgtcatttaattatctgaataaataatgaataattaggatgtcataggacatacttttctctgactaatttctcaagtttctgttttctttactagattaaaactgagacttgttcaacaatgacccttaactactctacaatctgctgtcagccagagttaggagtgggtgacaacagagttgctaagagttatatc

SEQ ID NO: 890909 - DNA, 549 bp, Homo sapiens
atagtttacccttccatcttagtcttttggtcaatgggttttctttaatttctccacatgttttgtagttttctctgtgtcttgtatatttttcacttttaggtatttggtgttttttgatatttttgttattttaaaagtattcgtttttaattgtttttctgttatgtagaaaaaaatttccttctttgtgtattgctcctacatctagcagccttgctaaatttacttatattttctaatctcttatctgtagatttttctaygtatacaatctagtgttaaatgaataaagacagccctctatttttgaatactcacatctttatttttcttgtcctactattcttacgtcatttaattatctgaataaataatgaataattaggatgtcataggacatacttttctctgactaatttctcaagtttctgttttctttactagattaaaactgagacttgttcaacaatgacccttaactactctacaatctgctgtcagccagagttaggagtgggtgacaacagagttgctaagagttatatc

SEQ ID NO: 890910 - DNA, 666 bp, Homo sapiens
aacctttcaaagctccatagacatattttaaagatagtaattgtcattttctatctggccaactgctgggatccgattggtcattaccttatttcaggggaagcttcaaaagctaatcagaggtgttatcagctatgacttctaccgctgctgcacaggaaacttarcaataaagcaaaagctgtaaattcaggatttattttttgtaaggatgtggcttatgcttggaagattaatgaggaattcctggtctactgtttattaaagatctcaccattctatagcattttaattgtatagtcactctttgacatcctaactaatggttcttgctaaattaataaaagcaacatattaagtctaaatcccagataaggtaaagattgccgttttaatatcccatctatatcctttatctttctacaggggctttcaggccagtagttttaataacatgcatgaatgaagatgctcttttttaactcaaatggtggcaaagagtttttcctttatattagcaggcaatcaattccaatagctttttaatgctttcttaaagaatcaattttaaagcagaagctcttcaggggaccctcttaaacttcttcacagccggtctcctaattttctattacaatgcaatctaaagcagctacaaaaataatg

SEQ ID NO: 890911 - DNA, 667 bp, Homo sapiens
acttcctacaaatccagtgtctgcaagcatcactgaattgttgacataatcaagaatattcatgtcaaaatactccaataaaaaattaaagtgtaaaatctttaacaaaactgaaattttattaaatgaacacattatttaagttggtaattcatatcaattattagcatgttttcagtttwtacagatttttcagttacccaaagcttacttatgagggaaaaaaacactttctttttttaaaacactttctgtcttttcaaaaatttattttacatttgtattattgatttatttttaatttgatttatgtgtatttattagtaatcactttgtcagattttatgaggtaggcagataacgacatcatggtccccacttgccacaaatacatgaaatatatgttgcatttatattctgtaagaaatatgatatttctgtctggaagaaaaacctattgaagaaatgggggaaaacagtgctggattgacaagtaaaatatgatgaaatacataaaaacagaaagcagggggaaaataaaccaaagcattttccttccaacatccatctaatctgcttatgttttctgagggaagtaatttctgactccagtgaccacagttgtcatagaaaactacatactagtaacaggccccacacagtggct

SEQ ID NO: 890912 - DNA, 667 bp, Homo sapiens
acttcctacaaatccagtgtctgcaagcatcactgaattgttgacataatcaagaatattcatgtcaaaatactccaataaaaaattaaagtgtaaaatctttaacaaaactgaaattttattaaatgaacacattatttaagttggtaattcatatcaattattagcatgttttcagtttatacagatttttcagttacccaaagcttacttatgagggaaaaaaacactttctttttttaaaacactttctgtcttttcaaaaatttattttacatttgtattattgatttatttttaatttgatttatgtgtatttattagtaatcactttgtcagattttatgaggtaggcagataacgacatcatggtccccacttgccacaaatacatgaaatatatgttgcatttatattctgtaagaaatatgatatttctgtctggaagaaaaacctattgaagaaatgggggaaaacagtgctggattgacaastaaaatatgatgaaatacataaaaacagaaagcagggggaaaataaaccaaagcattttccttccaacatccatctaatctgcttatgttttctgagggaagtaatttctgactccagtgaccacagttgtcatagaaaactacatactagtaacaggccccacacagtggct

SEQ ID NO: 890913 - DNA, 667 bp, Homo sapiens
acttcctacaaatccagtgtctgcaagcatcactgaattgttgacataatcaagaatattcatgtcaaaatactccaataaaaaattaaagtgtaaaatctttaacaaaactgaaattttattaaatgaacacattatttaagttggtaattcatatcaattattagcatgttttcagtttatacagatttttcagttacccaaagcttacttatgagggaaaaaaacactttctttttttaaaacactttctgtcttttcaaaaatttattttacatttgtattattgatttatttttaatttgatttatgtgtatttattagtaatcactttgtcagattttatgaggtaggcagataacgacatcatggtccccacttgccacaaatacatgaaatatatgttgcatttatattctgtaagaaatatgatatttctgtctggaagaaaaacctattgaagaaatgggggaaaacagtgctggattgacaagtaaaatatgaygaaatacataaaaacagaaagcagggggaaaataaaccaaagcattttccttccaacatccatctaatctgcttatgttttctgagggaagtaatttctgactccagtgaccacagttgtcatagaaaactacatactagtaacaggccccacacagtggct

SEQ ID NO: 890914 - DNA, 602 bp, Homo sapiens
tgtctcatcacttttaataaatcttaataattttccatatttcctacaggccaattttaataaataaaatcctgaagaaaagtcaccaatgcacccttcctaacagcattccttctcttcctctatataaacactaccctaaatttggtgtttatcatttttgtgcatgattttatacttttaccatatatgtacatgtgtccatgttggtacctgtggttcaggattaccttctttcatttcataatggactaaaatttctttatccattctccaacagtggatatgtaagaagtytccagttcccccattacagacaatgaagcaggcaataaatcttacctatatttccttgtacacgtatgctttagtttctccaggatatttatctgaatatgtgcacattcagaattatgcgaatgtgcttgttttaataggattcttctggaaatagaatccaaacagagattcgtgtgcagagtctatttgtgaattgataccaggaaacaccaataatggaattggaggagagacagggtagtggaggtagtgaataaaggatacatgatcaaacaagttactgggtaactggagtttaatcc

SEQ ID NO: 890915 - DNA, 602 bp, Homo sapiens
tgtctcatcacttttaataaatcttaataattttccatatttcctacaggccaattttaataaataaaatcctgaagaaaagtcaccaatgcacccttcctaacagcattccttctcttcctctatataaacactaccctaaatttggtgtttatcatttttgtgcatgattttatacttttaccatatatgtacatgtgtccatgttggtacctgtggttcaggattaccttctttcatttcataatggactaaaatttctttatccattctccaacagtggatatgtaagaagtctccagttcccccattacagacaatgaagcaggcaataaatcttayctatatttccttgtacacgtatgctttagtttctccaggatatttatctgaatatgtgcacattcagaattatgcgaatgtgcttgttttaataggattcttctggaaatagaatccaaacagagattcgtgtgcagagtctatttgtgaattgataccaggaaacaccaataatggaattggaggagagacagggtagtggaggtagtgaataaaggatacatgatcaaacaagttactgggtaactggagtttaatcc

SEQ ID NO: 890916 - DNA, 639 bp, Homo sapiens
ccattatggtaatttgtttttctcccatgtcgctcattttctttctaatcctaaactcatattttcatctattcataatatttgcttttttttcagttttatcttctgtgtatttcactatgctactagccagagttttgcctttgagcaatttccaattttatttttttgtgtatagttattttcttccagtatttgtccaatattttattaactcataattaaatacttccatgctatctgtgttagtccattctcatgctgctatgaagaaatacccaagattggytaatttataaaggaaagaggtttaattgactcacagttctgcattgctggggaggcctcaggaaacttacaatcatggtggaaggcaaggagaagtaggcaccttcttcacagggcaggaagatggagtgagggaaagcaggggaaatgccaaatgcttacaaaaccatcagatctcatgcgactcactattacaagaacagcaggggggaactgcccccatgatccaattatgtctacctggtcccaccctttacaggtgaggattacaagtcaagatgagattttaggtggggggacacaaccaaaccatatcactatgttaacatttcttacaacattttttttttc

SEQ ID NO: 890917 - DNA, 620 bp, Homo sapiens
aggcctttaggagtaggactctagctgaagcctgaatttggaaaagcttttggaaacaagctctcctagcacaactttctgggccagggacctcaccaaagcagtcttcacgacccatccaccagccttcgagtccagtcggctacactacagcacatcagtgctactgctctaggattaaaccccttagcaagtctacactgcagtacatcggggctgctgctctaggattaaaccccttagcaagtctacactgcagtacatcggggttgctattctaggattaaaccccttagcaggtgagggttttcctcaagtaactcacaccaytggcagcctgtagtgtgccctgttgtttaaaggatgactggggattttttaattagataatcaaagccctggactaatagactatcgccaatcccatctctattcctgctcatctcttctctttccttttccatcctcttttgttattggtctggtaattatttgataagaaaaatgtaccctgatcagtctatctccagcaatctgtcaccatctaaatagtttttgaggtcccaataattattccaactaaaggcttccctgattaccttcatccctaaaatcaggca

SEQ ID NO: 890918 - DNA, 694 bp, Homo sapiens
cacaacaaggtgtgggcctgggactcacctgagtttctctcctagaatggacaccagctatgccaatcacactgaacatgccaatcacaccaatcacactgactgcctggagacacctcttcctggctcatgcctgctaagagctaattcaagagcaagattccatggtacctagagaccagcagtgcctactcaagagaagctcctgtagtcctgaccsacatcgctcagtcccagatgacagtgacgaggagctgggtcccctgtcttgccgtggcgctctgaggaggccatgtcttctgcagcagccacagcatgatgcccatcaatgcccggagattttgtctcctcctgtgccatgcaaggtggtgcccattcagtaccaaggtcctggcatccagctcccaggactgtgggctgctgaggctgatggcaagtgcctccgtgcagtgcctgggggtggccctgcaggggagccctgcccagctaccactgggtctgggggcacaagccccactcctctgcttcagtgagggctgctctgaagggcccttccagtcctgagcctccgtggaagctgtcgggatccccttgtgggcattgtctgccctccacgagagcctccccagaacctctgcctcggtcttttaccaggaaacccaaccacaagagttcccatcaaccttcacttgtg

SEQ ID NO: 890919 - DNA, 639 bp, Homo sapiens
gggtggtgtgcagaattgaggagcagcctcgccagggcagcccccatccagttaccccttgacgtgggttctgggggcacaaaaccagccctgcctcagtggagcagctgtgcagggcttcccggacccctaggtgcccctggacattgctacccaacatgttcccgcggaccagcagcaagggcggcatccatgagctccttacaaatgcaaacttcaggcctcactccagacccaccggctcaggatctgcatcttaacaaggcatggctcaggccaaaaataattttagatccattcctgaaaaaatgccaaaaaatagacaaagcaaagtataataatgatagtaccagttttttgagcatcattttgaagwagactgtttagtgcaaaaaaaaaaaaaaaaaaagaaagaaaaaagaaaaaagtcagagaaaggaaatccacagtttttgctgagttgaagtgaaactctgtttgactctgatttatgtgccagtcatcctgacctgccatacgttttgcttggctgggatggtgttcttgcaggagagactgcggaagtaaattattagctttttaagttctacggaacaagagagaaaagattaaatggaatgaatacctgttgccttcatg

SEQ ID NO: 890920 - DNA, 639 bp, Homo sapiens
gggtggtgtgcagaattgaggagcagcctcgccagggcagcccccatccagttaccccttgacgtgggttctgggggcacaaaaccagccctgcctcagtggagcagctgtgcagggcttcccggacccctaggtgcccctggacattgctacccaacatgttcccgcggaccagcagcaagggcggcatccatgagctccttacaaatgcaaacttcaggcctcactccagacccaccggctcaggatctgcatcttaacaaggcatggctcaggccaaaaataattttagatccattcctgaaaaaatgccaaaaaatagacaaagcaaagtataataatgatagtaccagttttttgagcatcattttgaagaagactgtttagtgcaaaaaaaaaaaaaaaaaaagaaagaaaaaagaaaaaagtcagagaaaggaaatccacagtttttgctgarttgaagtgaaactctgtttgactctgatttatgtgccagtcatcctgacctgccatacgttttgcttggctgggatggtgttcttgcaggagagactgcggaagtaaattattagctttttaagttctacggaacaagagagaaaagattaaatggaatgaatacctgttgccttcatg

SEQ ID NO: 890921 - DNA, 662 bp, Homo sapiens
ttgcctaggttggcttttttatagttttggattttacatttaagtctttaatccatctttagttgatttttgtatatggtggaaggaaggggcccagcttcaatcttctgcatatggttataacccagcaccatttattgtatagggagtcctttccccattgcttgtatttgttagctttgtcgaagatcagatggttgtagacatgtggccttatttctgaactctctattctgttacattggtctatgtgcctgtttttgtatcatgctgttttggttactgtagctttgtagtatatagtctgaagttgggtactgtgatgcccccagctttgttctttttgcttaggattgccttggctattcaggtccttttttgttccatataaattttaaaatactttttttctagttctgtgaagaatgtcattggtagtttrataggaatagcattgaatctgtaaatttctttagtcattttaatgatactgattgtttctatccatgagcataagatgtttttcatttgtgtcttctatggtttctttgaagagtgttttgtaattcttgttgtagagatctttcacctccctagttagctgtattcctaggtattttattcttcttgtgcaattgtgagtgggattgcctttctgattt

SEQ ID NO: 890922 - DNA, 592 bp, Homo sapiens
actcaccccacccaacaacaggccctggtgtgtgatgttccccttcgtgtgtccatgggttctcattgttcaattcccacctatgagtgagaacatgcagtgtttggttttttgtccttgcaatagttcgctgagaatgatggtttccagcttcctccatgtccccacaaaggacatgaactcatcattttttatgactgcatagtattccatggtgtatatgtgccacgttttcttaatccagtctatcattgttggacatttgggttggttccaagcctttgctattgtgattagtgccacaataagcatacgtgtgcatgtgtctttatagcaccatgatttataatcctttgggtatatacccagtaatgggatgkctgggtcaactggtatttctagttctagatccctgaggaattgccacactgccttccacaatggttgaactagtttacacccctacactcccaccaacagtgtaaaagtgttcctatttctccacatcattgtctcttttaatctttgttgttttaaagtctgttttatcagagactaggattgcaacccctcccttttttttttgctttcc

SEQ ID NO: 890923 - DNA, 566 bp, Homo sapiens
tgaattaatttttgtataaggtgtaaggaagggatccagtttcagctttgtacatatggctagccagttttcccagcaccatttattaaatagggaatcctttcaccatttcttgtttttgtcaggtttgtcaaagatcagatagttgtagatatatggcattatttccgagggttctgttctrttccattggtctatatctctgttttggtagcagtaccatgctgttttggttactgtagccttatagtatagtttgaagtcaggtagcgtgatgcctccggctttgttcttttggcttaggattgacttggcgatgagggctcttttttggttccatatgaactttacagtagttttttccaattctgtgaagaaagtcattggtagcttgatggggatggcactgaatctataaattaccttgggcagtatggccattttcacgatattgattcttcctacgcgtgagcatggaatgttcttccatttgtttgtatcctcttttatttcattgagcagtggtctgtagttctcctttaagaggtccttcacgtcccttgtaa

SEQ ID NO: 890924 - DNA, 649 bp, Homo sapiens
tttcttttaacttggtttttaatttggaagcaggagcttggcattaatgtgtataacataacctgaactattttttcttttcttgagaaatgtagccttgtcttgcttgcttagtaaagtaatgcaccttaattcagctttgttatccttcttcttcttcttcttttttttaactgtagcctatttggtagttcctttttcctgtgaaacatgtataaagttctacaaaaataccaaaagtttaccatatttattgctaagatgcaggtatactacattacttatcctcacatcattagacgaaatgcatatgaactctccttacaactgggtattgaacttcactggtcattggttattagaacattttcttttaatgactgtatctttttgtaagatacaggtgttactttggagagaggtaggaatagctctatggaaaatgtacatgtacatgtggtggaatttttcctgaaattaaaggaaacatgcagtttggycaaatgcatcaaataaattaaaatagtgacggttactgcaaccgaatctgctgtcttaatatgctatcaatgtaaaacagcaatcatttataattgtcatcaaatgacaaagttaagtgtgataagaatattttgcacaccaattaatt

SEQ ID NO: 890925 - DNA, 425 bp, Homo sapiens
atatcaatccattcaacaaattctagaattatcctcaaccctgtgaataaaatggacaaaaagattcttgctgccattgagtttaaatccatatttcatgttctttcccagattgtcccattatttcaggttctcagacatggttgctgactcttctgtttttgatatctmtctttttttttttttttttttttttgttaagacagagacttgctcttttgcccagactatagtgcagtagcaggatctcggctcactgcaaactctgcctcctgggttcaagcaattctcatgcctcagcctcccaagtagctgggactacaggtatgtgccaccacacctggctaattttttaatttgttttttttttaattttatttttagtagagatggggttttgccatattggccaggctcgtctcaaa

SEQ ID NO: 890926 - DNA, 638 bp, Homo sapiens
gaaaataagtgttgatttttctttctataaatggaccattaaaatccaagggaggacttcaaaatacacatgcaaataatattaattttaaagtagaggcactacacactgagaagaaaattgggaaatggctacttaaatgttagcaatttacaaccaagagggcctgcatactgattgggaaggcagacgcttgaatagtatcaagatataaatagaactgatcaaactgagataacaggaaaggtagtcacataattataatataaacagtataaataataccaactatttgaaggtaaaaagcatgtgcttaatcgtacttatttaaaagaaaataggtcaaccaaatgaaaagaaaaggcgaaaagtgactggatgagcaagcctcttcactccccagacctccatyatctcttctgcaaaattaagggatcaggtgaaatgatctgaatatcagagatttataacactttaatgattctaaaactgccttaagaactgcacagtaaattgtggaagaataatgattctgaatttcagatctggttaaatgccagtcttttgcaaatatgggacacttaactctctcttttgcaaaaaatacattgatgtgagaaatcatctgccaaaatatt

SEQ ID NO: 890927 - DNA, 617 bp, Homo sapiens
tttttgtttgtttgttttttaatgcatcccacctaccaagtctggcccaagccaaaatcctatgtgtgatctttcaggcctgaccacaggcaattacagggctctgcctgacaggccttatgggggaaagctgtacttgccaacgagacccagtacatagtcagtgcactgcagttctctgaaggaaattgcagtcaaggactcaggctcagccaaatccatttagagacttccatattggaagttccaaggcacttyacaggagcctctcccaaggcctctttatcaaaggccttgacttttcttcactctgactcaaaattctgtcgcttcttgtggagaaaagggaagctttatgcactggtggtggtactatcaattagtacagtcatttcagaaaatagtgtagaggtttcccaaaaaaacaaaagttagaattaacataggatccagcaattcccctactgagtatatatccaaaggaattaaaatcagtatgtagaagagatatctgcccttccctgttcattatagcattactcacaatagccaagatacggaaacaattgaagtgtgtatcaacagatggatttgtaaaaattggtattaaacacagt

SEQ ID NO: 890928 - DNA, 636 bp, Homo sapiens
ctgttgcagttttctaacattcacaactttagaaatgtgccaaccaaaaacaaatctagctgtatccgtgaaatgaatggaagtccaacagatccccagctttcaactttagattttcttctgtcttttctgtctgtctaacaaacataaatagcttactcaagcagtcctttacactgtgtcaaaagactgctgaacgaagaaaacatatgcagaactayagcttccaacaaactttgccacaaattgctgacatttctgtgtgagtcagaattctctccctatgcactgctactgttgctattattactactagtagtagtagcagtgctagtagtagtggtgacaataaaggagtcagagggtcttcctggccctgggaaaagtaactggcatactttcactctaataggttggggaccagggggagttagaaactgatgtcaggaaggaaaaaaggaattatgtggccacaattaattccatcaagaagtaactatcattttactgcaaatatttcacaactttttaaactttacgcttttaactcctactgaccagcctcccttctttctacctctaactaaagtgaataatttaagatttacattccatcggccaggcgcggtggctcaa

SEQ ID NO: 890929 - DNA, 689 bp, Homo sapiens
aggtcttgtagtagaactggggctgtcagagctggacaatatcaataaacttttaccaaaattgaagcttgattttggaaaggctgtgtgtaggcaaggggtgggagtatctccaaccaagtgtcagttactatgagaccacttcccaagaatattaccagaaaatgctcagaggaaagcacggcagataaataaacattctacttgtttattctgaagcttgtttgcaagctgaaaagaatcaacacctcattatttgaggatactagttaagattgcagtaacctggaacttcctgtactacttactcagctaaacatggaaaacagaagtttagattatcaggaggctagccaaatgatttggtaggaaatattccttattcctacatcaggttaatccagagcctatcatgaatgagtactcacggctaaagatctttattaacatatgctgatataatgtaaaatattgtgaattccaggataagggtcacaattagatagtaccaacagggaggaccagggcagttaaaaccctgattgattcyccaggaaaacaaagggtcatttctaaggaagtcagctaagacaagaaggagcaagtaggtacaatagtatagacggataagatgtcaaatataaggatcataagatcaatatctatgaacacggttgaactctggtctc

SEQ ID NO: 890930 - DNA, 623 bp, Homo sapiens
gaagctccatgctaaaaatggaatataggaagaaatagactgtatcactgataatgtcctggtgccaccagaatgatttatcttcaaacttctcttttaactgaaaaaaaaagtaaacttctgtcttgattaagccactctcattttcattattatttccttccctggttatacacatttaaagcttattccaactgatttagtacttggaagtaaggttcttcaagtatcagaaactaaaatgtggcactaaatrtgtaatggaagcagagctgcataggtgcatagcaatgactcagataacgaaagccgaaaatctcatgatctttataataaatctacaaaatatttagtcaaatcatcacctgctacacattggaagccaaccacatgctgccaaaggctacatatagtattaggagaaatggtaaaatattggtatgggttgtcagaaaaatcctagcatgacaaattcaaggtggaactaactacctggccagtctcagagttgaaacggaaagacatgcacctttgctaaggaaggtactctttgcctataacccacaatctcagttgactgagagtctggtaatttgaaaacgttcatggttgaaaaagccaac

SEQ ID NO: 890931 - DNA, 528 bp, Homo sapiens
agttatacacacacacacacactcatggaatgaggatgtgtggattccatgtgaatggaatggggaagctaactagcataaggcactattgtaagacctgagaaaattaggaacagctctcttccaaggaatacacctgtgattctcaaactggcagtgttgcaagttgaaccgtgtccccaaaaaagacatattaagtctctaatccctaaaacctcagaacatgattttatgtggaaatagatcattccagatataattacttaggtgaagacaaggttgcactggattcaggtgagcaacatgactagcrtcattttaagaagaaggccacataaaggcagagacacacagggacaacaccttgtgatgacagaggcagagatgcaagtgatgcagttgcaggccaaaggacaccaaggcttgaaaacccctatcaggaagcaagaagaggcaaggaagccctctcccctacaggctgcagtagaagtgtggccctgtcaacaacttgatttcagtattctagcc

SEQ ID NO: 890932 - DNA, 651 bp, Homo sapiens
ggttgcctgtttgctttgatgatagtttcttttgttttgcagaagctctttagtttagttagatcccaattgtcaattttagcttttgttgtaattgcttttggcaattttatcaaaaaatctttgtccatatcaatatccttaatggtattgcttctgtgatttttagagtttttatagttttgagttttacatttaagtatttaatccatcttgagttaatttttgtataatggatgaggaagaggtcctttttcagttttccgcatatgcctagccagttttcccagcatcatttatyaaatagggaatcctttccccattgcttgtttttgtcaggtttgtcaaagatcaggtagttgtaaatgtgtggtcttatttttgaggtctctattctgtctcttttggtaccagtaccatgctgttttggttactgtagccttgtagtgtagtttgaagtcaggaagcatgatgcctccagctttgttctttttgcttaggattgtcttggctatgcaagcttttttttggttccatataaattttaaagtagttttttctaattttgtgaaaaatgtcaatggtggcttcatgggaatagcattgaatctatatattactttgggcagtgtaaccattttcataatattg

SEQ ID NO: 890933 - DNA, 667 bp, Homo sapiens
ctgcaaccaagagtgtgactgcaagaacacaaggcactgtgcaaagatagatgagctgtatgagtcaggagttctgctctccaggtctgaggctgttcattgcctgggtttgtccagcgggcctgaagccatggagagcataatatttagaggtggcgaacccgacaccaccctgcttgcattctttgctccaggccttctgacctagttgtccttttcctgtaccccatgcttgctccctgagccctacgcttgctgttctccagattgaggctttctcctcttgcttcatactcccctccctcagcccactatgcactatgtcaggccaactggtcttactctgcaggagagtctgagattcactgttgcttcctgtggggaggcttttctgagcccccargcctggtgctgtgtgctcccgtggcagcccctgcttctcctgtacaccacatattgccaacttgcttctgactttcccctactgagctacattctccatgaggtagggaattatgtgtttatttttccagcacagagcttggtgcacactgggtgctcagtggttgagcagatgaatggaccatctcggtgattctttgcttccctcacactgagaaggtctggccagctcgtttccctttctcctctcccttgtttcttgctg

SEQ ID NO: 890934 - DNA, 615 bp, Homo sapiens
cccttatatttggcccccactttcatccatactcccaaaggtacctgggctggtttaggattcagccttctaagtcagtgatcagccactcatccatctgctttccagtttccgttaccattgtaaaccaaaaagtatctgacacaagcctccaccaatgtagaggtttattttgccaaggttgaagacatgcctgggaaaaggagacataagccaccgtaggatctgtagcctgtgctttttytgaagaggatttcaagggcttcaatatttaaagcggaaaagtgggcaaaaggggaaagggcaaagcgaaaaaaggaggtcgcattcttctgaatccacatgttacacatgaaaaggaggggtaggccagtaatcccagcacttttgggagcccaaggtgggtggatcatgaggtcaggagatcgagaccatcctggctaacatggtgaaaccttgtctctactaaaaatacaaaaattagccaggcatggtggtgcatgcctataatcccagctacttgggagactgaggcaggagaatcgcttgaaccagggagtcggaggttgcagtggccacagcctgatgacagagcgagactctgtctcaaaaaaa

SEQ ID NO: 890935 - DNA, 649 bp, Homo sapiens
gttgcctgggctaatgtatcactaggttgtgtgcttctcatgttcactggctctgagcccagttcagcattaggaccttcaagtttatttagagctccagatcactttagtccatgataacagggcttgcctgaactcaggctttgactgctggaatgggtgattctcctctgtctagggctggcttaaatactctycataggtgagtgtgagctcatttcagcctggtttttctttctgctatgacagagtagcactgatttcaatgtaacatatcacaatccctgtgctcaccttctcccaagcacacagattctctttctgcacatgcagttatgctgggggatggggaaggcatgggcttggtaattcaagactgtctttcctacctttttttagtgactctttcagcaatatgaatttaaaaccaggtactgtgagtgctcacttgatgcttagatcttatgaaagtgcttttcttgtgtgtagatagttgttaaattggtattcttgtaagggggttgatgattggtggagcctcctgtttgttcgtcttgctctacccctcctcacctataaacagttttataatctgtaaatctacattttataatctaccatacacgaattggtgaaggtttagattata

SEQ ID NO: 890936 - DNA, 598 bp, Homo sapiens
ctctgaagcattacaacaggttttataatgttgcatgccctgtatgacaggatttttcactcaagttttgagctataactcattggttactcttaggttttgtccatctgacttccagcaaagcttcaaatattggtttggttgatgaagtccctactttgttttcttattctgacaacatgcattttcagcattagtctactgaattcttctaaatgtcactaagacttggataagcccagtttttcttgtgcataaaaagaattctaggttgcgcagggggcatttttagctaaaccctccccagaatcacaacccccctaaaaaaaataaactaaaatacaaatttataattcccttcccacaagtagcaaagtcaaggrtcttcattaaagattatgggagttatgcccccactatgtcagggcacttctcagaataactgcatttcctcagttttctccatggtttctaagtaacaatgctgcacaactggatactgtactaagttcactctcagggctatttgttgccctctggagctgtgtgcacatgtagaagttgggtccacctttactgctggaaaacacatttatgt

SEQ ID NO: 890937 - DNA, 679 bp, Homo sapiens
tctttggtcatactagttttgtagttttagttatctgtgtatttaactatatttcattattgtcatcatgccttttaaataatctacagataagatggggaaaatgcatttcagtgactatcttacctcatgttcagtttacaaaaagctgtgagcaatggtagaacttgctgattttattttattttttatttttttaaattatactttaagttctcgggtacatgtgcacaacatgcagctttgttacatatgtatacatgtgccatgctggtgtgctgcatccattaactcatcatttacattaaatatatctgctaatgctatccctccccctccccccaccccacgacaggccctggtgtgtggtgttccccaccctgtgtccaagtgttctcattgttcaattctgacctatgagtgagaacatgtggtgtttggttttctgtcctggtgatagtttgctcagaatgatggtttccagcttcatccatgtccctacaaaggacatgamctcatcctttttcatggctgcatagtattccatggtgtacatgtgccacattttcttaatccagtctatcattgatggacatttgagttggttcccagtctttgctattgtgaatggtgccgcaataaacatacatgtgcatgtgtctttatagcagcatgattt

SEQ ID NO: 890938 - DNA, 551 bp, Homo sapiens
ataaaaaatgatgagttcatgtcctttgtaaggacatggatgaagctggaaaccatcattctcagcaaactatctcaaggacaaaaaaccaaaccccgcatgttctcactcatagatgggaattgaacaatgagawcacatggacacaggaaggggaacatcacacactggggactgttgtggggtggggggagtggggggaatgatgagttaaggggtgcagcacaccaacatggcacatgtatacatatgtaacaaacctgcacattgtgcacatgtaccctaaaacttaaagtataataatactaaaatttaaaaaaaaagattcaggtcagaggtacctcctataggaaaaaaaaaaaaaaaaaaagagcagcttgcctaagagcctatctcctggccatcattcataaccgccatctactggattgtagcccaaattacaacaccaaaaatagtttgccagtatacagtacctaagaagcctaaggcaggaatccagccacaaataaagattctgtgcatagcactgaccttctaaaaacattcag

SEQ ID NO: 890939 - DNA, 598 bp, Homo sapiens
acaatattgattcttcctatccatgagcatggaacatttttcatttgtttgtgtcctgtcttatttccttgagcagtgatttgtaattctccttgaagaggttcttcacatcccttgtaagttgtattcctaggtattttattctctttgtagcaattgtgaatggcagttcactcatgatttggctttctgtctattattggtgtataggaatgcttgcaatttttgcactttgattttgtatcctgagactttgctgaagttgcttatcagcttaacgaggttttgggctgagacgatgtggttttcaaaatatacaatcatgtcatctgaaaacagagacaatttgacttcckctcttcctatttgaataccctttatttctttctcttgcctgattgccctggccagaacttccaatactatgttgaataggattggtgagagagggcatctttttcttttgccggttttcaaagggaatgcttccagtttttgcccattgagtatgatattggctgtgtgtttgtcataaatagcttttactattttgagatacatttcatcaagtattctctgatggtagtttgtatttctg

SEQ ID NO: 890940 - DNA, 592 bp, Homo sapiens
aaactggaaatagaaggaacataccttgacacaataaaacccatataagacagacccacagctgctattatactgaacagggaaaaactgaaagcctttcctataagatctagagcaagacaaggatgctcattttcaccactgttattcaacatagtactagaagtcctaactatagcaaacagaaaatagaaacaaataaaaggcwtccaaattggaaaggaagaaatcaaattactcttgatgatattatcttttatgttgttgttttgtttgtgtttttgagacagagtctcactctgtcacccagattggagggcaatggttccaccttggctcactacaatacctgcttcatgggttcaagtgattctctcacctcaggcttctgagtaactgggattacaggtgcctgccaccatgtccagctaatttctgtatttttagtagagacagagtcttgccatgttggccagcctggtcttgaactcctgacctcaagtgatccacctgccttggcctcccaaagtgctgggattacaggcatgagtcactgtgcccagcctgatattatcttatgtttggaaaaacc

SEQ ID NO: 890941 - DNA, 636 bp, Homo sapiens
aatagcaaagacttggaaccaacccaaatgtccaacaatgatagactgagttaagaaaatgtggcacatatacaccatggaatactatgcagccataaaaaatgatgagttcatgtcctttgtagggacatggatgaaattggaaatcatcattctcagtaaactatcrcaagaacaaaaaaccaaacaccgcatattctcactcataggtgggaattgaacaatgagatcacatagacaaaggaaggggaacatcacactctggggactgttgtggcgtgggggaggagggagggattgcagtgggagatatacctaatgctagatgacgagttagtgggggcagcacaccagcatggcacatgtatacgtatgtaactaacctgcacaatgtgcacatgtaccctaaaacttaaagtataatacaaataaataaataaataaataaataaataaataaataaataagaaattaacccttagaattccagtgacttaccaaaacaaacatttgtttaggcacataacacatgctaatgtggcgatcaagtggagtcgtacatctgtgcttcctatagtttctcaagggcttagattgacagaaataccaccatacgcattttctggaatatgcaa

SEQ ID NO: 890942 - DNA, 582 bp, Homo sapiens
tagatcagagaaatttcaatagaaggacatttgacaagacacatgataagtactcttcggaattttccaggccaacaaaaacaaggcaagtctgaaaaactttcgtagccaagagaaacctaaggagacatgacaactaaatgtaatgtattatctttattggaaacctgaaacaataaaaaagacatcaggcgagcagcaagaaaatctcaataaaatatagactttagttattaatatatcaatattagttaattcattgtgacacatgtattataccaatgtaagatgttaacaataggtataattggccttgtgatacatgggaactttgtaatatcattgcaatattcttgtaaatctaaacagttgtataaaagtttaacaattaacttctaaaaattaaaaagggggcataatatttagccacttcatctmcgaaaatataaaaatggcaaataagcacgtgagaagatgctgaacatcaatagtcattagggaaatgcagattaaaccaccgtgagaccactctataccactcatcagaattgctaaaatttaaaaagacaggggaatccaaat

SEQ ID NO: 890943 - DNA, 601 bp, Homo sapiens
ggcaacttcgtcagactggtgagcaggtctgatggagagaaaaccatgtgcatttggcccctgactatgacactttgggtgtaactagaatgacgattgtctaagccatgtccagttggctagttctaaaaatgacagactttttcatcatcacaaaaagagtgctagcagaggaatggaagagataggaaggaacaaagagcagttgagaagagaaaaggaaaatgcacataattgagggaaatattgattgacactaatggagtttggctaaccctgacctaagctctagccaggaaagacccaattgaaaagtaaatatctccaaagaattgaagattgtttactactttagttatctggaacaaagccaagaaccaagaaggaaacaaagrcctctgaacaactagaatagctgtgatatagaagacatatctcaggccttcactcctggcttattttcctaatttaacacacaagtctagcaaactctggccttaatttccagcctacagcaaacctgaaacagtaaatttgaaggggaatagtaaattcagagctcttttactaaatttacatttgctagcaacattgtgtgaca

SEQ ID NO: 890944 - DNA, 580 bp, Homo sapiens
ataccacttgacccagcgatcccattacggggtacatacccaaaggattataaatcatgctactctaaaggtacatgtacacgcatgtttattgcagcactattcacaatagcaaagacttgaaaccaacccaaatatccaacaatgatagactggattaagaaaatgtggcacatatacaccatggaatactgtgcagccataaaaaaggatgagttcatgtcctttgcagggacatggatgaagctggaaaccatcattctgagcaaactatcacaagracagaaaaccaaacaccgcatgctctcactcataggtgggaattgaacaatgagaacacttggacacagggcagggaatatcacaccccagggcctgtcatggagcgggggcctgggggagcgatagcattaggagaaatacctaatgtaaatgacgatataatgggtgcagcaaactaacatggcacatgtatacctatgtaacaaacctgcacattgtgcacatgtaccctagaacttaaagtatttttttaaaaagtaagactcaataaaagagaaaatactaaagtaagttattg

SEQ ID NO: 890945 - DNA, 580 bp, Homo sapiens
ataccacttgacccagcgatcccattacggggtacatacccaaaggattataaatcatgctactctaaaggtacatgtacacgcatgtttattgcagcactattcacaatagcaaagacttgaaaccaacccaaatatccaacaatgatagactggattaagaaaatgtggcacatatacaccatggaatactgtgcagccataaaaaaggatgagttcatgtcctttgcagggacatggatgaagctggaaaccatcattctgagcaaactatcacaagaacagaaaaccaaacaccgcatgctctcactcataggtgggaattgaacaatgagaacacttggacacagggcagggaatatcacaccccagggcctgtcatggagsgggggcctgggggagcgatagcattaggagaaatacctaatgtaaatgacgatataatgggtgcagcaaactaacatggcacatgtatacctatgtaacaaacctgcacattgtgcacatgtaccctagaacttaaagtatttttttaaaaagtaagactcaataaaagagaaaatactaaagtaagttattg

SEQ ID NO: 890946 - DNA, 585 bp, Homo sapiens
acacggtgctaagaggaaagttcatagccctaaatccctacatcaaaaagactgaacgagcacaaactgacattctaaggtcacacctcaaggaaccagagaaacaggaacaaaccgaacccaaacccagcagaagaarggacataaccaagatcagagcagaactaaatgaaattgaaacaaaaaaaaaatacaaaagataaatgaaacaaaaagctggttctttgaagagataaataaaattgatagatcattagcaagattaaccaagaaaagcagagagaaaattacagttgacaccactgaaatacaaaagatcattcaaggctactgtgagcacctttatgcacataaactaggaaacctagaaaaggtggataaattcctagaaaaatacaaccctcctagcttaaatcaggaagaattagacatcctgaacagaccaataacaagcagtgagattgaaatggtaattgaaaaagttaccaagaaacaaaagctcaggaccagacggattcacagcagaattctaccagacattcaaagaagaattggtaccaatccttttgacactattccacaagg

SEQ ID NO: 890947 - DNA, 611 bp, Homo sapiens
ttttcaccaagagtgaaacttgaagccctaccccagtgtattagtctgttctcacgctgctggtaaagacaacctgggactgggtgatttataaagaaaaagagtttaatggacttacagtgccacgtggctggggaggcctcacaatcatggtggaaggcaaaaggcatatcttacatggcggcaggcgagagagaatcagagagccaatcgaaaaaggaaaccccttataaaaaccatcacatctcatgaracttattcactaccataacagtatgggggaaactgcccccatgattcaattatctcacactgggtcccacccataacatgtgggaattacgggatgagatttgggtggggacacagccaaaccatatcacccagcaattatgtcattttatatgaggagcatagttgtattttcttccccttggtcctggctttctattaatactttatcatttacttttgtcccctgtgatacaaatgtgtaaaaaaaatctgtaaattgaagtgggaaataaacaagtgaattatgttacatagttaaatatattatttatgatcattaataaaacacgtaatccctctatgttctcaagttgtca

SEQ ID NO: 890948 - DNA, 611 bp, Homo sapiens
ctaatttttattcccatcaagtctaaaatttacaaggatgtttatagttttgaatcagtgctattctatccaggtttgtatttctgaaaggatgttagtaaaagagatcattgcaagttcttgagactactccactaygccaaatgtcaaaaacatattgttctctaattacaggtaataactatttggtaagtaacaaacacatgaataaccaagttaatatgcaataaaaatatgacccagaaaagaatagaaggttatcacagaaaagtatgaattcaatattatatttacaaaacttaaattaacaataagctagtaaataacatgtacaaagataatgcgtgcagctgcttacagagattgcttattaaatgttgaaaatgaaagtaagaaatcttatttcacttgaagtaccaatatatccatcaggtacagaagggaagaatgccatgaaccactgcctaactatataaacttaaacaaaacatagctatagcaaaagttaaagcccaagataggtagctccttctttcatagtactcactgtccttctgtgaatagaatttaccactggcaaaggaagaacatgccagccacatgtttcttaa

SEQ ID NO: 890949 - DNA, 621 bp, Homo sapiens
cattttctcactgctgataaatacacacctgagactgggtaatttataaagaaaagagatttaatggactcatagttccatgtggctggggatgcctcacaatcatggtggaaggcgaaaggcatgtcttacctagcagcataaaagagagaatgagaaccaagtggaaggggaaaccccttatagaacaaytgaatgttattcacaaccatgagaacaatatgggggaaactgcccccatcattcatttatctccaactgggtctctcccacaacatgtgggaattatgggagctacaattcaagatgagatttcggtagggacacagccaaaccgtatcagtgagctcttgtccttcatccaagaagaatgaggatacactgacagtttgaaggttgaagatgggcagagaagaattttattgagtaatgaaacagctataagtggagaggggacttgagggagggtggtccctcacccccacagttgggtggtttctctcttccagtgtggctgggtccagggctttttatgcactcagaaaggggaatgtgtgctgattggcttgtgagtatgcaaaaaaggttaaagcgaagacaccactcaaaggtgggcacaac

SEQ ID NO: 890950 - DNA, 538 bp, Homo sapiens
gatggtagaaggcatatggtaaaatatttgatttaagtgctttgtatatggtaaacaataactatttgccattttattattttatttccttttatactcttatttgtcaaacttaggtattctgaagggtttttatgaagggtttaccaaccaaaggcaaacttcaatctggcctgtgtccaaattttcacaaattcagaattatggagattttaatatggattatatatgtggttarcgtttctatttttatagtaaagataattactactttatttctattacatttgtcacttgaaagtaatttatactcactctagaaatgtttggaaagcttaagaaagttaaagaaaagaacttactcaagatctttttacttggggttaactactattaattttcatgtatttcattccagtatttttgaatacacatatagagtatatatgcacatataacaaaatttgatatatgcatatattataaaattggaatcattactatataaaatttgtaccgtgtgtttttaacattagta

SEQ ID NO: 890951 - DNA, 538 bp, Homo sapiens
gatggtagaaggcatatggtaaaatatttgatttaagtgctttgtatatggtaaacaataactatttgccattttattattttatttccttttatactcttatttgtcaaacttaggtattctgaagggtttttatgaagggtttaccaaccaaaggcaaacttcaatctggcctgtgtccaaattttcacaaattcagaattatggagattttaatatggattatatatgtggttagcgtttctatttttatagtaaagataattaytactttatttctattacatttgtcacttgaaagtaatttatactcactctagaaatgtttggaaagcttaagaaagttaaagaaaagaacttactcaagatctttttacttggggttaactactattaattttcatgtatttcattccagtatttttgaatacacatatagagtatatatgcacatataacaaaatttgatatatgcatatattataaaattggaatcattactatataaaatttgtaccgtgtgtttttaacattagta

SEQ ID NO: 890952 - DNA, 735 bp, Homo sapiens
gactaaaccaggaagaagttgaatccctgaatagaccaataacatgttctgaaattgaggcaataattaatagcctaacaaccaaaaaaggtccaggagcagacagattcacagccgaattttaccagaggtacaaagaggagctggtaccattccttctgaaactattccaatcaatagaaaaagagggaatcatccctaactcattttatgaggccagcgtcatcctgataccaaagcctggcagagacacaaaaaaagagaattttagaccaatatccctgatgaacatcgatgcaaaaagcctcartaaaatactggcaaaccaaatccagcagcacatcaaaaagcttatccaccatgatcaagttggcttcatccctgagatgcaaggctggttcaacatacacaaatcagtaaacataatccatcatataaacagaaccagagaaaaaacccacatgattatctcaatagatgcagaaaaggcctttgacaaaattcagcagcccttcatgctaaaaactctcaataagctagatattgatgggacgtatctcaaaataataagagctatttatgacaaacccacagccaatatcatactgaatgggcaaaaactggaagcattccctttgaaaactggcacaagacagggattccctctctcaccactcctattcaacatagtgttggaagttctggccagggtaatcaggcaggagaaggaaataa

SEQ ID NO: 890953 - DNA, 735 bp, Homo sapiens
gactaaaccaggaagaagttgaatccctgaatagaccaataacatgttctgaaattgaggcaataattaatagcctaacaaccaaaaaaggtccaggagcagacagattcacagccgaattttaccagaggtacaaagaggagctggtaccattccttctgaaactattccaatcaatagaaaaagagggaatcatccctaactcattttatgaggccagcgtcatcctgataccaaagcctggcagagacacaaaaaaagagaattttagaccaatatccctgatgaacatcgatgcaaaaagcctcaataaaatactggcaaaccaaatccagcagcacatcraaaagcttatccaccatgatcaagttggcttcatccctgagatgcaaggctggttcaacatacacaaatcagtaaacataatccatcatataaacagaaccagagaaaaaacccacatgattatctcaatagatgcagaaaaggcctttgacaaaattcagcagcccttcatgctaaaaactctcaataagctagatattgatgggacgtatctcaaaataataagagctatttatgacaaacccacagccaatatcatactgaatgggcaaaaactggaagcattccctttgaaaactggcacaagacagggattccctctctcaccactcctattcaacatagtgttggaagttctggccagggtaatcaggcaggagaaggaaataa

SEQ ID NO: 890954 - DNA, 578 bp, Homo sapiens
caaagaacttcaacaaatttacaagaaaaaatcaaacaacctcaccaaaaagtgggcaaaggatatgaacagacacttttcaaaagaagacatttatgcagccaacaaacacatgaaaaatgcttatcatcactggccatcagagaaatgcaaatcgaaaccacagtgagatascatctcacaccagttagaatggtgatcattaaaaagtcaggaaacaacaggtgctggagaggatgtggagaaacaggaacacttttacactgttggtgggactgtaaactagttcaaccattgtggaagacagtgtggcgattcctcagggatctagaactggaaataccatttgacccagccatcacattactggatatatacccaaaagattataattcatgctactataaagacacatgcacacgtacgtttattgtggcactattcacaatagcaaagacttggaaccaacccaaatgtccatcaatgatagactggattaagaaaatgtggcacatatacacaatggactactatgcagccataaaaaggatgagttcatgtcctttgtaggaacatgg

SEQ ID NO: 890955 - DNA, 578 bp, Homo sapiens
caaagaacttcaacaaatttacaagaaaaaatcaaacaacctcaccaaaaagtgggcaaaggatatgaacagacacttttcaaaagaagacatttatgcagccaacaaacacatgaaaaatgcttatcatcactggccatcagagaaatgcaaatcgaaaccacagtgagataccatctcacaccagttagaatggtgatcattaaaaagtcaggaaacaacaggtgctggagaggatgtggagaaacaggaacacttttacactgttggtgggactgtaaactagttcaaccattgtggaagacagtgtggygattcctcagggatctagaactggaaataccatttgacccagccatcacattactggatatatacccaaaagattataattcatgctactataaagacacatgcacacgtacgtttattgtggcactattcacaatagcaaagacttggaaccaacccaaatgtccatcaatgatagactggattaagaaaatgtggcacatatacacaatggactactatgcagccataaaaaggatgagttcatgtcctttgtaggaacatgg

SEQ ID NO: 890956 - DNA, 578 bp, Homo sapiens
caaagaacttcaacaaatttacaagaaaaaatcaaacaacctcaccaaaaagtgggcaaaggatatgaacagacacttttcaaaagaagacatttatgcagccaacaaacacatgaaaaatgcttatcatcactggccatcagagaaatgcaaatcgaaaccacagtgagataccatctcacaccagttagaatggtgatcattaaaaagtcaggaaacaacaggtgctggagaggatgtggagaaacaggaacacttttacactgttggtgggactgtaaactagttcaaccattgtggaagacagtgtggcgattcctcagggatctagaactggaaataccatttgacccagccatcacattactggatatatacccwaaagattataattcatgctactataaagacacatgcacacgtacgtttattgtggcactattcacaatagcaaagacttggaaccaacccaaatgtccatcaatgatagactggattaagaaaatgtggcacatatacacaatggactactatgcagccataaaaaggatgagttcatgtcctttgtaggaacatgg

SEQ ID NO: 890957 - DNA, 660 bp, Homo sapiens
gtggaagtaatgttaattgagtattggaagacaacattgtataaagtactcttcctagattctagacatctccaactagaatctacaagagctgctgtacagagaagtaggttactacctagagggagacgccgggtggtgggagggtgtgtttgctttgcttgttttgcattttgttcaatagtgggagtgactgagcatttttgaatgtaagaatgtaaattacttaagccactatggaaaactattgggaaatttatcaaagaacttaaaacagaactrccattccacccagcaatcccattactgggtatatatccaagtgaaaatcaattgttttaccaaaaagacccacgtacgtgtgtgatcatcacagtactattcacaatagcaaagtcatggaatcaatccaggtgtccatcaatggtggattggatttaaaaaaatgtggtacatatataacatgaaatactatgcagccataaaaatgagtgaaataatatcctttgcagcaacacatatgcagctggaagccattatcctaagcgaattaacaaaggaacagaaaactacattctacatgttctcatttataagcaggagcaaaacactgggtattcatggacataaagattggaacaatagacactggagactact

SEQ ID NO: 890958 - DNA, 622 bp, Homo sapiens
gttttttataatattttgatatattcttaaaaagttacatatatctacctctgattcagctattccattcttaggtatttattcaaaaaaataaaagaatatgtatataggaagacttgtacattagtgttcatagaagctttacttaaaagagccaaagctagaaataaattttcgtcaacatatttatggataaayggttgtatattcatacaataaaaataaagtttagcaatgaaaagaatgagatatttacggacacaatggagtagattaaatgcaaaataattttgctgagtgaaagaagccagagagaagaatagtacagactgtctggatttgtttactaagaactttaggaaatgcaactgtcgtgatagaaagcagaacaatggttgcttgggaaaggaaggggcagaaaggaaaggaaaagatttaaaagaggcatgaggaattactgggaaataatagatatgttcattatttttatagtggttatggtttcacatgtatatacatatttttaatttacaagtcatactgttaaaattatgttcagtttattgtccctcaatgttacttaagaaagttagttttaagaaaatatgaaaggtctatcttc

SEQ ID NO: 890959 - DNA, 507 bp, Homo sapiens
cttttttaaaataatcatttttaaaacaacttcaaaatagctagagatattgcctttaaaactaatagcaaaaatattatattttaaaataaagagaaaatcaaaaccaatactttttaacttaatctccacagttaaaacataaccaaaaatcgataagataaatgagataattaaagttgaagttaattaaaattgaatgattttcacgaatrtatagaacaaaaagcaaaaagcaaagagaaaataaattctataataagaagtagagaaataagattaatgatgctgtaacacacttgagatattgattttttccctttatcagacttcaacagaaaaaaaatggagaaaagaaatgtaaacagtcaagagacaatgaagaatgcaaaaaaacaaaaacaaaaacaaaaacaaaaaaaagtcccagcccttttccttgctgagcaggtatgagaaatttcgaaaatcatttataagtgagcagacttactgtacttcaatcca

SEQ ID NO: 890960 - DNA, 507 bp, Homo sapiens
cttttttaaaataatcatttttaaaacaacttcaaaatagctagagatattgcctttaaaactaatagcaaaaatattatattttaaaataaagagaaaatcaaaaccaatactttttaacttaatctccacagttaaaacataaccaaaaatcgataagataaatgagataattaaagttgaagttaattaaaattgaatgattttcacgaatatatagaacaaaaagcaaaaagcaaagagaaaataaattctataataagaagtagagaaataagattaatgatgctgtaacacacttgagatattgattytttccctttatcagacttcaacagaaaaaaaatggagaaaagaaatgtaaacagtcaagagacaatgaagaatgcaaaaaaacaaaaacaaaaacaaaaacaaaaaaaagtcccagcccttttccttgctgagcaggtatgagaaatttcgaaaatcatttataagtgagcagacttactgtacttcaatcca

SEQ ID NO: 890961 - DNA, 675 bp, Homo sapiens
taacgtcacttcatccaatcaagaaaaagccaagaactaacttgacatctgcaagaacagtgactgacttgacacctacaagtacaattactttctgaggcattgctgggaactttgatggtctcaaagatccctctccatccaaaaaacaagagttactggtgtgcaatcaagagcagtgaaaggtaggcaaactgggaagagctgctcaggaagcagtcttgagactgggatactgaactttagtacaggaacagagtagagctgtgcctggaacttctgcccatgttaagatttccagttcaacaggaaggtggtccaaaatcagtagcatgcccaggctccttggcagacaaactcaaactatctccaaagaaaagcatctctggaatcctacaggtgaagataaagcaatgagcttacaaagataaatacrcacaagaaagagagcaagccatcatgaatctgagtcaatgtagacagcccaggttgcaaacagcagaactgtcaaataaagaataagaacaatcaagtaggaaatgtctaaagaaataaatgaataagaaacaaaggactatcaagaatgcccagacagatttgaaaaataagcaaatggaacttattaaaataaaaaataattgctaaaatcaaatattcagaaaagtagcagattag

SEQ ID NO: 890962 - DNA, 550 bp, Homo sapiens
tttttagtttatcggtatttttcttattgttatgtggaggacactgcgtttgccaggttttttgtttttgtttttgtttttgttttttgagatggagtattgctctgtcgcccaggctggaggacagtgatgcgatcttggctcgctgcaatctctgcctcccaggttcaaatgattctcctgcctcagcctcccaagtagctgggattacagttgcatgacaccacacctggctaatttttgtatttttagtagagtcagagtttcaccgtgttggtcaggctgatctcaaactcctgacctcaggtgatccacccaccttggcctcccaaartgctgggattacaggcatgagccaccacgcccggctgcctttgccagttttctacatcctatgtggaacccagaaatccctgatgtccatttgtgttgtagttatctagttttttttctagttgttacagtgggaataatggtctttcactatcttctacattctgacccaaagccaaatgtcataataacctttctgaaacataaattggatcat

SEQ ID NO: 890963 - DNA, 595 bp, Homo sapiens
taatattggaaatcgaaacttaatacctgtgacttgagccaaaaacaggaaaaaactggaaattccaaactgaagcattttttaaaaagtaatcagtaaccaaaacaaagacatcaagtgaacttgctttaactatcataaatactttgaagcaaaatatytattcagctcaacaaactaaagcatctggctatagaattatgagaaaatgaattcatctccctgggctttcatttcctcatctgtaaaataaagaatttggtcttggtgattcataatctccctttagggagagctggcattctgttgtatgtattattgaattcaatattaactactcatttactttgttctagtgtttggattgcccttaaaataatagactactactaaggtctctgttttgaattgtatacaatatggcattggggcaaacagctctccagagtgtttattcttatattgtttattttttttcctagccatgcaggatcatttgccttcctgcaagatgttcttcaataaaacaggattagcaatgctgataatggagatatttgccagagtgtaagtgggacaagaagaacagataaat

SEQ ID NO: 890964 - DNA, 610 bp, Homo sapiens
aagtgttcttgcaagaaaaagaaaaaaaatggcaattttgcttaaaaattggtcccttcactctctctgagcatcaaaggtagtaaaaatccggtgcctattttcttacctataatgctcaggggagatgaatgatttcacctgagagtggcttttatgccctcctttgttatattattccataaaacatggaagattggaggaagaaggagtcagggatgagtgagcatgctgctgtcctcccagaattcctttgtaattaattggtaaaagtatgaataaacaaatccactaatgttttcttgaatggctaatttattaatgaatttcaaatataaattcattattattcttcacaaatatagttctagttttaaagattttckttgctttttattttttaaatatttttatttactgttaaagttatttaatatattgttgtttctctctttccattgtaatgtaaggcacatgaggacagggcctatgtctatgttcttctttacataccccaatgattagaatagtgactggaacatagtaggtactcaagagatacatacaaaattagtgatttttatttttatgttcaacctcttatctaaat

SEQ ID NO: 890965 - DNA, 663 bp, Homo sapiens
attcttcaaatgcacagatgttagtgtaaggcaacaagtaacatgaaagcaatgaaacataataccacccaaataacacaataacctcccagtggttgacaccaaagaaatggagatatatagactgtctgacaaataaatcaaaataaatgttttaaggaagcttagcaaacttcaagaatatacagagaaacaattcaatraaatgaggaaaacaataattgaccaaataagatatttaaaagggatattgaaattattttttaaaaaatcaaacataaattcaggagatgagaaatataatgaatgaaataaaaatacaatagagagtatcaatagcagaacctattaagcagaagaaacaatttgtgaacttgaccacaggctatttgaaacaaacacacacagaagagaaaaataaagcataaaaagaaactaagaaaactttcaagattttggggacagcatcaaaagagaaaacatttgagttacacaatttcaaggagaagaagagagagacataggagctgaaagcttatttaaagaactaatatcaaaagatttccaaatctggggaataagaaatatcttgaatgtaaatggattgaattctccaattaaatacatagagtgactgaatggttgagaaaataaaatccaatc

SEQ ID NO: 890966 - DNA, 577 bp, Homo sapiens
gtcccaccaacagtgtaaaagtgttcctatttctccacatcctctccagcacctgttgtttcctggctttttaatgatcgccattctaactggtgtgagatggtatctcattgtggttttgatttgcatttctctgatggccagtgatgatgagcatttttccatgtgtcttttggctgcataaatgtcttcttttgagaagtgtctgttcatatcctttgcccactttttgatggggttgtttttttcttgtaaatttgtttgagttcattgtagattctggatattagccgtttgtcagatgagtagattgtaaaaatttcctcccattctgcaggttgcctgttcactctgatggtagtttcttttgctgtgtagaagctctttagtttaattagatcccatttgtcaattttggcttttgttgycattgctttcagtgttttagacatgaagtccttgcccatgcctatatcctgaatggtattacctaggatttcttctagggtttttatggtttcagatctaacatttaagtctttaatccatcttgaattaatttttgtatgcagatgac

SEQ ID NO: 890967 - DNA, 577 bp, Homo sapiens
gtcccaccaacagtgtaaaagtgttcctatttctccacatcctctccagcacctgttgtttcctggctttttaatgatcgccattctaactggtgtgagatggtatctcattgtggttttgatttgcatttctctgatggccagtgatgatgagcatttttccatgtgtcttttggctgcataaatgtcttcttttgagaagtgtctgttcatatcctttgcccactttttgatggggttgtttttttcttgtaaatttgtttgagttcattgtagattctggatattagccgtttgtcagatgagtagattgtaaaaatttcctcccattctgcaggttgcctgttcactctgatggtagtttcttttgctgtgtagaagctctttagtttaattagatcccatttgtcaattttggcttttgttgtcattgctttyagtgttttagacatgaagtccttgcccatgcctatatcctgaatggtattacctaggatttcttctagggtttttatggtttcagatctaacatttaagtctttaatccatcttgaattaatttttgtatgcagatgac

SEQ ID NO: 890968 - DNA, 577 bp, Homo sapiens
gtcccaccaacagtgtaaaagtgttcctatttctccacatcctctccagcacctgttgtttcctggctttttaatgatcgccattctaactggtgtgagatggtatctcattgtggttttgatttgcatttctctgatggccagtgatgatgagcatttttccatgtgtcttttggctgcataaatgtcttcttttgagaagtgtctgttcatatcctttgcccactttttgatggggttgtttttttcttgtaaatttgtttgagttcattgtagattctggatattagccgtttgtcagatgagtagattgtaaaaatttcctcccattctgcaggttgcctgttcactctgatggtagtttcttttgctgtgtagaagctctttagtttaattagatcccatttgtcaattttggcttttgttgtcattgctttcrgtgttttagacatgaagtccttgcccatgcctatatcctgaatggtattacctaggatttcttctagggtttttatggtttcagatctaacatttaagtctttaatccatcttgaattaatttttgtatgcagatgac

SEQ ID NO: 890969 - DNA, 720 bp, Homo sapiens
tgtccaatgatcataaagtgatatctaagtgagtttatttgggaaagaattttatgccctgtcaatctgtcttttatttttaagaaaaataacaaagacaggctggaatacataaggatgtggaaaatatgccattcatatactcaatatgaaaaggatccttggacattcttcaatcaactagtattattttcctcttccaggaatgtatgataaggaaataagagcctgtgaataaagacctttatcatgggacattttgtgacaaaaatggtaaaaaaaaaaaaaaaaaaagaaaatgtcaacattctatgcatatccaagagcctggaataataagcagttaataaaataatggtgtgggtggaccatgggcgtcccattacatgggaaatactggcaatgccatattaaatgaaataatctaaatagaaattctccatgtttaaggcygggcatggtggctcatgcctataatcctagcactttgggaggctgaaaatgggagcatcttaaggctaggagttcaaaattctccatgtttaaagaaaaagttttatgtaacaaatgctaggataaaatatctcaacaaattaagagtgattgtctctggatagtgggattaaaatttcttttctaaagtttcacatttttttgatttttatcattagaaaaaaaatcagcaaaacaggtagagagatatgattcatttgaagtctg

SEQ ID NO: 890970 - DNA, 588 bp, Homo sapiens
tttcaaaggaggtatcaatagtgaaccaataaccagatctagtacaccctttcatacaggccttttccatagtgtcaactactgaatttatctctttgtgtgtggcaaggccaggaatttctaacttgaaattgtggttatatctccaattctcaccttaagytaaaaatacttaaagatgtcttgaaaaagtgtttttctcttacctataacaagacttttcataacatctttgacttctcccttttcttgttaccaggttctgttgctttccttcatatatttctcatagccccattcttccttcttattgtcacattaccttcttgcatcaattcttttgaatagccttttaatatctagcttctttccaccagaccattctgctcactgctgctagataaattttcttaaagcaatttttattctttcattcattcaagaaatacttatcaaatataatgccctgagcttcatgccattcccttgctcaaaaaccattttactataataatattccctttctttttccatgacccaacacttctgtggggtgaaatacacaccttaataacaatgactcactac

SEQ ID NO: 890971 - DNA, 588 bp, Homo sapiens
tttcaaaggaggtatcaatagtgaaccaataaccagatctagtacaccctttcatacaggccttttccatagtgtcaactactgaatttatctctttgtgtgtggcaaggccaggaatttctaacttgaaattgtggttatatctccaattctcaccttaagctaaaaatacttaaagatgtcttgaaaaagtgtttttctcttacctataacaagacttttcataacatctttgacttctcccttttcttgttaccaggttctgttgctttccttcatatatttctcatagccccattcttccttcttattgtcacattaccttcttgcatcaattcttttgaatagccttttaatatctagcttctttccaccagaccattctgcwcactgctgctagataaattttcttaaagcaatttttattctttcattcattcaagaaatacttatcaaatataatgccctgagcttcatgccattcccttgctcaaaaaccattttactataataatattccctttctttttccatgacccaacacttctgtggggtgaaatacacaccttaataacaatgactcactac

SEQ ID NO: 890972 - DNA, 666 bp, Homo sapiens
gatccaaacagcagggcaaggtagggtgaaataagttgccaaggtcatggtcatgaagtagtattagactcagaaaggctgatccccagtgcttgctccaccccatggatctctcctaccctccttctaaacgatactgtgggataaaataaaattaatctactgtatatgtgcaaaccacaggcctgcccttaactctttccttaccttctagtttcagattattcaaatcayggaggaaaagattagatcacaacacgttgacttcactgtattaccatacaaatgaaataacttagtacaaactgtgatctggggactcttgatctaaactgggaactgctgttgactgcattttaaactctaaaagtattttgaaactctttaatttcttgaactgaaaaaattgctttgaattcactttgttttaattctgagaacctaaaaacagggattctttaaaaaaaaaatgcaaaggctcacatgccagaaagaaagaagctgaggagataaaaatgtgtaaataattcttactttaatacccttagctagaaaaaccttaaaagcgacacatccagaagctcgttaagtcacagcctctttgaacctatttcagtgaaccaccgaatttcagatccctcaggtgcgactctgaattcagaattc

SEQ ID NO: 890973 - DNA, 666 bp, Homo sapiens
gatccaaacagcagggcaaggtagggtgaaataagttgccaaggtcatggtcatgaagtagtattagactcagaaaggctgatccccagtgcttgctccaccccatggatctctcctaccctccttctaaacgatactgtgggataaaataaaattaatctactgtatatgtgcaaaccacaggcctgcccttaactctttccttaccttctagtttcagattattcaaatcatggaggaaaagattagatcacaacacgttgacttcrctgtattaccatacaaatgaaataacttagtacaaactgtgatctggggactcttgatctaaactgggaactgctgttgactgcattttaaactctaaaagtattttgaaactctttaatttcttgaactgaaaaaattgctttgaattcactttgttttaattctgagaacctaaaaacagggattctttaaaaaaaaaatgcaaaggctcacatgccagaaagaaagaagctgaggagataaaaatgtgtaaataattcttactttaatacccttagctagaaaaaccttaaaagcgacacatccagaagctcgttaagtcacagcctctttgaacctatttcagtgaaccaccgaatttcagatccctcaggtgcgactctgaattcagaattc

SEQ ID NO: 890974 - DNA, 622 bp, Homo sapiens
attctgactggcgtgaaatggtatctcattgtggttttgatttgcatttctctgatcagtgatgttgagctttttttcataagtttgttggctgcataaatgtcttcttttaaggagtgtctgctcatgtcctttgcccactttttgatggtgttgtttgcttttttcttgtaaacatgtttaaattctttataaattatggatattagacctttgccagatgggtagattgcaaaaattttctcccattctgtaggttgtctattcackctgatgatagttttgtttgctgtgcagaagctctttcagtttaattagatcccatttgcaaattttgacttttgttgcaattgcttttggcgtttttgtcatgaagtctttgcccatctctgttttctgaatggtattgcctaggttttcttctggggtttttatggttttgggctttacatttaagtctttaatccatcttgcgttaacttttgcatcaggtgtaaggaaggggtccagtttctgttttctgcatatggctagccacttttcccagcaccatttactgaataggagatcctttccacattgcttgtttctgtcaggattgtcaatgttgtagacggttgta

SEQ ID NO: 890975 - DNA, 716 bp, Homo sapiens
ttcttggagtgctgttgggaaaatgatcctggatttgtatctctgccctgcaggaaagagaattatgatctattggtgatgtctaccccaggggtgggagagaagagtgacagtgaacatgctgtgtatttgcaatttatggatggttgaatttgaaggcctcttctaactctgatggcctgtgcttctgtgatactaaactctaatagtgtttagaaggctctgccaatgtgtttggagaaaaaagaggtcaatagttaagaagagagatgaaagacgagcattgcgcaagggggaggccaaggccagttagcagataactgccgctttcttactgctcyttccatttcctcttggatggaatccactctctctgccttcctagtccacttcaggtggaattaatctctggctctaggggtggccacgtgatctagtgactaagatcattggattcccttggttttgtgcatgacctaaccagagttagtgagatgaaatgaggcttttgttgggactcttttctgagagagaggcagcgttcttttccattggacttgcatctgggaagttgtagcctggatcttctggcagccctcctttcaccatgggctgcttgacaaagaggccaatatgaagaaacataaagtcaagagatgacaagagatggagtaatggagacatctttgtggcccctggatccggccatacctgat

SEQ ID NO: 890976 - DNA, 716 bp, Homo sapiens
ttcttggagtgctgttgggaaaatgatcctggatttgtatctctgccctgcaggaaagagaattatgatctattggtgatgtctaccccaggggtgggagagaagagtgacagtgaacatgctgtgtatttgcaatttatggatggttgaatttgaaggcctcttctaactctgatggcctgtgcttctgtgatactaaactctaatagtgtttagaaggctctgccaatgtgtttggagaaaaaagaggtcaatagttaagaagagagatgaaagacgagcattgcgcaagggggaggccaaggccagttagcagataactgccgctttcttactgctccktccatttcctcttggatggaatccactctctctgccttcctagtccacttcaggtggaattaatctctggctctaggggtggccacgtgatctagtgactaagatcattggattcccttggttttgtgcatgacctaaccagagttagtgagatgaaatgaggcttttgttgggactcttttctgagagagaggcagcgttcttttccattggacttgcatctgggaagttgtagcctggatcttctggcagccctcctttcaccatgggctgcttgacaaagaggccaatatgaagaaacataaagtcaagagatgacaagagatggagtaatggagacatctttgtggcccctggatccggccatacctgat

SEQ ID NO: 890977 - DNA, 643 bp, Homo sapiens
tgaacccttagtatgcacagtaattgttcaaggtactgaattacaacagtgaacaaagaagatacaaaatttctgcccttctagactacattttattaaggagaggcaggaaatagacaagatagatcaggataagcgcaaaagagtaaaacaagttaaaaagaagggcaagaaatttaaggaaagagaattatctcccattttaaataggattgttaatgcatgtctcgtaaaggaagggccatggaagcaaaggttggaaggagaagaggcagtgagccrgatgaatacctggggaaaggacgttctatgaagagggcatctggcttaaaaggctctgcgtgctctggctctggctacaccaatcagaaccatgctcattacaataccagggacagcctttagcaatccaccgaagtcagtatttaagctataccatacttgattctccaagtttaaatagagcccagcaagcaatctggtctgataacatctcaaaagcccattttgttcgatattacaattagtaggtatttattaaatagttactatttgacaggcagtgtcattagtgctgagaacaactcagtgaattaaataggtgaggtcttctgttcataaagagctgacattccagtagtag

SEQ ID NO: 890978 - DNA, 624 bp, Homo sapiens
ctagtttattttgcttatacttcatgaaggctttcctatatatgacataacatttagagaaattatttggtcagggtaagtatcacaatattgggctttgaacatgtgacctccagagtttcatgccactttgggcacatgattagacagataagtgatggatatgcaggactgctagtcagataagctgatgactatatcagatgtggtaggtctaggcaggtaagagaaagttgaacaagaagtagcaagcacttttgaggaatattaataattatataaagatctgatattagcacagatctgcaaataaactacaatggaagcatctcctgtcttctacacttcctgcaatttctttccagactattttaagaagtccaggtttatggctacagcaccttctgacgctttgatgaaaaaaaaaacacaaaacaacaacaacaacaacaaaaacytagatccattaatatttacacattacacaacatttattttttcagagatgttaggaattatcaggtagtgttctcttagatatcaggtatgatatgagataacgcctctggataaaatgacaccagaaaattttctgcccattcttgattatatgctgacagcagg

SEQ ID NO: 890979 - DNA, 364 bp, Homo sapiens
tcctcacccctggtgattagctgatgttttctgggcacatagatttcttgtgagaaaatacggatggagagagaggaatatgttgttggggcaatgcagagattagcacgagtggtcagaattagacaggctacagrtaaacaagtccaggaaagtatggtctgtagttgaagtttagcaaggaaacagtcaattttagcaagttcgatgagtatatgccatgattttgggtttagcaagataactgagttcaagagctttcaaaagtattgcagaaaatatctgaagcagttttttttttttccccccacaaagggttgtagggaaagaagggaaagtccgacatcatcaccaaggatgtaag

SEQ ID NO: 890980 - DNA, 659 bp, Homo sapiens; identical to SEQ ID NO: 890207

SEQ ID NO: 890981 - DNA, 646 bp, Homo sapiens
gcttaatattcctttttttccccaggtatctctattataaaattgaagattaagggggaaaagggagaaaattatagtcaaattctggtctataaatattacaaaagaactttaaatatgtgattgcttaattcatttctatacatatatatacatatttcattttgatttattcaccaaataaccacttgctgaatatatactctgtaacaagcattaagtattagaaatacaaagaaaactaactcatggtcaattttactacaaaatagtaaccagccagatgtggtggcttacacytgtaatcccagcactttgggaggccaaggcagggggagcacttgaggtcaggagtttcagactagtctggccaacatggtgaaaccttgtatctattaaaaatacaaaaattagccaggcgtggtggtgcatgcctgtagtcccagctaagtgggggctaaggcagatgaatcgcttgaacccaggaggcagaggttgcagtgagctgagatcacaccactgccctccagcctgggcaacagaatgagactctgtctcaaaaaacaaccaccaccacaacaaaaattttactataaaatagtaatcaaattaatataaagcaatcatttgcaaagaaaaataaaat

SEQ ID NO: 890982 - DNA, 718 bp, Homo sapiens
tttgagtagtgcctggcacatgtaggggcataataaatatttactaaataagttgctaaaataagcaaaataattatagtttgtgataagcaccaagaatgaaataaacaagttgacagataaaacaaaggctgtccaccttggctacacattaaaaccacttgaggagcatttagaaatacagatagctgagttccattctcagaaattctgatttacttcatctagaagaggcctggccattgttttgttttttaatgctctctgagtgattctcaatttgaagyaagcctgagaaccaatgagtttgagaataacgtggggacaagaacctacttgagacagggtgcacagggaaggcttttcatgttcttctgagaaagtataattgaaatggaaacctgaaggacgaaaagaaacatggggaagttggggcaaggctggcattcaattgttggtagagggtcaaaacaagattaaaagcactgaagcagggatgagcttggtgtatcctcagaacagtagatcagcgcaggtggtgcacagggggcaaggggaagagtgtaacaggatgaatgtggagagatgcacaggagccagattattcagggtcttctaggccatgggaaggaaatatgaatttatactacatgcaatgggagccatgggagggttttgaggagggaaatcatgtgatctgattttttattttctaaag

SEQ ID NO: 890983 - DNA, 589 bp, Homo sapiens
aaattcatttctgaaaacaactgttttaaattttggttctgtggcacacacatttacctttttatgatgattatcttaaaggaaacctctttctacatatgtatataaaagttaaatgctaagcatattatctaaagtcagtagagacacaccagggaaggaattcctggtgtctggaatatacaaataaaaaggttttgttttcatacacttggataactctaaacttctcagaataattagtctgttagcaatgataaaacctggtataaaaagtcmaatactttttattttatcaaataaaaactatttggaattgagcttttgaaactgactcttccaactggtcttttgattgaaagctaattttttaaataatatacttcttataatgaggagaatatttttcaaacatgtttgaggaatggaacacccaagaatcttgttttttttctttccaaaacgaaactagtattgagataattggctttttttttttttaattctgggtccacaaggtaaaagactcacaaggaaaaagctactattaagaaaattaaaattttggttaactttttatttaccaaac

SEQ ID NO: 890984 - DNA, 571 bp, Homo sapiens
atgggatgatttatcctagattctgaccttttttaaataaaaaagattgtgatagtctaaaatattttatatatattttgttgattcattcatctactgatggacatttaggtcatttccaaatgtaattttttttaattctttgttttagtttcaagaaatacaggatcaacttacagctactataagatgtactaaggagatggaaggtgacgcacaaaagtaaaatttgaagcagcacacaaaataacttgagtatttataaagcaaragagcactgtagtatgaaaattgtatcagttatgataataagtatgtctttgtgaagccaaaaaagtttcatctgtaagctatattgacatacatcatttttcttcattattcctaaattttgcatattatcaacaaaacacaggtagaaaaatgacacagtagcccagtcatctacttttgcgattgctaagaatttgtgtaattataccttcagaagtttgtttagaatttacatgttttaaaaacaattatatgtgagagtaattattttaaaatgcacattttaggcttgaagtag

SEQ ID NO: 890985 - DNA, 588 bp, Homo sapiens
ttttattatccttatttgagatgagtgtgctgaggaataaaatggttaagtaagttgtccaaggtcgcttagctagcaagcctggctccagcgtccctgggttggaagcatattctgtactgctacatcagcataaaagttyatttttgctagtgtgtaacagtattcttcctgtcattaaaattaagtcagtttccttcactattcaacagttctcttatgaactcaacatttctacctcattcaccattgtatttagaggaaaatttattattattgttattacttttatttttgagacaagaacttgatccgtcactcaggttggactgcagtggtgtgatcacagctcactgcagcctagaactcttgggctcaagtgatcctcctgcttctgcctcccaaagtgccaggattacaggagtaagccaaagcgtccagccaggaaaaattatttgaggattacaggaaagctgacaaaaggctttgtgaaagctttgctttaaataatctgaataataaatacttgaaatggaaataatttatctgacttcttacacaagaaataaacctatgggaaaatgtgtt

SEQ ID NO: 890986 - DNA, 547 bp, Homo sapiens
attataggcatgagcaccacacctggccagtacttcttaaaaataattgctgatccacgttgaataatgatggcctgtaaatattttttcttgcacttgccttgttgggttttgatatcaaggttatttttattttaaccttgtaaaatgaactggggagtcttctttttttattctctgtttgtgttggtggcagagttttttttkttgtttggttggttggtttgtttctcttgtatgtttcatggaactttttggtgaaggcacttgggcctggaaatttctttatgggaagttttttcattactgattcaatatatttaatctatgtaagttttttttctactttttgagtcaattttgattttttttcctagaaattcatatctcaccaagtatggtggcttatgcttgtaatcccagcactttgggaggctcaggtgggaggaccacttgactacagtagttcaagaccagcctgggcaatatagtgagactccatctctacaaaaaaaataaaaattagcttggtgtggtggtgggtgcc

SEQ ID NO: 890987 - DNA, 632 bp, Homo sapiens
aattttgcattcaatcttagggactgcaggtgtctacattagttatatattggtgtaaaaaaaagagccccaaacttaaggcttaaaggaacaatagatgtttattatctcacagtttctgtggttcagaaagtcagtaacatcttaactggatacttctgacttggagtctcycaggaggttgcaatcaagatgttgttggggggaaaggggcaggttcagtggctcatgcctgtaatctctacactctgggaagcaaagccaggaggattacttgagcccaggagtttgagaccagcctgggcaacacagtgagaccctatgtattagtcagttctcacattgctataaatacatgagactggagaatttataaagaaaagaggtttaattgtctcacagttccacaggctgttcagggagcataatgctggcatctgctcggcttctggggcaaccacaggaaactttcaatcatggtggaaggtgaaggggaagcaggcacgccttacatggccaaagcaggagcgagagagaggggggaggtgccacacacttttaaacaattagatactgtgagaactctaacgagcacagcaccaaaagggtgatgctaaatcattcatgaaaga

SEQ ID NO: 890988 - DNA, 479 bp, Homo sapiens
ataaagatcagttcccttctaaagacttaaacagaaaaaatattatgtttttcatattttgagacagggtcttgttctgtcacccaggctggagtgcagtggcatgatcatagctcactgcagccttgaactcttgggctyaagcgatcctcccacctcagccccctgagtagctaggactacaggcgtgcatcacacctgactaatttaaaaagactgttttgtagagacggtctcactctattgcccaggctggtcttgaactcctggcctcaagtgatcctccaccttggcctcccaaagtgctgagattacaggtgtaagccaccatctctagcagggaaaaaaaaatgttattaataaagtatagcaatttccctttttgtcccaattataaaagtcatgtacatttgtttgcttgataaagaggaaactgtctgggcaaggtggtccacacctgtaatcccagcactttgggg

SEQ ID NO: 890989 - DNA, 479 bp, Homo sapiens
ataaagatcagttcccttctaaagacttaaacagaaaaaatattatgtttttcatattttgagacagggtcttgttctgtcacccaggctggagtgcagtggcatgatcatagctcactgcagccttgaactcttgggctcaagcgatcctcccacctcagccccctgagtagctaggactacaggcgtgcatcayacctgactaatttaaaaagactgttttgtagagacggtctcactctattgcccaggctggtcttgaactcctggcctcaagtgatcctccaccttggcctcccaaagtgctgagattacaggtgtaagccaccatctctagcagggaaaaaaaaatgttattaataaagtatagcaatttccctttttgtcccaattataaaagtcatgtacatttgtttgcttgataaagaggaaactgtctgggcaaggtggtccacacctgtaatcccagcactttgggg

SEQ ID NO: 890990 - DNA, 636 bp, Homo sapiens
tttccaaggaccctttaatacaattccctacttatgagcatctatacccttgataagtcacctttatctggtatcttttgactaaatgaactgtttagaatatagaatgagccttttctttgacattagaaaggtctggatttgaatttcaggcatgtttttactatataagtgatccctttraagtcctatttctcatctataaaatggtgattgtaacatcaaactgggttgtattgcatattaaataagattatgcatgaacctgataaaaaggcagtcattaataattttaaaaaatgctgagttcttactctatgtaggcacaacttaacactctagaatagagcagtaagcaagaaagacatggtcatagcccttgtagtgtttaccacaagtgaaatgagtcacataataatcaagtaaattagttatttcagatataaattactctgcataaaattcaacagtgtgttaggaacgagagtgattatcaagaaaggcattatcataagtgatcaaagataatttctaccatcctaagaagaaggtgtccaacaaagagtgtctcatgcaaagagaccaatttaaatgtttctgaaagcataatgtgtgtgaagaacaaaaatcaggcca

SEQ ID NO: 890991 - DNA, 636 bp, Homo sapiens
tttccaaggaccctttaatacaattccctacttatgagcatctatacccttgataagtcacctttatctggtatcttttgactaaatgaactgtttagaatatagaatgagccttttctttgacattagaaaggtctggatttgaatttcaggcatgtttttactatataagtgatccctttgaagtcctatttctcatctataaaatggtgattgtaacatcaaactgggttgtattgcatattaaataagattatgcatgaacctgataaaaaggcagtcattaataatttwaaaaaatgctgagttcttactctatgtaggcacaacttaacactctagaatagagcagtaagcaagaaagacatggtcatagcccttgtagtgtttaccacaagtgaaatgagtcacataataatcaagtaaattagttatttcagatataaattactctgcataaaattcaacagtgtgttaggaacgagagtgattatcaagaaaggcattatcataagtgatcaaagataatttctaccatcctaagaagaaggtgtccaacaaagagtgtctcatgcaaagagaccaatttaaatgtttctgaaagcataatgtgtgtgaagaacaaaaatcaggcca

SEQ ID NO: 890992 - DNA, 575 bp, Homo sapiens
agttacctggtcaaagtattaaaattactttaaggatttagacctttgtctatgctgcttactttctgaaaatatttcagcttatactttatcagtggtggatattagttctatttttactaaactttactaaacatttagtgttacctagggggaaaaaaaagcaatttgataggagtaaagtgtatctcattaaagtcttgtactatactcctgctgatgctgtaacaaatttccacaaatgtactattatataataatgtacatttaaggttttaacagttctggaaatcagaagttcagaatagctcttacagcacgaaaatcatcagaggttctgcagagttgcattctttttagaggctattaggagagaatctgytcaatgcctcttccaatgtctagggcctgcctgcatctcttggctagtggctgcatttctctgatttctgcttccatcgtcatatctccttccatgactcatttgtttccaccttctgtcttataagcaccattgtgattatattggtcctacccaataaatccaggataatcttccattttatgatccttaa

SEQ ID NO: 890993 - DNA, 644 bp, Homo sapiens
aaatgcaaaattctctggaaagtctcagcaatagaatcaaacaagcagaagaaagaactacagagctcaaagacaaggtttttgaattaacccaatctaacaaggacaaagaaaaaaatatataaacaaagactccaagaagtctcagattatgttaaatgaccaaacctaagaataattggtgttcctgaggaagaagagaaatctaaaagtttggaaaatacatttgggggaataattaaggaaaactttygtgggtttgctagagacctagacatccaaatacctaaatacaagaagcacaaagaacacccgggaaattcatcacaaaaagatcacctgggcacattgtcatcaggttatctaaagttaagacaaaggaaagaatcttaattgctgtgaggcaaaagcaccaggtaacatatatattaagaaaaaaaaaaaccctatcagataaacagcagatttctcagcagaaaccccctacaagctagaagggattcaggccctatcttcaacctcctcaaacaaagcaattatcggccaagaattttgtatccagtgaaactaagcttcagaagtgaaggaaagatatagtctttctcagacaaacaaatgttgagagaatttgtgactaccaagcc

SEQ ID NO: 890994 - DNA, 626 bp, Homo sapiens
aaaagtgtggctgggtatgagaacatagttccattaggttgtatataatgaccacaacagcagcccccatctgtgtcaagactcctaacttttagagtaaacctcctaacttttgttcatcaaaactgaactggttttcaccatgccctcaaactcaaaagatcctaaacaaaatgatggagaatgctgataagagaagagaggagtcattctcattgatgtgctttgtaaaaataaggcagagaaaaatgggagttctgtgtactgttgctctaactgtgaaggaaaacaactttaataattcagaacattttcctcttgggycttatggaacagaacaaagtttgatacttgagcttacttaaactctaaactcctaacattagcatgaccttgtttttgcttttgaacaattgggaaattatctgtaaagaaaagttctcaaacataagctgaaacctggtttctctatttcatcccaaccccaaggaaaaactatcacaaaaagaactttaccaattaaaaaaaaaaatcaaaagtaaccccaaaactacattacatctatttgtttagtggatgttttgtggtttgttgatgttggttttttgtctgctttttcctttatg

SEQ ID NO: 890995 - DNA, 625 bp, Homo sapiens
cagagtctgcattattgctaaaacccaccatcctggggtctagagtctaggttctacatggtgcctcatccccaaggacccaagttgccactgagccttagtggctcaggtttccaaattatagttataccctgcaccctgggattgaaccttcagagtatcccttcctccctggagtcaggccagggctgtaccctccccatcggkggtggaatcacagtacaactgaaccccctggacccaagctgccagggggtgtctcagagccacagattctgttgctgtgagcaaccaaccaaccctgcaacagagggtgaacctgcattccaaggcctaagtgccacaataggtttgtcagactctgaacctagcatcgtcagccccacattgtccaagcacctgtatctgctggaatcctgctgtttggaaactgtaagacataatgagaaaagggatctcttcaattaagtctctccattgtgaggaaagtgagaatagaaggatctcaggagctttcatgacagagaatattaatagcctacactgccaccatgactactacaaacttccagagcctaggacactgaggacctccagttattgatgataatgaaaacagctgaag

SEQ ID NO: 890996 - DNA, 644 bp, Homo sapiens
acaagccagaagagagtgagggccaatatttaacattcttaaagaaaagaattttcaacccagaatttcatatccagccaaactaagcttcataagtgaaggagaaataaaattctttacagacaagcaaatgctgagagatttcatcaccatcaggcctgctgtaaaagagctcctgaaggaagcactaaacatggaaaggaacaaccggtaccagccactgcaaaaacatgccaaattgtaaagaccatcaaggctaggaagaaactgcatcaactaacgagcaaaataaccagctaacatcataatgacaggattaaattcacacataacaatattaaccttaaatgtaaatgggttaaacactctaattaaaagacacaggctggcaaattggataaagagtccagacccatcrgtatgctgtattcaggagacccatctcatgtgcagagacacacataggctaaaaataaaggcatggaagaagatctaccaagcaaatggaaaacaaaaaatggcaggggttgcaatcttagtctctgataaaacagattttaaactaacaaagaccaaaagagacaaagaagccattacataatggtaaagggatcaattcaacaagaagagctaagtatcaaaaa

SEQ ID NO: 890997 - DNA, 640 bp, Homo sapiens
gtctgttttagatttttcccgctttctgatgtgggcatttagtgctataaattttcctctaaccactgctttagctgtgtcccagagattctgatacattgtgtctttgttctcattggcttcaagcaacttatttatttctgctttaatttcattatttacccaatagtcattcaggagcaggttgttcagtttccatgtagttgtgtggttttgagtgagtttcttagtcctgagttctaatttgattgcactgtggtctgagggactgtttgttatgatttccaatcttttgcatttgctgaggagtgtttgaattccaattatgtggtcaattttagaataagtgcaatgtattgctaagaagaatgtatattctattgatttggggtgaatagttctgtaaatgcctattagrtttgcttggtccagagctgagttaaagtcctgaatattcttgttaattttctgtctcagtgatctctctaatattgacagtggggtgttaaagtctcccactattattgtgtgggagtctaagcctctttgtaagtacaaaaggaagttaattgttacttctgtagaaacatgagagatcactcactttatctcctatgtgagctttttgcccaggtctagg

SEQ ID NO: 890998 - DNA, 595 bp, Homo sapiens
gcccatgggtaggtgtgggcctcggccgagggatggcggctgcatcgggccgcccagggcgcgctgcaagaccgtggcgcgctcccatatgccggtgcgcggccgccccgggatctacggatggctacgggccctgacctccccggcctcccctgggtacaccatgtaaggaactgggccaagtggagacttcaggcatccgcgggccccttctttccaagagtatggagcctgcactggtgggtggcgtgggtggcggtggtggcagcgccgggatgccgcgggttttagctggccgcacgcygactctcaggggcctgggtccctagttccccgcggccctccaggcgttcatcatcccctcctcaaagccagactccctttgcagtatggcattctgtgtatgctggggtcttcctgttacagcaggacgcacccacataccccacctcgtccttcccccatcattatcccctgccctctgaggtggtgaggcccatcggatctttgtatttaagtggtgagccatataccgagcatgtgtttgtgggtgaactgtgctgggactgaggttcacttctctgttcaaatcagt

SEQ ID NO: 890999 - DNA, 675 bp, Homo sapiens
agtggtaataatacattggttcattggtgttgatttaaagtgtatatgagagctagggttttcaattaggaggtgatatattatagaacgagagtaactgaagatttttagcccaaaggaaaatgagaaataatcgcatgtagagcctcaaacactgaacattcattttattttataaaagaaaraaaacactatcctgctttaaatatctatcaatagcaacatgaaatagactaagaaaagaaataaatctctgttgaaagggttaagatacttctccaagacacataactgtcagattcaccaaagttgaaatgaaggaaaaaatgttaagggcagccagagagaaaggtcgggttaccctcaaagggaagcccatcagattaacagcggatctctcggcagaaaccctacaagtcagaaaagagtgggggccaatattcaacattcttaaagaaaagaattttcaacccagaatttcatatcctgccaaactaagcttcataagcgaaggagaaataaaatcctttacagagaagcaaatgctgagagatgttgtcaccaccaggcctgccctaaaagagctcctgaaggaagcactaaacatggaaaggaacaaccagtaccagctgctgcaaaatcatgccaaaatgtaaagaccatcaagactaggaa

SEQ ID NO: 891000 - DNA, 613 bp, Homo sapiens
taaaaaggtgcttgaaactccagaaataatgtgttttgtaggtatatttttctgaattgagtatttattgttttaaagatgctcagagttctgtgacccacaaatattaaaaatccaatctataaatctttagataattcttctctccttccttctcctcaatgccacagttgtctccttgaactcatctattttcatcttcacttcttccccttttttayccctagcccatcaccatgtaggaccagtttctctaccattctctcctttgcccacagccataagagctgatagtaaagccaatttggtcatctttgaaatgaactcaccattcttttggcttacaaaagggtccaaacttcaaccacgagtggtctgaaggagtttggtggtttcaagttcaccttcccccaattgctgttcactcttttgagtcaccttagtatattatggttgccctgtcttccagagcctgaaactcagaaatatcaccccttgtcagagattacacagcaaaacctggttacagtctcatgactttctatctatatgaatgtgtaatttctcccacatatgctttcaggaacattccccctctgctcctctttcaagg

SEQ ID NO: 891001 - DNA, 613 bp, Homo sapiens
taaaaaggtgcttgaaactccagaaataatgtgttttgtaggtatatttttctgaattgagtatttattgttttaaagatgctcagagttctgtgacccacaaatattaaaaatccaatctataaatctttagataattcttctctccttccttctcctcaatgccacagttgtctccttgaactcatctattttcatcttcacttcttccccttttttatccctagccyatcaccatgtaggaccagtttctctaccattctctcctttgcccacagccataagagctgatagtaaagccaatttggtcatctttgaaatgaactcaccattcttttggcttacaaaagggtccaaacttcaaccacgagtggtctgaaggagtttggtggtttcaagttcaccttcccccaattgctgttcactcttttgagtcaccttagtatattatggttgccctgtcttccagagcctgaaactcagaaatatcaccccttgtcagagattacacagcaaaacctggttacagtctcatgactttctatctatatgaatgtgtaatttctcccacatatgctttcaggaacattccccctctgctcctctttcaagg

SEQ ID NO: 891002 - DNA, 613 bp, Homo sapiens
taaaaaggtgcttgaaactccagaaataatgtgttttgtaggtatatttttctgaattgagtatttattgttttaaagatgctcagagttctgtgacccacaaatattaaaaatccaatctataaatctttagataattcttctctccttccttctcctcaatgccacagttgtctccttgaactcatctattttcatcttcacttcttccccttttttatccctagcccatcaccatgtaggaccagkttctctaccattctctcctttgcccacagccataagagctgatagtaaagccaatttggtcatctttgaaatgaactcaccattcttttggcttacaaaagggtccaaacttcaaccacgagtggtctgaaggagtttggtggtttcaagttcaccttcccccaattgctgttcactcttttgagtcaccttagtatattatggttgccctgtcttccagagcctgaaactcagaaatatcaccccttgtcagagattacacagcaaaacctggttacagtctcatgactttctatctatatgaatgtgtaatttctcccacatatgctttcaggaacattccccctctgctcctctttcaagg

SEQ ID NO: 891003 - DNA, 511 bp, Homo sapiens
caggcttaggcgtgagtgggaccacaggattggctatacactcatttcaggtgatgatgtgtgtgctcttggtgactcccctccacccagaatttgactcctcttgggctccagtttctaggtctttgtttaagagcagaagcaaaggtgtcaagttgggggttgacacttttatcaccccatagttcagggccattcctctggctcttccctgccactgctgcctcaggtccattttgcctattccttcttgctaaaggctcaccaaaatgatagtggcagaagtgggggcctactttccaccagcttatttattcttaagactttctcattggaaatggatcactaakttttattagatcaatttgtattttgcccagcaagattttctttaatactagcaagagagcatatgattcatagtaactacctgaaaccaggtaattatttttgttttcttatctcagcacttgtcatgtaaaaacaaatttgacattttcttgccctttac

SEQ ID NO: 891004 - DNA, 589 bp, Homo sapiens
aggtgagaaatgataccttagtagggttttcaaattcacttgtctagcaaatgctctcaaggtgaaacctggcctcagcacctcatctacctctttagctcttactttctttattaggcatccctcacccttaccttctccacaggttgattgtacattttaaaagctgtgttttatgcatcactgatgatattttacaatgtaacataaaagtaatgttttagagttgaagtcaaggtagacagtctgccatattttaaaaacaaaagatttctctgtctacagattcatggattactatagtgttttttaaaatgtggttctgtactatctctatcagtatccctaggaatgattattaaagtatagggcytttgagaggctgaagtgagaggattgcttgaggacaggagtttgagaatagcctaggtgacatagcaagatctcacctctaaagaaaacaaaattttttaattagctgggcatggtggcacacacatgtagtcccagctacttgtaggatagcttgagtccaggagttcaaggatgcagtgaactatgatcataccactacacaccagcctgggtg

SEQ ID NO: 891005 - DNA, 562 bp, Homo sapiens
aacacaatcagaaatgataaggggaatatttatcactgaccccacagaaatacaaacaaccaccagagaatattgtgaacacctctgggcacataaactaggaagtctagaagaaatggacaaattcctggacacacacacctccccaaggctgaaccaggaagaaactgaatccctgaacagaccagtaatgagtttggaaattgaggcagtaataaatagcctaccaaccaaaaaaatcccaggaccagatggattcacagctgaattctaccagatgtacaaagaggaactggtagcattcctactgawactatttcaaaaaattgagaaggagggactcctccctaactcattctatgaggccagcatcatcctgaaaccaaaacctggcagagatacaacaacaaaagaaaacttcaggccagtatccttcatgaacatcaatgcaaaaatcctcaacaaaatgctggcaaactgaatccagcagcacatcaaaaagcttatccaccacgatcaagttggcttcctccctgggatgcaaggttggttcaacatatgc

SEQ ID NO: 891006 - DNA, 658 bp, Homo sapiens
gcacccatgcagcctgcagtcctaaaggccagtcttactcccactgtgccccctcaacagcaccgagtctatttctgggaatctggtgatcaaggctgagaacttgccccagaccaccagcctcccagctaaaaagcaaggagactcacagtttttcagcatctcarggagcatgcagcagtgctccagttccttcaaagggtctgtggattatctcagcttccctggaatgttgctgtggtacttcttggagcaaaagatcatgatgtgagcctccacacctctctgtctgtccaagtgggagctgcaagctagtgctgcctcctatctgccatcttaattatcttattcttttttatggctgcatcatattcagttgtgtatatgtaccacattgtctttatccagtctaccattgatgggcatttaggttgattccatgtttttgctattgtgaatagtgctgcagtgagcatgtgtgcatgcatctttatgataaaataatttatatctctttgggtagatacccagtaataggattgctgggtaaaatggtagttctatttttaggtctttaagaaaatgtcacactgctttccacaatagttgaactaatttagactcccacttaacagtgtctgtgttcctttttccctgc

SEQ ID NO: 891007 - DNA, 711 bp, Homo sapiens
gcatcttaatccatgatgtaccttcatccaacaccaatgaataatcatacttactcaaataacattgcccattatctcaaaacagggccatggattaggagtgcataactcatgttatagccaaaatacttaaaaggagtataggagtttatatctgcacaagttttttctgatctgaaaactagtaaaatataagtttgttcacacacatacaacttcacccattcaagaaacagtgggaaccttgttatgtggatggtttcaacctaacagtwtccaacagttatcttttactcaccattttgtctctgaaaagtaagaagataatttaagactaccaaattgcaatcacaatttgaaggcatagcttttagatacaaaatacttagtcactcaccggtgtgcacataaattattaagatgaagtccatatttttcttcagcagataacccatccatcaacaagtagaaaatgagaaaattgctctggccaagaggttgtgaaacaagtctggatttctctagcaaatatgtataaattctggctggttgggaaaagaaaagtgattctgttaaatggcagtattcatttcatttccataaattaacacatattaattaattacaagagatacaaggactgttgagttctccctttcccatctatttacattttattttattgtctttttgcattagctaggactttca

SEQ ID NO: 891008 - DNA, 604 bp, Homo sapiens
tatcattatttgcctcagattaaattatatacatgtaaaaagtaggtgagtgctcagctttcttactttgggagattaaatttatgtcccacttaacaaattgtttttcccacagatttttttcataaatctattccaaattcaagaaacataaaataacagcaatatactatagtactgatgacractttcatttgctcagttatagcatgggtttctggtttactgttctctgctctattcttgcatctggttttatctagttttatcttcttgctgcctagattattggcatatctgctttagttgaaacctttcactgcattataactctttgcgttttgcatgtgataaaagtatttttattcaagtagcaaatctttactgaggatctattatgggcccagcactgtgtctcatattgccaacaggccatgaataaggtactaggttgctggtcgactttgcatgaccaatgtggtaaaagttgcctgagagagtcctcatgcactgtgctgagatgaccagtgctgagtctagaccagaagtgcattcattgcctccgttcctaagattgtcaactgccatgcctggacatctgttt

SEQ ID NO: 891009 - DNA, 571 bp, Homo sapiens
ttttgaacagttctggtgctttccctgcaatgggtagatcacttaagaaaatatcacggttcctttacccttcattttggtttacttgaaaatagtgaggcaatataaaagttaatgtaacttccacgattactttagcactcagcaaatccagatcaccttgtattttartaagagattatatatgttattactttgaaagctttcacaaattgctgtaaacatttaagaaatggattctccatggtataacacagtatctgtcaccactaagcagtgggcacatattttttttttgcttgccctgtagccaccgtttcactgttgtgaaaaggtgttgattagattttatttatgctatatatttaggatatttgacagttagctcaaggaatagagaatctgaataccaccaaacaacctgaaactcagcaaacaccctactctctactgcctgaattatagagcctggaaacatgtgcgttcctatatgaactccatttctcaagggttttcatatttttctgttgtcaaagagctctgtgctggaaaatccccactcctgtgtgag

SEQ ID NO: 891010 - DNA, 705 bp, Homo sapiens
ttctcatgttgccttgtttctacacacacacacacctcatcctctcgacttttttaatttttaatttttgtgggtacatagtaggtatatatataagtatatatatatgtgtatataaatgtgtatatatgtgtgtatataaatgtgtatatatgtgtgtgtatatatatgtgtgtatacgtgtgtgtgtgtgtgtgtgtgtgtgtgtgtgtgtgtatggggtatatgagatgatttgatacaggcatgcaaagtgaaataagcacaccatagagaatgaggtatccattcatcccctcaggcatttattctttgagttacaaacaatccaattttactctttaagttattttaaaatgtacaattaagttatcattgactatagtcactctgctgtgctaccaaatagtttctcctcttttctgaacatgtggtttacttgctgcttcctaactggagaaaatcttaatagtagttcttgcccattcttaccgcatttcaaaaccctcacatcccataacccaaccacatctagtctaagatggctttttaaatgttcatgaaaacawtgaaaatacttttctctaagtggtgcaatcttaggtgattatttttacttttttctttgtactttattacatagtgtactctttaacattacagtagcatgcaacatttttacaataagaatgaattttcatttta

SEQ ID NO: 891011 - DNA, 598 bp, Homo sapiens
agtgaggaaaaaaagtgacagagatgtaacaaatacattcttctggaatctggtcaaagtcttgctatcaatatttttgttttatagttttatatcatatttgtgcttctttgtgaggatcatcagttttgacatcagtggaaatatgcaactcgtttccagagyttttggaaaataagaaatgtgagttacataaaaaagaaatccaaatacatctgcaatttaaaacagcttcttccccctcaccccttcaaaaaaaagcagtattcaatgcttagtgctgaggggagtagaagtactgatttgtgacatgcaatgaactccctcaggattccacattttaatcactgaacatcaccattgtgacaagttagaaggagtcactcaaaagcattcaagatatttttgtttgttttttagatggagtcccactctgttgcccaggctggagtgcagtggcgcgatctctgctcactgcaagctccacctcccgggttcacgcctgcctcagcctcccgagtagctgggactacaggctcccgccaccatgcctggctaatattttttgtatttttagtagagacggggtttcaccatg

SEQ ID NO: 891012 - DNA, 598 bp, Homo sapiens
agtgaggaaaaaaagtgacagagatgtaacaaatacattcttctggaatctggtcaaagtcttgctatcaatatttttgttttatagttttatatcatatttgtgcttctttgtgaggatcatcagttttgacatcagtggaaatatgcaactcgtttccagagtttttggaaaataagaaatgtgagttacataaaaaagaaatccaaatacatctgcaatttaaaacagcttcttccccctcaccccttcaaaaaaaagcagtattcaatgcttagtgctgaggggagtagaagtactgatttgtgacatgcaatgaactccctcaggattccacattttaatcactgaacatcaccattgtgacaagttagaaggagtcactcaaaagcattcaagatrtttttgtttgttttttagatggagtcccactctgttgcccaggctggagtgcagtggcgcgatctctgctcactgcaagctccacctcccgggttcacgcctgcctcagcctcccgagtagctgggactacaggctcccgccaccatgcctggctaatattttttgtatttttagtagagacggggtttcaccatg

SEQ ID NO: 891013 - DNA, 531 bp, Homo sapiens
ttcagaatataattaaatagttctaaaggtctaaacaatttgtttttatttatttaaccatcataagtgcctctattctatccattgttgccattctttcatttaaaatcttttcttttttttgagacagagtctcgctctgtygcccaggctggagtgcagtggtgcaatctcagctcactgcaaactccgcctcctgggttcacgccattctcctgcctcagcctcccaagtagctgggactacaggcccccgccaccatgcccggctaattttttgttatttttagcagagacagggtttcaccatgttagccaagatggtctcgatctcctgacctcgtgatctgcccacctcggcctcccaaagtgctgggattacaggcgtgagccaccgcgtcaggccttaaaatctgaaattataaatcttattttgatagtgtctcaaaaatgttgactttgatttgattgttaattatcttctatctttaaacgctccttaaataagaaataatacttgtagaatatgcta

SEQ ID NO: 891014 - DNA, 635 bp, Homo sapiens
ctggggcaaacattttttgcagatataaatagcaaatattagtataatgagaatctacatagagagggaccttctttttttttatgaaagggctttaatagtggtctgtaaaagctatgggggaggcaggcataaaaaagaaaaggaccaaaactgtctgcttggggatatcagagaagtcttgaagaaagaggaacgtgaaacaatgccttgaaggatgartaagtgtggtctgtggcaggggtgatggaagtaagatagaagtaagggatctcacggagaaagaaaaggaatatgaggcacaaaggagtggaacagcaaggtacatgccgagctcaaagtagtcagaagtggcagatgggctgtgcacaggaggcagctggagaggagtttgtgaaactagacctggctgcatcatggagggcccagcaggctctgcaaggagttctgactttgttctgtggtcagtaaagatgcatggaggattttcatctgagagtggtacaatctgatttgtgtttgaatagttcactctggaagttacatgctggatgcacagctggggagagaaactgaagcagaaagtccttccagcaagaaatgtctttaacaatttttgttggaggaatgcattt

SEQ ID NO: 891015 - DNA, 635 bp, Homo sapiens
ctggggcaaacattttttgcagatataaatagcaaatattagtataatgagaatctacatagagagggaccttctttttttttatgaaagggctttaatagtggtctgtaaaagctatgggggaggcaggcataaaaaagaaaaggaccaaaactgtctgcttggggatatcagagaagtcttgaagaaagaggaacgtgaaacaatgccttgaaggatgagtaagtgtggtctgtggcaggggtgatggaagtaagatagaagtaagggatctcacggagaaagaaaaggaatatgaggcacaaaggagtggaacascaaggtacatgccgagctcaaagtagtcagaagtggcagatgggctgtgcacaggaggcagctggagaggagtttgtgaaactagacctggctgcatcatggagggcccagcaggctctgcaaggagttctgactttgttctgtggtcagtaaagatgcatggaggattttcatctgagagtggtacaatctgatttgtgtttgaatagttcactctggaagttacatgctggatgcacagctggggagagaaactgaagcagaaagtccttccagcaagaaatgtctttaacaatttttgttggaggaatgcattt

SEQ ID NO: 891016 - DNA, 596 bp, Homo sapiens
gttaatggccaaacttaacctaaaaactcatctttcatctatttgttaaattctttcaacaaaattttattttattttaatatgcactgccagaacttacactaggagctggggatagaagaattaagtgagctatagagatcagtttattaaggagataggtatgtgaacaggaagctacagcataaatttttccaaaaagctatacattgaagttcatttgaactaggtattaactaatgagtataagtgtcccattataccccacactataattaagagggtgtaatgtgggcatattagtaagggagaacaacatgtgcaaaggtatagaagcagtgatgagcatagygttttttaaagttttatgatcagaacatatgtctattgagtcaatagagtttgtgagtggtcctcaaatggccctccatattactaggttagtgcaaaagtaattgtggcttatgccattaagagtaatggcatcaacttaatacacagattttcctatctctgaccttagagaatagtaacatttatgttgagttaataatagtaaatattgaatagaatagaaacagagacatgtttaaaaa

SEQ ID NO: 891017 - DNA, 581 bp, Homo sapiens
ttgtgttccctttgatctgatttgagatgttttaaatgaagtctagaaaaaaaaacataaggtcagaaaaagcagtatttatccatggagctttgatttccaaaatgtaaaaagaattagctcctccaggagcaaattaggcagatacagagaaaggcaatctctgtacaccttggcaacacgatttagtgccctgcttcctacctctccaaggaactacagtgctttgaagtactatttgtggcctttcyctaaggtcttccttatatttcctgctactaggagaaaagttgagtcctagaaggccaggattttaaaaaccaaaaagttcagtcaaaacaattcacatggtgtcacttggattgcctctcttgctcattcctgtagctcataaaatgactgttgacctgtaattacttactgggtttaatgagttagttagccttgtttgatcaatccaaaaaggcaagataaagtagaaagaaagagaagaggaattagattaataggaaaaaaagggagagaaagccatcttagaataatttaaaacttactgagtatctgttgtgcacttttgctcc

SEQ ID NO: 891018 - DNA, 451 bp, Homo sapiens
gaattcatttctccttctagtattgtttatagttattttaaaattgtaatttgcaaaatgctaaccagatctaatagtaatttcggatctaatagtaatttcagactcctcagcatgggtgattgaggttctccatgctcagccaaccttacttaacagctgtatytgccttcaatttctccctgcatgttatcttgatgctgtagtcgaaatgaaaccagtcaataattcctgaatacatcgcttgttttctaatatcatgcttttattcatgctattatttttggtctccatgcctcccttcctggtaactgtcttgtccatgccttaattctcaacaaaaatgcttaaacctttatgtgaaccattttgtgtctccccacactttccttgaaaccagagatgtttctctcccctgtaaacccaattctctggcatagtatgaactgtg

SEQ ID NO: 891019 - DNA, 619 bp, Homo sapiens
gtttaagtcatttatcttttccaaaaggaattaccatgattcaaaaattactcaggagactgtgggtatatgcaaagaactagatggaagccaaagtttaatgaaatactggtgaaaccttctcagaaaaggctggcttaatcaagttagttgactctcttgttaaagtaaatttgctacaacagcagcagctgccatttatctgagcaacttatatgtgggacagtcaggattaaaattcaratctgtctgatgtcaaagctcatgttctttccaaaatgcaatatagtagtctcctcttatcttcagggaatatgttccaaaacccccagtggatgcctgaaaccacagacagtagaaaaccctgtatatattatgttttcccaatacatacatatctttcataaagtttaaattataaattaggcacagtttgagattaacagcaataactaataataaaatagaataattataataaactgtaatgaaagtgatgtgaatgtggtctctctctctccctcaaaatactttattgtactgctctcacatttcttgttatgatgtgagatgatacatgcctacctaatgagattaggtgaggtaagtggcataggca

SEQ ID NO: 891020 - DNA, 696 bp, Homo sapiens
aaatgtgcaaaataaacaacactgtcaggtgttcttggagctttgtgaagtgactaattgcaatcctagctgtggacctctaggagaataaaactaaacatataccaaacagaattgcttataaaatatcctatatcctactatctccttatgatttggaaattataattgggggagagaatggatataaagtgtttgtgtttgttattgaatattatttttcctttttgatatggtaaatgggaaaaattactatagatagccatttgtagaaacatgccttaatttcaaggacataaagaraaccattttacttcttcaaatgtttcctcactaacatctaaattccctttagtgggtaaactcaacagtcttgattttacatgaaatagatactatcctagaggatatagctcactgagaaattcaaataaaggtagaaatgattgagtcaacttcttttccaaaaacgaagtgtagatgaaaagtagaggagagtctgtatagggttacgtaaaagggagtggtgtgaggtatacaattaaagatatgattgaagatttgaatgggaatagaaaaagactgtcttattaactgactaaaaatagttctgtccattaataaccaaggatgcactgagctttctaaaactattgctcattttctaattaaacccaaaagtattcttgtgaagtg

SEQ ID NO: 891021 - DNA, 659 bp, Homo sapiens
tggtaacagtaccctacatcacaaacaaattttacaacctttgaattaaatttatgtaccaagcacctctaagcatatatgtcaaacacctccaacctttacaacaactcggtgtgatacatttcaacattcttacttgaaggaagagaaattgtggctaaagggtgaagtacctgtaggtcagggatgggaccatttaaaaaaaaaagacagctggtggtactgtcccttaccaactcagaaacatggggggggtgccagggggtmcccataaagcaccagcttctcagaactacatttggctttgattgactttccagtaaccttgataataacaaagatcataatttttccatctagagaaagtaatccaggaccggaaggagtctcttaaggataagctaaaacaagatactactcagaaaagacgccaggattttctggacatacttttgagtgccaaagtaagtcttctaaacttctgaacacatgcaactcaataattaaataataaagaaataggccgggcacagtgactagcacctgtaatccagcattttgggaggccaaggcgggcagatcacttgaggtcaggagtttgagacaagcctggccaacatagtgaaacctggtctctacaaaaaacacaaaaattagct

SEQ ID NO: 891022 - DNA, 524 bp, Homo sapiens
gccagttttcaaagggaatgcttccagtttttgcccattcagtatgatattggctgtgggtttgtcatagatagctcttattattttgagatacgtcccatcaatacctaatttattgagagtttttagcgtgaagggctgtcgaattttgtccaaggccttttctgcatctattgagataatcatgtagtttttgtcaatggttctgtttatgtgatggattacatttattaattttcgtatgttgaaccagcgttgcttcccagggataaagccgacttgattgtggtggataagtttttgacgtactgctggattcaggttgccagtattttattgaggattttcacatcgatgttcaccaggaattttggtscaaaattttctctttttttgttgtgtctctgcgaggttttggtatcaggataatgctggcctcataaaatgagttagagaggattccctctttttgtattgattgaaatagtttcagaaggaatggcaccaactcctctttttacctc

SEQ ID NO: 891023 - DNA, 609 bp, Homo sapiens
ggcctgcctcgctaggttgggaaagttctggataatatcctgaagagtgttttccaacttggttccattctccccatcactttcagatacaccaacctgatgtagatttggtcttttcacatagtcccatatttcttggaggctttgttcatttctttttattcttttttttctctaaacttctcttctcacttcatttcattcatttgatcttcaatcactgataccctttcttccacttgatcaaatcggctactgaagcttgtgcatgtgtcacgtagttctcgtgctatggttttcagctccattggctcatttaaggacttctctacactgtttattctagttagccattcatctaatcttttttcaaggtttttagcttccttgcgatgggttcgaacwtccttctttagctcagagaagtttgttattaccgatcgtctgtagccttcttctctcaactcatcagagtcattctccatttagctttgttccattgctggcgaggagctgcagtcctctggaggagaagaggcgctcttatttttagaattttcagctttcctgctctggtttctccccacctttgtggttttatctaccttt

SEQ ID NO: 891024 - DNA, 640 bp, Homo sapiens
gaaaaaggttgacaatccagtagaaaaatgggcaagaaaattggaggtagtttaaataatgtcatgcggatgaaagtgcattcaatctattagtcaacagaaatttacaaattaaatccacaataatttactataaatcactcataaaaattgctaggtttaaaagtattgaaaatacggattctcaaacactatcagtggtagwataccttgattaaaacactttggttataatttacataaccaaatataagcatacccttggacagaagttccgatcctatgtacatatctggcagatctaatgatatttgcataagaaatcacatgcgcaagattgattacagcagcattacacataataattaagaagtagagacaaccctaatgtccataaacaatagaatggatgggtaaatcatgatatatttctataatggactactttaaagcagtgtgtttgtttgtttgtttgtttgttttgagactgagtttcactcttgttgcccaggctggagtgccatggcacaatctcagctcgctgcaacctcctcctcccaggttcaagtgattctcctgcctcagcctcccaagtagctgggactacaggcatgtgccaccatgcctggctaatttttgt

SEQ ID NO: 891025 - DNA, 640 bp, Homo sapiens
gaaaaaggttgacaatccagtagaaaaatgggcaagaaaattggaggtagtttaaataatgtcatgcggatgaaagtgcattcaatctattagtcaacagaaatttacaaattaaatccacaataatttactataaatcactcataaaaattgctaggtttaaaagtattgaaaatacggattctcaaacactatcagtggtagtataccttgattaaaacactttggttataatttacataaccaaatataagcatacccttggacagaagttccgatcctatgtacatatctggcagatctaatgayatttgcataagaaatcacatgcgcaagattgattacagcagcattacacataataattaagaagtagagacaaccctaatgtccataaacaatagaatggatgggtaaatcatgatatatttctataatggactactttaaagcagtgtgtttgtttgtttgtttgtttgttttgagactgagtttcactcttgttgcccaggctggagtgccatggcacaatctcagctcgctgcaacctcctcctcccaggttcaagtgattctcctgcctcagcctcccaagtagctgggactacaggcatgtgccaccatgcctggctaatttttgt

SEQ ID NO: 891026 - DNA, 640 bp, Homo sapiens
gaaaaaggttgacaatccagtagaaaaatgggcaagaaaattggaggtagtttaaataatgtcatgcggatgaaagtgcattcaatctattagtcaacagaaatttacaaattaaatccacaataatttactataaatcactcataaaaattgctaggtttaaaagtattgaaaatacggattctcaaacactatcagtggtagtataccttgattaaaacactttggttataatttacataaccaaatataagcatacccttggacagaagttccgatcctatgtacatatctggcagatctaatgatatttgcatamgaaatcacatgcgcaagattgattacagcagcattacacataataattaagaagtagagacaaccctaatgtccataaacaatagaatggatgggtaaatcatgatatatttctataatggactactttaaagcagtgtgtttgtttgtttgtttgtttgttttgagactgagtttcactcttgttgcccaggctggagtgccatggcacaatctcagctcgctgcaacctcctcctcccaggttcaagtgattctcctgcctcagcctcccaagtagctgggactacaggcatgtgccaccatgcctggctaatttttgt

SEQ ID NO: 891027 - DNA, 524 bp, Homo sapiens
gccagttttcaaagggaatgcttccagtttttgcccattcagtatgatattggctgtgggtttgtcatagatagctcttattattttgagatacgtcccatcaatacctaatttattgagagtttttagcgtgaagggctgtcgaattttgtccaaggccttttctgcatctattgagataatcatgtagtttttgtcaatggttctgtttatgtgatggattacatttattaattttcgtatgttgaaccagcsttgcttcccagggataaagccgacttgattgtggtggataagtttttgacgtactgctggattcaggttgccagtattttattgaggattttcacatcgatgttcaccaggaattttggtgcaaaattttctctttttttgttgtgtctctgcgaggttttggtatcaggataatgctggcctcataaaatgagttagagaggattccctctttttgtattgattgaaatagtttcagaaggaatggcaccaactcctctttttacctc

SEQ ID NO: 891028 - DNA, 568 bp, Homo sapiens
ttactattgcaatttattttatcctttttatgttattatgagagagaggagaaagagagaaaaagatgtgagaaagagtaaagcacatgctgggtactgagaaaatgtttgtggaataaatgaatttttccatctgtgctttaaaatatttgttgttttacccacatggaaggaaatatttcatatcaagcattaccagtctggaaactcgccctaagtctctatatggtggggagaagaaggaagataaaaactgaaataagatggttsgaaataataaatagcataccctacgggtagatctagcctgtacatggctcaaaggtgataaggaggatattgtctgggaagcagaatgcagcagacaacaaagctctcagacaataagaaatatgataaaccgttacccacttccatatgctttatgttttgggaccatacagaatctttatcatgaagataccagaaggtagtatggcagattgagatttggtgcctctattgaccacagattctaaaattcaagccctagtgttatctcctctcacactacctctaggcttggcta

SEQ ID NO: 891029 - DNA, 583 bp, Homo sapiens
aataaaggacatccaaatcagtaaagaggaagtcagactgtcactgttcactgatgatatgatcatatatatacctagaaaaccccaaagactcatccaaaaagcacctagatctgataaatgaattcagtaaagtttcaggatacaaaatcaatgtacacaatcagtagcactgctatacaacaacagcaaccaagctgagaatcaaatcaagaactcaaccccttttccaatagctgcaataaataaataaataaaatacttagaaatatacctaaccaaaatgatgtgaaagatctytacaaggaacactacaaacactgctgaaagaaagcacagatgacacaaatggaaacacattccatgctcatggatgggtagaatcaatattgtgaaaatgagcatactgccaaaagcaatctacaaattcagtgcaattcccatcaaaatgccatcatcattcttcacataactagaaaaaaacaatcctaaaattcaaatggaaccaaaaaatagcctacatggccaaagcaagactaagcaaaaagaacaaatctggagggatcacattacccaacttcaa

SEQ ID NO: 891030 - DNA, 667 bp, Homo sapiens
aaattggaactagtttaaagtgttctctttgaaatcctgtctactaagaccctggggattcatcaaggaactaaagttaggaaacctaatttctgttttgggttctttttcttgggaaagggaaaaactaagtacccaaccttccaggaagggttccagacactaaacatgccttatctgtagccytcacattagggtctctgtagcaacagtttacatttattttgctctttaccaagtcttgaaaatgaaagtaaagttggtttaccactgaagaatactaagttctttggttaaagggcattaaattcagagaaaagtccagatgtcttcaactataacaatagtagtaacagttaatattataataacagtaaccgctaataacaataatagtaacagctaatatttattcaatgcttattaagggacaactgcgctaaatactttaggattctgcataatttgtagagtgtttaatatacaagcttactaaatttttcagttaatgatggtggcatttgctaagctgtaggccaagttattcctttcattcacagtctagggagagatgacacgggcatgctgagtcactcaaaacatgctcaaaccaccctaaggagtttgcctgatgaaaggttttcctttccttcaaagccacttcctg

SEQ ID NO: 891031 - DNA, 663 bp, Homo sapiens
gaaattcactgaagggttttcagcaggtgaatgttaatctgatttgtctttaaaagatcactgggcatagctgattttacttgggtaaggtaaaattttcattaattgagtgtaagaaaagaggaaaaaagaatttggaggctattgtagcagttctggcaaaatataatagtgattcagaccacaatgatcagattcagggtttattttgaaagagctgaagggacttgctgatgaaatggtaggaaaaagaaagaaatcaattataaaactgtctaatattgtttcattgcaaacacaaccagattaaaaactaccttaagtgagacacttctcacgatgctaaaaataaacttacacttctttaattcaacctcagtataaatccaataaatgctttatttatatggatttaaaaataaggagtagagaaactttcataaacactagctatatataggaaaataataggatgttaagcttgaaagcacagtgttasgtctgaatcaaaaggaaatatctcaaattatatcttctttttaatatctactagccataaactggtattcttacatgaattcaataattcaaacatttaggagcctcagtaatttaagtcttgggaacaagaaacaggatgagaagtgttttaattggagaaaa

SEQ ID NO: 891032 - DNA, 637 bp, Homo sapiens
tattttctaccgttatggtttcacagtagataactaaaattatatatatatatatattttttgagacaaattctcatgctgtcacccaggctggagtgcagtggtatgatctcggctcactgcaacctccacctccctggttcaagcgattctccttgattctcctgcctcagcctccagamtagttaggattacaggcacctgccaccatgcctggctaactttcgtatttttaataaagacagggtttcgccatgttggccaggctttaacataattgattatgtttcaaaaaataagaagcaatttctgcatacaaatttcagaaaaattcacttggaaataagttttattagcttacactgtgggtagagaaaagtaaaacattgaaaaggtaactgtttgctttaacatttacctgtaaaaacattcatgaatttacctacaatttcttggaagtagaaatatattctcaatgttgttttagaagcacatatttaatggagaaatttgttttttatagtgttatttttaaacataatttttaatttagaaaattatgacaaaaactcgttcattcccttttttggaaaaacgatacttaaccactagtaaatgttaagtcctgcattatgca

SEQ ID NO: 891033 - DNA, 637 bp, Homo sapiens
tattttctaccgttatggtttcacagtagataactaaaattatatatatatatatattttttgagacaaattctcatgctgtcacccaggctggagtgcagtggtatgatctcggctcactgcaacctccacctccctggttcaagcgattctccttgattctcctgcctcagcctccagaatagttaggattacaggcacctgccaccatgcctggctaactttcgtatttttaataaagacagggtttcgccatgttggccaggctttaacataattgattatgtttcaaaaaataagaagcaatttctgcatacaaatttcagaaaaattcacttggaaataagttttattagcttacactgtgggtagagaaaagtaaaacattgaaaaggtaactgtttgctttaacatttacctgtaaaracattcatgaatttacctacaatttcttggaagtagaaatatattctcaatgttgttttagaagcacatatttaatggagaaatttgttttttatagtgttatttttaaacataatttttaatttagaaaattatgacaaaaactcgttcattcccttttttggaaaaacgatacttaaccactagtaaatgttaagtcctgcattatgca

SEQ ID NO: 891034 - DNA, 622 bp, Homo sapiens
actatatgctgctcataaccgtgacacatttaattatgggaatttctttagatattgcctcttctccaatctcatttctcatcttctacaactcttattatattagacgcatgttcaacccatttagtctgcctcaatttctcaaccattttccccctattttccatttctttatctttgctggattttggttagcttttccatctctgtcttctagttcagtaattctcattttagctatgatctacctattgtttaactctttcgttgaatttttaatttcaaaaattaaaaaaatcattttttggagttctttcctatttttcaagttcacatattcttatataataatatcttaccctttccttgtggtttttactcctttatcactttaattatgttaagcatagttattctgyaatacatttcatattgttctagtttctcaagtccttgaagttctaacagtcctcttcactatgtctaattactctctgtcatactgaattattttcttctatgatttataaattttaatcccaagctcttgttggtagttctttatcaccctggactgttggaagtgtagctatacagagttttgcttctgccggacacccca

SEQ ID NO: 891035 - DNA, 634 bp, Homo sapiens
caggtgtatattagagaatcaataactatcaacctgtcagataacactagaaagcctccaattcttctcttctttccaaatatttggttctccaaatggacctaggcctttgaagcacaaagacctattcagagctgtcttcaatggtggtggttctctgcctagcaactcacccttctggctccaaaacacaatatcattgtttatttttttctaaacttaaaaacagcccatgccttagaagtcaagaccgaactaccttcctgggtggtggaattaatgatatcttttctttctttcttatgaatatagagtagccagaaacaagacaaaattattctttctttcttactgatgtagagtagccagaaacaaaataaaatctattatcttgtaatctgccactttaggtggcagaatatattttaaatgagcttaacgttaaaatacacaatgcattactggtgggaatagaaagtagtacaatatttytggaaattaagctaatagtataagtgtgactataccttgtgagccagcaataccatttctgggtgtgtattacatggaaaacttcccacatgtggatctataaggatattcatcactgttagtattcaaaggtaacctaggt

SEQ ID NO: 891036 - DNA, 612 bp, Homo sapiens
cttatcagcttaaggagattttgagctgagacgatggggttttctaaatatacaatcatgtcatctgcaaacagagacaatttgacttcctctcttcctatttgaatagcgtttatttatttctcttgactaattttcctggccagaacttctaatactatgttgaatagaagtggtgagagagggcagccttgacttgtgccagaagacatttgtgtggccaaaaaacgtacgaaaaaaagctcatcatcactgctcattagagaaatgcaaatcaaaaccacaatgtgataccatctcatgccagttagaatagagatcattaaaaattcagaaaacaacagatgctggggaggatgtgaagaaataggaacacttttacactgttggtgggagtgtaaattagttcaaccrttatggaaggcagtgtggcgattcctcaaggatctagaaccagaaataccatttgacccagctatcccatttctgggaatatacccaaaggattataaatcattctactatacagacacatgcacgtgtatgtttattgcagcactgttcacaatagcaaagacttggaaccaacccaaatacccagaaattatagac

SEQ ID NO: 891037 - DNA, 491 bp, Homo sapiens
tccatacattaaaaaatactttcttggccgggcgcggtggctcacgcctgtaatcttagcactttgggaggctgaggcgggcagatcacgaggtcgggagatcgagaccatcctggctaacactgtgaaaccctgtctctactaaaaatacaaaaaattagccgggcgcggtggcgggcgcctgtagtcccagctactccggaggctgaggcaggagaatggtgtgaacctgggaggcggagcttgcagtgagccgagatggcgccactgtactccagcctgggcaacayagcaagacaccgtctcaaaaagaaaacaaacaaacaaacaaaaaaaactttatttgtcctatttcttaatgggatcctctctgaacccggtcattttagctaagaaacagcagctaagttaaatgccttttaaaaaatatgtctttctagaatttaactggctattttgaaacgcttttgtaaaagaactttacatctata

SEQ ID NO: 891038 - DNA, 612 bp, Homo sapiens
agagagttttccagggagtatataagaaggtgctgatctgctgccaaagggcagagaaagctgaggaccaaagctagactaattgaaaaggtaaccaagctcttaacctaaccttgttacagtcaaggccccactgggaaagaattggattctgacacgtgggacagggatatctgggctaacacaccaaaattttgatccagagattgagaatagtcatgtcaataaaaagttattgtcctgtgtccagtttttgtacccacaccaatttttagacccagaatccattgactaaagcagagataggtcttaggaggaaggattcagcaacaccagagcaagtgtacrtggtaatgattctcgcagtctttgcctaagaggtcctacagccatctacttaggcaactgtacactgagggaaaaggaatacccaaacagttcaaggactgtcagcacgggatatccattggcattgacacctagagacccaaagctccatcatgccccccccattatagttgggggtatatggaggccaggtaatatatgagctctcagccagatttgactcacagtaggcttactgggtctatggattcacctggtgttcat

SEQ ID NO: 891039 - DNA, 653 bp, Homo sapiens
aattgtgggagactttaacaccacactgtcaatattagacagatcaacgagacagaaaattaacaagaatattcaggacttgaactcagctctggaccaagcagacctaatagacatctacagaactctccaccccaaatcaacagaatatacrttcttttcagcaccatattgtacttattctaaaattgaccacataattggaagtaaaacactcctcagcaaatgcaaaagaacagaagtcataacaaacaatctctcagaccacagtgcaatcaaattagaactcaggattaagaaactcactcaaaaccacacaactacatggaaactgaacaatctgctcctgaatgactactgggtgaataacaaaattaagacagaaataaataagttctttgaaaccaatgagaacaaagacacaacataccagaatctctgggacatatttaaagcagtgtgtagagggaagtttatagcactaaatgcccacaagagaaagcaggaaagatctaaaatcaataccctaatatcacaattaaaagaactacagatgtaagagcaaacaaattcaaaagctagcagaagacaagaaataactaagaccagagcagaactgaagaagatagagacacaaaaaaactcttcaaaaa

SEQ ID NO: 891040 - DNA, 653 bp, Homo sapiens
aattgtgggagactttaacaccacactgtcaatattagacagatcaacgagacagaaaattaacaagaatattcaggacttgaactcagctctggaccaagcagacctaatagacatctacagaactctccaccccaaatcaacagaatatacattcttttcagcaccatattgyacttattctaaaattgaccacataattggaagtaaaacactcctcagcaaatgcaaaagaacagaagtcataacaaacaatctctcagaccacagtgcaatcaaattagaactcaggattaagaaactcactcaaaaccacacaactacatggaaactgaacaatctgctcctgaatgactactgggtgaataacaaaattaagacagaaataaataagttctttgaaaccaatgagaacaaagacacaacataccagaatctctgggacatatttaaagcagtgtgtagagggaagtttatagcactaaatgcccacaagagaaagcaggaaagatctaaaatcaataccctaatatcacaattaaaagaactacagatgtaagagcaaacaaattcaaaagctagcagaagacaagaaataactaagaccagagcagaactgaagaagatagagacacaaaaaaactcttcaaaaa

SEQ ID NO: 891041 - DNA, 612 bp, Homo sapiens
agagagttttccagggagtatataagaaggtgctgatctgctgccaaagggcagagaaagctgaggaccaaagctagactaattgaaaaggtaaccaagctcttaacctaaccttgttacagtcaaggccccactgggaaagaattggattctgacacrtgggacagggatatctgggctaacacaccaaaattttgatccagagattgagaatagtcatgtcaataaaaagttattgtcctgtgtccagtttttgtacccacaccaatttttagacccagaatccattgactaaagcagagataggtcttaggaggaaggattcagcaacaccagagcaagtgtacatggtaatgattctcgcagtctttgcctaagaggtcctacagccatctacttaggcaactgtacactgagggaaaaggaatacccaaacagttcaaggactgtcagcacgggatatccattggcattgacacctagagacccaaagctccatcatgccccccccattatagttgggggtatatggaggccaggtaatatatgagctctcagccagatttgactcacagtaggcttactgggtctatggattcacctggtgttcat

SEQ ID NO: 891042 - DNA, 666 bp, Homo sapiens
aagcactgaataaagtttccttgcaaatttgtttttaataacaggcatccatgtacatatttaatagacaaaatatgcacaaacactcacagggtatctaactacaatgcaaacaaattttgttggttcacatgcccaaaaatatatarcattctgttaattttatagtatagtcaaataattattctagtcagggtattttcaagttgctggaatactacagaaaaggtagatttagtacaattgccatgctcactagcctatttgcagaaagagtacctcctaaaatttacattttcatagttcttgtggtacttatgcattcatcagactatctacagaaatagagattgagttgtgaagaatgaaaagagtaaataactaaatatatttaaatatactaagcttgggaatagaggggtaaaaagaaaaaaataagcagggaacagataaaactgtctttaggttgaaattttaaaaatggctccacaaatttactggcatggagtcatttaagatatggaaatttattaacagtgtggcttttactacaaattacttaaagctgcttatacatgtacacaaagcagttaatagtttgcagagtttctgccataaatgcaagtcacttttacacaagatttagattccgacactatgtgaagt

SEQ ID NO: 891043 - DNA, 549 bp, Homo sapiens
taaggtgtgtcacggtaggtgtcttgaattcattgaacttggagtttgttatgctttttgaatgtgtaagtttgccttttacagaaatcatataaataggcctacagcctttgagactgacttctcttacttatcagtttgcatttcaaattcaaccatgtctttgtgagtcttgacaggtcattccatgttatcactgcacagcattccattgcatgagtgtgtaccacagtktatcgattcaattattgaaggacatgttggtagatcacagatagtggatgttatgactaaagctgccataattatttgaatgcaccttattttttgtcgagatattttaaaatgtactagatcaatttttgaatgtggtgttgctggatcgtatcataaaattatgtttatcttttaagattgtgagttagtttgtatttttttatagtgtttatattttatttaacctttctcaaacttacagtagaatttgcaggactctcatcctatgttacagttcaaacagcctttactgtacaaatttttttcacaatt

SEQ ID NO: 891044 - DNA, 611 bp, Homo sapiens
tcagaaataacaccacacatctacaatcatctgatctttgacaaacctgacaaaaacaagaaatggggaaagaattccctatttaataaatggtgttgggaaaactggctagccatatgtagaaagctgaaattggatcccttccttataccttatacaaaaattaattcaagatggattaaagacttaaatgttagacctaaaaccataaaaaccctagaagaaaacctaggcgatacctttcaggacataggcatgggcaaggacttcatgactaaaacaccaaaagtgatggtaacaaaagccaaaagccaaaatagacaaatgggatctaattaaactaaagagcttccrcacagcaaaagaaactatcatcagagtgagcagacaacctaaagagtgggagaaaatttttgcaatctacacatttgacaaagggctaatttccagaatctacaaagaacttaaacaaatttacaagaagaaaacaaacaaccccatcaaaaagtgtgcaaagatatgaacagacacttctcaaaagaagacatctatgcagccaacagacacatgaaaaaatgctcatcatcactggttattagagaaatgcaaat

SEQ ID NO: 891045 - DNA, 542 bp, Homo sapiens
aaatacagtatctagtattgaatgataaggtagtatcttcatgcaccatacacatgtccgaaaagtaacatatcagtcactcaaacagacattttgtgtttattaggttagtttggtattttttaaaacggaattatctrgtttggttggaataatgacacaatcctgacaatatgtctttgtataatagtaaccaagaaatggctaagatatttataagggatgtgaagtgtctttctccaatagaaatccaaccaattgttctcctactaatatcatcacttcagaatctgaacacttaactgccaaacatattcatgtctcattaatcttgtcctggatatatgtaatttacatattacatatagctaggacattatcagtacaatattcatattcctatcaaggtttatgtttttgcatgtttgttctcttttttaatcagaagatagtacaacaggactactgcagttccatatagctaatgattgtttcatttctatcacctatgagtagcacacatgaataattttgctataggc

SEQ ID NO: 891046 - DNA, 635 bp, Homo sapiens
caaaatttgaagattggctctatgaaataagacagtcagacaaaaataaagaagaaagaatgaaatggaatgaacataacttctgcaaaatataggatattggcatccttgaaagggatgaggagaaagcaaacaacctgaaaaacatattttaggacatcgtctattaaatgttccccaaacttgctagagaagccaacattcaaattcaggaaatgcagaaaaccccagtaagatacttcagaagaagatcatccctaagacacataatcatcagattctccaaggttaaaataaaaaaaaaaagttaaaggcagctagagagaaaggtcagstcacatacaaagggaagcttatgagatgcacagcagacctctcagctgaaaccctacaatctagaagagattgggggctaatattcaacattcttaaagaaaaaaaaatatatccaagaatttcatatctagccaaagtaagcttcataagcaaaagagaaataagatccttttcagagaagcaaatgctgaggaaatttgtttccatcggacgtgttttacaagagtttttgaaggaagcactaaatatggaaaggaaagatcattaccagccaatacaaaaacactcttaagtacaca

SEQ ID NO: 891047 - DNA, 700 bp, Homo sapiens
cagaatagagagcccagaaatacggccatacacctataactatacaatcttcaacaaaactgacaaaaataagcagtgggggaaatgactccctattcaataaatggtactggaataactggctagccatatgcagaagattgaaagtggaccccttccttacatcgtgtgcaaaaattaattcaagatggattaaatgtaaaaccccaaactataaaaaccttggaagacaacataggtaataccattctggatacaggaacaggcaaggatttcatgacaaagataccaaaagcaatggcaataaaagctaaaattgacaaatggtatctaattaaactaaagagcttcgcacagcaaaagaaactatcaacaaataaacagacaacctacagaatagragaaaatttttgcaaactatgcatctgacaaaggtttaatatccagtgtctataaggaacttaaacaaatttacaagagaaacaaacaaccgcattaataagtgggcaaagaacatgaacaggcagtattcaaaagaagacatatatgcagctaacaagtatatgaaaaaaaactcagcatcactaatcatcagagaaatgctaatcaaaaccacaatgaaataccatgttgcaccagtcagaatggctattacaaaaatgtcaaaatataacagatgctggcaaggttgcagagaaaa

SEQ ID NO: 891048 - DNA, 592 bp, Homo sapiens
cctctcccaagttatgataataaaaaatgtccctagacattgtcaaatgtcctcttggagagcaaagtgtaccccatttgagaactactattgtagaaaagaacatccaaaggtttatggagatgtgaatgctggagtagatttattatgaatgagcttcttacccacctgctagttatgtcacctgggagggtccagagtacacacacttcatcaaggctttgagaaataaattggcaaaggcagcatcaacatccataaaaaggctccatagtggcagttctctgcaaagaaataagtgatgctgccatggaaatgagccccttgaattaaataggtgatgggatcccagagcaacaaggtacaagaagtgatcagaatgatttggcctatagaaatctttggtgagaactaatttatcatggggttcctargaccataatgaactacctactaaagtcttatttgtgttgtataagcaaaataaacacataaaacccaaaaattggtctggagacagaggtccaacatgaatcactacaattgatagtcatgcttcctcaacaaattctcagacttgagtcgtattata

SEQ ID NO: 891049 - DNA, 513 bp, Homo sapiens
ggagtaaatcaacacagtccctgatattttatctgcagtgttgatctagtggatgtttcttctctatacgtgttaataaatacaagtagaaaaaaagtttcccttatatggcaagagcagcagtacactttaactatgttgccttacttcaacctctratacaatccagtcctcaggaaccttgattgcctagcaattccaaaagatattattctagcccattgcattgatgatatcaggctgtttaggattagcgagcagatatcagactgtttaggactggtgagcagaaagtagcaaatatcttagtataccttaataaaatccatgacaggtgttgagaccacaaaattcagggcttgtagactcagtaacatttctaggagttctttagtctggaatatattgagatactccctacaaagtaagggacaagtggttttaaccactagaaaaagccataacacttaggatgcccatttggatcttgaggctatctataatttacttagc

SEQ ID NO: 891050 - DNA, 577 bp, Homo sapiens
acatgtaaaagaaaataagacttgtggagattagaaatcaaaatgaaaacatatagagaatagaggaatagatggagatttttaaaaatactaatgaagaaatatttgataaaataaggaaaataaaatcacccaatttaaagaaagctgaaagtggtccatacagagcaaaaaacactagacaaaaaacctcacccctaggcatattgtagtaaaatgtaataacataaaaaacaagataaaattctgaaagcttccaaaatgaaaaagtagacatattggagaaaaaaaacaagaattacatttgaaagaagcaagaagtcaatacagtattatttctaatctgcagaaggaacatatctgtgatygtagaattttatatttgccaatatgtcatttaaatctgatgagaaaaaaatattctcagacttctaagatatcacaaagtttgccaagttcccaccttcaaattcctccttagacaagatattaaaacaaaaacagggttaatttcgggaggataattgaagagatctggacaataaatttcatcaaatcccttttaaaaatgtctaac

SEQ ID NO: 891051 - DNA, 595 bp, Homo sapiens
catcacacatactatctacaactcagttattgaatacaaacttcctctaaaaaacaaactaaaaaaacaaactagggttctttagagtaatgcctgatgtgagttcattgtcggaagaacataattaatttgaaatactggttgtataccagaaagtgaagaattactttaagaatgatggggagggctgggtgcagtggctcatgtctgtaatcccagcactttgggaggccgaggtgggaggatcacctgtggtcaggagttcgagaccagcctggctgacatggtgaaactccatctctactaaaaatataaaaattagccaggagtggtggtgcatgactgtaatcccagctactcaggaggctgaggcaggagaatcgcttgaactcaggaggcggaggttrcagtgagcccagattgcgtcactacactccagcctgggtgatagagtgagacttcgtctcaaaaaagaacaaaaaaaaatgatggggacatgccagaaagatatggtcagcttggagatattctcacaagccaaacgtggtacaatctgagcatcgccatagagaatgatagggctattgccaatata

SEQ ID NO: 891052 - DNA, 744 bp, Homo sapiens
catttaaatattggtaaatgcttagcataagctaggggtcagcaaactataacccagggtctggccctactgcttgtttttataaataaagtatcactggaaaacaggcatgcccattcatagacttcttgtctatagctacattcacaatacgatggcaaaattgcgtagtagttgccccagaaaccgtatagcccccaaaaccaaaaatactgactatctgacctttttcagaaaacatttgctgacccttggataagccataactttttcttttcaataaggttatcttcattccggaacagagaaaaatatctcttaaaagacaaaataatctcttytgaatgggcttaggttaaatatatctctaaaggtatgtgcattattctgcataataaaatcagttctccacatttacttcctctctgatggaagtcgtctattctaccatattggagcaagggcaaagtcatgaaggcattcagtctttgtatactgtaaattaaattggactctacaatagcttttgtttgaagaatgtttaaagacaccatcatagcttgttctcatggtcatgcgtttttcttcagaaataagtagaagttttattgaatcattttcattgattaagaaatcatctgaagattgtggagaggccacgatgatttttaattgggttttttttttttatttcacacagtcttcatgatgagggaatgtaaaaagaattatactctagctctc

SEQ ID NO: 891053 - DNA, 744 bp, Homo sapiens
catttaaatattggtaaatgcttagcataagctaggggtcagcaaactataacccagggtctggccctactgcttgtttttataaataaagtatcactggaaaacaggcatgcccattcatagacttcttgtctatagctacattcacaatacgatggcaaaattgcgtagtagttgccccagaaaccgtatagcccccaaaaccaaaaatactgactatctgacctttttcagaaaacatttgctgacccttggataagccataactttttcttttcaataaggttatcttcattccggaacagagaaaaatatctcttaaaagacaaaataatctcttctgaatgggcttaggttaaatatatctctaaaggtatgtgcattattctgcataataaaatcagttctccacatttacttcctctctgatggaagtcgkctattctaccatattggagcaagggcaaagtcatgaaggcattcagtctttgtatactgtaaattaaattggactctacaatagcttttgtttgaagaatgtttaaagacaccatcatagcttgttctcatggtcatgcgtttttcttcagaaataagtagaagttttattgaatcattttcattgattaagaaatcatctgaagattgtggagaggccacgatgatttttaattgggttttttttttttatttcacacagtcttcatgatgagggaatgtaaaaagaattatactctagctctc

SEQ ID NO: 891054 - DNA, 691 bp, Homo sapiens
ttggaactgggtaaaaggcagaggttggaacagtttagagggctcagaagagataggaaaatgttgggaagttggaactttctagagacttgttgaatggctttgaccaaaagcctgatagcgatatggacaataaggtccaggctgaggtggtctcagatgsagatgaggaacttattggggactggagcaaaggtgattcttgttatgttttagaaaaagactggcagcattttgctgctgccctagagatttgtgaaactttgaacttgagagagatgatttagggtgtctggaggaagaaatttctaagcagcaaagcattaaagaggtgatttgggtgctgctaaaggcattcagtttttaagggaagcacagcaaaaaagtttggaaaatttgcagcctgacaatgtggtagaaaagaaaatcccattttctgaggagatattcaagctggctacagaaatttgcataagtaatgaggagccgaatgttaatacccaagacaatggagaaaatgtctccagggcatgtcagaagttgtcacagtagcccctcctgtcacaggcccagaggcctaagaggaaaaagcggttttgtgggccaggcccagggttcctgagctgtgtgcaccctagggacttggtgccctgtgtcctagctgttccagccatgactgaaagaggccaac

SEQ ID NO: 891055 - DNA, 638 bp, Homo sapiens
tttgtcaaatgactagattgcaaaacttttctcccattctgtaggttgcctgttcactctgatggtagtttcttttgctatgcagaagctctttagtttaattagatcccatttgtcaattttagcttttgttgccattgcttttggtgttttagacatgaagtccttgcccatgcctatgtcctggatggtattgcctaggttttcttcgagggtttttatggttttaggtctaacatttaagtctttaatccatcttgaattaatttttgtataaggtgtaaggaagagatgcagtttcagctttctacatatggctagccagttttcccaacactatttattaaatagggaatcctttccccatttcttgtttttgccaggtttgtcaaagatcagatgkttgtagacatgcggcattatttctgagggctctgttctgttccattggtctatatctctgttctggtaccaataccatgctgttttggttactgtagccttgtagtacagtttgaagtcaggtagcgtgatgcctccagctttgttcttttggcttaggattgacttgacaatgtgggctcttttttggttccatatgaactttaaagtagtttttttctaattctgttaagaaa

SEQ ID NO: 891056 - DNA, 641 bp, Homo sapiens
ttaaataatgcaataaattatctaaaattaaatttgtattgatagtatcagagtattcaaatctgatgattgctttcctcttcactgacagtttactttcttcaagtgtcagtcattctttagattttatgacacaaaagtaaatttaacttgaaaaaatattttaaggctcttaagaaatatagcattgaaaaactgattttaaaaaagttgattaagagtcagtccaacacttaagctcctggaaaacacataaaacctggtgagagatattggttaatctccagaatggtgtcaatagggtgtataaactaagtgcagtttggcacaagatactagaggcattttttcatattatataattcaaggtgaygttatagaattaataccaaatactcaaagaaagaaaaaagaaaactatgactgaaagcctaggtatttagctacatttttagcatgatttttatataaaaaaaagaatatccaggcaagcacactaagcacattgagtaagtaaggttaaaataaatgaagtatgtaaataatttatttttctgtgaaatactgtgcagtgttatacaatttacagagtacagggcatcacatataagtgtttgaaatctcattaaaacataatatgg

SEQ ID NO: 891057 - DNA, 640 bp, Homo sapiens
ctttgaaataatctgctttgaccccatgtctcatacccaggtcatgctgatgcaagaggtagtctcccacagtgtttggcagctccacccctgtggctttgcagggcacagcacctctctggctgccttcactggctggcattgagtgtctgmagcttttccaggtgcatggtgcaagctgtcagtggatctcccattcttgggtctggaggatggtggcccttttctcatagctccattaggcagtgccccagtggggactctgtgtgtggtggggggactccaaccccaaatttcccttatacattgccctagcggaggttctccatgagcatcctgcccctgaagcaaacttctgcctgggcatccaggcattttcatacatcttctgaaatctagacaaaggttcccaaaccccaattcttaacttctatgcactcgcaggttcaacaccatgtggaagctgccaaggcttggggcttgcaccctctgaagccatgacccaagctgcaccttggccctttttagccatggctggagctgaaacaactgggacacagggcaccatttctggagcctgcatatagcagagggcactgggcattgcccatcaaaccatttttccctcctaggcctacag

SEQ ID NO: 891058 - DNA, 640 bp, Homo sapiens
ctttgaaataatctgctttgaccccatgtctcatacccaggtcatgctgatgcaagaggtagtctcccacagtgtttggcagctccacccctgtggctttgcagggcacagcacctctctggctgccttcactggctggcattgagtgtctgcagcttttccaggtgcatggtgcaagctgtcagtggatctcccattcttgggtctggaggatggtggcccttttctcatagctccattaggcagtgccccagtggggactctgtgtgtggtggggggactccaaccccaaatttcccttatacattgccctagcggrggttctccatgagcatcctgcccctgaagcaaacttctgcctgggcatccaggcattttcatacatcttctgaaatctagacaaaggttcccaaaccccaattcttaacttctatgcactcgcaggttcaacaccatgtggaagctgccaaggcttggggcttgcaccctctgaagccatgacccaagctgcaccttggccctttttagccatggctggagctgaaacaactgggacacagggcaccatttctggagcctgcatatagcagagggcactgggcattgcccatcaaaccatttttccctcctaggcctacag

SEQ ID NO: 891059 - DNA, 565 bp, Homo sapiens
tttatgggaaagttgtctttttgaactgaaacttttcatttggtctcaaggaagagaatgtaactataagatctgtcacatttatttattagtatacacttttctctctatggcagttgctattctggtttatgacaccattatttcaccttacatgattcacgttaaagaggtgagcttctgtgtagtattgcatggcaaatcgcaacacctgctcacttgcattagggaaacatcacatttttaaagaaactgtatgtaatattaaaaggataacatgctaaagttttatgtttattagaattcaaggcattataaaataatatctaaaacaatgtactttaatatagaatgatcactgaactcttccctttgagaacacaaattagaagataaagagcatgctcgatactctgtttagaaagsaaaagattcgtctatgcatcatcatccattctattaaaacacgctttcctggcttcctacttcttgttgcccaagagctcatcaacatgccctgctgtttgatggaggttcaggagtgagtttttgacttgctcctgtg

SEQ ID NO: 891060 - DNA, 597 bp, Homo sapiens
ttaaaaatctttctttatttgtttgctaacctcagtcctagttgtattcacatttgttactttgtttaatccccccaataatccttaaatgtagatattacaacaactttacagatgatgaattaaagtttgctaaacattgaattaatttgtaatcaatcacgtaactgctgaatgctagagtctaaaccctagcctaggcaaacatgcctccaaaccccctccattttccattataccaagctgtgtggaactgagtactccctgttcatgtctgccattagctattgagcattatggtaggcaaaataatagaccccctggccaaagatgtccatgycctaatttctggagcctgtaataatgaagtgatggaccttgaggtggcaatactatcctggattatgtagctggacccaatgtaaccacaaagtcctaaagatagaagaaagagtcagcagagtcacagtcagaggagtcaggacagaagcagaggttggagtgatgtgattgttggctttgaaggaggagaccatgaaacaagtgacttctgtaagctggaaaagacaaggaaacaagttcttcctaaagcctcca

SEQ ID NO: 891061 - DNA, 609 bp, Homo sapiens
ggctgctcttgctctgcagggcttgttttgggagcaaggttggaagcaaatggtgacataaactgactctgggcagatctgccttagagagaaaaggacaaagtgaatctaagaaaatacaaactccagttacactggtgggcaagagggcccatcctgttaccctggcctcccttactctcctcactttgaaactgtggccaagttttttcatgtttcagaccagtcctgagtagaagaggyatgaggaagaaggaagagaaatactctgatggaaatgttgcctgggagatggatcccagtacaaactagacaagaggtcaggcacccaggagcaggcaggtgtttttagaaaatcaaaaagcaaaaaccaaaaaacccagcctgacagtgaagagcagaaaacatcaagacccttttataaaaagaagagccctgcttggaaagtagaacttccagcaccaaaggccttgggataagcctttagaaatttgagtaccttaggaccgaaatggaagcaaataggactgcgaaccacaataaagtttattgtttaacactctggctatgatgatgtcaaggaatatacactatatgccaagcactgtg

SEQ ID NO: 891062 - DNA, 609 bp, Homo sapiens
ggctgctcttgctctgcagggcttgttttgggagcaaggttggaagcaaatggtgacataaactgactctgggcagatctgccttagagagaaaaggacaaagtgaatctaagaaaatacaaactccagttacactggtgggcaagagggcccatcctgttaccctggcctcccttactctcctcactttgaaactgtggccaagttttttcatgtttcagaccagtcctgagtagaagaggcatgaggaagaaggaagagaaatactctgatggaaatgttgcctgggagatggatcccagtmcaaactagacaagaggtcaggcacccaggagcaggcaggtgtttttagaaaatcaaaaagcaaaaaccaaaaaacccagcctgacagtgaagagcagaaaacatcaagacccttttataaaaagaagagccctgcttggaaagtagaacttccagcaccaaaggccttgggataagcctttagaaatttgagtaccttaggaccgaaatggaagcaaataggactgcgaaccacaataaagtttattgtttaacactctggctatgatgatgtcaaggaatatacactatatgccaagcactgtg

SEQ ID NO: 891063 - DNA, 609 bp, Homo sapiens
ggctgctcttgctctgcagggcttgttttgggagcaaggttggaagcaaatggtgacataaactgactctgggcagatctgccttagagagaaaaggacaaagtgaatctaagaaaatacaaactccagttacactggtgggcaagagggcccatcctgttaccctggcctcccttactctcctcactttgaaactgtggccaagttttttcatgtttcagaccagtcctgagtagaagaggcatgaggaagaaggaagagaaatactctgatggaaatgttgcctgggagatggatcccagtacaaactagacaagaggtcagscacccaggagcaggcaggtgtttttagaaaatcaaaaagcaaaaaccaaaaaacccagcctgacagtgaagagcagaaaacatcaagacccttttataaaaagaagagccctgcttggaaagtagaacttccagcaccaaaggccttgggataagcctttagaaatttgagtaccttaggaccgaaatggaagcaaataggactgcgaaccacaataaagtttattgtttaacactctggctatgatgatgtcaaggaatatacactatatgccaagcactgtg

SEQ ID NO: 891064 - DNA, 589 bp, Homo sapiens
ttccaaaactatgttgaataggagtggcaagagtgggaatccttgtcttgttccagttgtcaaaagaaataaatgcttccagcttttgcctattcagtatgatgttggttgtgggtttgtcatagatggctcatatcattttgaggtatagtcccttaatgcccagtttcttcagggtttttaatgtgaagagatgttaaatttcactgaaagcctttgctgtgtctattgagatkatcttcttttttttttttagctctgtttatgtgatgaatcacatttgttgatttgcatatgttaaaccaacctcatatcccaggaataaagcctatttgatcatcgtagtttaactttttgatgtgctgccaggtttggtttgctagtactttgttgataatttttgcatctatgttcatcagggatatttgctgtcattttctttttttgttttgtcacttccaggttttagtatcagaatgatgctggcttcatagaatgagttagggaggagtcctttctcttcaattttttggaatagttttagtaggattggtaccagctcttctttatatgtctaatagaatttaac

SEQ ID NO: 891065 - DNA, 625 bp, Homo sapiens
aattactacaaagagaataaaatacctaggaatccaacttataagggatgtgaaggacctcttcaaagagaggtacaaaccattgctcaaggaagtaagagaggacacaatcaatgggaaaacatcccatgctcatgggtaggaagaattaatattgtgaaaatggccatcctgcccaaagtaatttatagattcagtgctatccccaatcaagctaccattgactttcttcacagaatcaggaaaaactactttaaatttcatatgggagcaaaaaagagcccgtatagccaagataatcytaagcaaaaagaacaaagctggtggcatcacattacctgacttcaaactatacaaggctagagtaaccaaaacatcatggtactggtgccaaagcagatatacagaccaatggaacagaattgaaacctcagaaataacaccacacatctacaacaatctgatctttgataaacctgacaaaaacaagtaatggggaaaggattccctatttaataaacggtgttgggaaaactatctagccatatgcagaaagctgaaactggaccccttccttacacctaatacaaaaatcaactcaagatggattagagacttaaactaa

SEQ ID NO: 891066 - DNA, 586 bp, Homo sapiens
atgctcaaaacaccagaaggctttttatggcacaaaatgacacagtaggaagaacagcctcacaaaccatctagctaatttttccaagaaactgcagaaataagaagatgttcctctcctaacaccttcccagtttcacagtrtatacccgaatagtccctgaaggatttagtgtgtacagtaatgcaaggcacagatagacaggataaagcatcctgaggtttacaacgcatttagcacaaggctgttggtcagcaacaatgtgataaaatccatgaaaatgaccatctaacttgtaagaatagtcaatataataaaagtaagactattaaataattaaataactatattatgacttattacagaaggtttttttgggagggggaatgggggattgagtccaggctatatttaataaaccatagtgactaacatagccttcagtgagaaaagatatctgttttttctgtaagtgcacatggagagtgggcagtaggaattccaaaaaaaaaattgggaagagtggatatccaggcatttgtttacaaaatagtacatctgaaagatccattgattttgacagtat

SEQ ID NO: 891067 - DNA, 496 bp, Homo sapiens
ttccataaattcttataatggctatttgggcaatttttatatgacaacttggctattctgctattcatttaattgcttaagccaaatgtaaccccttggtgactttctttcatggttgtagttttttgtgtaatcccttatgcatgagccagaatctgtaataatagtattctaggactgaaaatgttgcctaccatctgagagttgactagatgggtggaaacaaccacagctttaatgacattcaccttgtggagtctgatcacttgcagtccctgtgtatatcttggtggtatggtttgagtttgttccctccaaaactcgtattgaaatttgatccccaacttgktggtgttgggaagtggggcctagcaggaggtgtttgggtgctgacggtggatccctcatgaatggcttggtgcagttctccaggtagtgagtgaattctcacttggaggagactggaaaagttctcatgggaataaacaagttccct

SEQ ID NO: 891068 - DNA, 661 bp, Homo sapiens
tcttattaatcatcatcatgtctctatccctgataatcttattctgaagtttatttgacctgatagtaacacagtcacttcagtttttttaatgagtatttgcatgatattttcacctcttgtgatctctgttgttacattttaggtagatttcttataggcagtgtaaagttggatcttgatttttaaaaatctaacctgaatatctgacttttgagatgtctgaccatttccataaatgtaattattaaatcttccttcttccttttgcctgctctttatcttgtttttttgtttcctttttcctctttttctttattcttttgaattaattgagtattctcaaattttaktgtctctactcagtgtatagttatatctattttgaggagatggttgctctatgatttatgatatatatctttagcttaacatagtatttcttgtaatagcattatacttcctcaaagtataagacttataattgcatatttctagttcctcacttccattctttgggttacttttgttatacagttacttttacacatattgttatatgtaaaatatacataattgttgttatttgtgtgtgttgaggttcccagaaattcttgatgctgtcttttaaaattattattttctttcattaattttggaa

SEQ ID NO: 891069 - DNA, 732 bp, Homo sapiens
tgtttatattcaaaatgtataaagcttttagtgttgataagggaaatagtaggatgaatatctctaagaccttatcttgtaagttacttaaataatgctcctaaataatgcttctctcaaacttaacagcagtaatctccaggtgaataaccaagggcttatggcatattaattttcagttgtyaactagggaaataaagtttctaaacgtaaatttaaaactagattaaaatgcagtgctttaggtgtgattttaaatgtatacgatacagttatatggtggatatcttaatgtgatgatttctagccactttcattccagataaactagctcagagaaagtgcttctatttgataacttttagactaaagtcaattcccaaaaaatatccagataatactcatggacatttttataataaatgaagtaaataaattattggaaaatgtagtagcaatcaaccctttctatgttattgtggttgtttttgatcagcaaaattattccataatggagtatattttggtggttctttgatagtgttcttcaaatcttctgtattcttataatttccagtctactttctgtattaattactgagtgagaagtgttgaacttttcaacttaattgtggatttttcttttttttctattagtttttgctttatgtatttagaggtcttattattaggtgcctacatatttaagaatgttaagtcttcttgaattgt

SEQ ID NO: 891070 - DNA, 732 bp, Homo sapiens
tgtttatattcaaaatgtataaagcttttagtgttgataagggaaatagtaggatgaatatctctaagaccttatcttgtaagttacttaaataatgctcctaaataatgcttctctcaaacttaacagcagtaatctccaggtgaataaccaagggcttatggcatattaattttcagttgttaactagggaaataaagtttctaaacgtaaatttaaaactagattaaaatgcagtgctttaggtgtgattttaaatgtatacgatacagttatatggtggatatcttaatgkgatgatttctagccactttcattccagataaactagctcagagaaagtgcttctatttgataacttttagactaaagtcaattcccaaaaaatatccagataatactcatggacatttttataataaatgaagtaaataaattattggaaaatgtagtagcaatcaaccctttctatgttattgtggttgtttttgatcagcaaaattattccataatggagtatattttggtggttctttgatagtgttcttcaaatcttctgtattcttataatttccagtctactttctgtattaattactgagtgagaagtgttgaacttttcaacttaattgtggatttttcttttttttctattagtttttgctttatgtatttagaggtcttattattaggtgcctacatatttaagaatgttaagtcttcttgaattgt

SEQ ID NO: 891071 - DNA, 598 bp, Homo sapiens
caagttctagaaatgaaagacaaacttagagaaatgcaaaatacactggaaagttaacagaatcaaataagtagaagaaagaacttcctagctgaaacacaaggctttcgaattaacccaacctgacaaagacaaagaaaaaataatttaaaaaatgaacaaagcctccaagaaatttgggattatgttaaattaccaaacataagaataattggtgttcctgaggaagaagagaaatataaacgtttggaaaaattatttgagggactactcaaggaaaaattttctggtctggctagagatctagacatccaaacacaagatgytcaaagaacacccaggaaattcattgcaaaaagatcatcacctaggcacataatcgttaggttatctaaagtcaagatgaaggaaagaatcttaagagctatggggcaaatgcaacaggtaacctataaaggaaaacctatcagattaacagcagatttctcagcaaaaccctacaagccagaagggattggggtcctatctttagcctcctgaaacaaaataattaccagccaagaattttctatccaatgtaactaagcttcataaatga

SEQ ID NO: 891072 - DNA, 577 bp, Homo sapiens
caagattttcaagacagaggaagcagtgcattgatttgctttctggtgcatgttccttattgcctgagaccattttgactagttgctctaaaattttgccctgtgtgcctgccttccttgctgccttccttaacttctctgtttgtttgcctctgaagttggactayggactccttgtgagcagcgatttgagctgactttgttctgctggagccattaccatttaattaaaaatgacatgtgaggtgaaacctacttaccatccctgtgcttcagggttttctgggggcaccttcagggcacctctagactgttgtccaaacagcaggtagggaatgaggacaactggattaacagacatcttggagagtcccacagtaatggcatcaagggtccttgtcaggttgccccaaggaaaatgctaaaaattaaaaactgttgcttctggattccactgaaagtcacatgtagcagctcacaatgaactaaatacttaactgggtaatattgagtcctacatacaccttccctgaagtctttgggggaaaagcatcaagtcagctagggagggactttt

SEQ ID NO: 891073 - DNA, 577 bp, Homo sapiens
caagattttcaagacagaggaagcagtgcattgatttgctttctggtgcatgttccttattgcctgagaccattttgactagttgctctaaaattttgccctgtgtgcctgccttccttgctgccttccttaacttctctgtttgtttgcctctgaagttggactacggactccttgtgagcagcgatttgagctgactttgttctgctggagccattaccatttaattaaaaatgacatgtgaggtgaaacctacttaccatccctgtgcttcagggttttctgggggcaccttcagggcacctctagactgttgtccaaacagcaggtrgggaatgaggacaactggattaacagacatcttggagagtcccacagtaatggcatcaagggtccttgtcaggttgccccaaggaaaatgctaaaaattaaaaactgttgcttctggattccactgaaagtcacatgtagcagctcacaatgaactaaatacttaactgggtaatattgagtcctacatacaccttccctgaagtctttgggggaaaagcatcaagtcagctagggagggactttt

SEQ ID NO: 891074 - DNA, 584 bp, Homo sapiens
agtgactggctcctaacttctggtttgaaaaataaagccagccaggcatggtggctcacacctataatcccagcactttgggaggccaaggtgggcggatcaggaggtcaggagattgagaccatcctggctaacatggtgaaactccatctctactaaaaatacaaaaaaaattagctgggcatggtaatgtgtgcctttagtcccagctacttgggaagctgaggcaggagaactgcttgaacctgggaggcagaggtttcagtgagccaagactgtgccactgtactccagcctgaygacacagtgagactccatctcaaaaaaaaagaaaagaaaagaaacaaaaagaaaaagaaagccagctggcttaatcagaatcacctggagcactgtggctaatacagatcccaggtccctcatccctagaaattccaattcacatgcctaagaaattaataatatgtatattatttaaatacgtaacacatatatatttataatacatatttttaaaagtggtaccttaagtgactttatatgtaattctgaggcatagccaagtttgggaagcactgatatag

SEQ ID NO: 891075 - DNA, 587 bp, Homo sapiens
cttttcttatttggatgccttttgcttctctctcttgtctgattgccctggccaggacttaaaatactatgttgaataggagtggtgagagagggcatccttgtcttatgccgattttcaagtggaatgcttgcagcttttgccygttcagtgtgatgttagctgtgggtttgtcattgatggctcttactgttttgaactatattccttcaatgccaagtttctttagggttttaacatgaaggattgttgaattttatcaaaagccttttctgtattcattgatataatcatatggtttttgtttttagttctgtttatgtgatgagtcacatttattgatttgcatatgttgaactaaccttgcatcccagggattaaagtctacttgattgtggtggctaagctttttgatttgctactggattcagtttgctagtatttggttgaggatttttgcatctatgttcatcaaggatattgggtggaagttttcttttttttttgttgtgtctcttccaggttttggtatcaggatggtgctggcctcattgaatgagttgaggaggagtagctcctcctcaatt

SEQ ID NO: 891076 - DNA, 695 bp, Homo sapiens
tacctcagcctggactatattgtccatatcactatcagcattttggtcaaagccattcaacaagcctctaggaagttccaaactttcccccatcttcctctctcctgaggcctccaaactgctccaacctctgcctgttatccagttccaaagttgctcccacattttcaggtatctttatggcagcaccttactctaccggtagcaatttactgtattagtctgttctcatgttgctrataaagacatacctgagactgggtaatttataaagggaagagttttaattgactcacagttcaacatggctggggagccctcacaatcatggttgaaggtgaatgaggagcaaagtcatgtcttacatggtggcaggaaatagagcttgtgcacacagggaaacttccacttataaaaccatcagatcttgtgagacctattcactactataagaatagtttgggggaatcatccccatgattcaattatctccacctggtcccacccttgacacatgggaattattacaattaaaggtgagacttgggtgacaacatagccaaaccacatcaaatggacttacagtttcacaaggcttgggatgcctcacaatcatggtggaaagcaatgtggcagcaaaggcatgtctttcatggtaacaggcaagagagtgtgtgcaagggaactgcccttta

SEQ ID NO: 891077 - DNA, 600 bp, Homo sapiens
cagagatttctttcactgtgcaccttaactttgaaaggtatagataaaaaaaataaattattacatacgagtaacagaaaacaacttagataatgagtcagtccacatgcacataacccatctctgaattagtcaatataatatgctcaattacccactttctccacattcttatgtggcatacttactctatgcycttcaaaaaagatttatattttcagggttgaaatatgattatgtcatctccattctcagttagaatattttaaatataccctcaaaattcctaggtaagtccaaattcccttatatggttcttgaagttctggaagtggtgttaccttgctctctggatttagctgtagttattactctccatgtgtgctaaagtatgccatttaaaactatttgtagttatctaactttatattctttcttgccttggggctttggcacatgctgtttcttgcctaaatgtacccacccctttcatgttgcttgtaaattcctccttgtcttccatgaccctagtctaagaactaaagtatctttcttaaatgctcccataaaaccatgtactcatcttatcataacactgat

SEQ ID NO: 891078 - DNA, 661 bp, Homo sapiens
tcatccctttagcattatatagtctttttttctaaattgtctttttttctaaacactatattgtctttttttctaaaataaataaacacactatattgtctttttttctaaaatttgttgtaggactagattggtcttasaagaaatgctgaagggagtcctgcatctgaaaacaaaatgataaaatttaccatgatagaaacacgaaaatataaaatccgctggtaaagcaaacacaaataaggaaaagaaaggacccaaaaattatcactacaaaaaaccaacaaaccatgatgagaagcagtaagaaaaaatggaacatgagggacttttttgtttgttttcttctatttgctaaggttttcctctaaccgtattctgccaccaatgccattttccaaataccaccacaatccttattaatcagacacactctcctttgaatttaatttaacaatttatgctttttgtacattcgcttggagccttatacttcatcttaggcaagtaatttcctacaagtcagtccagtgttctcaatcctgtgtcatattagagagttcttacatataaaaatatttcataaaaaaattagatttgacatcagtgaaaagtggatgaaaaatagtttattctgttttatgggtgcatatgttgctat

SEQ ID NO: 891079 - DNA, 600 bp, Homo sapiens
  misc_feature 383: n = A,T,C or G
catgtggtttttgtcttcagttctgtttatgtgatgaatcacatttattaattttcatataatgaaccaaccttgcatccttaggatgaagcctacctgatcatggtgtattagtttttgatgtgctgctgaatttggttttccagtattttgttgaagatttttgcattgatgttcatcaaggatattggcctgaagttttcttttattgttgtgtctctgccaggtttttgtttcaaagtgatgctgacctcataaaatgagttaggggatgggcacagtggctcacatctgcaatcccatcattttaaggggctgaggcaggtgaattgcttgaggttaggagttcaagaacagcctggccaacacggcaaaaccccatntctactaaaaatacaaaaattagctgggtgtggtggtgtgcacctgtaatcccagctactcgggaagctraggcatgagaattgcttgaacttgggaggcagaggttgcagtgagctgagatcacaccactgaactccagcctgggtgacagagcaagactctgtctgaaaaaacaaaagaactagggaggattccctccttctcaaattttggaat

SEQ ID NO: 891080 - DNA, 580 bp, Homo sapiens
aaaagagacttagactccaacccagtaatcatgggagaggttaataacccactgtcaatattagacagatcaatgagacagaaggttaacaaggatattcaggacttgaactcagctctgcaccaagcagacctaatagacatctacagaactctccaccccaaatcaacagaatatacattcttctcagcaccacatcayacttattccaaaattgaccacacagttggaagtaaagcactcctcagcaaatgtaaagaacagaaatcacaacaatctgtcccttagatcacagtgcaatcaaactagaactcaggattaagaaactcactcaaaaccgctcaactacatggaaactgaacaacctgctcctgaatgactactgggtgcataacgaaatgaaggtagaaataaagatgttctttgaaaccaatgagaacaaagacacaacgtaccagaatctctgggacacatttaaagcagtatgtagagggaaatttatagcactaaatgcccacaagaggaagcaggaaagatctaaaattgacatcctaacatcacaattaaaagaactaaagaa

SEQ ID NO: 891081 - DNA, 546 bp, Homo sapiens
ttttggctagccagttatcccagcactgtatattgaatagggaatcttttcccaattgctagtttttataaggtttttcaaagatcagatagttgtagatgtgcagccttatttctaggttctctattctgttccactggtcyatatgtctgtttttgtgccagtactatgctgtttcggttactgtagccccatagtatagtttgaagtcaggtagtatgatgcctcctgctttgttcttttgtgtagattgccttggctattcaggctctttcttttttttggctccaggagttttaaaatagttttttctagttatttgaagaatgtcaatggtagtttagtgggaatagcattgaatctacaaatcgctttgggcagcatggccattttaacaatattgattcttcctatccatgagcatagaatgtttttccatttgcttgtgtcatctctgatttctttgagcagtgttttgtagttctccttgtagagatctttcaactccctggttagctgtatgcctaggtattttattctttgtgt

SEQ ID NO: 891082 - DNA, 546 bp, Homo sapiens
ttttggctagccagttatcccagcactgtatattgaatagggaatcttttcccaattgctagtttttataaggtttttcaaagatcagatagttgtagatgtgcagccttatttctaggttctctattctgttccactggtccatatgtctgtttttgtgccagtactatgctgtttyggttactgtagccccatagtatagtttgaagtcaggtagtatgatgcctcctgctttgttcttttgtgtagattgccttggctattcaggctctttcttttttttggctccaggagttttaaaatagttttttctagttatttgaagaatgtcaatggtagtttagtgggaatagcattgaatctacaaatcgctttgggcagcatggccattttaacaatattgattcttcctatccatgagcatagaatgtttttccatttgcttgtgtcatctctgatttctttgagcagtgttttgtagttctccttgtagagatctttcaactccctggttagctgtatgcctaggtattttattctttgtgt

SEQ ID NO: 891083 - DNA, 617 bp, Homo sapiens
caaaattgccatctataaaaaaattaggtcctattcatgaatagacacttctcaaaagatgacattcatgcggccaacaaacatgaaaaaagcctcaacaccattgatcattagagaaatgcaaatcaaaaccacaatgagctactatctcatgccagtcagaatggcaattattaaaaagccaagaaacaacagatgctggcaaggctatggagaaataggaatgattttacactgttggtgggaatgtaaattagttcaaccattgtggaagacagtgtggtgattcttcaaagaccaagaaccagaaatacatttgacccagtaatcccactgggtatatacccagtgstatatacccaaatgaatataaatcattctattaaaaagatacatgcatgtgtatattcattgcagcactattcacaataacaaagacatggactcaacctaaatggctatcagtgatagaccggataaagaaaatgtagtacataaaaccatgaaatactatgcagccataaaaagaacaggatcatgtcctttgcaggggcatggatgtagctcaaagccattatcctcagcaaaccaatgcaagaaacagaaaaccaaacact

SEQ ID NO: 891084 - DNA, 630 bp, Homo sapiens
tttactatatttacaatattttatacttctctctgtttaactgaatctcagtgttaacccatatttcttttacttttttagagaaaaaagttaccaagtcttgagttgtttattttgattctttttcccattagctgaattatatctttaaaaaagtattctcagcccagaggatgaaaacaacgtgtttcatggatcttgttatctgagattattttcccatcacattactgtaagaacaaccttttaattatatatttgaatctgtctgtagaatttctataggaaattatccatttaatttcagtgttcagaatttcccaaggctgggcatggtggctcacacctgtaattccatcactttgggaggcaaaggcaggaggatytctggaagccaagagttcaagaccagtctgggcaacaaaggaagacgctggctctaaaaaaaaaaaaaaaaaaaaaaaaatatatatatatatatatatatatatatatatattatattatattatattagccaggcatggtggtgcatgcctgcagtcccagctactccgaaggctgaggagggaggattgcttgagcccaggagtttgaggttgcattgagctataatcatgccactgcact

SEQ ID NO: 891085 - DNA, 648 bp, Homo sapiens
atgggtacggctgatcagttggggtcgccatcataggggtggggaaaactgtccttcgttgctgagtccacctctggatgggggcacagagcagtcactggtttggatggagccatccagtcattagaaatgcaaacgcctgaagaaagatctcaaaagtccaatgttaggttatattaataaaatagtgatgttatttacaggagtaactggggaaatttacaaatcttgtgacttccagaacaaaggctggttattgcttaactacatctacatcttagcagaattcaggctcctcttatcctcctaagttggtggactttcattaattttaccaaggcaatttagttttgggaagggctattatcatttaaactrtaagctaaatttctttccaatttagcctggcccacactcaggaaagactagggcagtttggaggttaaaggcaggatagagttggttaggtcagaattctttcactgttataagttttgcaaatatggtttcagaaggaaaagtcattttcgactctgcacttggaggcattcctttagtttgtgtagaagcagctgggaaggaagcctgagttacaggtcacctagggatggagagagaggcaggtagaaaacacttgagctcagaatt

SEQ ID NO: 891086 - DNA, 648 bp, Homo sapiens
atgggtacggctgatcagttggggtcgccatcataggggtggggaaaactgtccttcgttgctgagtccacctctggatgggggcacagagcagtcactggtttggatggagccatccagtcattagaaatgcaaacgcctgaagaaagatctcaaaagtccaatgttaggttatattaataaaatagtgatgttatttacaggagtaactggggaaatttacaaatcttgtgacttccagaacaaaggctggttattgcttaactacatctacatcttagcagaattcaggctcctcttatcctcctaagttggtggactttcattaattttaccaaggcaatttagttttgggaagggctattatcatttaaactataasctaaatttctttccaatttagcctggcccacactcaggaaagactagggcagtttggaggttaaaggcaggatagagttggttaggtcagaattctttcactgttataagttttgcaaatatggtttcagaaggaaaagtcattttcgactctgcacttggaggcattcctttagtttgtgtagaagcagctgggaaggaagcctgagttacaggtcacctagggatggagagagaggcaggtagaaaacacttgagctcagaatt

SEQ ID NO: 891087 - DNA, 612 bp, Homo sapiens
tgataggccacaaaagaagtctcactaaatttaagaaaaccaaaattatatcaagaattttctcagaccacagtggaataaaactggaaattaattccaaagggaaccctaaaactatacaaatacatagaaattaaaatctgctcttgaatgtttgatgcattaacaatgaaatgaagaaggaaatttataaattatttgaaatgaataataatagtgacacaacatatcaaaaccactgggatacagcaaaagtggtgctaagaggaaagttcataatgttaaatgcctacaccaaaaagtctgaaagaatgcaaatagacaacctaatgtcacacctcaaggaactagagaagcaagaacaaactaaactcaaacccaccagacgaaaagaaataaaaaagatcagagcagaactaaatgaaattgaaacaaaaaaaatrcaatacaaaaaataaataaaaggaaaacctggttctttgaaaagataaacaaaattgatagaccattaatgagattaatcaagaaaaggagagagaagatccacataagctcaatcagaaatgaaactggagatattgcaacagatgccacagaaatacaaatgatcat

SEQ ID NO: 891088 - DNA, 652 bp, Homo sapiens
tgccaaccctatgagcaactgaggaaaggtgcctcacgccaccttcctaaagccagaatttgtgtcagattgtagggcaacctagaacctacagggaaaaattagtaaagggagacttagcaatcagggttaaagagataaggtttttggaaatctagaagggaaatacagtacttcctcatttatccaggtcaggaaccaggcagacacagtggcaggagccctggcattagcaccctatgccttagtgtgaatgtcacctctttctctggccagtatgcactgtagttagaaatgcagggtgctaaaccccagtatatgagttgaagcccagctccattgtactgagtaaatttcacaatctcttgtttcttcatctatagaattgtcaaatattgtagtacttttctaacagctgttaggaggattaggtgattgcatacatgtaaacacatccacctgtgtcagaacctactragtacacaataaacattaaccattagttttatgaggcattgagaaaggtacttagcttctttgaattttcattcttcttatctgaaaacaggcacaataacatccatgtcataaagtggttaaaatatttaaatgaggtaaggtataggaaagtacatgtttgggccgggcgcgg

SEQ ID NO: 891089 - DNA, 568 bp, Homo sapiens
ccaccctttaatacatcctctgctctttccattttccaaggctttctgtgtcttagttgtcacaaaggaaagtagatgggtattttttttttgacattggtcctttgcaagataagccctgcaagaagcgagcaatgcttaatacaaaatgctgaattattaatgatgacatttcaggaaactctaaaatggagattggggttagggtgaactttgcccacatccctcaagtaatgtaatgcatgtaatattaaccatgaatattgagtcaaggcagccagcctaaactttgggagacctgtatccagctcctcttaatagctgtgccactttcattaatttattaaacctcytggagtctcatttttcctattggcaaaatgggagtaattggcctacttcacaggctgttgtgaggattacaagagatgatgtagataatgtacattccacaatgcctgccagttatattgtccttaatacaaactggctgtcattattattattgttgttatccacggttactttttatgaatgcaatccaaagattttcagccaagccagtgga

SEQ ID NO: 891090 - DNA, 634 bp, Homo sapiens
gataagatattggggtgagaaataagaggatgtgcaggagtgttattcgcagcaagcaagtcttgaaaggtatattattccccaaacagtacttctccattttgttggcatagcaattcagaagggcactttggaagaggagctgggtcattcgtgacttcttagtgctcctgtagaacacaggcggttcgtgcttgttgatgtgactgaaggccctagagttctcactgtgccagatcacaggggccatcctggcactgagtgggcctgtggcctgtgtccacagggaacaccctgcaggttgggtccatgggtaccagcctggtgcttgtggccaygggggaaactggcctgcagttggtgggcttagagcctgtatctgtagggccagcctggatactgggtctgctggtgttggaatggtgcccaaggccatggtggacggcctggtgctgtggtcttcaggtgccaatctggcactggagtaggcctgaagcctggggttatagggttgggtctggcactgaaacagtctgggtcctgtggtcactggggctgccctagtggtggagcaagtgatggagaacctcaggcaggtctggagtctgtgtctacgggggcttccttggcacag

SEQ ID NO: 891091 - DNA, 607 bp, Homo sapiens
taggcgatcaatgtcagaaaactagaacaaatagaaacacattttccagtagagagacattcagttgactccattttggttttctttctcggtttaacttttgatttacccaagaaagaccaggaaatcagtgattgcctagagtgaaaactgctagaagaagagattatatacaaagaaggataaggaatattttggatatgatgaaaatagtctgccctggttgtggtggtggtttcataggcatatacaactgcgaaaactcctagaattgcatactttaaattgatacagtttaccctacataaattccagctacattatttgatatgggtgaaaatccatttcagagtttggcttaaayactatagaagtctgggaatgaggactcccattttactggactagaccaatccaaagcaaaattaaaaaaaaaataaagtgagtcgcagatgctaggaaagatcattgtagaaattgctcaatatttttaggtgtcttgaatacataattgatattctttttctttgaatctcaacattgaagacagattctgaagaccagcaaaaagactagactgatgtaaatacacatttcctagctaatc

SEQ ID NO: 891092 - DNA, 638 bp, Homo sapiens
cctgagactgctgaagttgcttaccagcttaaggaaattttgggctgagacgatggggttttctaaatatacaatcatgtcacctgcagagacaatttgacttcctctcttcctatttgaatacgctttatttctttctcttgcctgattgccctggccagaacttccaatactatgttgaagaggagtggtgagagagggcacccttgtcctgtgctggttttcaaagggaatgcttcagcttttgcccattcagtatgacattggctgtgggtttgtcataaatagctcttattattttgatacatgttccatgaatatctagtttattggctttttttttttttttttttttttttgagacggaatcttgctctgtcgcccaggctagattgcaatggcatgattttggytcactgcaacctccatcccccaggttcaagtgattctcctgcctcagcctcctgtgtagctgggattacaggcgcatgccaccattcctagctaatttttgtatttttagtagagatggggttttgccatgttggccaggctggtcttgaactcctgacctcaggctgagatcatctcagcctcccaaagtgctgagattaaaggtgtaagccaccatgcctggc

SEQ ID NO: 891093 - DNA, 587 bp, Homo sapiens
ctgaggaagatgagtgtataaataagtaagtttaccagagttaccagagctttgctggaactctcccccaatatggagtggagaaattcaaataaacctggcaaataaacctattcttgaaaggcttcatagattaggtgagacacaagcatattcttaaaaattgaacaartgaacccctcctaaaaacaaatgggagcataggttttccaaagagacagcacaggtgaataggcctcataaagagaaggaaaattctcattattaggagaatagcacaggaaagactggcccccttgatttaattatctccccctgggtccctcccacaaaacgtgagaattctgggagatataattcaagttgagatttgtgtgcagacacagccaaaccatatcattccacccttggtccttccaaatctcatgtcctcacatttcaaaaccaatcatgccttcccaacagtcccccaaagtcttaactcatttcagcattaacccaaaagtccacagtccaaagtctcatctgagacaacggaagtcccttctgcctatgagcctgtaaaatcaaaagcaacctagttactt

SEQ ID NO: 891094 - DNA, 600 bp, Homo sapiens
attgtccatattgctaacagcatttttgtcaaagccattcaaccagtctctaggaggttccaaactttcccacattttcctatcttcttctgagccctccaaactgttccaacctctgcctgttacccagttccaaagttgcttccacatttttgggtatcttttcagcagtgccccactctactggtaccaatttactgtagtccattttcatgctgctaacaaagacattcccgaaactgggaacaaaaagaagttcaattggacttacagttccacatgggagtggcctcagaatcatggcggaaggtgaaaggcacatctcatagagcagcagacaacagaaaatgagaaagaagcaaaagcagaaaccgctgataaacccatcagatctcttgaaatttattcactatcatgagaattgcatgagattgaccagcccctgtgattcarttatctccccctgggtccctcccacaacacgtaggaattctgggagataaaattcaagtttagatttgggtgaagacatggccaaaccatatcacaagactatataaatagagacatttagtgcatgtcaatggagacgccaaaacc

SEQ ID NO: 891095 - DNA, 572 bp, Homo sapiens
gccctgtttcacagggtctccagaagctccggtcagataacaaaaatgaaaacactgtttacacatgcacgcctttgtttgttgtagaaactattattattggatggactccaagatccactttactcctcaagaggctcaactgtagcataactcacaagtgagaggtgtcaggccagcaatgggaacagggtccctgttcaggaatgccttctcctgccttccatgggtccagtgggaagcagaaagagcccctctgtgcctttaaaatgacctgctggctaaataaataataaacagaaatcatcatttacttacagacactccagaactggaatgtaagttgatttccttccctctttgcctggaagattgtttgaggggaaacttttggtcttgttacacaacagtagcatgcgccatattkctgtttctttcttcatttgtcatttatgaggagggtattttggggttgccctatgggcaagaaataggcttgccttcactagaccaatttgccagttcacctaatagacactgaactacaggcaccagtgcctgcttttctgaga

SEQ ID NO: 891096 - DNA, 598 bp, Homo sapiens
caacaccactatcagaggcttctagaatgtctgattcacacgcatgaaatcccacacagcacggcgtaagatcagaggacccttaccatagtgaaggaagtgtgagcgtgggccatgacaatgggatccactgatcgtatcacaaatcacaacatccaaaagcagataacctgatagggcattagaacagcttgcttgaggcatgrttgatacaccagctcagagccaatactctgcaagaataagttgctatcttctgggatgagtatacacactaagttggatacctccataaccattacatacctataaaaaaaaaaaggatgcaaggcttttcaaaccaaggaatggagtggctccactcacaatgacctattggaggcactttgtgcttctcattcctgctactctgagttcctaagggataaatattctggtcctctaaaaggtgtaatcttgccaggggacaagtttactgttaactgccaggttcagatgctgcctgggcactttgacattcttgtatacagggaccagcaagaatgaagactagccatcttggcagaggtaggaggagatagagctgctgtaaaataac

SEQ ID NO: 891097 - DNA, 598 bp, Homo sapiens
caacaccactatcagaggcttctagaatgtctgattcacacgcatgaaatcccacacagcacggcgtaagatcagaggacccttaccatagtgaaggaagtgtgagcgtgggccatgacaatgggatccactgatcgtatcacaaatcacaacatccaaaagcagataacctgatagggcattagaacagcttgcttgaggcatgattgatacaccagctcagagccaatactctgcaagaataagttgctatcttctgggatgagtatacacactaagttggatacctccatawccattacatacctataaaaaaaaaaaggatgcaaggcttttcaaaccaaggaatggagtggctccactcacaatgacctattggaggcactttgtgcttctcattcctgctactctgagttcctaagggataaatattctggtcctctaaaaggtgtaatcttgccaggggacaagtttactgttaactgccaggttcagatgctgcctgggcactttgacattcttgtatacagggaccagcaagaatgaagactagccatcttggcagaggtaggaggagatagagctgctgtaaaataac

SEQ ID NO: 891098 - DNA, 495 bp, Homo sapiens
attcctcaaagacctagaaacagaaatgccatttgacctagtaatctcattactgggtatataccaaaaggaatataaatcattctattataaagatacatgcacatgtatgttcattgcaacgctattcacaatagcaaagacatagtatcaacccaaatgtcctatacttgataaagaatatatgatatatatacaccatagaatactatgcagccataaaarggaatgagatcatgtcctttgcagggacacggacggagctggaagccattatcttcagcaaactaacacaggaacagaaaaccaaacactgcatgcttttgcgtataagtgagagctgaacaatgagaacacctggccatgggcggtggaaacaacacacactggggcctggccagagggtggggagagggaaagcatcatgaaagatagctaatgcattcttggcttaatacccaggtgatgggttgataggtgcagcaaaccattatg

SEQ ID NO: 891099 - DNA, 585 bp, Homo sapiens
gatgctaactagcatgccctgtaaatgaagaatgttttggtttatcagaaagctgaacttcagcaagatttcaaaggtggagacttctgcaaggtgacattcaattatgcatatctttatataaaatgaattctgagtcattacagttgtataaactgaagataacccttttttggcaaataaagattgacaaattcatgcactttatagagatatcttgggtcaaatgatcatttacttatcagaaatggctaatgaaatgttacagtgatttatggtgtgctgcagtaaattttcataatatagttatttatcttacataagataatgaactgcctgtcyagttcatttactgagtaatagttactttaaatgttttatcagcagctccatttttctgttttcctcctcttcctctcagatttttatcacgatgagttagggagtaatatttcattttaaatgacttgtcttgactatagatagttcagggatataggcagaattgctgtcatgtgaaacacagttgttaatctgaaatatctatgttgaattgactcctgctgttattatcaagagctataa

SEQ ID NO: 891100 - DNA, 666 bp, Homo sapiens
acagaatgggagaaaatttttgcaatctatccatctgacaaagggctaatatccagaatctacaaggaatttaaacaaatttacaagaaaaaatcaaacaaccccatcaaaaagtgggcaaaggatatgaacagacacttctcacagaagatgtttctgtggccaacaaaaatatgaaaaaaagctcatcatcactggtgattagagaaatgcaaatcaaaaccacaatgagacaccatctcacaccagttagaatgatgatcattaaaaagtcaggaaacaacagatgctggagaggatgtggagaaataggaatgcttttgcattgttggtgggagtgtaaattagttcaaccattgtgaaagacagtgtggcaattcctcaaggatctaaatctagaaataccatttgacctagcaatcccattactgggtatatamcctcaaaagtataaatcatactactataaagacacatgcacacatgtgtttattgcagcattattcacaatagcaaaggcttggaaccaacccaaattcccattatgttagactggacaaagaagatgtggcacatatacaccatggaatattatgcagccataataaagaatgagttcatgccctttgcaggtacatggatgaagctggaaaccatcattcttag

SEQ ID NO: 891101 - DNA, 577 bp, Homo sapiens
ctttttatggctatgcagtattccatggtgtatacgaaccacattttctatatccagtctatcattaatgggcgcttgggttggttccatgactttgctattgcaagtagttctataataaagatacatgtgcatgtgtctttatagtagaatgatttatattcctttatgtacatacccagtaataggattgctgggtcaaatggtatttctggttctagatccttgaggaatcacagtgtaaaaacaagcctctttctccacagcctcgctarcatctattgtttcttgactttttaataatcgccattctgactagtgtgagatggtatctcattgtggttttgatttgcatttctctaatgatcagtgatgttgagctttttttcatatgtttgttggctgtgtaaatgtcttcttttgagaagtgtctgttcatatcctttgcccagttttttacggagttgttcatttttttcttgtaaatttgtttaagttccttgtaaattctggatattagacctatgtcagatgggtagattgcaaaaattttctcctattctgtaggttgcctgtt

SEQ ID NO: 891102 - DNA, 501 bp, Homo sapiens
accagtgaaaagcaacacatacatatactgctcaacaatcagtaatagaaggaataaaaatctgatgaaatggggaaaaatatatcatatgtcttatatatgcatgtgtgtgtatgtgtgtgtgtgtgtgtgtgtgtgtgtgtgtgtgtgtgtatctctatatatcaaatatatatakatagagagagttgggtcaatcgtagcaaatgtgagtgtcagccatactcttgagtacatgcctgaggtccaggccatttcccccactaagatatagcaaatcaggcaagaagtgaaagatttcacagcgacttcctggagggccatatcatgataaccatccagacccttgctagactggccttctgccaaaggaaaggaaagcaggagattcctgaaggccaaagaacgcccgccaggaactgggcttttgagaagccgagaggtcagatcagcctatcctcacattattcagtgacgtcagcaacaattcactggggattt

SEQ ID NO: 891103 - DNA, 685 bp, Homo sapiens; identical to SEQ ID NO: 890780

SEQ ID NO: 891104 - DNA, 569 bp, Homo sapiens
ccacagctctagatgtttgaaatgcttgtgtggggattttggtatgttctggttttcacagacctcttcctcctccctttttctggtgccaaaattcctgaattaagaaattgcggccaggcccggtggctcatgcctgtaatcctggcactttgggaggccgaggcaggcagatcacttgaggtcaagagtttgaaaccagccatggccaagatggtgaaaccctgtctctactaaaaatacaaaaaattagccaggcatggtggcacatgcctgtaatcctagctactggggaggctgaggcaggacaattgcttgaacccgggaagcagaggttgmagtgagctgaaatcgcaccactgcactccagcctgggtgacagagggagactctgtctcaaaaaaaaaaaaaaaaaaaaaaaagaaattgcaatctagctatccacttattttatttgcagttggagaggtagggtggagatataggaacgactgaatttaatattttgataaattatcttgccataatagcttcttctcattaaacatctatgttccaggaattgtaat

SEQ ID NO: 891105 - DNA, 620 bp, Homo sapiens
gtgagtcgagattgtgccattgcacgccagcctgggcaacaagagtgaaaccccatctcaaaaaaaaaaaaaaaaatcatcagaccctataggtgtaagtttgtgaatagttaaaagaacagccttagttcctgtttcatttttttatttggaattcttgccactctgtcactgaacatcttgagtttgttttgcatatcatcaactgtatgagatgaagkttttttttatcctttattaactatgcaatcaaagtatcaggccctgcatgattccccaaaatttgtggttttcagatcagcagtgccctagttcaagaagaaaattgctttcagccagtattattcaaagagtcttgtttccattttatcttttatttaacactgctgtgtcatctaggggcccgttcacaaggactccaattatttgataggcagcagccagtgacatttttctctcgttttctcatctgataggcataagttaaaatttatttttattaaaaaattaggcacctacttagaggttggggaagtttacatgagggccacaaagatttcactgtgaagcaaatttttaaaaaaagaaaagatctctctgaaatgaagactgctgcacaa

SEQ ID NO: 891106 - DNA, 581 bp, Homo sapiens
gtgtgcggcttcattcgtgaagtcagccataccacaaacccactggaaggaaccagctccagacacaatgggacccctacgatgtagtcctgaaggctggcctttccaggagtgggacactgagcctggcttatacccaggtactacatagaagagcaaggtatatagcgccatgagcatccagcytgagtcctcccttccattttccgtgctgtccaccagctcagacacacgggcagagatggtggccctgaggtttgggcataggcacggaaatggtgctttgggtctcacccactcccccttggcttccgtctcatttaggaaacaactctaagggctagcgctgcccacttgctgcagctgtcttgtgaccgcccctcttgaatcacacacctcgtgtgatggggaacttaccccctgacagacatctctggcagctgacgctaggagaaagcttttctttgccggcaccagcttccctaggagaacagccccagaggttgtttcccagaactccatggggggactgtccccagcctacccttgctcctctcatgggacctgggacctctcctgaa

SEQ ID NO: 891107 - DNA, 584 bp, Homo sapiens
tgagtacataagaggcttaaatgcacagttggatcttatataaatgttctgaatgtgttcttggaaaacaacaggagtatttgaaaatgttaatatagtttgaaccctgaatgtaaaacaggttccttccgcctttgacaaagtaaactctcttttctcctaggggcatttgtttccttcttttaaaaccaggaattgaatgtccctggctcactgaagttcaagttgggatctgagacaatgacaggcctctatttgctcccctttccaactctggtgatctgaagttgctattgcttccctgattgtagctgtcactgcattgattctggattaaatcattctgtttggtgcagagcaagagagttggaagsggctagcagtgttctttacatttctggtttaattggtgatcctggccaaccagagtctatgcccacctcctgaaaactgtctcagagatcaggttgggaggataacttttactgctgaggtctagatagaaatggcccttataaactctatttctcaaaattagtcttatcagggaaacttcatcttgtttgtctaacaagagttcttgg

SEQ ID NO: 891108 - DNA, 584 bp, Homo sapiens
tgagtacataagaggcttaaatgcacagttggatcttatataaatgttctgaatgtgttcttggaaaacaacaggagtatttgaaaatgttaatatagtttgaaccctgaatgtaaaacaggttccttccgcctttgacaaagtaaactctcttttctcctaggggcatttgtttccttcttttaaaaccaggaattgaatgtccctggctcactgaagttcaagttgggatctgagacaatgacaggcctctatttgctcccctttccaactctggtgatctgaagttgctattgcttccctgattgtagctgtcactgcattgattctggattaaatcattctgtttggtgcagagcaagagagttggaagcggctagcagtgttctttacatttctggtttaattggtgatccyggccaaccagagtctatgcccacctcctgaaaactgtctcagagatcaggttgggaggataacttttactgctgaggtctagatagaaatggcccttataaactctatttctcaaaattagtcttatcagggaaacttcatcttgtttgtctaacaagagttcttgg

SEQ ID NO: 891109 - DNA, 590 bp, Homo sapiens
ttgtgataaacaataattgtaacttttgtaggtgactgataccctggacaaagaagtaaggatgtcaggattttccacctctaccttggaaattaacttcttgtctttgaatctcactcagtgtctccattcagtccctgaattgagatatgctttcctctctgagctaaaatactcagtcttttggaagggctacctaataaacgataatcactgaagtgttgacaacttaaagattggaagtggagcagaaaatacttggtataayttgagcacttggtgggtgctgtaagatgactttctggttgatggggtaacatcttttactctggttcgggtttaaaagaatccaggtgacagagacaggatacctgccctaatatggtagccactagccacgtggctattaaccacctgaaatatggctagggtgaggaagagctcaattttaaattttatttaattttagactttgataacttgatttagttattggaaagcttatttatatttggaaacatacttgagcttacgcatctacttttgaaactaagtgttttgaaatccaaacgcaaattaagtattttgat

SEQ ID NO: 891110 - DNA, 685 bp, Homo sapiens
gggttcttttgtgcatttgtttgtatgtttgtttttcaagacaaggaatactgggcatgtttgactaaaaagaggactcagtggaaacagaaaatgactatgatctgaattctggaatttcttttttatttttattttactttaagttctgggatacatgtgcagaatgtgcaggtttgttacataggtatacaagtgccatggtggtttgctgcacccatcaacctgtcatctacattaggtatttctcttaatgctatccttcccctaagcccccatcccctgacgggtcccrttgtgtgatgttcccctccctgtgtccatgtgttctcattgtttaactcccacttatgagtgagaacatgcggtgtttggttttctgttcctgtattagtttgctgagaatgatggttccgagcttcatctatgtccctgcaaaggacatgaaactcatcctttttatggctgcatagtattccatggtgtatttgtgccacattttctttatccagtctatcactgatgggcatttgggttggttccaagtctttgctattgtgaacagtgctgcagtaaacatacatgtgcatgtgtctttatagtagaatgatttctaatatgattgtttctgacttatttgataaagtagagtgggtgctatcctcttctgcttcttatgtagatg

SEQ ID NO: 891111 - DNA, 619 bp, Homo sapiens
acagttgccaaacacatgaagtgatgggcaaatagaaagaggaaggattgtgttaacactgggtgggagagtggcagctctaactgaggttccagggaagatgtgagagggcattctgaaagtagagctagacctacccagaattcccaggtggtgaccaaaaatctgctcttgattctccctggaaatacccattgtctgctcagatgtaacactatctggggcaaacatcactgtaggattttatcataaaacaattttatttttgtccccactgttgctttaaaatattgagtggggctagttattctcttttccctggatgatatagctgaggagggtcracttctatggccccctagttagtcaaaggacatatagtcactatacattgaaaaacaatctcaattccacaattcaaacatcctggcctatttggtaatgaaaactttgaacttaacttaaattgaaggcttctattcttacccccacctcagatctgctgggagcaggagaccaacagtgtggaagggagtaaatatctttctttctcttccttcattttatttctattctgccaccctgtgtaaggcttctttctcccataggctcagactgg

SEQ ID NO: 891112 - DNA, 601 bp, Homo sapiens
ctttcattaaatttgatgtgttatgggcagagttatgtgaatatcggttccaagtattaatgcttccaggggcacttaagcgaagaggattttgtaattattttcttgaaaagaatcctatctgttgatacctactttagtttaaagtaaaatatataaatcaattactactatgtaattcgttatcttatataggtcctttcaatctatattaataataaagctttcttcccaggtaaattccagctatttctaatttactatcactcacattattttacrttaaacttcaactgtggtcaacccaaatttgatcaataaaatagtaatcatcttataaagaaacctaaatatactcctgtctcagcctttttgtgactggtctgtgctattctgattttggtgtataatacaggacataaaggaataaaatacctgtcagatttgtcacttttcattgtttgaatttcttctctatctctattctgtcccacttgagatcatgccaataaaatattttttattttgaaattgcaatctcatccatcttcacacaatcaaaaattatttgtttttatttcatttattataaatatcttta

SEQ ID NO: 891113 - DNA, 651 bp, Homo sapiens
agggtctagaaccagaaataccatttgacccagcaatcccattactgggtgtatacccaaaggattataaatcattgtactataaagacacatgaacatgtatgtttattgcagcactattcacaatagcaaaaacttggaaccaaccctaatgcccawaaatgacagactggataaagaaaatgtggcacaaatacaccatggaatacataaaaaaggatgagctcatgtcctttgcagggacatggatgaagctggaaaccatcattctcagcaaactaacacaggaacagaaaaccaaacaccacatgttctcactcataagtgggagttgaacaatgagaacacatggacacagggaggggaacattacacactggggcctgttgagggtggggggctaggggagggacagcattaggggaaatacttaatgtagatgacagtttgatgggtgcagcaaaccacaactgtacgtgtatacctatgtaacaaacctacatgatctgcacatttatcccagaatttaaagtgtaataaaaaaattaaaaagggggagggaagacccaaaaagagagacatctggatacccatagaaagaggacattatatggactgaaaggtgacttgaaggaaaaacaaaagaaggtc

SEQ ID NO: 891114 - DNA, 605 bp, Homo sapiens
tcctcagcaaatgcaaaagaatggaaatcataacaactgtggtccctcagaccacagtgcaatcaaattaaaactcaggattaagaaactcactcaacatggctcaactacatggaaactgaacaacctgctcctgagtgactactgggtaaataacaaaattaaggcagaaataaataagttctttgaaaccaatgagaacaaagacacaacataccggaatctctgtgacatagctaaagcmgtgtttagaggaaaatttatagaactaaatgcccacaagagaaagcaggaaagatctaaaactgacaccctaatatctcaattaaaagaactagagaagcaagagcaaacaaactcaaaagctagcagaagacaagaaataactaagatcagagcacaactgaaggagatagagacacgaaaaacccttcaaaaactcaatgaatccaggagttggttttttgaaaagattaacaaaatagatagatcgctagccagactaataaagaagaaaagagagatcaatcaaataaacacaataaaaatgataaagggggtatcaccactgatccctcagaaatacaaactaccatcagggaata

SEQ ID NO: 891115 - DNA, 605 bp, Homo sapiens
tcctcagcaaatgcaaaagaatggaaatcataacaactgtggtccctcagaccacagtgcaatcaaattaaaactcaggattaagaaactcactcaacatggctcaactacatggaaactgaacaacctgctcctgagtgactactgggtaaataacaaaattaaggcagaaataaataagttctttgaaaccaatgagaacaaagacacaacataccggaatctctgtgacatagctaaagcagtgtttagaggaaaatttatagaactaaatgcccacaagagaaagcaggaaagatctaaaactgacaccctaatatctcaattaaaagaactagagaagcaagagcaaacaaactcaaaagcyagcagaagacaagaaataactaagatcagagcacaactgaaggagatagagacacgaaaaacccttcaaaaactcaatgaatccaggagttggttttttgaaaagattaacaaaatagatagatcgctagccagactaataaagaagaaaagagagatcaatcaaataaacacaataaaaatgataaagggggtatcaccactgatccctcagaaatacaaactaccatcagggaata

SEQ ID NO: 891116 - DNA, 613 bp, Homo sapiens
tcagggaataagactttcatcatgtcctcagaaaggtaatttcagtctaatagatttcattaaactctgcattttaggttgaaagcatttctaaatgcattgctatggagtaaaacacaacatagtaaaaatgttcccaagttccttgtccttacttggcgtagtctcattatttcagttatattcctttggaccaccctaaagtattgtgytcttctttcatgtttacatcctttcgacaatttaaattcatttaataaaatctacaggagggagagacctttcttgttaacatattaacttctggggaatgtctgctttcatataattatgcatagacttcatattcatataaatattttttgcctgcaggggggtaaaatggatctctctcatgaatattcaacagtgccatttcttctagcaagacacagacatctttcttcatggttattaagcactaggatgtctatatatattttctccttcatgttgtgtttgcataaaactgatgagatacaggaactgccaaagcagacatttattattccaggtacctcaatattatagggccttcatccaaataactcaataacatttttcagattcaaat

SEQ ID NO: 891117 - DNA, 585 bp, Homo sapiens
aaagaaatgacaagcaaaagggggaaaagcctcttataaaaccatcggaactcataagaactcattcactatcatgagaacagcaacatgggggtaactgcctccatgattcaattacctcccactgggtccctcccacccacaatacatggggattctgggaactatagttcaagatgagatttgggttgtgaaaacagccaaccatatcactgatatttaataataatttcaatatcagcacgtttttcaatgcccaccatgtctattagtrcaaacaaatacagacatggtctttgcagaaaataattgttttatttaaaaaaaaaaaacagttttctggataagtgaaaaaagaaaagttatttgtaatcaaaactaaatagaacacaattaaattgcaaaacttcatcaacaagaaaattatagaatatgtaagatctttcaacagctaaagacctggttctgtgcattgcaatatgaagtggcaaacatttctatgtgtgaaagggaaattagattgctatgtgtattaatataataaattgtcacaaatttggcagcataaaacaacattccatttgt

SEQ ID NO: 891118 - DNA, 621 bp, Homo sapiens
ttaatttgccttatacagacatacctgagactgagaagaaaaagaggtttaatttgacttatgcatggctggggaagtctcacaatcatggcagagtgtgaaaggcagttcttatatggtggcggtgagagaaaatgagaaagaagcagaagtggaaaccccgataaacccatcagatctcgtgagacttattcacaagaataccaagggtaagactggcccctatgattcaattacctcccactggatctctctcacaacacgtggggattatgggagatacaattcaagttgagatttyggtgggggcacaggcaaaccacataagttagtagatataaggtctcatatttgatactgtatatttgtgtccttatttaattcttctacacagcaccttgggaaaattataagaaagtttagtaagctaaaataatttttgtgaccaaatatgctaagatgcagatacaatagttgaatcaatgtctatctaaatccaaaatatatactcttgccccactatcttgctacctatagggtatactactgaactctaggactgccttgaatttatgacaaaaaataagctgaagttttatttttaaagagagtgttaaaagt
